United States Patent Application Publication US 2006/0134663 A1 - sequence listing, part 79

SEQ ID NO: 212459 - DNA, 613 bp, Homo Sapiens
ttttttttttttttttttaaagacaggctacaataattcccatgcagagaaccacatgcgatgacactggattccagacagcaagaacgtatggtgaagatgaggccaacagtgagctgagagaggccagccagggtgtgtttcagtgaagatgagaaacaatcagataacacctgtttcctccaggaaagaaaatgtggccagggaaaagagatgggaggaaggctggtcattgcctattccactgtgcacagtttgaatttggagccatgaaaagtattgcttggttaaattaaaatcattcaaaagataaaacataaacatttaacaccagcacaatatgctgggaaacaaaatgaaaggatttctggtctcggtgctgtaggtcacatagccactctttcctggtttgaggctttccagcaaaggggctgggacgtaaggctggcctgctggtgtggacagagattccagcaacatgcatgacctgggggtacaaggattgcttcctaaacaatgataagcacacagccacctaatagtctggatcggctgagaccatcctgatttcaacacccagtccccttgccttcctaagacccctgtgtttctc

SEQ ID NO: 212460 - DNA, 795 bp, Homo Sapiens
  misc_feature (660)..(660): n is a, c, g, or t
  misc_feature (765)..(765): n is a, c, g, or t
  misc_feature (770)..(770): n is a, c, g, or t
ttttttttttttttttttgagacaggatcttgttctcttgcccaggctagagtgcagtggtgccatcatggctcactgcagccctgactgattgctaggtctcaagcaatcctcctgccttggcctcccaagtatctgggactacaggtgtgtgctaccatgccagctagttttttaattattagtagagacgaggtcttactaggttgctcaggccaaccatttctgatattacagtgtattgctataagaaaaaaaaagtatgtcacagaattactacgtgtcaaagaacaattaggagttaagagtgtttgttcaaaatgtaagtttttaaaaatgatttgaataaaggaaataaagtcaaatacaaactaaaaagtattcattaaaagaaaaagccagaatgtcacaactttaaaagtcctatattgtatataggatcacaaatttctataatcaggcaccacatttgctgattcataaatatacttctttggcttaattctccccccgtttttctgtaagcaaaaataaaagtagaattgataagaaattacggtcatgtaaatgtgattggcctaaaaatgcagtgcttggctttctgcctccttactgtttttgtacagactgagataaacaagttacttttgtgttttccanacatttgtgattttattactttgctttctgctttcattcactattatccatgtcattatcctcctcctcaccgtcatcatcatcatcatcgtcaccttctgacangtcanatcactgaacccagagcatgttgac

SEQ ID NO: 212461 - DNA, 738 bp, Homo Sapiens
  misc_feature (712)..(712): n is a, c, g, or t
ttttttttttttttttttgctattaatttcatgtttatttcatacagggtttttgtcaagtttatcagttttaaaatgattaagtcataatcaccattcaaagacaaattttcctctcaaaataataatttccattctgctacctacagtttggcttatcctttggtctgatagccatacttcatctcacaggactatacaagtatgtactatgtacaaaacattttcaagtttgctttcaaatgatacctacaaagagtagatcaagttttcaagtttacagaataccatactacaacaatttaccactataaatatgtcttaacacctgtttattccattctatttagattgcaacactaacaagattcttaatgcatatgtccccaccacctgtactttccctacactatcattttgacacttaacatagaaacaactcaattcagcaaccaagttttacaaccactgttgctaccaatcaaatggtgatgcatcagatcccaattctcatgagtattaacatattaagagagtacattatttacctaagactgaatgactgtgccttactttataaaaaaacaaagatagccacatcaatttaattccatatatatgatactacctattcaatttattaaaaattgtaataaacataataatcaaactagtgctccaaacttatgctgttcacatggaagacacacanaagaagacatatatagagactgcttg

SEQ ID NO: 212462 - DNA, 821 bp, Homo Sapiens
  misc_feature (670)..(670): n is a, c, g, or t
  misc_feature (723)..(723): n is a, c, g, or t
tttttttttttttgttttgatagttatgtcttttaatatgtattagaagaatacataattagcacacatcaaacctgtgatttcacagatatcactacttgggatgaaaatgatataggataacaatgttagacctcagatcaacctcaagaaaaatactgagtaaatagtacaggagggcaatttggaagtattattaaaaaccaatatataaatatcctatgactttgcaattccacttctaggaatcaaccctaggtaaactttcatacatatactttcacacaggcatagtgatgctcctgtgtagtattttgtaatagcaaaacctaaaaacagtcttaatgtccatcacaaaagaaatgcgtaagtaaaatgtggtaatcatatgatgacaatctatacagcaattacagaagatggattgagctacattaagtaacatgcacagatctcaaaaacatcgttaagcaaagaaaacaaattgctaaacaattcaatatatcatttgcattaaacacacaatatttccaatgagttcacatatgtacgtacaagcattaaaacaaagtctaaacggaagtacaacaaacaacagccactaagaagggaaggatcaaggagtggttggtagctgaatgagactatctttaacaatctaacttctcanaaggagaatgaattcatgcatatttgggtaattagaatggacttaacttttanaaagcaatatacagattggaattaaagtgtgatggtgtatgtgaatgagtaaaggctgagctcatcgcacccggctttgctgcctctgcatgatcctt

SEQ ID NO: 212463 - DNA, 787 bp, Homo Sapiens
  misc_feature (710)..(710): n is a, c, g, or t
ttttttttttttttttttacactttagaaatatttttattcaaaattaattaaaaagcattatgttaaaaaagataagcttttgttagttaatagacttcctcaccaagtcatgttgagcctcattcaacagcacagaataagccaattttatacaagacacaggtatatggaaacacaaataactttaatgatttgtggtaaaaaagaaggaagcttgaatctatgattgaaaaataaaaaataattacatgtatatctacacagaaagtacaatcacaagtttcaagagcttaacacaaactaactgctgtcaaatatttaacaaaagcaaagatgaaactgcttaacagtcagggaaaaacaacaaaaagaagggaggggtgataaaccaagaaaatgaatgacaaaaactaagagacctcataggtgtctttacaatcaggaattcagatgcaaggaacagacacaaacctgtctaaaatgtgacctatgaggcaacagaaagtgacttaaagtctgttataaataaaaaatgacaaccaaaatcctagagagtcttaaattatttaatccagacattatctaacgcctcggatttttgtttggtgctatggtgttcattttctatcagaatgaaatgtgggacaaatgcattactggttgtagagagtgtttcagagctaattcacccagcaaggtcagggtcanaaggttattattttgttcatatatttcttgatatgaaaaaacacatgtcaaagaaagatttaagcaaatgtgttttc

SEQ ID NO: 212464 - DNA, 716 bp, Homo Sapiens
ttttttttttttttttttaaaatacaatttcatatatttttatttacactttaacaacttgctgggaatttaaacaacttgctgggaacatcctttgtgaggcactgtagcctttttttatttgaaactacttaaactccaagacaggctcactaactctttttcaagtgcaacaacaaatgtgttagctgaaaatagctaatttaatgattatttgtgacacagacacgattatgtgagccaagagagcctccccacctctgtctcccctgtggaggaggaggtctttgtgtgcttttgtgtgatggttccactgaattcattacaatagaaatggacatttgatattcataacgatccaacatctgagcaatcttctttcgagacacaccatgtttattcctcttttctaattcttcaggatcaaatttccaccaagtttcaggttcatgaaactctactctgtatccttttcctatggccacttccacatatggcttcatttcccaagcttgtatattagtgttatctattataactggagatcttccctgatcgatagcttgttttgctctgttctggttccagtcatgggcatcaccaagttgattaacattatacctgtacccatcttgatggtgaaaatagtcatcagtgctgaacacaatgccatcacgattctgaccaagcagaattcgagacaatgttgttttccc

SEQ ID NO: 212465 - DNA, 753 bp, Homo Sapiens
ttttttttttttttttttgagacggagtctcgctctgtcacccaggctggagtgcagtggcgcgatctcggctcattgcaagctccgcctcccgggttcacgccattctcctgcctcagcctccagagtagctgggactacaggcacccaccaccacgcccggctaatgttttgtatttttagtagagatggggtttcactgtgttagccaggatgatctcgacctcctgacctcgtgatccgcctgcttcggcctcccaaagtgctgggattacaggcgtgagccaccgcgcccggccctattttttgaaatcatatccatcttaaactcattgaatattcaaatatgaggcttggaaaacccacagcacagctggggcatgaaaatgggcttgttagacaagctgattcaactaggggggaaaaaagaggagggaagaaggcggcaattatatgtgtgaaatccacaactggaaatcaagtttagctgtttggaagtatacaagctcattgggagtatttgaattcaagaaaacttgcgcttcaatgatggggagacatgatacagaaaaaaaaatgtcctgggaaagaccctaacagtttctaataatgtatcctactgacaatgcattgaggtggcggttctggttaagccctgggaaactgaaatctctgctgacctatttttactttgatctaaaaagaatcaatacattctttaacagtacataaactacattgcaaaagaaatgg

SEQ ID NO: 212466 - DNA, 751 bp, Homo Sapiens
ttttttttttttttttctatttgtctgctttttaattcaaaaaaaaagcccatgattctttggggaggggatacaggattgttttccagtcagatcataatttctaccatctctgtgacaatcataaattcaaaaggttcccactctccgcaccccgattcacttttggcacctatatatgaaatgtcgcttctgaaaaatggggaaaaaatgtgaatactgggctcttcccacagtgctcctttcctgatgaaaatctttcagtttgctcaatttagaatactgatgcaagaaagtttaaagatatgtcatcaatgaaaatctttttctaactatctggctatcttagaaaataattatattagaaacagcagccaattctcagaggcaaaggggcgatggcttatctctctctacttctaattttaaatttagaattacagagcaattctatgagaggtagcagaaggtctggcacaggctctggcttcatgatttcagaatacaactttaactcatcacgtctttgggaagagtgtgtgtgacacttagcaagaggctcactagacctccgtgtgcagtgatgctgatcagacagacacatgcattcaccactagtggagagggaggggcctaaccagaggacaggcagttaggagaggacttagccaaagaacttaaaaatatctacacaagtggcaatgtgtgtcatttataatgcaaccattcctgagtctcacttggtctgcca

SEQ ID NO: 212467 - DNA, 749 bp, Homo Sapiens
  misc_feature (559)..(559): n is a, c, g, or t
  misc_feature (714)..(714): n is a, c, g, or t
tttttttttttttttgttcataacagctttatttataacagccccaaactggaaacaacccaggtgtccatcgataggtcaatgaacaaatctattcaatgaagcagtactcagcaatgaaaaacataaaaacaaaaactcgtgacacatgctaccacatggatgaatctcaaaataactatactgagtaaaatatgcctgaccaaaaaagggatacatattgtatgattcaatttacatagaattctaggacatgcaaactaataacagggcacaagggcacttgggaatgatgggtccgttcctcacttcagttgtggtgatagttttacgcagggtatacatacgccaacacattgtacacttttgatacgtgcagtttattgggtgtcaagtacacctcctaaaataaaaatattgatgggctctacattctggagacacgggcagtagaactattattttcagcttgaaatattagctacactttggtaaaaatacttttgaactttatcttcacagtcgcggcaaggaaaacaaaaggtataaacattcattnggttgaaaaacaatgtcataaagttgtccccgtatctgtggggggtttggttccaggactcctgaggatactaaaatcctcagatgctcaagcccctgataaaaaatggtgcagtatttgcatataacctacccacatcctcctgcacagtttanatcatcactagattacttatattacccaatacaat

SEQ ID NO: 212468 - DNA, 710 bp, Homo Sapiens
ttttttttttttttttttagaaaaaaataacttttttatttacaaaaaaatccaaatattggatgctgtaaacaaaattcacaatctgttccctctagcactgattcaaacatgtcagttttttagtccattttccatcaactccttttctgcctgtgacgcagcctatagtcaaaatattccaaaagagtgacccaaggtgcagcttgctgcaacagaacacctcaaagcaggcatgattgtagagaggttggagggagagacagccagcaggcagagcctcctccgttctgcaaggctttgcagcaagtctcgttaacttgacatcttccaactttgtactttaccatttgctttgttagaaagccattattttaacaaaatataacatagagattctttcttagcactgaaaatgctatgctaaaagaaattttaaagaaagattatattcaaatagatgctatatatgaaattactttttttggctttttggtttcacctaacacacttcatcttcaacaacaacaaaaaagcttatttttgaactgacagctttcaacataatacatttcatttacaaaatagttcacaatatttatttaacaagcgttgcattgaaaacaactttatgcacagtgaagcaacaacaataagcaaacagaaaggggtgggtaaaacagtacgttcacttttcatttccttccttg

SEQ ID NO: 212469 - DNA, 758 bp, Homo Sapiens
  misc_feature (577)..(577): n is a, c, g, or t
  misc_feature (620)..(620): n is a, c, g, or t
ttttttttttttttttttcataatgaaacactttatacagacaggaatagacaagggatttctgacacactcatgctttggatgtgtcagtacaagacagtatgtgagactgtgattctgccaggcagaggggaacgggcatgatttatctgctggcaaataagtctccactatacctaatcattcttttatctaagtgcatcatgatcttcttagtcctggacgtcaaaatagtcaattattggctccttggttattttctgtaaattactgctcccaggattcttgtctgactgatgtctgtgatgaggaatcggtggtggaggccgtgcctgcatttccctttcaagcacacctgtcagcgtggtaggaggacaaacggacttccccctgatggcagtgaccaccacattgcgcttcggttcactgtcatagctcacgctctccaggccataaacttgggccaagtcatggatgatccggcggtggtctctgttcatgggagggaagctgtggcttttcttactattctttcccttattcacggcctccacgagggtttccatttccttctcancgtcactgacaaactttaagtccttcctggcatcttctttcanactatcactgaattttgaccctgaataacgtatattgaaaggatcagaatcctcactgatatgaaatgcctctgctaatctctttttcctttccagggatgaaactcctcatcacactccagcctggcttgatgaact

SEQ ID NO: 212470 - DNA, 745 bp, Homo Sapiens
ttttttttttttttttttcactttaaaatatgctatttactttttttacagttataaaaataatacattatcaaaatagacaacttacaaaacacaaaaatccaccaagggaaacacagcaaaggcccctgatcccaccatctagaaagaacgagagtctttctggcccgaaggcaccagctctgatgaaggcacaatgaggagatgccagcacagacttccccagacctgaggtgacgctacaaacgagcggtgcacagccacacacgcaggtttagagttcgggaggaggagacctaagtcctgtcttcaaaaacaaaaagcaggccgggagtggtggctcatgcctgcaattccagcactttggtaggtggacgtgggtggatcatttcaggctgggagttcaagaccagcctggccaacaaggcaaaaccccatctctactaaaaatacaaaagttacttgggcgtggtggggggcgcctataatcccagctactagggaggctgaggcaggagaatcacttgaattcaggaggcggaggttacagtgagccgagatcgcgccaatacactccaaactcggcgacagagtgagactccgtcttaaaagaaaaaacaaaacaaaaacaaagcgagccaccgtggagatccacctgccgctgctcccgcgggggtcacttctctggctcctgcagccggcagcttaggcagcacaacacaatccactaggacattcgggaatg

SEQ ID NO: 212471 - DNA, 676 bp, Homo Sapiens
ttttttttttttttttttaagtttagggcatttatatatctgcaacccaataaacccctgggtaccatgcagctcccccaaattcagtgcaaccaaagctgctgaaacaagtccagccccagaaggtgtagtggcactgtggtgttaccttatttttatatgacccttcaaaaaggacactgaaaacccagtgcctgtttgcagagatcatgtgtggaaattgaaaccctgtctttaaggaatgaccaaattcatgctacttaacctgaaaacttgggggcaaagtggttgtgattatctgaagggctgctatgtagatgaagtattaaacatgtcgtaggcaaggtttagaggagaatgtggtacttaaccttctatagatcccacaatgaaatgacctgccttgtgaggtagtgagctccctgtcaagagagattttcaagcaatgggtagaagaccacttggcaggagtgttgcaaaaagtgggctaaaccagatttttccaacctagtatggaggaagaggcagagtaggggaaggtcctgcccctatgagattctcctgattgcatgcaagatgacaggtaatccctggtgtggacagactagaaaagcagacagcccctaaaatagatggggagaacttttagccctgatatccacacaaactattttag

SEQ ID NO: 212472 - DNA, 769 bp, Homo Sapiens
  misc_feature (677)..(677): n is a, c, g, or t
ttttttttttttttttttaagttggtgctaagtttcattctttatatttaattgatagaaactgcatgcatcaaagaaaatgcatactgagctttaatgtgcataaaatggatattagcattttaaagaggaagattaacacattaatccaagtaattttcatatattgcttctaataaaatcttcacagtataaaactcttaatgaagctaatcataggcattccatttagtgggacgattagggataacataaaagtatttctttttcataggttttctaagatttatgcttttgcttattaaaaataaaaatgggaattgcatttcggttcttcctaagaaaatgttgaaaatgcaaatagactttctcacgctatcacgtaggtataaattattgagaaggtactgcccattatggagaacttaagtcctgaggggtggcagttatgagaaggagggaatagagaaataaacaaatgaaaaagtatacaaaacttcaacacttcaaacccaggtctccccgctcccagcttcccatgaattatagattatatacaccagagtaattacaaaaatctcatgtaggtactttcatgtgagcatttactgaggagtaggagatgcctctggagcatttgctttcaagcctccaagtcatctctgtattgcttgtanacagactggagggcatggagagcttcgactgttaccctgagcttgccaatacttcaccatctgctcgtgcatcaaaacatcgatattttgct

SEQ ID NO: 212473 - DNA, 545 bp, Homo Sapiens
  misc_feature (538)..(538): n is a, c, g, or t
ttttttttttttttttttaatgtagattctttattgattccaccaatgtattagtagatatgataataataaatggtatttttacattctcttaaccaaaaatataacaaatatttacactcagtaaaaatacaaaaagcatacagaggcactgtctttctaaaagacataagtttaagaggtatcaaaaaataggagacaaacattgcttgttacaggataccttacaatcaatgaattgtgcagtagaattgctatctgattattacagatgtgcagttttgtttctgtcttttgctgattagcttacatgtctcaattttaaaagatcaagttcaactgcattctgtgtatcaaaaataaagaagcattaaaaatgcacaacaaaagtcaaagatgaaccaggattcaagtttaaatttgaacatgtactgtgacacttttgacacttttctgaagatttatcccgtttttctagcctttaaggtaatgctgaaggaatacatatactttaatatcaccttttttagaaacttanaattgaa

SEQ ID NO: 212474 - DNA, 653 bp, Homo Sapiens
  misc_feature (617)..(617): n is a, c, g, or t
ttttttttttttttttctaacagaagcatcaagccactgacttttattcccatgagctcctactatgatgacataacatgtcacatttattgctcttacctacttcctaagttactgcttgcctaataaggaaaagggcaagaaataagagtccaaaagacactcagaacaccagcagcagctttcaagtaaggactcagggtcagggtctcacaactcctccatttcatgtttcatttacattgtcttcgtgctccagcagcaaggctgacatgtgctttggggtaggagcctggagtatttctgccagatggtctgaggtgacgtatactcctagagcccaagtgaccaccagaagggacatgtgagacagcaggcagaggccatacatggaggatcacactccctcagacgtcatcagccccatgctttatcctttgactccccctgatcctcaaggccaggtggggtgcccctgctgcatgctccagagaactgtgggcctctcctaccatggctctcaatgcactgttccataactggcttctcccctggacagagccaccctggtctccttgtaagctttagttgggcttgtccctgagtgtgtggggtangaataggagtgtgttcttgtgtatgttgcaatcttt

SEQ ID NO: 212475 - DNA, 713 bp, Homo Sapiens
ttttttttttttttttttaaaacttcgaaatatttattattaagatataaatacatattttaaaaatgtacaagttaaaaataccttcaaagttaaatgtcagttctttcacaatcattgtgccggggtaatacgtacaatatcttggcttactagtaattttataccagtcacttgaaacaacatccttaaactttaataatatgttgtaataattccatttttcactttttagagtttgatagaagacagtcaatatcgtgaaggatttcagaggtttttttcaatgctattgatactctattttcattaacttctcctagcaaggtttctgaagatcctggtttataatgatcaaaagactgttgttcatttttcttgttagaaatctggtttaggataccactattttctagtagcaagttaaacttctgtatcttttcaagttcagaagcaacagaccaattttcttggagaacagaagatgacgaatgagtgggcatctctctgggactagtctgggtcagtctcctgcaccatgatgttactgttgtcacatatctttcatatggttcagggtgttcaatctgaattaactgctcttgtccatcaggaaaagttaacttacaccaacctaagttaagaccttgatttacctgtctcttctcaataggagagctgaaattccatttagggttagagtaatgccatct

SEQ ID NO: 212476 - DNA, 494 bp, Homo Sapiens
  misc_feature (428)..(428): n is a, c, g, or t
  misc_feature (479)..(479): n is a, c, g, or t
ttttttttttttttttttcatataaatatgttttattgcagagaagttataattatttacatgctgcaacacgtcacaacataaatttaccaaatatttcatggtgggatgctgtaggtttcagataatagttttaggagaaccacagattaagtgaagacacttacagctttattgactctacgactctcggttgctaaatgctagaagtcaaaaggcagtgttttttcagtcctacctgtcataacttgcatgcagaaacctaggaagcaaatacaagagaactgtcgagtttcaaatccatattgccaccaaagtttacaatgggttgagttatacttcatgttgtaaagcatttaattcttgcataaaatatacaattctattaagattggtataaatctacttatttataaaccctggcttanaaacaaggacaggatgcagcctgcacatgcattgagaaggacaactagcanatgtttgcgacctta

SEQ ID NO: 212477 - DNA, 530 bp, Homo Sapiens
  misc_feature (498)..(498): n is a, c, g, or t
ttttttttttttttttttacaaggtacagcacagttgtattgaagaaaaaaaggacccaactcttactttaggagtattaggcctggacttcccctgccccatgcaataaagcaagttttatatacactccccatatttttttctaacattttcttatataaatttaaatattttacaaaaaaaggcttttttcctccaaacatataaatctgagtgaaacatagattccccacccgagaacttgtttcttcactaaaatataaatgttgtctgatattaagggtaaatgtcttttgaccactggagatcactgaagtctgaattgcaccgtggagaaggcacttgtgttttctgaggtctccagcaagtatctcagtgagcactcatagaattgctgtctgtcctccagaacccgtgccaaggcctccgagtgcccagttactgaggcagctggggaaaaacgttgagtaaacatgattctacaattacggagatanaaaataaaaacagcatggactggttctaccct

SEQ ID NO: 212478 - DNA, 635 bp, Homo Sapiens
ttttttttttttttttttgaatcactgcttttcctttattgataggtcagagagcatttcctggcacccccagggtacagccccctgactcctgctacccaagaaggccaccctttcctgcctgtgatactccgtggcatctgttctgccagaggactgaccctttgtgctccacatatgttttgccaggaaacacttatctcagccacaaaccgtccctgtcctccaaaagactcagagctgcttacaaggggctgctttggtcagtcagctgttagtcctggggctcttgcctcctctgtgggggtagcatcagtcaccctaaagttctcaggccgccgctagctagtgagttacaagattttagaaaccagctcttgtccacagatcctcaggcccctggttcttggatccagaggcgtctgaggtatgttcacaggcacctgctgctgctgctgctgcctctgctcttgccctcagtccccgtctttccacctgggtccccttgcactttcatgcctgaggctgcactggtggccaagtctaaactgagggtcctcccgcagaccgagagccgccgcagcgcctcggaggcggcctccacgggcatgctggagcgctgttccagcagcatc

SEQ ID NO: 212479 - DNA, 738 bp, Homo Sapiens
  misc_feature (638)..(638): n is a, c, g, or t
ttttttttttttttttttcacagtttgtacatgaaagagtatttattgaaaacatggttactgacaggaagctcctggctgctctctggttacaatcttggctcacaactggaagtgttacatactttttacttcccctcaattttatttttccccaaggttccatcctaagataggtagatcttatataaatatatatacacgtctgtataagtatggcctatagtaatgaaaatatatagtacactcttcattgggtagtacctaccatgccaggccaccaatactgaatgccaatgtgctaacgtatgtccagggagagaggctgtgtgtgtggtttacaagtgctgcagcaccagggaagccccactggcacaggtgtggcctcagccggcctcagccagctccctgaaatcatggccaatggcagaaaccatagcactaggaagggaaggccaacttcctggggtctggaaggccaaaggaaagcaaactggagggggctgcaattcaggttaggggagatttctctctgaggaaggaaaaggtattaatgtgggggaagagcagtagaatctagtgacctcaccacagtctaggcccaggcctcagctgggttttccctgcagcgttcctgnagacttaagagggcaggacttggccaggaggtctttgacttgctgggatgagactgagcgcttgcagggagaaattccgtctgctctgatatctgtatgg

SEQ ID NO: 212480 - DNA, 686 bp, Homo Sapiens
ttttttttttttttttttgggttttcacaagtagcatttttattcctcctgctgtctgacatctgagctccaagctctaaacccaacctgtattatatgcagcagcaggttatctttgttttaaatcacatttgttattctgtacttagtcacctttccgtgtgatctgcatttgaaatgttgtaaacttggtcagtatttccattaaaatatcagggctaatcttgtgtattttttttttgttcctaatgattttatagacaaagactcttggcaaccccaggagaaaaaaaataaagctgtcagtggagtactagggatgagaatgaaactggaggtctgtttctggtattatggcttcccgggactctacagtcctgtatggtgaaatacatttttccattgggatcgtcaatgccatgactgttctgccacctcaaactccagagtttctggtgatgtgcaagagttagcaatatacattcagtaaagcgtgtaatcgagtaagtcgtagtaacttgggcgtaaagctctaccaccctgctcactaacaccctgatctccgtccggtatgaaaacacctattccgggtagtctggctccacgttaagcaaacaccactttccgtgttcaccgacagctagagccagaggtctcccggttgctgcttctgaggctgggtctgc

SEQ ID NO: 212481 - DNA, 608 bp, Homo Sapiens
  misc_feature (523)..(523): n is a, c, g, or t
ttttttttttttttttttaaagaagaatgggagagtttagccgtcttttattttgaaaaattcgacataagtctggcaaatgttaacattgtttaaagttgagtagtgaatatataggtattatcttactctctactggtctctgtgtttaaaatatttcacgataaagtgggaaaatggttaattttacataaaaagaactttaacagatgcaaaaaataaaacctctctcattcgacaagcagcctaaatggggaaaaaagaacccactcaaaaaaaaggtagcagataatgtcaccgtggcttaccagcctaatcaaacttattacttgttatgtatatatccttattaaactaagtcgttactgtgttaaagcattttagtgtttaaataaaagatttcagaatacagcagaaatacattccaatatgttggggtttttacgcttaggaaaacctacaatagtaggtgatttgacatttgaatcacacctatctgaattaagatgtccagcactaccanacaaaagccacacgaggccacgaaacactcccaactctgcatgttttagccctttttaagtcctagaaacaactgatactgatta

SEQ ID NO: 212482 - DNA, 687 bp, Homo Sapiens
  misc_feature (645)..(645): n is a, c, g, or t
ttttttttttttttttttggcccattatacagctttaatttcaatatattttcttcaagttcagtttacatacagacactatgaacacgattctttgaaataccattatacaggaatgttgtattatttaggtttcttctctgttacagctcacctcacactggggtgaaagagatttgaactgagatttgcagccatcaaattactgttagttagattgatgggtggcattgtcacagaacctccgcaatgtggattttctttcaagccattacagttagtgctgggattgatagggtttggtggttcaatggttacaagttttgtatctggagacataggatgaacattttcatttgcatcctgttgaccaagtccaccttcatactctttcttttttggttctgagatatctcctcttcctcctttgactttaataactctgactttgatctccttgggctttttctctttttctatttcctttcccaaaactgaactacttagcagtgtattggtataaactgtttttctttcatctttcctgagttcattttctttagaactctcttttggctttattaatgaattgacttttgcttcctgcagtaatttagctttcagttctggcatgaatttttcacntaatccatctctaggtaaatactcatgatgcaaaagatcact

SEQ ID NO: 212483 - DNA, 791 bp, Homo Sapiens
  misc_feature (667)..(667): n is a, c, g, or t
  misc_feature (770)..(770): n is a, c, g, or t
ttttttttttttttttttacctttctgaagaaaaaactttttatgacttcaatgacatgttatttttaagcagcagcggaagtcttaaacacctttacatgcttcgaaatactgttgatgatctgattttcaatactgtattgggtgccattaaagagaccattgttctttgaatcagtctctgtgttgctgtgggaaacacggtaaggcagaagcactagaatcatggaggcaaattactgaaacactgtgatactgaaatactgctggcttctggaataatcttctgacatgtggaattagacatctgaagtgtcgctccaatcagtcacagttactaagctgctttttaatgtgcttgattcattttcttgaagtccttctccctttggccccttaggattaaatgcgccccaggcatttagcacatgagcaaaatgtggttcatttttcgcaggtggaggttccttctgttctttcccagatttttttcccaaagatatctcttcctctagggatgatatgtcccagtcttcatcctccacatccgcacactttagttcttgtaattcttcttttttgataaacatctcagggacattagttccaccgactggtttgttcacatttttgcgatgtggaaacatcttttcaactttttcagtangtgttttaacggcgactcctgcgggcttggaagaatcatcagtgtcctcgatttcgcttcccctcggtccgtccgcgtcacttttcactgtgtttctcccgangctgccttgttttgtggtggc

SEQ ID NO: 212484 - DNA, 684 bp, Homo Sapiens
ttttttttttttttttttcaaaatctccaagcaaatgggacttccatgacctcaccattttggttaagaacatcagaatccggcttcttcagaagcgcatctagccagcataatgatggatagcctctgccttttccttctaaaacacgacctccttaagaagtatgtctcagcttcttcataatctcaaaaagggagaaacctgactgggggaggtggttgatacatgaaaaactttattccctccgtcacagactagataaaaattaattttgtgttcactaaatttagatgtgccgacacttccctttacttttctagaatcttgcatctcttccagagagctagatttctggctctggtaaggttagtcctatgagaccctttaatggtatctattcctggcttgccatttggatgtcttaaaccattaaaaaggaaatccctgactgacttactgtagagtcgagtctttttcatttttggctcatccttttactaaggttttgtggtgggttgttgaaccaggaaagcactggcactggggctgagtcttttgggtatggtgaggagctctatccacaatcctgccagaggaccagatatgtgttgtggaaaaagcacatcagagagggatggaccccaacctctttgctgctgtggccctctaagctctgggtgaag

SEQ ID NO: 212485 - DNA, 737 bp, Homo Sapiens
ttttttttttttttttttaactttagaaagcgaattttattagcttcatgagaaacagctgccatgagtcaagacctggatggggatagagctctggtagcttccaaccaatggcgtgaatacagcccacctgttctctctacatcctcagaccagggtcttagtgggggtcccaagaagaacaccccacttccttgccctctcagtgcaggcacagattcagggaatgcattcttgttggaccttaggatctccgtctctatgatatctcactgaacaggaaaatgaatcaaatccacattctagacagccagatgctgacagatttgggatacgagccactgttctggatcatcagccaggaacacaacactttgaatcaccaatcagaaagtcaagattctggaatgcaaaataagaaccccctaactttctagcagatttcatcagtagctccacatcctagaatgactgtgttacaaatcaaccagaaatctgacattctaggttgtcaactaagaacccagtattctggcagaccaaatgagaaccactcctaacaatctgaagggctaacaaggagttcagcattctggaagaataaacagaatcacaatattccagataatgggtgagacttaaagttctaaatgtcaaccccaacactcaccatgccaaaccagaaaatgagcatttaagaccatcagccctggcctcagcactctggaatgacaagc

SEQ ID NO: 212486 - DNA, 651 bp, Homo Sapiens
ttttttttttttttttttgatttataaacatttttaatgactgtgttaaaaaaccatcatacaaaaagaaaagaaagttgttttcaacttaaaaaaaatccttatataatgtaccactcatctgggatatgcttctgggagggggacactccctgcttgggctgcagcagaaggcagtggggagaaagtcttaaagttctgggagtcaggctagcccctcctgcaggtgtcctcattgccacttcttggtccctgtggtcaaggttcaaagtgccaaaagacccactgatcgaacctgagactgttgagatgtcctgttcccaacagagagtatctgaactccagaaacttccctctcaggcctccactcccccctcctttgtactgtgcatcctactctgacttccgtggctggggcagatcaaatgtacattctcagtgtcccctggtaacaacctctcccttgcctctgatttgcgaggcacagacaaagctgacaaggccttcttccaggaggctgctctgctttctcctctcctaccccagcttttggctcctagcttctctggaaagccacaggactccaccagcttctctctgccaacagttcagtcttcagggctggagctgcagggtctgcggaattccctc

SEQ ID NO: 212487 - DNA, 664 bp, Homo Sapiens
  misc_feature (610)..(610): n is a, c, g, or t
ttttttttttttttttttcagagagacgaaaggctgttttttgaggcctgaggcaccccaacatgacaacgtaagactgtaaccatggtcatgtgagttatgagctaggaaccctggacgaaaccaacacatatacaatcatctcccacctcccaacgcctttactttcacagcctctgcagcaaactgcggtcactataatcgctcctgtggcacagaggcatacccaggggaatctgcccagggggccactctgtgcccacgtgggaacccacacctgcttgtaaagcctcccctccctctgaccagcaaccaggacagtttgttgttccaagcagtgggctcatgtctgttttggctcagaacagggtggggagagcgggccagggacccgcaggaaggcttatccttgagattgcgtgggagacacaacaaggggtgggggcccgcaggcggggcggggcgaagcaggtgatatcaagcccagagccccagcctctccccacagtctcaccatggcccgcaccgtggtgctcatcaccggctgttcctcgggcatcggcctgcacttggccgtacgtctggcttcagatccatcccagagcttcanaggtatagataggcagggacagggagggagagaagggaggagcccttggaggct

SEQ ID NO: 212488 - DNA, 624 bp, Homo Sapiens
  misc_feature (613)..(613): n is a, c, g, or t
ttttttttttttttttttacttttattagtctttttattcttcttttattgatcacctctgaagttcagtagcacactgcataattttttgcattagcatgctgttgtttctacctaaaatgaccggggtccttgccttctgcttcccatagagattgtcccaactccataggtccatagtcacaaatgaggacagctttacatgtaacatgaatcttaaagcacagctccagaaacaagctcacctcctcagtatcacacactgccaggaaacttgggggcaacctgcagaacaaaaagcttagcgtgaaaactaaactggccaggagcggtggctcatgcctgtaatcccagcactttggaaggggaggccgagtcgggcggatcacccgaggtcagaagttcgagacccatctagccaacatggtgaaaaccatctctactaaaaatacaagaaaattagctgggtgtgatggtgggcacctgtaatcccagctactcgggaggatgaggtaggagagtcgcttgaacccaggaggcagaggttgccatgagccgagatcatgccactgcactccagcagcctgggtgacagagcaagactccgtctcanaaaaaaaaaaa

SEQ ID NO: 212489 - DNA, 555 bp, Homo Sapiens
ttttttttttttttttttccgcgtcaatgcatatttaatccatgatactgctgattggaaggacctgaacctgaagtttgtgctgcaggtttatcgggactattacctcacgggtgatcaaaacttcctgaaggacatgtggcctgtgtgtctagtaagggatgcacatgcagtggccagtgtgccaggggtatggttggtgtctgggaagagcctagctggttgttgcctttcctcggtacctaggtcttcaacatcttggtccctctctaggctgtgatggaatctgaaatgaagtttgacaaggaccatgatggactcattgaaaatggaggctatgcagaccagacctatgatggatgggtgaccacaggccccaggttagcgggtaggggtttccaggaggcctgaggtgagaaactgggcaacaggggattgtagggctcaagaaagaatgactcattgtctattacacggcatgggagcagctggagatgccagtctgacccccaaacccatgtccctgatcagtgcttactgtggagggctgtggct

SEQ ID NO: 212490 - DNA, 622 bp, Homo Sapiens
ttttttttttttttttttacattcatatgaagtctttttattgatcttcctttgcaatttcacaagaataaagttgagataacttacaaaaacaagcagtcccttgcttataactgcacaaacattctagccagaggcatcttctttgcaaacagagcaacattatccttcaacattttgcagaagtaagggctgctgacagtgagaagatctgtggggtctccttcagctttttagagtttgtgacactctttcctcatttgataaatgtagaccaaattctcaactaccgaagaaattgtatgatgaaaggcaagtaactggttgttgaattcatgacccaagtcaaattaatctgctgcaagaataattgcgattactccagcagagggcactctgctccttgcaataacatcctactgaacagtaagtaccatggatgccaacacaaattcagaccgaaaagtccatgtatgtgttagttcttcaactgctctactatacccattagtacaggcaacagttttgtatcttcttcgaaagagcaggatatactatatttagctagctcttatacatgaaaattctttgggctatttaaaatcttcacattctcaaagag

SEQ ID NO: 212491 - DNA, 560 bp, Homo Sapiens
ttttttttttttttttttaaaaatgtataatttattatatatgtatgtattccttaacaatatgttgtataacccaacaatgaaatatacatcaatgaaaatgacagctataaaacaataaaacttgtgaattctagagacatgttgagtgaaaaaaaccaaatccttagactacatagagtatgatacaatttttttgaagttcaaaaagaaagaaaactataaaataagtcactttagggatacatatgtattttaggtctttctacattcgaacaaatctattaaaaagagagcgggggggtcggcaaagataggagaagagctcaaatagataaaatacaagcactcataatgttattcttaagttaggtgatgagttattatgcttgataatttatttgcattccccatttacccttttataagcatcaaatattacatttaaatataagtcccaaattatgtataaagtgttgataaaatttatatctgcatggctgttcctaaaactatgcttattttatcaagcagagttcttggttttaggcaattcaggt

SEQ ID NO: 212492 - DNA, 745 bp, Homo Sapiens
ttttttttttttttttatcatgtttgaaaggtatgtattttattactcttgcaggtattttggacaaaaatattgaccagctaattatgctcttccacacatcatgttcactgagtttactaccacagttttagtgcaacaaaatatctttgaaaagccactctacagtaattatggcaaggctcattaatatgcagaggtaaagatttcatttgtatagaaacttagaaaataatgtttgaaaaggaaagccattccatcaggctaaatattttttgtatattaaaaaatatatataaatatttcttgaattagttttatagtcaattttgatgcagtgtcattgagtggtgataaattttgagaggtatatgttaaacaaacatcatacttgagattatagtcttaggtaaacatttaatacacaatgtcaaggtagttccctttttaaaaaatttttgtaccaagtaagtcatacatttaatgttgacatttcttcttacctgtgtgcctcacaccaataaagtactctgcattaaaatttaaatcttgagacagtagtacagcattgaaaaaaaattgtaaagcagcttagatacactgaactcagattttacattttcatttgtcagattagaatataaaaagtaagcttgaaaatcaacttgaaaaagcttattcttactcaagaaaaagtatgaacaatctgaaaatgatcaactagtgtgaatgacattgtacatag

SEQ ID NO: 212493 - DNA, 618 bp, Homo Sapiens
ttttttttttttttttttacatttaactgatatattttttatttattaatgtaggctaaacaagcagaagccatcagtaagagacaagaggaaagaaacaaagcatttattccacctaaggaaaaaccaattgtgaaacctaaggaaggtaatgctttctatgatgtaaaagtctttattaattaggaaaagtaaacccataataaatttgtctgaatctttttaagaaacagttgtatcttttcatcagttctcttagcatttcattaattactaatcctaaggacaagggatggctgagataatttataatttagaggcagctaatgcctatttcagtgcaaactggattgacagtcctctcctgacctctggtctgtgcttggaaaagactctttgttgtgaaagatacaaacccagggcagccagtgcatcttctgtagaaatgcaagaagatccctgagctctgctgtcatgcctctcaaagaggaattatcagaagttgtactttttcttctctttatgtgatcttggcttagagtttggcttctatatcggtaacatggatttctcatcaccttagactaaaggatgctgacaggtcttattcaggagcta

SEQ ID NO: 212494 - DNA, 630 bp, Homo Sapiens
ttttttttttttttttttgcatagggaacaaataaacaaaataatgacagccagagtcactttctgtaaatggtacttaggtaggcgcgtccgcgaaaaccaaaatgactgcgtaatatacaaggttatgattggagtatgatgtgaggggcggggtggggtggggggagagccggcgggtctgcccaggtgtccccttgtccccctcctgtcctcgctgtcaagaggagaagtaggaggaggaggggagggtgggggacctgctggaaccttctccggattgggttcatgagcatttttgtgggtgtgtatgtgtgtgttatccagtgtgcggtaagcagaaagctagaaggagagtaaactatcctggtgatatcagtaaaatacaaaaaggaaacaacaacaaaaaaatctcaaagggaaaaggaaaggaaaagcaacaccacccaaagagtaaaggggagaaaaaagaaagaaaaaaaaaacccaaaggaaaatgttttgttttgtccctccctcctcccagctgcccccccaccccccactgtatgccctgccccatcctgtccccctggagcccttgcttgttctttctctgtgtgagaatgctcggggctgggtgggcaggaa

SEQ ID NO: 212495 - DNA, 580 bp, Homo Sapiens
ttttttttttttgtttttccacaatgccagacttttactgatgctatttcaatcacaaaagccacgaactacatggagtttccaagaaagcaattctccttagtacttcccactcactcagcactcagagtcttggacacacaggctcaaggcactccacaggtcaatcaatattgcaaatcatgcataatggtatacttaatcaacatatatattatagagtgaacattccacaaacaaaataacatttaacattaagagaaaagagataggacccttttctcctttaagtctggagccctcagaatcatctcctttccttcctttttccctctttcctcccccaatttattttttaatctttgtgggacatgacttctaggaatgagccttcctagcaacatggaacatgacttcctaggaatgagccttcctagtaacgtgagacctgaatttcctggaataaaccatcctagcgacaagaaaccagctcaaaaaaggaggaaaaagcgaactgaggccaggaacacatattccttttaaaatgctttctccaaaagatgttaaagaaaaaaagggg

SEQ ID NO: 212496 - DNA, 666 bp, Homo Sapiens
  misc_feature (619)..(619): n is a, c, g, or t
ttttttttttttttttttcattcaatagatatttattgtgtacctgttatgtttcaggcactgtgtaaagaactgagtatacaatggtaaacaagaaagcaagattccctgccctcatggagcttacattctagtggggcagtcagtcccacccacccacacacatacataaagccaaaaagcaaaataagtttaaagagttgtcatcgatacaaaataacaagggtgacctgctttccatggaaaaggaacgtgtttttttttgtatcaggaaccgaaagatggccagtgtggctggagcatcgtgcactgaaaggaggatggagtggaatgacactggagaggttcgcagggccctgttcatgtaaagcaataaaataaaggcatcagaattcattttaagtctttgggaagccagtgaagaggtttaagttacgaagtcatgtgatctgggttatgtgttaaaagtatccctctggcttctttgtgaagaggaggttgggaggcagaggatgagccaagaggtggggtcagtcttccgggtcagagatgaccatggcccagaccaggctgatggcagtgcaagtgcagagaagtctttcctcttctccatctccanattactgaattatttcaggccctcattctatctcattttgacctttg

SEQ ID NO: 212497 - DNA, 772 bp, Homo Sapiens
ttttttttttttttttttaaattgttggtagagacagggtctctttatgttgcccaggctggtcttgaattcctggcctcaagtgatccttctacttcagccttttaaagtgctgggattataggcatcagccaccaacccagctgcttgtaacattcttgaaatgttgactccattggagtgaccagcagagcttgccatgcctcccgatctgtactctttgctgtagtttagatatttgtccgcttcaaatctcatgttgaaatctgatccccagtgttggaagtcgggtttagtgggaggtgtttggatcataaggatggatccctcataaatagattaatgccctgccatggtgagagtagtgagtgagttctctattagttttcccaagagctggttttttaaaagagcccggtgcttccctctctctcttgcttcctctctcaccctgtgatctctgcacacactggctccccttccccttttgccatgagtggaagcaacctccagcctttacctgatgtagatactggtgctgatttttgtacagcctatagaattgtgacctaaacaaacctccttttctttataaattacccagactcagatattcctttatagtaacacaaacagattaagacacttcccacccagttgtctctcagacctcattacggttattcttcttacatgtgttcactttagctgcttgggtcccatgcttttctcaaacacacgctggtgctcttcttgcctttgcatgtcgtcc

SEQ ID NO: 212498 - DNA, 591 bp, Homo Sapiens
ttttttttttttttttttgccactcagtaggtgtctttattcatacttgttgacatttcccatggggaatggttgaagggaggggcagggagggctgagcgggaagccacggcttggttttcctccatccagtggagaagagactcggtagggacatgctaagtagagtgaacaggggaaccatcactatgtgggctgagatgcactgtgcagtgacttcagacaacctgagtccttctgtcaggaaatgcaatttctaagtggaaaaaaaaaacaagacccaaagaaaaaaacaaagtgcatacaaagcaaactgctaatgtaagaaaggttctaaggcagccagcagtgaaaagccaggggtctggagtggccacctggccatgccctgtcccactgccctgtgccaggctgtcgggccaccagtgccctcttgagacagtctccattggctccaagggttctgtgagccacagaaggttgtgaaaggagaagagcctgaagtgtggcagcaccagggcagcccaaagcagggctgcgttgaaaatatcaaaggatctctttaggggtggctctgagggttggtgggat

SEQ ID NO: 212499 - DNA, 564 bp, Homo Sapiens
  misc_feature (526)..(526): n is a, c, g, or t
ttttttttttttttttttcacagaacagggtggtttattatttcaatagcaaagagctgaaaaatgtcgggtcccataaaggagcagaacctgacccagagcctgcagtacatttccaccccacaggggtgcaggctgggccaggcagggccaaaggcagcagaaatgggagtaagagactgtgcccactgagaagctctgctgggtgtgggcaggtgggcatgagatgatgatgatgtagtgtaaggaccaggtaggcaaaacctgttcaggtcttgttgagtgtccagagtggatccagaaggctgagggggtcgtcagagggccgggtggcccgcagcccttgcccgttatgggcctgcagaaagttatgcttgctcatccgctgtttgccccgcagggagctgtccagggagaaggcctctggggtcaaggaggccagcaattccagggaggaggaggggggccccgagctgggggcttcaggcactggcggctcctccttaggctggggagcctcaggtantggggaggaaagggggggtggggagggagatgggattg

SEQ ID NO: 212500 - DNA, 697 bp, Homo Sapiens
ttttttttttttttttttgatttttaaaaactattttaatacaagattaatagcaattttctatccaaatcagaaatgaaaaatcttaacccaaataatattcatttgacagtcacataaaattttagatttgattggtgcacacatttatcctgcatatatattatgtatatgcacagagagacctcactattatgccattgttaggggtctttttttggaagtacctcattacaaggcaatgtcaaaggttccagtaactactcaactttgaatgaagttcaaaatgtccccatgctaagctgagtctgtgccatagcaaaccatgatatagcaagtctccagaatgtgtacaaatcaatactctgtttgtataagttggtctaaaactaaacactggctaatgtctccaacaaggaggaacacattacaaatttataagttatggtttcctttactcttctgttggcaaagctaaattgtgtttttaaataaaaatcaggtctgttcgttagtaagtaaatggaaatgtgtttaaatttctgcaagttttaggtaaaacttgcatttcctaatgcgtctaggtttaatcaaatcatttgataattagctttgcaaaaagaagtaataaaagaatcacatctcaggaatatgttaaggttttttcctccttagggactttagttcgtgttcagtc

SEQ ID NO: 212501 - DNA, 689 bp, Homo Sapiens
ttttttttttttttttttagcggtgtagacatattttcatttctttattagaaagaggtctctacaccatagccacctctctctgttactttacacatctttctttttctttttcccttagaatactgtacagcggacacaaaaaaatcccaaggcaggaaaatacaaactggcatatttaatcaaaacaagatcatatgaaataacaagcaaagtgaaatgtctgtcaatggttttaattacagtacaaacaatataaataaagcatcattgagtcattgtgaaacataaagttgctgaatgaggtaatagaaaacatccaaaaaaaaaacctaaacccatctgtggatacacccacgctgcccttccatctctatacactgctatttacagaaacagaaaactggctgcaaggtgggttggccttccctgcccctgcctagaaatgcatctcagttgtcacctttgagctgctccggctgccctttaggaaacgcacccctgtggcaagatgagaaccaaattccaagctggcagaagggaagagccagtgcaggagacctgcccccgggacccgtgcgaccctcccctctccaggctgagctcaataagggcctccccagcgctcaggtgctcggggctgagaggggctgcagtctggagaattagatgtatttcagacacaaaaa

SEQ ID NO: 212502 - DNA, 740 bp, Homo Sapiens
ttttttttttttttttatccagcataaacctatctgtgtttaataaaagaagggaagagaaaggccacacatacgctttcataagcacagaaaacttctggaaggctttgcgaaaaagagccgactggcagcttgcgggaggcctttacccttcaacggactccagactcctgtactcttttttaaccataagcatgggttgcttttatgtattttttaaaattaatgttgttttaaacaactttgatttaaagatggtggggaaaagacctttggtcgttgtccctcaaacactcacaaaactataaggcgaaaaacaggaactcaaaccttggatactatgagggatccatggcctccagccccagcaggtgaggctggcaagcagcgaggcagggcctccagcctgggcgcaggatgtcccccgggcacggcagtggcagactggagggggctggcacagcctgcagaaagggccgggaaacccctggaccccagccctctccccgcatgaggagcctcgtcaggagaggcttagccactccaggaaaggcatttgggggccgagaagaaagccatggccccaggccccgtgagccccgcagtcagagcccaccgaggccagcagcagatgtgaggcccggagcagccgcgggcccaggagagctgcttggtgatctgcaggaccgaggggacgggggcggagaggctggagggcggcacacccgccagcgtttgtg

SEQ ID NO: 212503 - DNA, 693 bp, Homo Sapiens
ttttttttttttttttttcatgaatacatatatatttatttaattcataatatagcattttggatgggctggaatattgtagagagggatgaggctgtgtaatccacagatgctcatatttctgtcactaggagagacactattggtccagagctcccaatacaaacaggcgtggggtaaagcatttgataaaaaatagtccaacaatagtctaataaatagtctagccaataacaacaatacagcatatgtctgaagctggcagactacaccataaaaggcagttttgtctgacctgatggcaatcagtttggccaacctgtaacacacagccaaatacagccattggctccaaggctgcagttggcttcaggagctagaaataagtgtaggagtggttcttacctacctgcctgacactctccattccttggaggaagcagtatcaaatatttgagtttattcaaaagtccatccgtggattgctccatcttggtagtcatatataaatatgtaaaccatggaagtttagaaaattcacctagagtgttttagccgaaaagaacagataagtgattttgctgcaatctgaatttcactgcatctaaagatacacatagaattgtataataaaaacacatccagatgcagttactcttacttacaagtagccagaacctcaatgtggcatta

SEQ ID NO: 212504 - DNA, 701 bp, Homo Sapiens
ttttttttttttttttatattaagcaaagaaagactaaatttattttaataaacattcagaggctgagggtggccaaattttcaagccagaccctcccaatgttaatacactgtgcaaagcttacaccatgaacaactgacccggaccactaccattccaatgggagcctctgccttacaataccaggttagatgtctgtgcccagaacccccaaattagttacaactaataatcttctttcaagagttttttttttcaatcttggagttaacaatctgacttatttttcttttatcaaagaagtaggaaaattacaataagaattctagagatctctataaattacagacctatgactcaaaatccttgaaacaatttctctacgaacataagagttaaaaatagatttcagtaaaaccctatatgcgtcttatgtgtacacagtatagctatgaggaacagatcttattttgaggaactttattgttacatttttgcaataattgaggcacaactacctcctgcttttccaacatcttaataaaaaagacaataaggattaacagtgaaattaaaattaaaaaatacaaaagcctaaggttctggagacaaaactgactagagtctatgtgtagccaagttgtgaatgacagtttagccttgcagagtttccttcttctccaattacaatgtgttacag

SEQ ID NO: 212505 - DNA, 687 bp, Homo Sapiens
  misc_feature (640)..(640): n is a, c, g, or t
ttttttttttttttttttaggcaaacatattcctttatttagattttatattcacatttagttttttatgcacacatttaagactttataaacactaacattagcaattccagaagggtaggtagattttttaaatataattactcttataaaaggaagaaatagagactttactaaaggactgtatttttgacttcacctataatgcaactaatcatctacttagttgctatgttaatctatttgcttcttcagcaaattatcactgactcagtggtttaaaacaacacaaatttaccatcttatggttctgtgggtcagaagtttgacattgatctcactgggctaaaaaggtgccagcaaggctgcattcctttctggggactctaatggagaatctgtttccttgccttttcaatctttttttacaggcccccttcattccttggctcaaggtgtcttcctccttcaaagccaccttttaacttccttcaaaagtagttgtctttcttatacaggatcactctgacctcctcttttgcctccctcttcaacttttaaagatccctacaattatattaggccctccaaagtaattcaggataatctccccatctcaaggcccttaataacattttanattaatcacttctgcaaaattcttttgcaatgtggcataacatattc

SEQ ID NO: 212506 - DNA, 704 bp, Homo Sapiens
  misc_feature (548)..(548): n is a, c, g, or t
ttttttttttttttttctgcaagctgctttattttttattttcatttacattagaaaataatctctcccttgcttgattttacaagggtaagggtggtcacatgactgacagagacaaccatggtgacacagctcttttcagctgttcatcaccagcaacctggatttcctatgcccagaacagcaatgcactgaactcaagtacaaattaaatttaatcccaactttagtccagtctgagattagcgcattcaaagaatctgtcataacgtttactatagactcttgtcgcccacagaatcagtttccagttcgtgtgtgacatgttctattgttgaatcagtacagagttcttatgtgtgtgagttttctatggtgactacacaaaacctcaggcttacaattgtggaggtcagaggtcaaggtgctggcagggcaggatccttcctttcctccatcatgggggctgctggcagaattcagtttcttgcagggctgggacggaggtccccagtcccagctgcttaggggccaccacactcctcggncctcctctaaggccagcagcgcaggtgcggccctcctcgggttctaacctctcctgcttctggcatctctcagactcagcaggaaaggctctcaagctttaagggcccatggggctgccctgggcctgcaagatgacctaggacaatctcccatgt

SEQ ID NO: 212507 - DNA, 706 bp, Homo Sapiens
ttttttttttttttttttgattgtatcacaagaatctttaatgtttactttaaagttgactcacggtggggttgtatatgtgtttagtaaagtgtgccaagtgctcacactgagaccagtccagttcaaattagtgtactccacgagggtgttttctgtgcccagcaaggtcatgaagggccttgacttttcttggttaggccggctttgctggtgacttcttccaaactctgcaggagcagtctaccccaacacacatcatcagtcccatataaaagaataagatggaaactttctcaatgtatttcatcagtttagcacatctctggtacaaaaatccaagaaaggtagcacaaaagcgaaagcaccaaccaagcttacatataaacaaacatgcatacatcctaaatactacacaatagtacccaaatgaatacaacattgcattaaaggtataaaagcactgtactgaaaacttaaaagttacacgtgaatactgcactgtaaatcctgaatactataatgacccacccccacccttccacagccctggtgagggtcagaaaccattcatctgcctccagactttgctagtcctcagagacactgctgcgagggtagtgggcagtgggattagcctcccgcagagctctggcctcctccagagcttctctgtatcgggagggccaggcctgggggtctttct

SEQ ID NO: 212508 - DNA, 680 bp, Homo Sapiens
ttttttttttttttttttcacaccaaatcgctacttcatttattcaacaagtatttactgagtgccttctgtgtgccacgctactgttaagacagagtccaactccaactgcgggcaggtatgttttccatactctccccatccaggtactaaccaggcctgaccctgcttagcttacgagattaggcgcgttcagggtggtatggccgtagactattttggatacccttatctttaattttctcagcaacccttcaaaacaggtatcacaagcctcattttgcagataaggagactgaggcttttagaggctaaaattgacccaggtcacccggctgacagatggcaggcctagggttctgattcagtccattggattccaaggcctgtgcttgttccacccggccacactgcctgtcatcaaaacacatgtctttcttgcaggctggtctattgcatttccgtcccgccatctgtcaaaaatgggcctgggacggagaggcctctgcctattctgccctccttgtttcgagaccttaggtaaagccagcatctccctaccagctcctccctcctcctgtgtgccctcctttttccaggccccagccctgtgcctgggctcctggcagctgtgtttcatgaagacctccacctttgaagagcatcttttctgttggttg

SEQ ID NO: 212509 - DNA, 679 bp, Homo Sapiens
ttttttttttttttttttaaataaaattcactttatgaatcaataagtgaaatggcaaaaaggagaggtggatattatttaaaagaagatgactgtttaaacacaaaaccatcacagagggaagagaggtttagaaaggtacagaaaaaaaaatctacaccaggtaacactggaggatgcagggctacatttgccactgaagaaacattgttctcttgcatctgaattccagtgctttccaaatagatgggtagatgatgaaaaatggagcagcttcttttatttcttcttcttttctccttgaattctagtacgagacagttctctgcctgccaccaaggcagaaagcagcattttgctcacctgctcttcagtctggcagggtcccacgctcagttttccagcatagctgcagggtgctattgtaatgactcagggatggtgctgacaacgtgggttgcctctgtggctgcgggaggggagccaaagaaggtgttggtttgattcctctgctgatctcggaggtaaggaggaaccgacgaacttttgatatggaggatcctggtgtccatcacctgacagtcaatctgcatcatcaacttcgtagtcctgcccattgatcacattctcatttatgtttattgctggtaacacaatgaatttttggtcttgtggtctt

SEQ ID NO: 212510 - DNA, 693 bp, Homo Sapiens
  misc_feature (681)..(681): n is a, c, g, or t
ttttttttttttttttttaactttaatgcattttatttaacccaacacatatatttcaacatgtaatcagtatcaaatatttttgacatattttacattttgtgtgctgtcttagaaatctgctgtgtattttacacttacattacatctcaattgagactagtcatatttcaaatgagtcctatgtgactagtgacttcggtactagtagtccagggctagaggaaaatgttcatacggaagagtaacagaggttcaagttggaggtaggggtcaaactagagggggtctgaatgccactaaagaaagtggaaagcctttgaaggattttgagttgattgtaaagttaatctagtggttaacacaggattaagagaccatccttaatgccactgtagcaatccttccttcatttcattgaggctgttccactctgtcacagcttatcactggtggtgcagactgcttttccaagcatgtacttttgtaccttaccaacgggtctggtaggtagtgaggactgagcaatcaggacagcagtatgcagatgcttccctcttcagatgacacactcttaggcatggctgggcactaaaaaaggtcctttgacaatgttggtgaaagctgagattcagccagagtatcaaacagtgcggattgatgtgccacaggtacaatgtncagtatgactca

SEQ ID NO: 212511 - DNA, 698 bp, Homo Sapiens
  misc_feature (695)..(695): n is a, c, g, or t
ttttttttttttttttttgccatgtttcatttcctttaataatgaaaatccataagggtttaaaatactcttagacacacctagcttagcaaatatcatggacctctacatttatgtgaattcacacatgagctagccagcacctcagttctggctggccccctttggcaccaggacacaataatttattaaccttcgatacttaataaatgtgcacaaatatcatgcagacattacgaccaaacaaaaaatgtattagagacataggcttatacaaaacatcttgtaaacaaaagggaagaggttgatattttctgtacaaaatatgcaggtttttctttcttttttaataatctgtaagatgcatcatacttctggcattttcaaaaagtgaaaactgtataaaaataaatattctatgtacaaacacacacacaggccaatccaaggttagaggcatcacttgttccagcagccttggactggtaagccatcttcgcccaatgggcagggggcatctaatccaggcgctccttggtctcccttatcccctttaggccctctagagcctttcttccccctctccccccggtttcccttgtccccgggtggtccatgtaaaccaggaagcccagctgctcccgttggtcctgtcatcccagggtctcctttgctgccctctcgccctttggtcncgc

SEQ ID NO: 212512 - DNA, 684 bp, Homo Sapiens
ttttttttttttttttctgggtgcacacgtggccctttattcgaatccgactttcacagggctccacatcgttgtgggcaaggactggccgccccgtaagctgccggcgcaccgcagcccgtgctccaggagagactcgaggccctgagcccgcacctcactggcgaagcgcctcctggaaggaggaggaagggagggagaacaggcgcgggctccaggcgggggacccggcgctcccgggaggcgctgccctgcacccaacacacaccgaaaggcgcccgccatggggccataggtgcgggagagcaggactcactgaaacgcccaggtgccgcccgggacagggctcagcgccacatgccactcttcccgaaagcacttacaggggacaagcctcctgggcaagcggctgcctccagctcttgttccaggtgaagtccctcctgggacagtgaccccagaggtcatcgctgctctcaggccacccttccccgagtcctggccgggccccttcaacctcgaattacagggctatttccacatatgagctagccaagggagcagcttgcgtctcagagggttctgttgggcgcaaacacttctgtcctccgagggctgcagcttccataggctagcagagaatgctcagaactcgtgaagcaacagcagaactagctaaccggc

SEQ ID NO: 212513 - DNA, 694 bp, Homo Sapiens
ttttttttttttttttttgcctattagtaaagatttttattttttaggaccaatgatacaattttagctagaagttagatcagaaaagccacagtaaattttctagtgccataaagtaaatcattttaataattaagatacataaatagtttatgatagaaacaataaagttgtctcaactctgcacaaacattgaatttccaagtaatttgtaaggaatatattcatcttattacattcaaaatcttgattgaacaatgacgattataaagttttctgaatgatgttttttatagtctgaattcacacagtattacattaatttatagtattacagtgcttgataatttgaagaaatgaaataaaattcttctaatggtatgcaggaaataaaaataaaagtcatttgcataactttttataaaaacaacaaaatatttttcctgtaaaaataaattaggttttttatactgaaatgttcttctagtaaagtgtttagaaaatagttacattcattgtgggcagtgtgctcaaacattcttatttgccattccctcacgcatggtaaaatgaggtgcaagctgttcacatgtgagaaaaacagcttttcacaggaaaagaacatatatttatatatataaaatagaattaattaaaaaacccaagtgtcatatgacagacatacaaaaattca

SEQ ID NO: 212514 - DNA, 763 bp, Homo Sapiens
ttttttttttttttttttccctgaaatccacttttattcatgtaaaaaaaatccccaaagaatagagaaaaaaatgtgactcctacttcccggagctccaagtctccagccagctctcccggggaagggaggagacgctgctagctcgagggtgtgggtgtcacagggagcaaagccctgaccaaggccctaacctaagactgagggcaggaaggaggggccccaggaggatgaagggagttagctgaggtacttgccccgggtttaaaaaaataaaatttctagataaaaagttaaaaaaaaaaaaaaaaagcattagtgtcattgcctcctgccctccacccagcgcccgccctggccctgtggccacctcgctcagccagttcagagctgcgtgttctcctcctggctctccgagtcagcgcccgacaggtgcccgctgctcccgggtgcgtgaccgttgctggcacaggccaccagaggcccgtcccccagcccctccggcatctcgcccagcaggctccggcggatctcctgggggagcctcgcccgctgctcctgacactcctgggccagctgggccagcagcttgggctcctcttctgccagctgttgcaggacctgctgctgcccagccacaagacggtcatgccgctgcttctgggcctcctccagccgacggatggagttgactgactcagtgatgtgccgacggttatctccgtcagttccgctccttttctatgcttgtcctcatctggct

SEQ ID NO: 212515 - DNA, 622 bp, Homo Sapiens
ttttttttttttttttttggcattaaactctatttatttagtatttgaaacatggtgtacatgtatgtatttgtataaacatttgttacatctaaaatccacaacaagtaaacaatctgtgctttcttttgtgtacaagtttggggtttacatctggatattttggtgttgtggagactcagtctgtgaagctaatcagattgcctcatattaccataataactgtgacagaagtgatttgctccttaaaggggctgttccttgcccagaaaaggtgtcacacttttgaactaataaaccgggtgtcacggaatcaagagaaacacagctgacacgatggagaaggtatgtgcaggggactcctggagatccaagtcaatgcgtagcaggcaacacaagccatggggtgacgctgggaattgagctctcccttttcaaactgttggatgtgaatatcaagtctccccaaccccacctggaggggtttcatccagcaagagcttgccttctgctcagcacactcctgggagtaacctatgagtgtcacagctgcaactccgaggtgccaaccaagcccagggctctggcttcttctggggtcaggccgctcttcagggttctt

SEQ ID NO: 212516 - DNA, 681 bp, Homo Sapiens
ttttttttttttttttttgaagcttccacattttaatttaagatttgcaggctttcaatggaacctccaccacagtagcaagctgcaagctgcacataaagctattacagaagagattgtttttaagaaacaaattggcaggtgatggctatgtacttaatgtatctttggtttaggaagacgagaatatcgattagaggccaaacaatccccagaatgcaaattgccatttggattctgcatgatttcttttcgttgtgttagtggccttgggatgcttgtcttggcctggaagctttgaggctctagttgggggctgtttgtttgtttttgtttgaaagagcctgagggggggcggagcttagatgctttcagattctgattatttgcaagatttgtttgactagatgttggctgaagttttgctgaattacatgttgtgattattggtgactttttacaagtgggagtcctacttggagatgattcagaaactggaggcggtaccaaagaactcaatatggatggctttaaaagctgcaaggacttgggctgagacatataacccactggcggagactgatttcttccaactctcttagcctggtctactgtacttgactcgggaggtgtctgaagagaagtgggtataaactgcatgtcactaatttgattgtttgc

SEQ ID NO: 212517 - DNA, 683 bp, Homo Sapiens
ttttttttttttttttttaaaacattacatttactaagattctggcaataagacacagcataccaggcttgccactcaacttgttattgtaagtctcagcttcaatatgaagccgttttttttttttaatcaaaaccctgctttttacatgctaaatatcttggcaagtaggccattaaacatagtaatgaacttaagacagcaagagtgaggagttaacaaaagctaaacattgcagcctaaacaaaattcatacaaaaaaataaactatcactagttacataaaattttcctgactggttaaaacttagtataaaacatgcattttagaatctttagctatcaagttcaaaaagtaccaatgtctatttaaaataattcctctcccaagccaaagtgtagtcaaaattaattcaaatgacataacacattctaatgctaaaaaatattcattattactaaagtggaggtaaatcccagagcttttggggctttctcatgctgcaaatggctgtttctctggttcactcaaagcagcatatgacagcatccaaagatgacactaagctcagtaaagggcaagactgctggtagccagctctgacctccccgtgaagcatggctactgtgtccataatacaggatgtgtgaggatcagaggcacactattctgctagctaaag

SEQ ID NO: 212518 - DNA, 705 bp, Homo Sapiens
  misc_feature (661)..(661): n is a, c, g, or t
  misc_feature (699)..(699): n is a, c, g, or t
ttttttttttttttttttaatacaaaatacaagcaaaggatacacatacttaaaacagagctcaggagcagacacgcagtcctggaaacccttcaataaaagcaaagcaggagtttgttttttctttgtctatgcagatacatacagagactgggatatgtaaaaattaagtatcacaaaagaccatcacacgattctaccaatgcatgttgcatctgtaattcacgaacatggtcaacaaaatcatgttcacttcaaccccatttcatttaaattaaagaaaaaaaccttttaaataaagtggttacattcaaactttaacttccttagtaccatgctgcagatttcagcactgttaaggtattgcaagaatgcccaaccctctggtgtctgatcatgtatctagcaacattgcagtatgaagaaaagagatgccccggtctcagcccatggactagttaatacagtgaagcaggttcctgtcttttacccttcctgctcagaacataaaagattaaggactaaaatcaaggaagactgggagttttagagctggcaaaatgaagtctaaaagataaatcaaggcaaacaattactgagaacttggctgttgcttaacctggcaagtctaaaagcctttctttaaccttgtaggaattanatgcataaggtttgctgcaacatgttcatggtaaacanactaag

SEQ ID NO: 212519 - DNA, 725 bp, Homo Sapiens
ttttttttttttttttgtattctctaaaatttatttacagttaataagttaaaaagcaaagtacaagcagattataaatctcaaccataagcacatcaaactgtccagggaaacactttgattccattacaaacaattgttttctaatgcgcttaagacataacactctatcaaaaaatattttaaacacaccaataaatattaggcatgtatgtccattaaaaaccattaaagagtcctgtggcaatccttaaaacaatgaaaaacttttgagttcaaaattgctcagatattttgtattcaaatatttttaaaatttacttaagagttttctaaaaaatagtactatcatttgcacacagcagatcaataggtgtcagtcaccagcttaagttacacttgtcaatattcaaacttgaataaaataaacacacatcacaacagcgacactttgcactatcaacaatgaagcttgccctcaacaattatgacgttactggttttagtaacataaaaatacattgctggttgacaggaaggataaaaatgacatcaagaatctcaaaaagttatgtgaggtgccggtcaccacatttaggcactcaggaattaaaaatcaaataaaagcatagcaaggtgatgaatttcctcctggcttccccctctacttgtgccatatgagataaaagagaaggcaagagaatgaacgaagatcatgagatttc

SEQ ID NO: 212520 - DNA, 679 bp, Homo Sapiens
  misc_feature (560)..(560): n is a, c, g, or t
ttttttttttttttttttaaaagctccaagtcattagctttatttttactgaattcagcatgggatgacaaaaatgcattatatcactaccatccattattacatgtagacatttatccttgtattctttatatgtccattttctacgttaaatctgttaaccaatactaatttaaattacatgatttcctactaaaaatatgcagttcatataagcaagggcaaataaatcctccttaaaacattttattcctttataattgagaacttaacagtcttaatggctagttcttaaaaaatgtttataggattaagtttatttaagagagcagacaaacaaaacatattgtaaaactagtattttccagaagcaatttccattctcttcctttcttcctgcaaactggtgttttatctttacaagttctctgtcattccataagaaagctgaacagtggttaaaacatccagtttgcttgaattcctgagtgattcagattccagtgagattgagggtcattcataacagttacaaggctggtgtggtaaagggagaacanaaataaactgggtttctgcaggtaagtgagaagaacaatgaagaggaataaggttgtaaggcagtatgattaggcttgtgggtgctatgccttctgataataattatgaacagaaatag

SEQ ID NO: 212521 - DNA, 732 bp, Homo Sapiens
  misc_feature (681)..(681): n is a, c, g, or t
  misc_feature (693)..(693): n is a, c, g, or t
ttttttttttttttttttacaaccaaagataaatgattttattttttataatttttacagaccaaaaaacattatacagattaatcataattttctttaaaatgtgcatactgtcactcaaaaatttcacatcctaggatatcagtaattatatcctcctcaaagaaaacacaaaatatttccaaacaaaaatcgctgttgccagatcagactattaaattgtccacagcttctcaaattttcttatacagagaacaagatgattaattttgaaaacggagagaagcaaaaataagaaaagctgagacagatccctctgagacggacattttgtggcctgtaaaactcaagagactaaacagggatgttctttatcagagctgcaaagcgtgtctttaaggcagaatcgttctgtccaagtaaagaaattcaaagtaaagaaaagctcctaccaacttcccaattttgggggaagcattccaaaaggacatttgaggagagattagcactctgttaactatattcctatacccctataaacattcttggtggctgtttagacatttttaggtaaatattctcaggctacagactacccatacacaaagacatattaagccagctatgcaggcaaaatccatctagagctgatagaatgaggaacgtgggaacagaagtcanactgctcattcncaggagaaatacatgagcaagaagatggcacagaacaag

SEQ ID NO: 212522 - DNA, 701 bp, Homo Sapiens
  misc_feature (641)..(641): n is a, c, g, or t
tttttttttttttattttatagacacattatatttattcagaaagattaagtatttcaaaggtaaaaaatgaagctaacatttgaagattaggtaagtttcatgttacagaatataaagatgaaaatggataaaaaattattatgaagtacacacattagaatttgacttgcttagtttgcctctttgtgcctctacctttatcaaagataattatgtgactaagtatcataactaagctggtacatggaatggacaagtgaaaataggtgggacattagaattattatatatgagctcttctgacttcagagtaaaatttgtgttgctcattcctagcttccagaagtgaataaatacataaaagattaaaggaaaataatttcacttaaggtgatcttttcatataaactataatgaaaagaaacaaacttggccaaagtaggattttatatattcttaactgatttttaagataaaaattaaaccatttgctcaagtcaaagtgatcacgttataatgaaatgttccatttgtaacagctaataatttttagactccatctttcaatttattctgaattctctcagtggccataaagcacaactcttagaaacggtaaccttacaagaaactcatcanatcataaaaatgctatccaatctacaaatgttacaaactactgtaatgacacggttttat

SEQ ID NO: 212523 - DNA, 778 bp, Homo Sapiens
  misc_feature (735)..(735): n is a, c, g, or t
ttttttttttttttttttaagataaccaacaattactttaattcataaatgtatatacatagattacataaagaaattaagtacacatgttgcattttaaaaatgtgtctagcaggttattgtacaaaattaaaatgaatttaagaatacattttaacatttttaaaattagttaatcatatatttatttatctattttatttatttatttttgagacagagttttactcttgttgcccaggctggagtgcaatggtgtgatgttggctcaccacaacctctgcctcccaggttcaagtgattctcctgcttcagcctcccgagtagctgggtttgcagacatgcaccaccatgaccggctaattttgtatttttagtagagacggggtttctccatgttggtcaggctggtctcgaattcctgacctcgggtaatccccccaccttggcctcccaaagtgctgggattacaggtgtcagccaccgtgcctggctaatcatatatttaatattaagacttaaggctttagaaaagttattattcaaaaaataactgatattgcttcaaaagtgattaattcaccatggtataattaacaagaatgatgcatttcatttaagttgcagaaaaaaattatgcggatccttcctaagtattttcagttttttaaaaaaaatttattgccacatcacaaggagtcaagaggatccttcctaagtttcatatccacacanaaatgtgatgcctatatagtgaccagaacaatactatgaaagt

SEQ ID NO: 212524 - DNA, 636 bp, Homo Sapiens
ttttttttttttttttttaaatgaaatgatgttctttatttcacgaaatcatcaatcttaagcacgagcaggaataaacaactcccagaagaagcttaattcattcttcctggattttcactgtgtgttattaaatcacaaaaatgacagtccccacactgccctttcccactgacaccaagtccaaccgtgagcacagtgcctctgcgaagcatcctggcacccatggtgagcgctggcgaccaggcagtctctggccagcaacagggactgctcaagttaccgacgttggtaggagctgggctcgcatggccagaatggaaccccctagactttccacacgtcacctgcctgaacgctaactacaaagaggaaaggcaacttaaaggtgttttctagatgcagcatcagttagtccctctctttgtgctttaaggaagatgctttgtgcttaacacattcatctgctgatgggacaagccattctaaagggcagaaatgatcatctttagaattaacactgactttgtaacacctggatgttaactgtccaaatggcaaattattcatcatttctagggatacagttagctagctgtagcatctaatttttacttactttgatgactgaattgt

SEQ ID NO: 212525 - DNA, 715 bp, Homo Sapiens
ttttttttttttttttttaagcacatagctacatatttattaaacaggaaaacatatatagagaaatttaccctcaataatcagaaaatatacattcttttcaagtacaactggaagcattcactaaattaactatgtactaggccacaaagatgcaacaatatactccaaaaagttaatatcatgcaaatcatgttctctgacaataatccaatatagaaagaaagcaatgatacaattttaaaagaatataccagcaaactaaatatctaagaaaaccttcagttaaaaggaaatcatgaaagaagttaaaaaacacaaaattaaataacaatgaaaacagtaccagtcaaaacttatgagaaaagtctaataaagcatttagggaaaaaattatatctttaaatatcttattacagaataaacatcgaaagcaaatcaagcatttaagatgttgcttattttatagcaaacacaaattaacaacgaagaaatgtttaagatgaaagcaggaatcaacgaaacatgtcagagatttaacaaaactaaaagctgattctgggagattaatataataggcagaactggcaaagctaaccaaaagaaaagcagagatgcaaaaaaataaaatggaagaaatgcaaaattgaacaattgccacattatgagaatggcaaaattaggcaaatgaagtactggcaaggatgtgaggaaa

SEQ ID NO: 212526 - DNA, 608 bp, Homo Sapiens
ttttttttttttttttttcaatttgttaaatgaaattgtattttgcccacggctgcttctgtttgatccctggggacagaggggagcaagggaggggagtggcagggggaggcccaggtgtggggctggagggggtactggcggcagcgggaggcagtaggcttgggcaggggaggagtgcgctgcgcctcaggaggcaaaggtgccccagcctgggcaggccctggaccagcccaagctgagcagcgccgcccctgggctggctctcagagcctgggctaacgtggagcccgccacgtcgcttggcactcagaggcccctgcttcttgttggctcacgtaggccacgctcaacacgtagcctgtgccacacccttcgaggcccgggtaggagggcagaggggctggtctgggctcttggtggacccctgctggtgctgcctgcctcctcctcccccacgtgggactcaagccaagggtcagaggcgcttccgctgctgggagcaagggaggagagtaggggtggagcagcctcccctctgcgtgggaacccggcctgtgtaagcagtagcgggacagggtggccggagtgatgccttggggcctgcg

SEQ ID NO: 212527 - DNA, 669 bp, Homo Sapiens
ttttttttttttttttttcaagtttctatttttaatttttttgctttgataaatcaattgcttcacaaaaatcctttttaaagacaacaatccaagaaaacatattgttacagtattcacatttcaaagattgtcagtttcaaagaccgaatataactagaacgaaagattgctgagttctttctgtctctaagtgccaggaatgggccttcacaaggggcagaaccccctctggacaccctggagtttgtctcaatgaaaagtgcccactgctacctcacacaggcaggagatggatcactctcaggtcacacagacacaactcccagagccgttagccgtgagggtttcttttgcatgctcgataaacacttccactcatcttactatctggaatcaaagcgcaaaggccaagctagtccctcggcaggagcgagctggaacccagcacagccagccctgccactcctgctccacaggtgcagggcaggaataacagcaacatgctcaatttgggtctcaagacacattcaaaaggagccttcatagggaaaaactcaacaagaataaaactggaaccgaatctgatcatttaaaacgaaatcttagagggggtcacacttttacagattctctccactgtccaagggctggagaacaggtgtttta

SEQ ID NO: 212528 - DNA, 763 bp, Homo Sapiens
  misc_feature (750)..(750): n is a, c, g, or t
ttttttttttttttttttcatttaatctggcaattttaatttcaacaaatacatattaacaacaaattaaatcctattgtaaatacacttctttgttataccacgaccaaattttctaatcctagtacaggccacaatgaaataggccaaacatgctaccattaaagtttgttgggatgagattgtagtaagtttactcaaagtattcaagttctaatttttaaggtgctgtagagaaacataaaagatttcactgtatctaaaaatatgactgttttgatcttaagctatacattttatttttatctaactgattaagacctgcctcttaatgaggcacatttttggcatttctgtaaatgctgctacatacaagtaaaaataaggaaaagccgtgatagtaacattcatagctttcatagaaaaatatatattccctgaattagtcatatcaagtggtcattcagtatgaactgcaatattataaacaaaatgacatcaatggactttctctaattgcctatttccaacactctacttcagaactcaataatcagtatctccagctgaaattcccaggtcctcctagtttgtttttgacctttggggatgtgaattatagggaatggatctgggtagtttttgcttcactcagaagtcaaataggcccattagcacttcctttggaaaaatgcctgattttttttcctcatgacaccatagttgtcgtggtctgaatttttacactgntatggagaacctg

SEQ ID NO: 212529 - DNA, 745 bp, Homo Sapiens
  misc_feature (50)..(50): n is a, c, g, or t
  misc_feature (641)..(641): n is a, c, g, or t
  misc_feature (718)..(718): n is a, c, g, or t
ttttttttttttttttgtattttttgtagagatggggttttaccatgttngggtaggctggtctcaaactcgtgagctcaggtgatccacccgcctcagcctccaaaagtgctgggattacaggtgtgagccaccacacctggccaatgggccatttctttggttgaattttaaaatattattttttatcatttaccattttctagggcattttaagacccaatttattctgccacaatcatgtcatcagaatagtcaaatgaaatgactttcatttgaattctcactattaagatttaaaattgtggaaaactaaagtgggattggagtagactgttaggaatagatcctagatgaaaaatcacttttggatttgcagaaaccctggatacaaagtagttcaattaaccataaaacaaggatcagctgatctctacacgccaccacctgtttcatgtacatgggaagagtaaaaaatgaacccggataaaataaaacaaaagcaaacaaaatgctaaatcattggttattatccacatcaaataagtctggttctgtggaatatctaaaagtcacagttttatgcctttaactactatacataagggatgactttttaacctccagggcttatacaacanaacacacctcagaagcttatataacaatatactactttttccattttatcaacaattcagcctgccttaagctacanagtaaaataattagacaactgtgatat

SEQ ID NO: 212530 - DNA, 646 bp, Homo Sapiens
ttttttttttttttttttaactcatagatgatttattgccgtaagtaactaaacaagagaagagacaggctgtgggtttggtcaagacaatcagcattccctctccaaggttcgccagttgcatctacctaaagccttaatactttctggacgatatacacatgataaacacagcatacatgggtaacaacttgaccaatgttacactgattaaaatagcacataacaagggcgccagccagtcccgatgccctgaagtgacagaagtaatgtggtttgtatgatgtgctgagtacaaaacctttaaaaacaactttttggcattaatactaacacagaatacttccttgaacattctgcaaaagtaggtgcagagacagaattacttcttcatttccagattaccagtatctataggactattttgagaaaagctgggaggcggagcacctcccctccccaatgtcattttctttgtcaaagcagaagagtcgaaggggtttaggtggaggagggcagctgacagggctcctggagttgttaagtcaccaagtagctgcaggggatggacactgccccacacgatgtgggatgaacagcagccttggtttgtagcccagggtgtccatggatttgacccgaatgc

SEQ ID NO: 212531 - DNA, 706 bp, Homo Sapiens
tttttttttttttattttaataaaaacaatggtcctgccattttttatttatcatagcaatacatacttacagaagaaaaagaatcacacattttaaattctgatcattacactatttttttgtagttgaataataaaagaatgaatctcttagtgactttttaaaataccttcaatgttggaaaaatgcaaattatgatatgataaacattcaataactggagtaagttcacttccaaatgaaagacacttggcacccagtaacagtaatgaaattaaacatcactgaagacagtaaggaggtctgcctggaggtctctaaggaggtctgcctggaaccatatctttagtgtagattcacaatcaatccaatctttcaacctacattttaataatttagctttagaagaataacatgtgaatcagtttttctctaataaggccctgaaaaagttgtatcctgaagcactataaagagagtgaaacttttttgttggtaatcaacagcttcaaatattggtttttatcaacgaattataaatacctttttataaaaggccaaaggcacagtaaaacaatgagtatttgtactttaccattttagagctcaaaataattcagaacacaaaataattcaggcgaccagcacctaatctgtcctgtaggtggcaaattatcataaaaggaatccaggcacaggagtcag

SEQ ID NO: 212532 - DNA, 788 bp, Homo Sapiens
  misc_feature (647)..(647): n is a, c, g, or t
ttttttttttttttttttaattggatgattttggacaagtctgtgcatttattcatatcttattccatgtcaggggactcagtacaaaggtgaaaaagacaaagttgctgttctcaaggagtatactttagacacataagctagcaataaacaaacaggatgattttagctcatgacagggctacacagacagtaacagtgatgagatagagtgatggggaagaggtgcttaaaatggggttgtcaggaaaggcctctgctaaccaccagatctcatgggctcatcttgagatttaacccagcaaacctcttctgagccagttggcaccactgatctccctcccctcctttaaactgttgccttccttgatttctgtgacaagatactggtgtcactatctccttgtctcctcctacttccagctccctctttcagccttctatgcaggcacatcttcttttgaccacccattaaattcgctgttggccaggacaaccatccctcctggcggctggaaagaaagctcaagtgcagcacaggcccagcatatgatgctgagtcaaattcagatggcttcctacaaggtgacatagagcttctccaggctaggacacaggtccacctggctacctaacacattattcancaccaaggaacaactgatcaataaggttaagtgcctatactgactgcaaggcatgttacacagtgcataaagcaacatgattcttaccctaatgaaattatacgatagttcagaaacatgacttacataaaagacatatga

SEQ ID NO: 212533 - DNA, 748 bp, Homo Sapiens
  misc_feature (722)..(722): n is a, c, g, or t
ttttttttttttttttttaacataggtgaagggttttatggactcaatatatatatctttccaaaaatgacatgaaactcagaagccataaaagcgaacatggttatacttggacatgtaacaatcatacacattcttataacaaaaacaaagttgaaaagtgtgtaaaaaatagctataatggttgacaatccaaatcttatttcccgaaatagtaaatgagctcttcgaaatcaggaagagactaaatcctcctcccacccacaaaattggacataaagaagaaattaaaaaatacagatggctaataaacatgaaaaaatgaccaaactcaaaaacaaaagagatacaatttaagacaatagtttgggtgatcacattggcaaaaatgttaaatatttataaaatccattgtctgtgaggctgtaggaaagctggcaatctcattcattgccatttgaagataaagttgttaaccacatttttgaaggcaatcttgcaataattttcaaaatataaatataaagtgtgcacatacttaatcccagtaattcaactgataagtaatttattatgatattatagacaaatgcaaaattactgatatatagggaggttcattgcacagaaatttggtgctaacataaatatctatgagtgagaaatgcttaaaacatttaattatattttatctacaaaacattcatgtcgtcattcaacanatgacacagatgtgtatgtactactg

SEQ ID NO: 212534 - DNA, 537 bp, Homo Sapiens
ttttttttttttttctttacggtgtttcatttaatgctgaaatcagacaatgattaaaacatgaaactttgtttgaaaaagtatattcaataaattttgtctttaaaacagagctcttgacctataaagtataaaaagtaattacaatgaaatattcttcagtaaatctgacactttgggattccaggcaaaaggatcgcttgggtgccaagagttcaagaccagcctggtcaacatagtgagattctatctctgaaaaaaaaaaaagaacaaaaaacaaaagttaaacaaatcaataaatctgagatgcactggtataattcactggcttgcccagttggtactctcttagccatggctattcctgatgactaactggcagtaaaagccaggaaattatggaggtctactgaggagccccctctcgaagtgaagttttcccattatttacacttaagaaaaaattaatgtgagattggattttaaacgtccccattaaaaacagaagaatggagggaaaaaggtgggtggggaggg

SEQ ID NO: 212535 - DNA, 720 bp, Homo Sapiens
tttttttttttttgttttgaaagaaagtttattggccctagtaaagttttgaggagctggcaagttctgattggtgtgtgacagtggtgggtaaaaccagttttgcagtcacagtaggttgttttaatagctgttagataaaactggttttaggttacaacaggtagttttagcaactaggtttgtagagaattatattttgaagcaatgctgtgtgccctgagtgcctttttcccctggcctgtctaccctgttttagttgcatatgacaagaatgaccccatttgtttgatcaacttgtacagatcaaagaaagtttaattttcttttgggtaaagccagttagcaaacacatacggtgtgtgatctcctcctcaccttcactcttaaagccccacccccctttgttttgacagatttcagttcagactgagtcctagtctcttttccctattgtaatagtcttgaataaaatagccattgtccatataacattgttcagtgccattcttgctctgtcaggaggtacttcatctttccatttatgtctttgtggactcccagtttcacattttgttcaataggccataatctcctattctggtactcaaattgttccatattgggtcatgaaagtcctgtctaagtgctatgtctgtccttgatccccacaattgttttctgggtttacagttacaaaagaaagaaagaaagaaagaa

SEQ ID NO: 212536 - DNA, 743 bp, Homo Sapiens
  misc_feature (728)..(728): n is a, c, g, or t
ttttttttttttttttttcaccaaggagtcataacctccaagacattttattttgacagaaaaggtgtgacacatccatcagaaatgggatcagaaatttttggtctcccagtccccagtcctgatttttaattcccaatttcaaaattctatactaacatccaaactataacttgacttttaaatttaccccactcctcgggaagagaagtgcaatgcaggcaggcagctgtttccaggagatcagaaaagggtaaatgaatactcaagatttacagcgtcaaaaggctatgttgaggataattcttatgactatgtaaaagacaaggtagtgaaattgtgagggccctgggcccggccactcacagaatgactgaagcatgctgcagtggagaactggaaatgtatctcttgttgccctccatctccacccaccctcaagactgggacttagaattcccacgtccagcactgttgtagatgggaggtacgttgtgctgaactgctgcgctggccacatcaagacaccacatgtgttcccaagtggtattgcagctgtcctgaggcccatctcttctccctctcatattgggatctcattgggagaaagtctaggcagattcctgctctgctgggccttctcttacgccagtgtggacttcacgggatagggcagacagagtattcgttgcatttatttgttctatcactacagaagaagcattcanaatgtgtacaaagga

SEQ ID NO: 212537 - DNA, 762 bp, Homo Sapiens
  misc_feature (665)..(665): n is a, c, g, or t
  misc_feature (747)..(747): n is a, c, g, or t
ttttttttttttttttttcaataaataggtagtttattaaccatattaataacaatgatgggtcaaataatcggagattcagcccatctgggaagtacggatgaaaatgaaaggagtccttttttttcttcccctccctccctcatcctcataggtttttatatctaaattatgtgagagtgattcatacacacacccattatgaatcagtaagagaaataacttcaagacctttgctagtgatgaaagtgcaagttaagctcattaagccttagtggttatgatgtcagctgaccacagtaaggagagaatgtctggttgaatttttacacctaaagtcaaagttcaagaaaaccagctaagattcagcttaaaaagcagtgacgaaaaacagccaacacccacataaaaacagatacacacattctgtatgctttgtccccacccttcttttctttagcctcaatctgagaatctgccatgcaacacaggtagaaagaattataagagattcaaggaaaaggtcacaaggccaggaagcctcctaggttccctgaaatcgtgggcaaaggggagttaggtggaaatataaaataaggactggctgggtgcggtggctcggcagttctgtttgcttcaggatgctagggatacttctgggagantactgctaacagattagaaagaagaatgatacataaaaaatgattaggaaaagtttggtgacagacctatcatggtctgtcncagagttaatatggt

SEQ ID NO: 212538 - DNA, 778 bp, Homo Sapiens
  misc_feature (694)..(694): n is a, c, g, or t
  misc_feature (706)..(706): n is a, c, g, or t
ttttttttttttttttttcccagctaattatttttttattttattttatcttattttttgagacagagtctcactctgtcacccaggctgaagtgcagtggtgcgatctcggctcactgcaagttccgcctcccgggttcatgccattctcctgcctcagcctcccgagtaactgggaccacaggcgtctgccaccacgcccagctaattttttgtatttttagtagagacggggtttcaccgtgttggccaggatggtctcgatctcctgacctcgtgatccacccgcctcggcctcccaaagtgctgggattacaggcgtaagccaccgtgcccggcattattttattttttgtaaagacagggtttcaccatgttgcccaggttgtttcacattgttttaatccaggctggttatgaactcctgggctcaagcaatccacacgccttggcctcccaaagtgctgggattataggctgagtcactacacccagcctctatatcatgacttctttcatggcgagtaaggtgactggaacgagtgtaggctttaccgcatttcttacattcatagggtttttctccagtatgaattctttcgtggaggtgaagggaactgaggcgactgaaggcttgatcacattgtttacattcatagggtttctctccggtatgagtacttctatggttacnaagggaactcanacgactaaaggctttgccacattgtttacactcatagggtctctctccagtatgaatgcttcccatggtacg

SEQ ID NO: 212539 - DNA, 784 bp, Homo Sapiens
  misc_feature (744)..(744): n is a, c, g, or t
  misc_feature (760)..(760): n is a, c, g, or t
ttttttttttttttttatagtttaaaaacaacaagcatcctttattctccttccagtctcagtgtccagaggctacggttaacaggttttcaaagtgcaaatcatttcattcctcaaaagccagaggggaataaaaactgtacatcatctccaatccatattcatcaggagcgccctggggcttgtcatcctgctggcacggggccaggtttcagggcctggcggaaagaggtctgtaggctttgggacttggtgtctggccccttgagatgagattagttctccaataacctgaatgcctcttggggaggcggcagcacgcaggcgtagaatccctctagacagccagatcgggcgtgggtggagtttaaaccccaggatgttgctaacagccacaatgaaagctgggggtcagaggtaagagcctgctgagcaggagtggggatctgcaaagggactaagggggtagaataatacaaaaggccaaagcaataggaacaaaatggaaaattatttctcctggtgtgaaagggcagaagaaaagggagctaggggttagccaatgaatgaagagctcaggacaaagctttccttagggacatcgtggcctcctttcctccacaggagtgaatgcaggacagggggaggaacagacacatgatatctcaataaacccacctttggtgtacatcagcctagtagaagcacacacagactctgaatctttgcacgaacacgggtcanggaagacagacatcanagactattatttgagtatggattg

SEQ ID NO: 212540 - DNA, 704 bp, Homo Sapiens
tttttttttttttttagtctaaaaagtatatttacaagtattagttctcatccagcttgatctcaaacaaagtcatttacatcctcttacagctaaagttttaaaaaagtatcttcacaaagtaagtctcaggcacactaggggttctatcataaaacaccaagtagatcagaatgtccaaacttactagagaagaaaagtggaattattggctatattttcaaattgcattcaaaggaaatttaagttctgaatttttttcaccttcatacttccaagttaatagaattcaaccagaacactccattccttcaaagcctctagccagacaaagttttactgtattacttcttgctttccatggatatgaagcagagtcctggtaggcacattttgcatacctgcaaagatgcagaactaaacagttccatctgttccatattaaaacaaaagtcctgtgaaccttggatggtgagtgtaatacttcagcactagcaccaaagcctcaaatatgaaaagataccaagaacaccactagcaaacaaaactaaattcttgaccaggagcaggagctcacacctgtaatcccaggactttgacaagccaaggtgggaggattacttgaagtcaggagttcaagaaaagcctcggaagcttagtgagttcacatctccacaaaaaattttaaaaaacagctgggcatg

SEQ ID NO: 212541 - DNA, 770 bp, Homo Sapiens
  misc_feature (679)..(679): n is a, c, g, or t
  misc_feature (754)..(754): n is a, c, g, or t
ttttttttttttttttatctcccaaataaactttattttgaaaagaatatcacaatatagtcatgtaaatttaaatatggcacactgagcagtattgacgcaaattatatagtcatgtaaccatgtttcggtcaatgtacaatatatatatgatggtggccccacagattataatggagttgaaaaattcctgtcacctgctagggatgtcttgatcctgaccctgcataggcctaggctagtgtgtttgtcttggtttttgaccaaaaagtttaaaaattcaaaatttaaatagataaaagcttatataataaggatataaggaaaatatttttgtacagctatgcaatgtgtgttttaagctacgttattactagaagagtccaaaaattgtttttaaataagtttctaaactagaaaatttacagtaagctaaggttagttttttattatttctataaaaattatagaatttttttttttgagacagagtcttgctcctctgtcacccagactagagtgcagtggttcgatcttggctcactgcaacctccacctcctggattcaagcaattctcctgcctcagcttttgtacttttagcagagacggggtttagccatgttggcccggctggtcccaaactcatgacctcgagtgatccacccaccttggcctcncataatgctgggattataggcataaggcaccatgcccaaccagaagaaaaattttttataattttagtgtcactnagtgtacggtgtttat

SEQ ID NO: 212542 - DNA, 617 bp, Homo Sapiens
ttttttttttttttttttgacttatcaaaaatttatttcatataataaattatataatttattttcatctttaaacagtctacaccgaaaacatttttggaaacatcttttccttttggtaaaacaggttagcaggctgacatcagcttcatattctcatggctaaaatcccccacggttatacagttaagcatagcctttctttgtatttctcaagttgacaccacttgataaaaaacaaaacaatataaacatttctagattttgcctaaggccttagctttaactgcagagtagtgagtaggaaattacaaacatatattcattagccttaaacttaccatcttacatgcgcacataccaaaagggcaaaaggaaagtaaaaagtaaggcacaaaaggatgcagtgagtgttaggtctgtttactaagattggccataagagacattaaccaacataatatgacagacaaggaaaaaactgactaatagaaccttttcttaaaaagctgttaatagcatattcaattattatcaaattattcaggttgtgagacttctaaaatgaccaaatttctgtgtatgcaaaactggacttttttcagttacaaaataag

SEQ ID NO: 212543 - DNA, 734 bp, Homo Sapiens; identical to SEQ ID NO: 55639

SEQ ID NO: 212544 - DNA, 720 bp, Homo Sapiens
  misc_feature (588)..(588): n is a, c, g, or t
ttttttttttttttttttaaaaaagcaaagtttgttaatatttattatcttatttttagaacagaaataacattaaaatagatgtttttagaatatcaacatacaatcaaaaacacaaagtccaaggatcctccccatctccaaggcttaaagggcagctatccagctgtagtctattttcctaaattttctcagttctttttcttcagattttgacaactgatgtataatgtcttctcctaaacctgtgttacttgtatcctggactttttcggtaaaatcattttcttcatctgaatcttcactttctttttcttcttccatatctacatcttcaggaatttccttagcactcttagtctctttagacagcagcaatgaatttacaaacatggagcacaggaaagcagcagatggcaggacatgggctggagtgtgaagaagctcactaattgcgggtatgttttctgttaagggtagttgtaccagctcattctctaaagtttcgtttagtttttcatcctgctgttgcctgtgttttcccaatatgaaataaaatggggttgtgggaagactttcttctgctancagctgtttgcttgttggtgtgagtttttcttctggagactttgtactgaatgtcaataaactctgtgattttgttaggaagtaaactgggatctatttagccactggtaagcttctgaggtgaaggatcag

SEQ ID NO: 212545 - DNA, 687 bp, Homo Sapiens
ttttttttttttttttttaaagtgcaaatggcttttattgagggcctactgtgtgctgggcaacatgtctgcaagggtcctgctttacctccctgtactttgcaccggccagggaggagggtgctggggagacccaaacatcaagctgggggagggtgctgaggtggaggtagaagggggcagaggggcccctcagctgagtccttagggagggaagggatcctggggtctgcccagcttgaaacagaagctgggggccacaaggccctgaatcaggccaggcagggtacaggggcctgggagtcctgctcctttgctgtgagacctttagggaatgggatccatctctgagtggtttctcccgatgaaagacaggtccagagggcagagtggccatgcccaaggtggtggccaggtctgacaggatctgcagtccctgccaacaacctcctcctctgctctctgggcagtagtggcctgctcctggacactgctttgcagtcatcacctggacctagagctcatctcggggctggggttggaggctgtgcccgctgctgccaatcaggtccaggcgggggctgcgcagggtcttttgggagccgctccagctgatgaggcggccgctgtcatcatcccatggagaggatgtctccgtgtcactgagccactcggcgtccccggcat

SEQ ID NO: 212546 - DNA, 758 bp, Homo Sapiens
  misc_feature (735)..(735): n is a, c, g, or t
ttttttttttttttttttagtgctcacaagtttatatttttaggtttgaataaagattcttgtgtattttctaaatacacagacaaaacagttccggaagtttacatacatgtcttaggacacttatattaggtaggtaatttacattttaaaaagttggtcttcgtaaaagatcttcccaaagagcttttacaaacagcaggcggaagtgttcttttgtttacagtgttcaaaatgccaatgctcccactaaataatggcctcaaccatctctcctcaacccaaaatattgttctcaatagctagtgtactccaaatttaagtacccaatgtcataaaatttagggctagaaaacatcttttgaagtgtgcttatccctaacacattttaaactatctagaattctttaacttcagttgaaagcagagatacagcaggaaaaaaaaaaaactttccattttaagtcctaaagtgactaaacacctgttagttctaagtgtggatattatgtaccatagttaagtttaaggatctgggtgactgaacggcacaaaaactggggtttctatctagttcttcagataaaaaccattcttttataaaattaaaatgccacagccagttaagagcatgtgctacactgatgtgtcttaatatagtcaaagtgacaaaacaactgctttatgaagaaagagtagtaaggaaattttattggggggaggaaagacactcanaattctaaacacagctgtcttat

SEQ ID NO: 212547 - DNA, 847 bp, Homo Sapiens
  misc_feature (762)..(762): n is a, c, g, or t
ttttttttttttttttttagaaaaaatatacactttattttcaactagaaaggtgcaaacatgtaacttttggtcacactctcaacaaataaactgtccgaaaaacagtcatatcaaagtagaaacaaatgcttccaggtgaaaaaactgatcagctatatagagtcactcagtttttaataaaggccatttgttcattaaaagtgaggctaccacatttcctacctagaaatcagcctgccaaggacactgatgcctcccctttgcaaacaatctgttttgacggactgtcattctatctgagcagaatttccatataagtatccatttcatgctttgaacgatcagacaagctttacattctacctatggtgttcagaaattgaggctaacattgaaatatcaaagcattaaaaacaaaaataaaaaggcacaaacaactttaaattaacttagataactgtacatatatatatatatacacacacacacacacacacaatatttacaatataaattttaaaaaatctggcttgttacaggcaaattcacttgccacaagctgtccagtctaatcgacaggattccgattcctgaacagtgtcattcgaatcagaatgtcagagctgagtctgctgttctgacttaaggaacaacttgactcagtctcttgatggctggagaatgcacatcctagctgtcactggggctacaggcaggtcagtgagcacgctaaaattttccttctcaattacacttcanatagcaggcatattactcgtataagatgctatctgatgatactaactttctgctggtacctcccactgctcctaaagcacacctt

SEQ ID NO: 212548 - DNA, 703 bp, Homo Sapiens
  misc_feature (644)..(644): n is a, c, g, or t
ttttttttttttttttatatttctataacttttctcgaatataaaggatatcatgtgcaaaaagatgagcattggtaaaaatcctgccacattttttgcatttccaggggatttcttcagtaggaattatatatatacagtaagatgtgacaagcatttgaaggctttgccacatttttcatatttttgtggcttctcaccaatatcatttctcttatatttagaatagattgagtgtggttgcaagctttgtcacactttccacgtttgcagtttctcttcagtgtgaattatcttatgattagaaaagactgaggaagatttaaagactgccacattcttcacatttgtaagactttcctccagtatgagttctcattatgtttaagaagcctggagtatggcttaaaggttttgtcacatcttttacatttctatggttttatatctaggatgaattttcttatattcatctttcatatcttctcaatgtaagtttgtggaatgaatcttctactctcaaatatgaattttcataaaggtttgtggatggtctgaaggctctgccacgtttttcacatttgtagcatttttttccccagaatgaattatcttgtgcacagtaagggttgagaacctattanaggctttgccacattctttacatgtgtagggtttctctctggtataattctcttatgtt

SEQ ID NO: 212549 - DNA, 727 bp, Homo Sapiens
  misc_feature (681)..(681): n is a, c, g, or t
ttttttttttttttttgtattatatttttattgttggcttaaaaaaattacttctttaacctccttaatttgtcagtttgtgggaggtgaatctcaatggcatcaaaagttatagtcttcttacacttgttaaaaataaagtgtttaaacaagtttgtttccattcacaaacttactcccaactacaaaaaaaaaaagaaagaaaaaaaaccagaatccatcctccttcctcattgtctcctaatggagagcagcaatcctttccatccagaccattgtcacacaaccgtctccacgcccatcagctttggtgtaaggattctcggtgtcacaccgttgtttaggtcttcctcgaactctagcaactgccccatgaagttaaggtttggggagataattggtcgtttgcctttgacaaatttataagcatcagtcatggtcatccgagtgtgcttcatcaagtaagcgatgacgatggtggcggagcgggacaccccagcctggcagtggatgagaagccccttcccacactggtgagcttcctcaatgaactcaaaagcctcttcaaagtactgccgcaggttctgcttgttgctgtcagtggctggcagccgcttgtagttgaacaggcctttctcatagtggtagaggggaagatgagtggtgacgttgatgacgtanccgatgttcagccgctgcatggtgtccaggtcctgagcatcctgct

SEQ ID NO: 212550 - DNA, 812 bp, Homo Sapiens
ttttttttttttttttttggtttttctaataaacatttatttcaagtgttatttgttaaacatttaattgttgagatttgaaaatgaacattattatttattagacacattttataggctcattcaaaattcttaacttttgagttcctgctttcttcacagcagtgcactcactactttctggtatacaagaagaacagcttgtccccactcttacagtgtaatgaaattagcagtataatgaagaaaagtgctgtgtaggaatgactgagctctaagacaaactggtaagaacaattaggtactaaacaatgggagtactagggagaagattcattttgagtgggagatgttggaacactttggaaataacactgaatttgggttctgaaagatggatataattttgatatgcaaagttatgaggaaagagttactgtataatccagccattctcctaggaatatacatccaagagaaatgaaaacaagtccacataagatttgtacacaaaagttcatagtagcattattcatggtagccaaaaagtacaaacaacccaaatgtccatcagctgatgaatggatacataaaatgcgacatatccatatgatagaatattatttggcaataaaaaggaatgagatgctgattcatgccacagctgggatgcaccttgaaaatatactcagtgaaaaagacacatgtatgattccatttatatgaaatgtctagcatgggcaaatctatagagatggagagtagattagtggttacctagagttgtgagaaacagagtgatactaacgggc

SEQ ID NO: 212551 - DNA, 717 bp, Homo Sapiens
  misc_feature (695)..(695): n is a, c, g, or t
ttttttttttttttttttactatttgttatatacattttattgaaaaaaattttacaacaaaatattttggcaaactgtaaaagtatacataagtgcaaatatatcctccttttaaaatacaagcaaagtgtgagtatacacggtcataaaaatatctttaaaatatggtggtagaaaacaaccttgtaaaaacgttgtattgtcacaatactgaaaaccactttcttaaactagacacattgtttctaaataattccttaataatgttctttggcacctgtatccaaatgtagtgtctggggaaaatgactctcccactcagctaggcaacaagaagaggctttcttgaaatcttgtgcttagcactgcctttttgaaaagcacacaagttttcttagacacacacacacacacacaacttgtctgcttttttcacaccctgattactgaaggcaacgaagatcccacagatacacgttgatgccttacgcatggcacatcttcccacctgagtctgccctctccctcatgtgggagcctgcaggtattcagattggggaacgctaccttgccagcggttgtccttcttccagcagtaggcaaataacagtgaccaacgcgatcctgggcattctggctaagtggcaggtgtgtggcttactgctatccgcgtgcatgtgacttgaatccgtcncagtttctatctgcccctctga

SEQ ID NO: 212552 - DNA, 478 bp, Homo Sapiens
  misc_feature (430)..(430): n is a, c, g, or t
ttttttttttttttttttaagataaacatacttcattttgacaagttcaatcagaaaattaaatgttccaaaatacataggtacctaatataatttcaagaaatataaaagcaatacccagagattcgagtgagacacagacaaacccataatctttgtcagaaatggaatttcacctgtcactcgctgatttaaccttcacttcttccctgacccacacccagaaccaggcaccctccagagctggcccatctcccctccagcccctgcctccctgcccggcaacaccccgggagctccagcgagtctctggccgctccaagcgctctgagggcaccagcctgtcccactctggccatttcaatgccgctcggacagagcctggtgggttcgtaagccagtgcatacccccaccctgcacgtgctctcncgggtcggcgcccagtctggtctgggaccgcatcctcgcgctgacgcc

SEQ ID NO: 212553 - DNA, 440 bp, Homo Sapiens
tttttttttttttttttaagttttttactttcctatatttattaggaaatttaaaaataatcttaaggatgactgccacatgccagccataatggaggatggtctttcttctaccctagacatttcacactgaacaggcctcacttggatctcggacatcttcctttctgcactgtgcagatcccctcagtatatgcagagaacagaaaatcattttgctgccagtggaaggtagacagaagctacgtttattggggaagaaaatacccttgctgtcaaaccatggcctgaaaataaaggccttggattactcccacccatctccactccatgggtgcagagaatgctgagggtgcttgcatacgagaccataaagttgtaaaggatgccttccagcccccatttggtttgttatggtgagagctggggctctgtgagtg

SEQ ID NO: 212554 - DNA, 644 bp, Homo Sapiens
  misc_feature (546)..(546): n is a, c, g, or t
  misc_feature (550)..(550): n is a, c, g, or t
  misc_feature (624)..(625): n is a, c, g, or t
  misc_feature (638)..(638): n is a, c, g, or t
ttttttttttttttttttgaaagaaaaaatcatttaattttccacaattgattaaggacatcattgtacaaattcaagaatccaaaaaagtctcaaacaggaaaagaaaaaacctacaaacaaaccacctagtgtgccagtcacgtttctattctcagctgcaagctcatccttgtagtctctactgttctactgtagctgccactctgtaaactacatttcccagattcccttatcagctggcttcctgttagggtctaccaatggaagccactagagggagattagacggcagtagatagcaattgccctagacccagtggttttttgcatgagacaattttatatattaagcccctgagatttagggattattactacagaaaaagcccatcctatcctaataaaatatgcaaaaaattaaaagtagaactttacacttcataccacgtataaagataaacctaaatgacaaagactatatagctttcagaagagaacacaggaaacatcctcatgatcttggggtatagaaggatttctcanatangacataaaaaacataaatcaaaaagaaaaagcttgatagatttgacataaaaattaaaagctcctgtttatcannagacagaactaanatagtg

SEQ ID NO: 212555 - DNA, 766 bp, Homo Sapiens
  misc_feature (539)..(539): n is a, c, g, or t
  misc_feature (638)..(638): n is a, c, g, or t
  misc_feature (701)..(701): n is a, c, g, or t
ttttttttttttttttttgcggttccgagaacaagtgcactttattggttctgatacagaggagctgccagaaaagccagcaggcggctgcggcacccagccctgcccgaggggagcaccaggtctgcaggcaccgggcctgatccggagctgccaatcagcaggcagccctgcctgcacagtcctcttgggcagcccacagcctgtggccggcaagtccctccgtggaggcgtgggttcccaggtggccagtctttcctgcgcgaatggggcttctcacctggccacggccacagccacagtgccccagcctgcctagactccacgaggccccggtatctccaggacagctaaggctgctactcaccacgggctgtggctgccgcagagaccccaggccctcggcctctctggcctgctcgggcccacatcccgctgggcacagtccaggcagcagggcgggactggctgcccacgaccaccctgcttgcgccacgcctggtgctctgagctggccgcctggtgcgggctgagagtanagggatggagcttcctccagtggccccagcatcaacaggtgcttctcgctgtcctctgggccagactctggcctggctcctgctccccgacacgttcanaggcggtggcagcggcccagagagccacgagatccagtgtgcctgcgcacgcatccagcctgngcgtctgtgggtgtcactcccggttctacagtttgagtcgggcacctcagcttgttgtggagcct

SEQ ID NO: 212556 - DNA, 653 bp, Homo Sapiens
ttttttttttttttttgtgatcaaagatgtttatttaaatgcagattttacaaactcaacttgtccctttacaacaggtcttcccagagcttttaatgtgcagacaggcatgtgaacctctgataaagagagggaaaatggagaggcatcttcctctgacttaatacaaccctttttacttttggtagaaaatcataaggcatgagtgtttaaggagcacactttgggaaatgtggttctactagccttactaggcaaatatgcttctaatatgtataactaacacatgtaaagcactaattatattaataatgccatgagtccttttttctttttctgtctacttctatgatagtttaataccatgctttcttttattatcactaaaaagatggacatgttgaattattttataattttcttttacagttctgtgagttaagctgtatatagcatatgggtgtatcattctttagtaaattacatctacttgtgaactaaacattgatttcattttgactttgtgccattgtctaactttgcaaaaaatcaaaatcaaggaatcaaggtgcttcacaaaaggaacatctatttttttaaaaaaatccattctggtcttggtgttcagtgaactttttttcaccaagctaaag

SEQ ID NO: 212557 - DNA, 688 bp, Homo Sapiens
ttttttttttttttttatcaaaaatattttatttacaaaaaattaattatactatacatcctatactggaaatacattgaataattgctaaaataaatacaggcaattaattcaactttttataagaatgagagaatttgacatttgaatgttatcaaagcttaacttagaacataaatagttaaaaaggcaaactcaagttttcatctcatttattggcatggtgtgttttgttttccacaagctctccaatcagtgagagtcttgagtctcagatgtacctttttgtactctgaaggtaggatgtgcagctttttcttaggcaggatagatgtaacatagatgactgcataaaaaagaggcagaaaggcaggaagcccattttttttttaacacttctccatgtgtctctgcctcaccataatgctgtttattcaattattcatatattccgattgtgttttcaacacaggtctacacagcaccagctacaaggcaaggtcaatcgtgtaaaaaataaaactggataatggaggccttgcagtaactaaattagccaagttcagagtatgtggttcaacaatttttatatgtgccaatcattgatatacttattaaaccttgatgtcacttctactgtgtagacatttttatacaggtccagaacaggaaataggaagtgatgatc

SEQ ID NO: 212558 - DNA, 762 bp, Homo Sapiens
  misc_feature (724)..(724): n is a, c, g, or t
  misc_feature (742)..(742): n is a, c, g, or t
ttttttttttttttttttggggggggacggagtcttgctgtgtctcccaggctagagtgcagtggcatgatctcggctcactgcaatctctacctcccgggttcaagcgattctcctgcctcagccttgtgagtagctgggattacaggcatgtgccaccactcccaactaatttttgtatttttagtagatatggggtttcaccgtgttggtcaggctggtctcgaactcctgacctcatgatccacccacctcagcttcccgaagtgctgtgattacaggcatgagccacagcacacagcccatctttttttaaactatgtttgtttaatcatcacaaatctattcatctatccactcctttatttatctatccacctcttattttgtacacatttcaaagtaaactatagacatctgtatacttatctttaaatatttcaatatgtacatcattaactggtgttaagtatttctttatagcttttcctcttggtggaaagtttacatacaaagaaatgtacacattttaagtacatgttcactgggttttgacaagtacatgcatcagcaaaacccaaaaccctatcaagatagagaatgtgcccgggcgtggtggctcacgcctgtttttccagcactttgggaggccaaggctggaggattgcttgaacccagaagttcgagaccaacttgggcaacatggtgaaacccatctctacanaaataataaaattactgngtgtggtgggtgcactgtgg

SEQ ID NO: 212559 - DNA, 717 bp, Homo Sapiens
ttttttttttttttttttaaagaaaaagttggcccagccccagggaataaattttgactgctctaaacaaccacagaccaagggccaaatctggccctctgactgtataaattaagttttactggaataaaaccaggtccattgatttatccattgtctacatacgcttttaggctacgatggcaccactgtgtcactacaaaagaggttatctagacaaaaagcctaaaatattaccgtttgcctctttatggaaaaagtttgccattccctagtctaaggtttagattctgagcttatcatgttatcctaccccccctcaccagtgactggctcaaaacaagtctgtgattccattctgactgttctactgagggaattccgccttcttctcatgcagagctgatgagggtaagttgtattaataggacatatgctcaggttttctgaaaaatacttttatctagaaatgcataggaatatgctggtgcctgaatgtaccatccggggacctggagattgactcacctgcctccagagctggtgctcacacttactactgagaggcctgaggaaacgcctgcctacccaccaccagaacctgtataggtcacctggagaactagagatcagcctgccacacacaccacccaggagcccagtggtgcacctgcccatctggcccactgccagcaaccatagaagccactggagtcc

SEQ ID NO: 212560 - DNA, 416 bp, Homo Sapiens
  misc_feature (302)..(302): n is a, c, g, or t
  misc_feature (309)..(309): n is a, c, g, or t
ttttttttttttctttttaaatcaggcatttataaacaagaaagcatacattaattacataaaaatagtttccgagtagcagagtaagcatcatactgtcgttagcagcagcgtggggcacgggcaggggcgggggtctgggtgatgttaaaggtagagatggagctttttccttaattgaaaaaaaaaaaagtcatttgtgactcctgacttaaagcgagaacgaacatctccctggaccctggtgggcacggggtgggggggccggggttcggacccacagggaggagggggtggggggnggggccnggggttcggacccacagggaggagggggtgggggggggccgggggatcggacccacagggaggagggggtgggggggccgggtttcgtacccacatggaggaggggg

SEQ ID NO: 212561 - DNA, 593 bp, Homo Sapiens
ttttttttttttttttttggatgttaaaaaggaaatgtttattttcatgttataaggtgattacaaactcctctaaaaaaagcaaagatgaatttaaaatattgatatacatatttatctaaaaagcaaaagagaaaaaaacccctgcaaaatacagggaatcatatcataaaacatttatacacaaaagcttgtatactgcaagactgaactacacaccaaggatcttgttcaaatacaaatgttcctcctcagaaaagtctcttgttggttgattttttttttataaaagtttaaaatatcttaaaaatattttgaagttttaaaaaaatgtcctgatgagccagacatatttctggaaggaggcaagacccacattctcagctttctcttgtgctaaatacagagtcacagttgctagggattgggagattaattgggtaaaaaaaaaaaatgaagccaacatctcaatttgaagtcaaatatataacaggatgctccatccctcggagaacacgccagaacatgtctgtagtgacacccacaagagaacaatgcaaaaatgcttcctattacaacaatatatattctga

SEQ ID NO: 212562 - DNA, 741 bp, Homo Sapiens
ttttttttttttttttttccaggtagccaagacttgagtttatttattggattcatatctcccttcttaaaaggacatttacaaactcgatttcaaaaataaaagaaattctttatgacaaatttcactttttaatttcaatattacaggtatgttcttttgtcataaattatcagttgaaactgttccagtgaaatctggtatcaattaatttaacactttatataagaaataaaacatttattttcaagtcttacatatattacttaaaatagatacaaaattcagtttttaatttttaaattgtattgctatttcaagctaccttaaagtaaataccttagtggaaaaaaaagtttagattttcctgaatgacttaaaacaaatactcttaataacagtccaccatatgttattcatttagcaattaggtaggtcaaatgatttataaaattatcttgaaaggaaaaaagtaatatttgttgggcaagtaaaataattttcgagactgttataatatgcaacttagaatcaaattcaagaacttgattgataagaaaatctaacattgcacaaattcataaataattgcttaatttccatctttaatattaacctgcattattgaagcacactgaaaacaaggagatgagataacgtagaaaaaaagtatacatatgattgtttgcttgacggaggcattgatttgttaatatactttcttacacacatttccctgtc

SEQ ID NO: 212563 - DNA, 772 bp, Homo Sapiens
  misc_feature (695)..(695): n is a, c, g, or t
  misc_feature (700)..(700): n is a, c, g, or t
  misc_feature (738)..(738): n is a, c, g, or t
  misc_feature (759)..(760): n is a, c, g, or t
ttttttttttttttttttcactttgttttatgttacaaatattttattgcaattttttccctttaacaatgtctggatattttggaattaatatctcggacttctttctaatccacattggttcatcttgttcattatgaacagaggattctactttacaatgtactaaaatgttgttatgtatttcaggaccattgaacattcaagttgtttatcattttctttgaccaccaacattgctgtaatgaatagggatttaagagcaaaagtaacgagaatacttgcttaaccacttatgaaaacatatcataaaagtagaacaatcaaaatggtggatgccatagagaaagcaaggtaacaaaataggaagcctagggaccaataaagtatatatacaaggatttcctatatcacaaaagtaacacttcaggtacatggaaaaagaatttcagtaccaaaaggcacctcagtctcacatccacacattcaaaaataattaaaattttacatgaaaagttggaaacacaaaatgaactagaaaaacaatatataaattaggacaaacactgctttgcaatgggaggacctttgtaaatctgacagtaaaagtgaagaaggagtttactagggatctgtttgacattacagaagcattcatattcatacaccaataaacctcatatacaacattatangacanacaacagatttgggggaaaacactccaccatctgtganagactgtatgtcaatagtcannaagacttaatca

SEQ ID NO: 212564 - DNA, 807 bp, Homo Sapiens
ttttttttttttttttttaaacccaaaataagtaaaatttaatttaataaaattaaatctatatgaggtaatgactatacaagtacagaatggagaggttcctctttacatgtgaaagacctttgagtttacactttcaaactccttgagtcaagaatatacgctgacatagaaacaaattttattgtacatttcttaatactgtaaacttacacgtacttcccacataacctcaattcctcatctattctcttgtagagatatggtagtcagtgggacagacgcttaaaaagctgacaagacctatatttttaacttttatacattggcctttgactacctggaatagtattaaatagctgtttacggttatgtcctcaaaatcataccaaatgtttaaaatgcagtctaatgctactttttacaacccaagaagatagctgttattatccttatcttgaataagatcctgtgtttgaaatcaattctgtggggttagagactcatcccagcaggtaagtgctaggtctttcaataattccaccactttccttcgctgtttagtgactattcctttttgctccattacacagctgctgaaccacaacgagtagggcccaagaaaatttttaaagcaccttaggtaattgtaatgaaaacgggccacaatgcaggtttgggaactgcgttagatcatctgaatatttctcatcaggcttctgatagatgcttgatagcagattttaagactatactttctgataacaggcagtattgtataaaaagctgaaagacctagttgaattt

SEQ ID NO: 212565 - DNA, 680 bp, Homo Sapiens
ttttttttttttttttttcaattgcaaagattttatttagcggctttctgtgcttggcacttagaaacagagttccgtgcataagggcaaatttttgtacaccttttcttcatacatattttacatacccttttattgccccctttttcatattcataatattggattccccactaggcacataaatacatttatctacaacacctcaaaaccagaaactttaataatatctgtattattttacttggtattatttgcatttccacaccatttaaaaattttagcttgcaccaagcttcacttgctttcttaccattaaaagatttgaagggaaagggaaagatgaaggacaaaacccaaaacttcaaaatgcaatgtactatttgataaaaatggagatctaagggcaggtagaagggtatagaagacccatctgcaattccctgggacatgaggggatatttcctgccacagggatagcgggcaggcattctaggtcaggtgtctggatccggcacctggaggccaggcctctatttgttgcctctgctcttggtatcatcttccgagattataaaactattccttcttcacacccttttattttccttcccctaccaggctgcatgctgtggaatcagcacttcccacgtagtgcacctctcttctggatcacagtg

SEQ ID NO: 212566 - DNA, 683 bp, Homo Sapiens
tttttttttttcttttttaaagagatttattatggaaaattaaaaatagatataaaaaaattaaaaatagatataaatgtagagaaacaacataatgaacttttgtgtacccagcttcaacagatttcaattattgccctatacattcttcataccccctcccaatactcttttgtatattttatttagagacgagatctcactatgttgcctaggctggtcttgaactcctgagctcaggtgatccttctcccttggcctcccaaagtgctaggattacaggtgtgagctactgcacctggccccaacattattttgaagcaaaactcagatgccctgtcatttcaagtgaaagtacttactctgcattatgtttagttcacagagtacttcctgagggagagaattcagataaattgctaattgatttctgtacatgtttatgccagtttacacattcaccaacagaatttgtgaaagacaattggaggtactaaagccacagttcacagaaatggctgattgttcagattatttttggcatatttaagaaattcttatcggtcttcttatataatgggctaccacttatcctgtttttgtgtgtgatatgggacttagtcatatcgtatttactggccattatcttagtggtaactctaagcatttgtggaaatattttt

SEQ ID NO: 212567 - DNA, 707 bp, Homo Sapiens
ttttttttttttttttttcagggttttatatttattttattgaaattgaacatctcttttacaaatgctaataaatgaatctattcattctctcatttattcaaccaatgttaattgagcacttactattacatgccacttaaccagtttcactcagtttaatgaagcatttctataaatccttgagcacagacgtttctatgtatattgcaagctgtgtttgacaattgagtagcaattgctgatgctggaaaaaaactaatgttgcaaatatttcttgagtaattatatcagttgtttttggggtttggcttaggatgtgggttcagaagtctgaagcctttcctggttctcttaatcttcaagagaaatgtgacctgctgctgagttgagataaataatcctgtgtccacagcaaacagaatcaccaccaacaatgggataaaaaattgtagccagtacttctcacgcggagcttttattacagtaatgttgaggggctcagactcatagtccagctgccacactttgcccgtacagtagtaggttccactgtcttcaactgtggcatttgtaatggagatgttgtggttctcataccagtacttgagagcttcaccatccttataatagatcaccttgtacacatcccagttcctccaaccatggcacctgaggaagaggggctggccctccatcaccacctc

SEQ ID NO: 212568 - DNA, 705 bp, Homo Sapiens
ttttttttttttttttttaaaacattaaataattttattcttttctcatttacagtagcccagtggtaagcatgttagaaaacctgaagaaatttaaaagtttttggtttacaaaaagcatgtataaaaatacctgttcagacaaacaaagatctgatcattacattgcccagctttaagaatgccaaaaataactaaaatactgtcaatcaaatgagagggctacatgggtttattaaagtttattttaacaattttagctaagcagaatgtgctaatgtaattcaagttacagttactgccagataacataagagaaaacattgtgtgtggccacttaagattatgcctcaaacagatactgtttcgtgcgcagaacagagttggggaacacagctgggttaagtttcaatggtaagcagcaataaagatcaagaaaatccccaacttttctaataaccgctatacaatatgaaaaaaaaaatagtatctatcaccacctcttaacaatggacatcaaaattaggattgtaggttttctaagtgcttggataaaaaatgcgaacacagttaagatccttgggtaattatctttgatttttcaaacccccaaaacataaaatattttgcttgctggtgcattaacccattagcaataacctgagctatcttttcctcaccaagtattttgacagtgcaaaatgt

SEQ ID NO: 212569 - DNA, 691 bp, Homo Sapiens
  misc_feature (615)..(615): n is a, c, g, or t
  misc_feature (662)..(662): n is a, c, g, or t
ttttttttttttttttttacacaaatacagactgttttaatcaggaattaaaattataaaatgacaaaggctatacagcatattggaaagctaaagcagaactaataactactctttttacaagagaacaaaaaaatgttttgtaagaatgacaatccaaatattgcagtacagcagtcattcaaatatgtctgaaaataactttccttgtgcacatctaacactgtactttttatatccttacaacttctttcatttaaaaaattcactagagattctctgttaaattgttaatatggaaaatatttaaaatcagtatttttctacatgtaacatttcataaacaaatatatatcactttgctttatttgacatcttgaaggctttcttggtggtggtatgtaagtgcaatgggcaacagtaaattagaaatatctttttacgtaaatgagtgacaatataaatatttttgaaggtgaggacaataacatttatttaaaaatcttgttatataactcaagggattggtttactgatcagcattttactaagaatttagtactaactaaaatatgctttgtacttttatttactttgctttaatttaaaattcanataccatgctttgtcgttcagttggttacttcttttaatgtattcanaaatgttgaacacatacagaactgaatta

SEQ ID NO: 212570 - DNA, 667 bp, Homo Sapiens
ttttttttttttttttatgaaagtgatttttattattttggtaatggtgtcccagtataagtaatgagatacaatttttttttaatttggtatatcaaacagtaaaggctacatataaatgttgtttccccagaatgtactttgtctacaactatgcactgtagctattatgcacacactaaaagcattcatgataaagtacaaaaataagaaaagattaaataagaaggtatccttgagttataaatgtctactaaagtataccttttaatcacacagttgtgtcacagctaaaaacacacaaattaacatatactgctatgcaactatttgatctaatatagatctactaggaaaatattaaggctgtagtaacacttcacaggtaaaggctaagttctgggacatgaaagcttttagaaaattcacaaaacaaacctgagacatctttttgttttggaaaaaagcaatttgcttatagagtcaaagctttgacatacaaatgaagcatttaataaacattatactttattgcaataacctggagtaaaacttctgactttaatggttgtcagcaaatacattctctctccggtagaaacacaatgagggtttctgattaaagcagtaatctgattactccagcctccaaattcagttattttca

SEQ ID NO: 212571 - DNA, 727 bp, Homo Sapiens
ttttttttttttttttttcatttagtattttaataataataaaaaagacatacaaaatccaaacatttctttttacaattcagatacatatttttccccaagtgcaaaatactctatgaactgcatcatttgctgtttattgtcgattgtataggagatgcttactaaattggcagcagtggaaggcagatataaatacaatattttgaaatttcttctgcatttaacaaaaagcctcccacatggcgatgattattctgaaacttgagttcagctcacacagaagtataaagttttcagtttgttcaaactgctacaacctgtggtgtctaaaaaagctgatgacaactgggggttctattccttctaatcatatatttccttgtacaaataatggcacaaggatagggtgtgctacttttgagacgggtcaaatgtaaaaatatccttgtgttgttcgctcccacttttattgtgcttaagaaagaaacctggagggttaacattttctgcttatgctcagttatactttgtcttggtaccccttgtttgtggctgtaatattgaggttaagcagcaaatacaaaagttcgagtgctctataacgttttctgacattttgagatatgacctcataatccattccagagtcacctcagacatgtatatagagaaacttctcatataaaaagtttctctagggccaaagaccaggactgtgttactg

SEQ ID NO: 212572 - DNA, 664 bp, Homo Sapiens
ttttttttttttttttttgggtgttttattatttatttacttgacaggtaacatcgatttggtcctacaagacaccatgctataggcttagctacttgctgttgcacaagagaactttcctgaactctcaggaagcccttgcatggcctatcgaggacagctcagtcactgaagggaaaaattccataccaaagaagagagaaaaattccataccaaagaacagacttcccccagggaacctccgtcctacagcccttcagggccatcacactcacacacatcagccatcatcaaaatagtggccatgctgggaagaacaggagtcctgaactagaaggtggtcttcaaaccatggcgtaccgatttatgtatattacagatagataaattaagaggtctacatgaataaaaaatctctcaaaggggaacgaattccattctgtcatgccaggtgtttgtcagaaccttgaaaacgaaggtggttttcagtggagcttgtattaaaaatagaaggtatttatacacaggccctgctcctctcatggccatgaaatcctctggtgttgtcaggacccctgggcaacctcagcacccctacgggtagcccatctgcagtctgcatctttccgggagagcaggggactcgtaccggggcttttctcc

SEQ ID NO: 212573 - DNA, 674 bp, Homo Sapiens
  misc_feature (651)..(651): n is a, c, g, or t
ttttttttttttttttttggtcttagtataattacttacattttcaaattaaaaaaaaaaaggaaaaccagtaacaaatcagccacggcagagaggggtactgggagttgatagaaaatttgtcctcagttgtaggttactcttaaagcagcttagattgcatgttttcttcagggtcattggaaaaggtggttaccgtcagtccaggaagtggggagccagctaattgtatccagatggaggtacagtggacgctttgagggaaggaggccctgaaacgtctctagcaagcaggctttggtaaacagaactgcagatactgatgagtgacagtccactgctatttgtgtcatgtaggcaggccagcctggggcagggttctcagcagtgatggagggcaggggagagatgtaaaggctttgagactggttcccatcgctggaaagaggctctgtgcagctgaatgctttaggttctctcaacccccacacccagagagagttccattgggattggcttctgtaggcctctgtggctcttaggttcttggtggcagtgacatacatactggtgattctctgacatggctgccaggtagacatctttctctcggtgtttgcgctctttctcccacactgctgtttctttctngcctcctttatgctttttagctt

SEQ ID NO: 212574 - DNA, 693 bp, Homo Sapiens
ttttttttttttttttttgagatggaattcacacgtatttttatttcttccaagcaggtacagagactcaaatgtaaccctttgagctctcatgcttgaggatgtgctgctacctggcctttgagctctgtgctggcataaagcccaaggcctgggcagggcagatgatcaaagtagggagaattttaacaccagtcatgggacacagtggggagcacaaacagtagggtttaccaggcaatgctgttgatgttgatagtcctagcaaggctggcagttccaggaggaggaccagcacctccaggacgtatgacttccccccctacccatgggtgatgtgatccttcacataaccattctgctccaaggtctgccttgttctcaagtgctatacgctgattcgcacccatcacaatcacacacgtctcacacagactccagaccctgcagcgcccaactgagtactcactcacgcaaggtgaggctccttggcggtgccatctttattattcccagccacaagttatagccacaacctctcttccatttaaagtgtgcgtcacccgcagaagacaacaggtgccggagttcactcctatgattcaattctaccctcccctggcctttgcacggatcccagtggtcctggctcggatcaggcctacagcttacttcccaggcatgcttccagga

SEQ ID NO: 212575 - DNA, 637 bp, Homo Sapiens
ttttttttttttttttttgacaacttcaaacaggactttaattccaaaccaaccacagaaccggcgcctgggagcaagtgggactgaggcccaggtgctaacacggggctggcagtgtcgagagaacactctggaagctcctaacagacggctccgcgtgcggatgcacaggccctgacgggcactctgagctgggcagtctgacaccaagcagtaaggcctcccgggcagcgcagcctcagtccacgagcacagcgggtggccctctggggggaggcagcacggggcgcagccctcggcaggcgagcgggcgggatggatgaaacgcagcggcaccaggagccccaggctctcacaggtgccacccccgaccccaggattttcaaagggacaggatttcaaagtcttcatcttctgagtcgaagaatctttccagtcgctctacatcagaagaatctagaaggaacaggacatagcgcatcaggcatcttgggtgggccacctgggtgtgagtcaagggcccttggcgtggggcagactgagcagtgcctgctctgcagcccacagacagctgtccccatgcgggtgtgaacaggtccgggggttgtgcagacctgcgaatatggggggagggagc

SEQ ID NO: 212576 - DNA, 737 bp, Homo Sapiens
  misc_feature (642)..(642): n is a, c, g, or t
  misc_feature (672)..(672): n is a, c, g, or t
  misc_feature (719)..(719): n is a, c, g, or t
ttttttttttttttttatcctttaatctctttaattcacgcatctgtcttttgtataaaaaggtgttttggtgaacccacgttgctacaccaatgacattccacagtattaacactagaatgactgaagtcacattcatgaaatatacaggaaatatcaatggttcatgaactgattactcttctggcaagttagggttgggtctcatattatcaaactaattacgatttttaatgcctactaaaactcatacttaataggaagacaatctataattaaaactgtcccttgttaggtggagagcaaagacttattcacactgaatctcccatgccttgtatagcactaggcacagaatggcattcagtgttttgagaatgaatgaatggtctgcctcttgtctttgataacagtgaatatcatgctaggaaaacaggggcatgtaacttttacttatcaaactctacgagttgcactgagaatactcaatcatgagcattaatttgagaacagttaggaatgaaagtggagtctctggggcacttgcctctgttcatggcctcctgtgcaattttagccaaataacagcctttccaggcctaggtttacctatcttttaatattaccggattttacgctttnaaaattctataaattactacctatttacanatctagattaactgtgacagatggtatgtttaaggaattactttttnaaaatcctttttattact

SEQ ID NO: 212577 - DNA, 636 bp, Homo Sapiens
ttttttttttttttttttgcaacatttaatacagtttttatttgtttaatttggtaaatgtagaatgtaatggtttcaaggcaaaccctggactacttcagtcacaacccaatagttaacatgattctgaagaacagtcttatctgcaatatctacccacttctaaacaaacacatctatagaaatccatgtacatatatattagttttcaacaagtcaggattttcaacaactctaaaatttcaattttatattctgaacacacttcaaaattatccacttgatgcaggatataaccatagggagataaaaattcatgcaatgatactcaggttttttttttaaaggtaaatccaatatttgatcattcaatgctacataaagtgcattgaatatcgaaaataaaacaagcgccaattttatcattaattaataacacatttattatcttgaaaccaaactggcccaagttactttttgtctttttgagtcagctctgtataaactcatttctctcaagcttcctgggaaataaaaaccaagatatttcatttattctttgcagttaacaagagatggcagcgggctcaaggtaggtatgttcttgataattcagagtcagaaagtacttcttct

SEQ ID NO: 212578 - DNA, 721 bp, Homo Sapiens
  misc_feature (606)..(606): n is a, c, g, or t
  misc_feature (619)..(619): n is a, c, g, or t
  misc_feature (705)..(705): n is a, c, g, or t
ttttttttttttttttttgcattttatgtgtttgttggttttatgggatttccaaaacaaaacacaactttttttccttttttcttcagatccactgagtctggacagacactcatgtcctgggcttagatgcttgactctttagggggcaggtccacattggtgacagaggtcaccagggaaacgagacagtccgaggtagtgccgttgaccgacctccgaatcagggacacccgctcctccacacagcccgcggacaagcgagcctctgcatcatggtcccagcactcctcgatggtcacacaaagctgggccaggcccgggtgtttcaaccagtgatctttaatggtgggcctcatcttcttgtgcaccaccacctcctgcagctcctccaacgaagggtgctggccaatctcttcctcaaagggcagcatgtactcatccacgggtccgtctgcagccttgcagcgagacacaagctcccacagcaccaaccccatggcatacatgtcaatgcgcaggaaggcatctctctggaagttgatggctccctcgagcacctcaggagccatgtaccgtctcgtgcctacctgtccgtgggtgtcncctggaggtttcnctggctcaaatcgaacagccaagccaaagtcagccagcacggctgtgaggtcgctcttcagcaatacattcttacttttaaagtcnctgtgggcaatagacg

SEQ ID NO: 212579 - DNA, 745 bp, Homo Sapiens
  misc_feature (619)..(619): n is a, c, g, or t
ttttttttttttttttttccttgaaaaccccaacttttattcttgaaagacagctggattaactggcaaaagccagtttgttgaaatttcaagatggtataaaaatgcttccaggatatagtcagcatattcacgttcacttcagttccattcacagatggatttcagcttccaccgggtgcactgcttgaatcactcatccatcatttgccaactctgattgtgaggtactgatacaatggatcaagttcttaaaaattttaaaagaataaatgatgctggaattctggacctgaggatctttagtatttgaacaaatccacagattaaactgaaggtaaattaagacttcagttttggttatttccaacttttctgtgaggatgtatatccattaaagctcaggcttatagccacactgttacttttgtaggtaatcttcaagttttatggtttaaaatccagccaaccagtggctgtaacagccgaattagccataattcactggctcacacagtggagatctggctctcattcataccaaagcatttcttggtaatgacctccatatttagagatcaggggaacaactttagtgagcagcaaccaatccactcanacagtctgccttgtgctttatgcctgactttttcttgtgcctacctcagcaacccccaaatgtaaactgcttttatctttgaaaattttttgtcaactttgaaactattttagtaacggttctact

SEQ ID NO: 212580 - DNA, 674 bp, Homo Sapiens
  misc_feature (503)..(503): n is a, c, g, or t
ttttttttttttttttttggactgagagccctaagtgaaattcttgaattttctgcaaagccctaagttaagaaaaaagcctctatttgtccttttgtcccctggggctgcagaacattctctgtggtggttactggggctggacaatagggctttgttatctgatgttctgaattggggtgcacatagggagggaagaaggggctctctttatctatctatttgcagaattgagtaatcaagaaagtgcatcatggcctggcctggcctggcctttggtgacagacacacatcagccactaacctaagtccccctgccctaataaacttcccgagtgcccaggggcttgggagagtgcagaagagcacagcaggagggagagctggttgtgtgactcactcctggtttctgagaccagagagggatgcagagcaggctgtcagcctttctctgcttctgcctggcccctcttctcctgcctcagcgctggtctactggctanagtggtgggctggggaaggatgtgggcagcttgtgaagctgcctgggatcccggggtgacgcagcgggcctggtagccccagagaaggcagcactgatgctctcctggaatgcgggtaggggtggtattcagaagaccccgtctgggcctgggccaggccacgggacctga

SEQ ID NO: 212581 - DNA, 715 bp, Homo Sapiens
  misc_feature (604)..(604): n is a, c, g, or t
ttttttttttttttttgtattggtacgtattactttattgcagtgggcacttcattgtatttgaggagattcacctaaacagagcagctccactacttacaagggaccataaagcattactccattttggcataaggttgagattttttttctgaattttcagtacagtacttttcttctaataacagcagttgactgacagctgttactaaaaaaacttgtatgaataaccttcaagtgcagtttcataaagtaagacggaagatcacaactaatgaatggaactgtccttctggaacacaaacataaaaaacttgcatagctatgtctaaagaggttttaaggcacttaatcgatatttcagtgtcgacaaagtgtcggtttttttctgtttctttaactgcttaaagcttttctggatacagtcactagcaagtaccatgggaaaaattagactgcagttattatcttttggagtgagttcagaccctatgagtcacaagttggataccatgatgacattcaagtgtttaaattttcaggtattacacattcgagatttcatacttctctagccctttccttcatgcttccatcccaacanactgaactagttacctcagaactggaaaacttgaaggcatttgcctagagattacttgattcttcgccttccttcttcgacattttgacaggttctctcccacagtgtatg

SEQ ID NO: 212582 - DNA, 657 bp, Homo Sapiens
ttttttttttttttttttaaacttgaaacagcttttattactcacttacatccctgggaaaccaacagatgggatctctcattgccaagttctaatgtatttcatgttcatgctcggctgcaggataccaggtttgccaaataccaataagctgttgagagtgaggtgagtatcaagaatctatagctagatcgtctccctccattgcacaaggaaagtactcactctaggtgaatttccacaaaaggcagtaagtatgtgggtccacagacacggacatggaagataaccagtgtccataagaaatatttccttttttagtataaaaaatatagtggctacccctaagggtaatttacatctattccttgaaagggctcattatgagtactgcagcaactaattattatcctgatggatagtcaacagaatagctattatgttcaaatattaaggcaacctagaaaataaacctcaagaaggctctagtctgtttcattctgatcatttttgaaatcagtccttgaatactaggccccaaaactcttgagatgaaaagttttgattcctatcaaccagccaccttagtgcctgggcttctttcttggattgttcaaagctggaaatccacatctctcgcaaagagctcaaaggtgg

SEQ ID NO: 212583 - DNA, 627 bp, Homo Sapiens
ttttttttttttttttttaacctgggaattaggcaaacctgcctcccgttttatttctaaataacatagctacaatgataagaagctacacgcctccctcataattagcgcccagggaaattccttgtggacaaaggacagacggaactggaagtcatccctctggggctcccctgagacaaacgcttatatgattgccccgttcccttactgtttacataaaaatgcggattcactgggccagactcaatcgtgtattcagtggaaggctgactgaaccaatgtacgccatacacatactgatcttgtgtctccctaagatgtataaaggcaaactgtatccccagccacctcgggcacctgttgtcaggacctcctgaggctgtcacaggtgcatccttaaccttggcaaaataaactgagactggtctcagatatttggggttcacaaaggcgtgagacggcagggtcctgaggtctgaggcgccgtgggcgaggaggagggtcctgaaatctgaggcgccgtgggcgaggaggagggccaagcacacgccagggtcaggtcctgggcaggtggaattgtgcagtccccctgcgtctgcaggtgctgtctgtctgacttgggca

SEQ ID NO: 212584 - DNA, 623 bp, Homo Sapiens
ttttttttttttttttttggggttgaaaatgtatttatttttttcaaatgatctttttcaagcaataaataaaaccagacatattgacttctaaaaaacaaaaccaaacaaaaaaaaaatcccctaaactatatacatcctacaggaatacaggcattatcaaatgtagaaatggtatcactctgaaagatggggctatttacacaagttacaagaattgcgttgctgtctttaagaagtctcctccttgaataactcataaactctaagggagagagagtactggtggggaagcggggttcaaagaggagacatcctccatctttattgatggacaagacagtctcaaggaaaaacatcaatatccaaacaccgtattgagtcccttaacaaggctccacagatcagctggctttcaaaaagcctggaagggtgctccactcaggaactcccaagagaaaccatcttgtccctcagccaggctgggactggcagtgaggccatgctgagccagtggcaaacccgtggctgtggtttccacaagacaacctggctctgtgctgtcacacccagcctccaacagcgccttgacatccaaaaagcatggcagtttcccaagctcg

SEQ ID NO: 212585 - DNA, 690 bp, Homo Sapiens
ttttttttttttttttttcggagaatggacagtttattactcacagtgaacacagcagccagaacagtatctttagtcactttcccatgcccctattcccaagaagagggcatgtggatcgtaccagctgggcaggcagtgggtctgcatcccaggagagggacccgaaactgggagacttggagattttatcagggctgtggaggacctgcctttcttctcctccagagatagatgactcattatccagcaacacagaggtcagcaccgacctcaccagcagcaggctcacaggagtggcaggggcattgggagagtgggaggcagcacagggtcagctctttcacgaaaacagagaaacggggcagctctagagtgggagtaggggcacagagaacaggaaggaaaggcggccggcgaaggtatgatatcacaccagctcccactgtgggcacccaaacccaagcctcctgggaaagtctgggaactgttaaaaatccacacctcagcatcaccctgccaaggggtggggtggggtatgtacacatccccatcattccttgattgaaggctgcaggagagtggagttcatgccaaggcacttgagatcgaccatggatgcagccaggcagaggcagaggaaggccagccctatcccagagaagggcaggacaggggtggacatggggc

SEQ ID NO: 212586 - DNA, 791 bp, Homo Sapiens
ttttttttttttttttttgacatgataaattcagcctcactgtagtccagagtgagaattagaacataccaacttccaatctgcctaaatgtgacagcctctgcccaagactggctcactgaggcgtcttggctactggatgtaaacaaaaaatgcaatatccgtgcctcccagttctttgaaggaatcaattcatccttggttatatctatgctggaaaactgtgggtgtcctttggataaagcatacaggagttatctaccaggatttagatttggtcccttctgtaaatattagcctgaacgttgagttctgtgaacatgaattcttttcgaattccattacaatgcaggcagggttttggtgtcaattttttaaaatcaaaatcacctactaaattagttattttggggggaggatctagacacttgatgattctcagtgaccagatccaggctcagggctgaagtcagcataattcttgagcaagaaaaaggtgattccttcttccacaaagccattccttctcctgagatgccatcttctagagaggtgactaacaggctctgagtgggggttttattatatgggtttttgtttcctggaatgagtaaaaatgtttcaagaataatcatttctcttaagaaaaaaaaaatcacctatgtgtaaaagagaacttaaaaagatttctgacatttataatataatctattccacaggggtgtatattttgaggaaggtaaaacataaaataaggtagaaataaattatacatactatctggatgctaa

SEQ ID NO: 212587 - DNA, 686 bp, Homo Sapiens
ttttttttttttttttttggccatactacatttcactttattattattaacatttatcatacacggttactattccaatctttcatgcagacaaaaataaacaatataaaatacataatgcactttgataattttaaccatacataaaatatggagtaatggaagctatgttacatggatattttacaaaggaaaaaaagatgacttttataataacacatccagatgaaatttatcattaaattttggatttcatatgatgttaagtatggatatattcaaaacaattactatttatagaaccaatttgatattttgtcatttaaaataatgaatactatgtaaatgagtacttataaaaatatttttaggcaaaaagctctgttctactcatttacttgccagttacaaaaatatatattcatctgaaactctaataaatttgcttgaggcattagatattcaaattcaaatgcatattttctaaagcgtcttaccaatttagtgttcttggctacatacagtatatttgtatatatgatattaggtttgtgttacaaataatgccactttaagcaaaagacacagatgatcaataacacacagagacaccacgaaggttttcaaatcaaacatgtccacacatataccagccccaacagctgtgccttgcacaaagtgaattc

SEQ ID NO: 212588 - DNA, 739 bp, Homo Sapiens
  misc_feature (712)..(712): n is a, c, g, or t
  misc_feature (726)..(726): n is a, c, g, or t
ttttttttttttttttttcatttccactaaaatatttatttaattgatatcttacagaaataaataaaaacagtttttgtctaatacagataggtttttttatatatatgtaatttgattttacaaaattgaagcatatcaaattgttttctctaaaacatagctcagaaaggaatagtagaaaacaaacacaaagaaatactgaaatagtctcatttttaaattataagcatgggccttctgaatctcagcatgacatgttattagtaaaagaatgtaagatatggagtcaggggacctgggctccactgtttacttgctacatgtcctaagaaagtttcaatatatctgaacttcagttctctacctttaaaacagtaaagatattaattatatcaacttcacaagattgttgggtaaattaaacacgtaaatgtacatgaaagctctttttaatatgtgaagagctataaaaataacagtttgatttaatttcatataaaagaatcaatggatacctccttttaactgaagaataagcaccaaaagcatgtgtgtgttttcttcagttgaattacatcactctataaacctagagtaagaaaatgcaccttaactaagcaccaaagcctctcggacaaatgggatctagggaatggttctatgagttttccaggcagctaactgggagctaataagtcctgagggtcanagagggtcctttanaactctgaaggct

SEQ ID NO: 212589 - DNA, 771 bp, Homo Sapiens
  misc_feature (42)..(42): n is a, c, g, or t
  misc_feature (686)..(686): n is a, c, g, or t
ttttttttttttttttgtaagttgataaagtgtttttatttntggagagttaataacttactctaaagtagattttaattactagaccttgctaacaactgacatatgaattaattactttaaatcactatcaagttcaatctccatacaagtttcaaggagaactgcacagcactcaaacataaaggaaatattaatgaaataaatgatggaacacaatcaagtctattattcattagtatgaatgaaaacaaaatacagtgagcgataaagacagactagaactaatatcatttgggtttacaaaaaccatctcaagtccaaacatgttcttgtccaaagtccttgcctcatttcaggaaacaaccccatgcctcacttgtgagattagagtaccatgttttctttctttccacatgtggaagtggggtaaagagatgttttggccaaaaaatacattctagacccaaacactagagatatgatcaatctccaggaattttataaaaaggtaatgttgtatttctggataaaagggaaaaaatgagcacaaaaaggatacattagaccacatatccagagattaaggagaccctctgtgtatcctcagtttcccagcttatttagttttgtgtttcccgtcttggtgaaatacctttgaagggaaagcatgcttttatctgcanatagagtttattaactagctctgggggcattactagctctgggggaacaacaattttgaaagtaatttctactttgactttttga

SEQ ID NO: 212590 - DNA, 564 bp, Homo Sapiens
ttttttttttttttttttggtgaaacaatttattagccatggttcagaataatacaaaaataaaggtgtggctttatttacacacactcttgaagctcttggcattcagcggacagcaaacaccatactcagagtgatggaattaatagcatttagggtaagcaaggaccagtgtgagactgggcccaggaaatggggagggaatgtgaggagaaacagggaatgacattaaagaagaaacagacaccttggagaatttatgactcctttctctatgtcatgtccagaagaggcaagtctacagagatcaaagtagcctaggggtgcctagggatggggaggttggggtggtgactaaggggggctggatttcttttgggggtagtaaactctaagactgactgtgctgatggctgctgaactgtgactatactaaaccggcatcaaattgtgcagggtcaattgtggattgtatggtaagtgaactgtactccaataaagctgttaggaggacaaaggcagctgccctggagatagtaggcaatgcccatcaggacatttact

SEQ ID NO: 212591 - DNA, 765 bp, Homo Sapiens
ttttttttttttttttttaagtctgaagacattttatttttcctatgtgggaagcaatgatgatcttacactttttgttttctgtttttaagaagggcagcacaaggatatgtgcagattttcttttaagtaccttgctaagcgacactagactaataaccattttctagaattaggtgacctacttctgaataaaattgaaactggattgcgtattcccttactaataataatactaaatatattcttaaatcagttttcaaaattcaagatgaaatctagaaatatggaacaactagcaggaataagcccgaagatgattctagctccgttactactaaaacctagtttctaaactttcgaggattttatatgaactcgcatgaaaaaatgagctcagaggctagaatatgactccagaacataccttggtcgggtatgttcatgctcaagtaatcagactctgctccaaatttcttgacataagcccttttatctacctaataagcatagcattatgccaaggactatattgaaaaaagaacactggcctaagattgatagtctggatttaagtccagatttagtcacagcctctatatggccttgggcaagttatctcagctctctgaaattcacatttggaatctgcaaaatgagcaactgggcctgaggttccttctagctttaactttctttgcatctaagtttcgtagctcaagcatctggaattccaggtgagagaaggtatggtagattgaactg

SEQ ID NO: 212592 - DNA, 638 bp, Homo Sapiens
  misc_feature (618)..(618): n is a, c, g, or t
ttttttttttttttttgtgactcaaagatgagatttttatttaaaaatcattcaaaggtgaaacacagcaacagcaatataatgaagtttaaagtccctgtcctcaatgaatgtacaatgcagttgggaacaaaaacaatgattattaaagtgctagttaagtcttatttttaaagagaccctatcttgtccaggatgcagtgctgtggctattcacagacgatcatatcacactccaccctcgaactcctgggctcaagctatcctaccacctcagcctcctgagtagctgggactgtacataggcatgcaccactgcacctggctcataagacttgataatttataaaataattctacagcctcttccttactcttcccctttatttattccaactggcatatgctcttttcctggtgagtgagtcgtctacagtgttttctggtggataatgcatcccgatcaaccagagaaaaaacagtgagaaaaatctgtgttctgttgcaatccctctgtgatttgtctaatacaatagatgtgggtgtacccctgcagaaaaatagtttcgcttcctttctccttatacagttacaaaatatccatttcaagatattcanagaataaagtattagggaga

SEQ ID NO: 212593 - DNA, 774 bp, Homo Sapiens
  misc_feature (726)..(726): n is a, c, g, or t
ttttttttttttttttttaagaatcaaataataaactttaatttgaatataatacagtagaatataataattattttgaggtacaaaaataattataaaatacttttcccatttgcaagtaatgtatgctatagactataaatagtacactgatgccagaaactgtacatatttcactacatgcctaagtctgggtcttcctctctcctccatcatcacatgtaagaaaaccagctatgcaatactactttgcaatcttgaaactctgttaagacatttcagaagtagctatctttaataaaagaattagatggtacctttctttaaaatagtatgtatgttttttggctcaatcctatagatgaaaaagtttacaaaaattagatttctgccatttttggaatatctgcttttttttcccaaaagacaggaaaatgtcagagagaatctagagtgctgaattcaacacaagctcatttgaaagtaagtctccatcaatggaaaagctttttgactataggcaatttgaaaataatagcaattcactggaagacaaatttcactgccaaaacctgcagacgagttctccctgtcttttctattactgtgtttcctaatattttaagtgaggtaagaattacaagagtgattctaaaaattatagcaggttctacccagatgggacccatctagttcctaagatgctgagagccatttattatttanaaagtaggaacaacatgaggcctcgtgccgcctcgtgccgaattcttg

SEQ ID NO: 212594 - DNA, 675 bp, Homo Sapiens
ttttttttttttttttttaataagaaccaaaagaaatttatttacaaatttcttacttgaccagtagtgtcagccaagaaacagtataccaggaaaaatcaactaacaccccactaacagtctttagaccagttcatacaagggaatgaccagagcagctcctgactgttagactagaaagatgtccttctgcgtatccttcaattgtacaagaatttacatttaaccaaaggggtctgtgcaagtagcaccgtggtacttgtagtctcaattgagtcatagcttctagagtgctgttccctgtataccttacatagctttttcaccacttttgttgatttctttgtcagcttctttccctttttctcctcctttgtcagttttgtcttctctgttgattccttcctctttttcttctccactatcagctcctttctctcctccattcttggtgttctcttcttctccactgtcagctcttttttctcctccattgttgactcctttctctccttctttgtcctgaacactgatataaacagctttgttatagccttcccggttccgagcaatttcaatggcaaagaattgtatcctgggggcaaagatggtgttttcctcagtgtagccctgagaacaatctagtcgcagcacagtaccatagttgaagtcttc

SEQ ID NO: 212595 - DNA, 605 bp, Homo Sapiens
ttttttttttttttttttagacaatagcatctttattaaactatatagatggtgtaaagggagatttatatgcataaattgagcatatttgtacaaacaaaatacttcattttaaacaacatatttacgcctttaggaaaacaaagttaacataaggaaatacatcagctatgtaaagagtacatctgtgccactggttatccggaagtataaatcactaatgcttaatagaacaacctccaggagtgacatcatgacaatgctcttgggtgtttagacaagatccaggctgactcacagtctcccatctgatatatagcaataggtccattaaatgaaaatgacttggtgttctgtagcagagctagtccattgcaggcatttgctagaagaaagtctccactcaggatagcaattttatttccaaattgcatgtctttcagtggaccatcagatgattgcaactcatttaaatttactatcccacgatgtacaaggagagcaatatgaattagctccgtgatctctgccaaacttctttgactttagaccattcccttatatctgtttccaaacctctccaaccccttctttctcctcgtgcc

SEQ ID NO: 212596 - DNA, 723 bp, Homo Sapiens
ttttttttttttttttttaacgcttaaatgttgcatttattaaggaaatgttaaataagaaaaaaacaaaaagtcaaaacggtgtcacggatgtcaagagcacttttgtggcgtaaaccgtgcagtcacgagctacgagttctattctgggtctttgtcccagggccagcaggaacgctagacgcctcccaaaagacccagtgggaaatgcactaaaagaaacaactcaccccgttcaaattcgcaggctccccctccccccaccccttctcccacaatgacaaaactgtaactcctcaggcaggcaaacaggccactggggcagaaaaagacttatcaaacatttgtattcaagcaaacaaacacaaaacctcttaaaacggcacgttacaatcaaaggtatttatcgcccctcccctccagggcagggggggagcaggagaagagtgggagcgcacccggacacggatttgtgagaccccatgagtctgctgcgtggcttttaacaggtcactcttccggtcacaaggcgatcagtgccgctgggtctctcccctgcccgccctctccacctgcccccagagcttggcccacctgcgggtgggagaagggccttcgcaccgtcggtctccccgcattccaagtaagtagcagcttccaaagttgtgcgccctaatcgccctcttcttgccactttctgctgagttcagagtctgggcgctc

SEQ ID NO: 212597 - DNA, 701 bp, Homo Sapiens; identical to SEQ ID NO: 40676
  misc_feature (651)..(651): n is a, c, g, or t

SEQ ID NO: 212598 - DNA, 592 bp, Homo Sapiens
ttttttttttttttttttagtaccacaaatggaagacatgggaagtttatttttaaaagggggacaaatgatcagaatagcaaaaataaaagagtggggaaaatggattttcctgtgtctgtgccagtgccacaaccctacattcttcccccatgaccaaatatttgagcccacaatagcaacagaagactttcacttcaaggtcatggcctgtggggctggcctgcctcatcagccatgttaagaatatagttagccatatcatcttcagtgggtgcatctgataccacccaagattcatttgctccagtcatctgtaggcgacaaatagggcaattcctgtgtcgatcactccatttatcaatacacttctgacaaaagctgtgagcacaaggcaggatgaggtcagcccgcccatccatacagatacaacactcctcctcatcggtcagctgcttcacccttcccatccaaagactagcctgacaagatgttacagaggatgagttttcatcaggttcttcagaggtggagctctgtgccaatactcctgctgcttgacttgtgatatctttataaagttcctcgtgcc

SEQ ID NO: 212599 - DNA, 684 bp, Homo Sapiens
  misc_feature (25)..(25): n is a, c, g, or t
ttttttttttttttttttacagttnatcttttattttctgcaaatttaggaacatatttactcgttttcacattgaatcttaagtttaagctcttcatttggtatttaggcaatatatgagaaaaaaattttttttgttcatttgtaattttaacaagttgaacattttaccatgattgaacatgtttttattacagtatttaacattcccccaaagaataccctgcaaagtgtaaacctttgtcccatactgtgatattactgttctgctacaataaatgtcaaacctaagcactttgcagttcactacttttgggaaaatgttctagggaactgtatcacaggtgaaactgttacccataaagtgtagctctctgaactggtgtgatcgtgtctctgctgaatggtggtggggatagctggctccaccacacacacctgttttaattaggctgggtaatgtgcacggagagcaaagatcacagactaaggagcagtcagtcggatatttgctttgctggcaaagatttaaaccaagaattaattatctttggacactataaagattttgttcccttccttatagcaatataatcatgacaggccatggttaactacatcagatacacgtagcagccgtgaccaagacatggtgccctaataccaagtgttcttgggttaaag

SEQ ID NO: 212600 - DNA, 756 bp, Homo Sapiens
  misc_feature (709)..(709): n is a, c, g, or t
  misc_feature (720)..(720): n is a, c, g, or t
  misc_feature (747)..(748): n is a, c, g, or t
ttttttttttttttttttgaatttataaagttttatttttgtatatgtgctaaatcttaggaactgtgaacaatcttcatgtcagtctgttggcttgtaaaaggctaagaagtgcatgacttgggtggtgaaatttccttttaggaatctgaatctctaaataaattttcacacatttgcagttttaaaatgtggtgcaccttgcccccgcttctcttacacctataaatttggagggaaagtgctaaatttctgcaaacgtcaagtaattgttataaatacaatcagcagcaaattctcaatacacttagcacttctgtagtgttttatcacactcaaaaaccttatttgcaaaaactgaacactcacatatatgtaggaccaattctggttgagtcctactatgaaaccaatactgttttttttttcttggtaacacaaaaactggggtgtaggggagtgttttcctttatcggcagtatgtagtaccttcaaactagagaccaaaactgggcacttacaatgaaaaggcaattttcttatccagctataatcctaaataaggcaggatatatccaccaaattacccacaaaattcagcaaagtaaaatagctcatgggaaaacataagctggaaaaatactaataaaaaaaatgaattacttcgaagtagtcatctgaatattcacagacttgttttcatttacanatgtaagtcanaaaagtctcctcatctttctcctcgtnngcgaatct

SEQ ID NO: 212601 - DNA, 668 bp, Homo Sapiens
  misc_feature (521)..(521): n is a, c, g, or t
ttttttttgatttttattatggttattttattgattattactggcaaaaacggccaggtacaacacctttttcatacaaggcccaggaggcttagtccagtctgtgctcctgggctacaaggacccagcctgagatggtcccatctgcagggccccgcaccagttggagcagatgcctccccaccaccaattgccaaaggtccaataaaatgcctcaaccacggagtctgcgtgtgtcagtgatgcctagccccgccttccccagcagaccaatgtagggatggaaaagggagaaaaacagtaaacttgtgaccctgaggttcttgtctccagcgtccaccctgcggcttgggagctcctcctcgggaggcagcccccgtacatacgcacccgcgactttgcagctttcacctgaaggtctgagcgaagcccgggcggcgcacgtgcagtggatacctccacccccctgggaggcggggtcgcgctcagagccaatgagagcttgcggggtggaggggtanggaagcttccagaggccggtggggaggaagttataaagagggtacgagggggccagctggagagccatgcagtccaagcgggattgtgaggtaagcggctggcgacttgggggccggcgagccccgccggagcgggggtcggcttta

SEQ ID NO: 212602 - DNA, 571 bp, Homo Sapiens
ttttttttttttttttttaatttgtgttcttttaataaacacacttgcatagttatattacaattttgtaaaaataaaaacagattatctcatgccaagcgtgcccagcatttgcacaatctcaatacctttaatactataattttcaagacacacaaaataaaattttaaggcaaaaacagcactttgcaacaatttaataatttattacattacagtagcatcacagcagcattcaataatgccactttaggcaaaagtctttcagtatttccattatagattctgtttacaagaattcataaactggtaaaagtcattctaagaaaacctggcaaataaagctttggactggaattggtatttctttctctacttttctttcccccagtttctttcttttaaactacagtatttatattttaaaatgttttatttcaaaacatttaaatatcagttacatttttaatagttatattattttaaaatgactctttaagataaagttttagagaaactatattatggatagggctgatttacattctcaaattttctaaaaatcaccttt

SEQ ID NO: 212603 - DNA, 688 bp, Homo Sapiens
tttttttttttttttgttgttcttgaaacattttatttttttctaaatataaacccttaaaatgcacattattttttaaaataaaaactggcatgaatcctaatctttatacaatttcacagcaataatagcagcatgattttagcctcttaaaagatttcctcctttgctctaaataaaaattaatttcaagttctaaaaagccagagcagcaaccatccagtaattggaatgcaattctcctagtgtcttctacagaccgagcatttaaaatacgtgaatgtataaaacttgagtattattaagagttatggaatgaaatgacaatctaaactcgttttgtaaacataggactgccttgctagtctgatgtattttggggggtggagggagctgagaacatagaatggagttgggctagagagttcctactctaataaggaatgcaactttcaaaactcgtgggtgttaaacatgttttacatgtctccagagttataaagagctatacctgaaatgctggtgtagatggtaattacaagaagactgtgaccacacaagtatagagtaagcaaacgacagtaatgccttaggacagcaataactgcccagaactccactggtgaaacggggctgtgaactaagcagttattgcaggaacttgcagtctaataatagataatgcgta

SEQ ID NO: 212604 - DNA, 704 bp, Homo Sapiens
ttttttttttttttttttcacttttggatggctgagtaccataaaacatgatttatttggtaacaaaaatgtttccaggagtttaaaaagggaccactactcagagctaaaaaagttctaacagtcactttttaaaaaagctagtttatcatttgtttataaagaaaaacacaactctgtcctacttcctctaataaaaatggaaaatattaagatgagctgtgtgcttataaagaggtgctacacaagtcatcttacgtttctagtcaacacaaacattgcttcagtgacacttaatattcaatacatgatgcattactcttagcatttttgcatttactctccgcatataacaaggtcagatatcaaaacagtcctgatcttagacaactcactaccaatatttaaagctgtttcctcctaggactacagttcctaaactatgcacagggagcaaagtggtattcccttaggataaacttggtcaaggctcagataaccctgagatgaacttagcaaagtccttgtaaagaaatcttcagatgggaaactccacctatgtgaattttaaagctttaagactgacccattcaacagaaatagcagattttctcagagcactgagtctagtgattgtccacggtcaggaggcacacacacaattttacccacacccctgatgtctcttctgtatggaaaatgca

SEQ ID NO: 212605 - DNA, 639 bp, Homo Sapiens
ttttttttttttttttttgaagtttctaacatgaatttgctattgcttataagacgatggtttaacaaaggaaaaatctccctttttgtaaaacaaatatctgtgtttctaacgcgagttctgcagagaaatgtagagggagaacagagcagcaaaagccatctcagaatcagtgagactctacggaagcagctttacattttgagtcttcccatacaaagcttttcaatctcattgcatataaagattaattgcaaaaataatgcagggataactaaaaacctgtttatagtacactgatactttgtcatatgtaattccaatctgtgactggctgccatgtaccctgatcaaacaatatacacacagacaagacagctgtttactgagacagtcagtatccatagtgattccataaagatgccactctcatttctggaacactctgccatactgtcatttgggaatgaatatcagagtcaacctgcaccattcataagcactttcccccccaaaaatgtaatgtgcaataatggcaaattctgacttcatttggttctcgtatatatgaaaggcatttgttgggtttctcaccaatttgaacatctctggtttggaatacggtgaatccttggacaa

SEQ ID NO: 212606 - DNA, 592 bp, Homo Sapiens
ttttttttttttttttgtgataaaaataaatacttttattggtctggttaaaagatacaaatgacttgaatctgataagcctgctgaatgaatgaatgaatgaatgtatccatctattatgagggttgggctttggctctttcctgtagtgagggagaaataatactttgaagatgtttgacggggctgcggtcaccaaggcctggtgctgcgacgttcctgcaggtttcgaatgaacctggcgttgagtatgtccccacccactgtccaggactgggctggcggggccggggcctgtggaggagctgtgtgcatgggcttctccccagacccatcctgtgacaaggcctgctcctcactggcagacctggtaggtggggagatggagagtgggttataggaatactaaagaggaaattaagattacagactcttcaaggtctcgggccaggttttaatgtaggacacatgatgggtatgaagctggaaccattagtgctatgtccaaatttaaaacctctcagagaatccgtattccaaagggaagtaccagagttgaacctgtgggggaaaggggcttgcaggatgtaag

SEQ ID NO: 212607 - DNA, 841 bp, Homo Sapiens; identical to SEQ ID NO: 40034

SEQ ID NO: 212608 - DNA, 1000 bp, Homo Sapiens
cctcttttccatatctttgcttacatttcgaaaatgcatatattgcttgatagcatcaattcttgcttgaaattctgctctggctgcattcatgttggaaatcatagaacctatgttaccaacgatggtagcaaaaattaacactccaattaggaaatcaaccaccacaaagacatactcagaatccctcacgggagggggtgtttcaccaatggtagtcaaagtcagtgtagaccagtaaaggctgtatacgtattttctagccaaacggccaaattcaggatcattaatatcagggtagacccatgtatcatttccaaatccaatagctttagaaatagagtagaacacacatgcattccagtggataatgatgacgatatacataacaaggttggaaatcctgaagatgtttggatagtttgtccttgtttctgttctctggaagaactcaaacatacgagagaaccgtaacaacctgtttaatctaatttctggatagttccaccctaacttaaaatacagcaaatcagttggtatcagtgacagaacatcaagtttaaattgcaagttggatttatatttatttatgagtttaagttcttcctttaccagcagtccttgttctaggtaacctaaaatagaaaataaaatcaaattccagtgtttctcctttttatgtcattgtggaatttttgtgaataactgtcaaattaactttgttgaggtcaacagaaaattcattttcaataaatatgcctttaacaatgtaataaaatacaaatactaataaacctatggctgtagaaaatattctgctgtagaaataaaaggtaaaattttggccagacagctcacatctgtaatcccagtgctttgggaggctgagacccaatatcacttgagcctgggagtttgaggctgcagtgagccatgatggcactactgcattccagcctgggcaacagcgagaccctgtctcaaaaaaaaaaaaaaaaaa

SEQ ID NO: 212609 - DNA, 894 bp, Homo Sapiens
  misc_feature (762)..(762): n is a, c, g, or t
  misc_feature (827)..(827): n is a, c, g, or t
gaactgccaagttgatagaatttagtcctctgagggcaaccgatgtaaaactcccaagtggagcagtgtttgtgattgccaacagttgtgtggagatgaataaggcagcaacttcccatttcaatatcagggtgatggagtgtcggctggctgcgaagctcctggctaaatacaaaagcttgcaatgggacaaagtactgaggctggaggaggtgcaggctaaactagggattagtctagaagaaatgctgttggtcacagaagatgcccttcatcctgaaccctataaccctgaggagatctgcaggtgtctgggaattagcctggaggaactccgaacccaaatcctgagtccaaacactcaagatgtgctcatcttcaaactctatcagcgggcaaagcatgtgtacagcgaggctgcgcgagtgctccagtttaagaagatatgtgaagaagcacctgaaaacatggtccagctgctgggagagttgatgaaccagagccacatgagctgccgggacatgtatgagtgcagctgccccgagctggatcagctggtggacatctgtcggaagtttggggctcaagggtcacgacttactggagcaggatggggaggctgcacagtatcaatggtacctgcggacaagctgcccagctttctagcaaatgtgcacaaagcttattaccagaggagtgatggaagcttagcaccggagaagcaaagtttgtttgctaccaaacctggaggtgggggctttnggttttgcttgaggcctgaaaaaaatgtaaaaagtctgaagagaaactacttaggggcacttagngaattggcagggactttccctgtgccacagtaaaattaatccttcccttctgtttttggaataatga

SEQ ID NO: 212610 - DNA, 996 bp, Homo Sapiens
  misc_feature (838)..(838): n is a, c, g, or t
tgataagctgtgagtttgcacacaatagcaactggtatatcactttccagtcagacacagatgcacaacaggcttttaaatacttaagagaagaagttaaaacatttcagggcaagccaattatggcaaggataaaagccatcaatacattttttgctaagaatggttatcgattaatggattctagtatctatagtcaccccattcaaactcaagcacagtatgcctccccagtctttatgcagcctgtatataatcctcaccaacagtactcggtctatagtattgtgcctcagtcttggtctccaaatcctacaccttactttgaaacaccactggctccctttcccaatggtagttttgtgaatggctttaattcgccaggatcttataaaacaaatgctgctgctatgaatatgggtcgaccattccaaaaaaatcggtaagataaaaaccatagctgtaatgtattttaaacaattcctaatggatcttaaggcattaatagcaatgtttgttgtcaggctcagtaataaggtttggtggattttttgtttgttttgtttttactaagtgtatatgaacagtttaatctagaattcgtaaaaacactttgacctttgagttggtaatgcatgtaacagacttgggattcagattttttttaataataaaagagaatagaaaaaatatttcatgacaccagtctctgacaaatctggtgactaatttccatttagtatgttaaatgggtagcattttagagaatgaattctttgaagatataaatgttgttaactgaattgtgtaataaatggttgggatgtatgttattcanggtttttaaaggatttttgaaatgacacccaagaactacagtgcacaacagacagtagctaacatttattgcacatttaatatcaccaactcctgttcctagggggctttacataatttaatcaggttactttttttcaaaacccttttataggtgcc

SEQ ID NO: 212611 - DNA, 897 bp, Homo Sapiens
cgttctccagttaccctccttgctgcagtcatgagccttcctgaggaacacaacaaaatggtctactttgccatctcggattatgtcttcaacacggccagcctggtttatcatgaggaaggatatctgaacttctccatcacagatgacatgataccgcctgactctaatatccgactgaccaccaagtccttccgacccttcgtcccacggttagccaggctctaccccaacatgaacctggaactccagggatcagtgccctctgctccgctcctgaacttcagccctgggaatctgtctgtggacccctatatggagatagatgcctttgtgctcctgcccagctccagcaaggagcctgtcttccggctcagtgtggccactaatgtgtccgccaccttgaccttcaataccagcaagatcactgggttcctgaagccaggaaaggtaaaagtggaactgaaagaatccaaagttggactattcaatgcagagctgttggaagcgctcctcaactattacatccttaacaccttctaccccaagttcaatgataagttggccgaaggcttcccccttcctctgctgaagcgtgttcagctctacgaccttgggctgcagatccataaggacttcctgttcttgggtgccaatgtccaatacatgagagtttgaggacaagaaagatgaagcttggaggtcacagctggatctgcttgttgcatttccagctgtgcagcacgtctcagagattcttgaagaatgaagacatttctgctctcagctcccggggggtgaaggtgtgcctggcctctggctccaccctcctcctcttaacagggtgcatgcatggccctctcttgagcctggactttgctcccccctccaggaggg

SEQ ID NO: 212612 - DNA, 729 bp, Homo Sapiens
  misc_feature (644)..(644): n is a, c, g, or t
ttttttttttttttttttgccttttactttaaatacatctttattgtctgaattttttacataagaatatatcattttataaattaaaataaaatttcaaactaagtggtaagagttttaaaatctctaaactgtatagatgatagagagagaaagatctagattggtccatagttatttctaagatacatttactgaaagttgacactataggatttggctgacatgacaagaagaacatgaagaaaattatccttttaggattaaaagaaaaaagcaactaatttcgaatcatctaggtaaaatgaattaatataccttgatggaagtccacaccaatttcaaattggctggtacttcatctgccctctcttctttgctaattggcaatttgctaaggatgaacaagacacaggatgccttttatcagcaggaaatttcacctacccttttcaggaactgcctcaaataaggtttcaaccaatttagcactgccctcaaagaagcctgaagctgggagatctgaggtttttggacacaccaacaaatacaaaaggagagaaatggtctccagtcacagaaccccgccttcgttcaagatcaagtctgagctggcaaactgaatggttggaacctcaggccanagcttttatcacaacagaactttgttcttaccatgtctagcctattcctcggagactctgtttccacagaccaggaaaacagcac

SEQ ID NO: 212613 - DNA, 795 bp, Homo Sapiens
  misc_feature (715)..(715): n is a, c, g, or t
  misc_feature (723)..(723): n is a, c, g, or t
ttttttttttttttttttaagattatcttctaaagatctaagctgagcagtactcttaaaatgaaatacacatgaaaatgttagaatgaaatataatactcatctttaaatgaagctatgtctacctctcttttaattaaaacgtagtcactgtataaggtttaagatttgttccaaaaaatctaagtgactctgtataaccacattagcataatctgaagtaaacttctctaggaacaaggtaatcgagatgaaatacactaataattcaacaattaaaaactataaactaggttgtcctacttttggtatgatctagctgatcatattactgtcaaattttttagagttgtgtttgcaattatgaatgtcttaatttactcaagaaagttccgaagcaagcgccaagacacttcaagaagcagctctccagggacaaactcataaagcatagtttaagaaaaagatcctttctctagtcacaaaggttatgagaccagctcccaccatgcccactgggctcagaagagttttgccagtaggaaggacatgactgtcaactcttgacacttaggttccacttccaatcttgactccagctcccggcacagaggaatacagacaagcctatacttcttccccaccctaagcaactgatacaccacaagtggtatcataactcagactgcagctgcttctccagaaaccaggtgantaagacanacatgagaaacctacagagaggaatggtgaatgtatctcatcctgatctggcacagactgactgggacatta

SEQ ID NO: 212614 - DNA, 689 bp, Homo Sapiens
  misc_feature (650)..(650): n is a, c, g, or t
ttttttttttttttttttagaaagaggattgtaggttttattgactaagaagataaagggatgcaaattagttatacaggttttaattccagacaacagaatagtggctattaacaataaaatcagtaagtattctggacatgtttaacttgaatattcaggtaggggattttattggaaatacggatctagagctagtggaagaagttatatttaggagtcatccacaaagaggcttgagaaacaaatgaaaatgtattgagaagtgcatagagaacaatgttaagggggctgtggggaaaaaacaacatttggaagataactgaaggaaatcatagaggaaaaatagtacaatctaatttttctccctaactgaaagcaaaaccacttttaatactaagaatttattatgatctctccatgatactaccattttttcaatcccaacaatcatcatcacatcccagagccatctcatgacaagagctttctaaatactaattgcctgaacactgaagaaaattaatatctgatactaaggtgtaacttatttctctataattaaaaaaaagggggccaggcacggtagctcatgcctggtatcccagcactttgggagggcgaggtgggtggatcaccatcaggagttnaagacagcctggtcaagatggtgaagccccatctctact

SEQ ID NO: 212615 - DNA, 700 bp, Homo Sapiens
ttttttttttttttttttcaggttttcttgtgtttaatttgaaacgtccagtaacattaaagaacagcatttgatttgcttaaacaaagtagtaacagctgaagttccttccaaatcacttttctgattctctaagaggcttgcctatgccttgcagatctagcttcacctacaagacatattctgtaaggatccaggttcagcaaggtgtcagaatgtcctaagggtttctgtcccggcgctctgcctgtcccgcttgtgcacaatgcttttgcctatccctgtttctgcatagattttagtcttcccaccagggacgcaactgtcagtttcctccgtctctctcggttctattccaatctgctcatctcccctcccgtccccgctttccccaaggacctactgagatttcgatcccacaacttagtgggtcccatctcacccaggccccgcaatcctcgccttctacttgtcagcgttgtactacactctgagcaggcacccctgtgctactcacggaagcgggaccattaggtcggccattcctcctcaccccacgacacgcacccactgggtcgggccgcctccttgcagggagtctcaaggatgggctggcgtcagggaggggcccagggggcgctttcccaacactggtcgcagtcattgttggtataacggctagagacgcccagtgagttag

SEQ ID NO: 212616 - DNA, 756 bp, Homo Sapiens; identical to SEQ ID NO: 55336
  misc_feature (597)..(597): n is a, c, g, or t
  misc_feature (690)..(690): n is a, c, g, or t
  misc_feature (731)..(731): n is a, c, g, or t

SEQ ID NO: 212617 - DNA, 770 bp, Homo Sapiens
  misc_feature (557)..(557): n is a, c, g, or t
  misc_feature (752)..(752): n is a, c, g, or t
ttttttttttttttttgtcacacatcagtttattgagaaaatcatgatgctatatgttaattctcttcaagtgattacttttcattatgtcagatgagactccaaaaggccatagccatgaagttagacactttcccatattttgttcaggaacacaaaaaccaaatgcaaagaaatgtttaagagaacatgaaattggcctcttccttcccccaaccaaaggtagtcattaacagtcaggaaggacaaactgaaacatgtaaaaagcaaatatttttgctagattttattttcaaagtttcaaacctttccaattttttttttattttttaccccaaaaaaggtatcaatacttttcattccactcttgtcaactttagccaaagccttctgagctgcagtcattttgctatttttcttttcagtcttcaaatctttagtattaaacttagtgtaatcttcttttgcttctacaggctcatctgataactttattttctttgatggaggatttggcaatgaggctgaaggttctggaagctttaagtatttagatnagtcatcacttaattctttagggatgtagtcagatatcagaccatgggcataacgaatataatcctcttccttgtcagtggaagcttggtcaccagagaaaaatgcagttgactgtacccgggaactgacattcacattattggtttttaatgctgcacagtttgattacctttttttccagccactttaatgtnctctctttgctgtacttg

SEQ ID NO: 212618 - DNA, 633 bp, Homo Sapiens
ttttttttttttttttttaggggtaagaggtagtacactttattgaccgggttctctcaacatgttgcaacctctggcaaagccagatcctgggctttgccaccatcccatccaccaaagacagaagagaatgcatctcatgaacatccacgtggcctccagacagcagagcacaggggcgggtgtggggagggaggctgccagccaggggtgggtggacgaggggcgaaagcgctgggtgccgggctgggggcacccctgaggcccctccagacctggccagcccctcactcccccagttgaggtttcgtgtggttcacagtgagactggcttagattggcagcgggcgatggcagacagatgccctccacgctccctacccgccctggccagactcacagagctggcaagagggagagacggaaaatcccgttccccgtgtctccctccgggacagggaagccccttctctggaggggtaaaggggagaggcctagtctctggacatcccccaggctactaaggaagggccattcactcctggctcagaagtttctagaacatcttggtgaaagtgcccgccattactcccaattagaaaaaggtttttgaaatctaggagttgactgggg

SEQ ID NO: 212619 - DNA, 777 bp, Homo Sapiens
ttttttttttttttttatagtaggtttatcttttattctaatgttgctagaataagaacaaaattaaaataagcacacacacacaaaatgcctctgtgaatcagtcacaggatttctctaagtctgggctggtgtcctttctcttctgctgcttgcatagctctttgatgttctctatctctgcaggactaaacttggaggttagcatcacattgtcataatcaaattcttcatcaagtgaaaaaagttgaacttcatctccaagtatctcttccgtctgtttgtccattcttttaacactgggctttggcttcacttcacaggtaggaggctgggccacaaaagggatacaggaaggaatgctggtgcttacatcctgctccacttctcctggaagcagcagcaaatcctcactcatttggggtttaatctcttcatccatgtccaaatcttctaaatctaggaaattatctacctgttcttccaaacattgtgatgaagtacgaagaaagatggttttatttctaagatggtagtcatctgcttcatttttatgagtaacttttgctgaggtaaaaatgttttctgaagaatcagttccaaacactccccttttggacacatgatcctcttgtgaaagatgagtaaaagtgttcagaaattcttcatcatatgtttgctcatgacaattaaggaatttatccaagacgtctttgattaattgatcttcatccattatttccaatcctgacatatgggcagacattcctattcatg

SEQ ID NO: 212620 - DNA, 756 bp, Homo Sapiens
ttttttttttttttttttcaactaatttttatagttacatcagcctgggctaattatacagaaaatttatacaaatacacacaaaaccaaaaataccaaaccaagcaacaacaaaaaaacaacccccaaacccaaaaactctcattccataaggtgacaaattttacttctgagaggtagtacaaccaaccaaatgaatactgtacgtgcattaactgaggcacttaagatcacccaacctttttaatttataaccaaatctctcctcttcaggatttcagtgctcatgaacaagtattatattagattaatggtctcaatttattctgacaaaatcttactttgaagtttagtcatttagaccttaaagttacaaaaataaagtatttctatctcaggcaagtatttaatttcttaaaagctagtaagaaatgaaaagatcaatgtggagagaagtatgatttcttaaaaatgggtacatattttagttttttaattgtgaaatacattatgacctgtaagaacactgttcttcctattctattcagggtcattttaacatgtgagccttcagcttcattttgtacactacaaacaggaaaacataaacatcatgaatcagtttaggcagagatgtgattaagaattgtaaaagatggctttcataacatacataaaattccaaacactttgcatgtgaaaattttctgaattattaagcagtagggtgatctcagtgagacttggcttcatatg

SEQ ID NO: 212621 - DNA, 746 bp, Homo Sapiens
ttttttttttttttttttaaatccaaatacaaaagtgtttagaagtttattaaacattttattacacacctgtattgcctaaagtttctataacaaacatcttacattggaacgattttcttgtttttattttctacaaaaaaaaaagcggggggacgttaaaattaagcatagaaatggtggaactttgggatttcctgtccagtcacctgcgagtcaggttttattccaattgattcaacgtggcagattaaatgtgaaaagtaaaatggtgggctcctttaggcagcaagtcttgcttctctcctggttacctctgcctacatagatatttggttaagcaagatgtttatacccccacacatattctagatagttctggtcatgaagtaagtcacaattttccatatctgcacaatttttaaaaaatggaactacccatctgcacaaaatctttgggagtgcagggtaggccaggcagtggaggagaaattgacaccaacttccctgagagcttccaaagtaagaaagcatccctttttcctacgtcaactcctggttgcatgctggaaaatgcagcaagtgaggcacaccaagcatagacgcaaaaatcggaacacaactgtaaggtagccaggctggcaggtgtagggccgaaatggctgcacaccaccacactaaaatgtctgctacagccgcacatttacaatcagtttggtgatgtttccaacacaggctgggggatt

SEQ ID NO: 212622 - DNA, 681 bp, Homo Sapiens
  misc_feature (620)..(620): n is a, c, g, or t
  misc_feature (627)..(627): n is a, c, g, or t
ttttttttttttttctttcctataaaattttatttattacataaaaaattctatacatttgttagactaaaatacagttttcattataattctggcaactgagtcagtacacagagaaaacttagcattagatcagcacttttctttctagttcgtatttctgcacaagaaaaacatttcaaagctccgtttcatataggctgattgttctctgaagccagatggaattccatccaattcagagctcttggaagttaatttcccagcaagatttgataactccaactccagaaagttaattgcttaatatacatatttttaaagtcctctgagagcataatgctccatctgtaaagtctgcactgtgtcaataatgaccgtcacaaatactagggctacaactgtgtctgtggggcatgttcaagcacctacatgtttgttcccccacatgaatacagtgtagtgacactgtaataagaaaaaaatccaaaataatggtaaggtaaatgattccaaactatgaattcatggaaggcttaactgtgatcctccagtttataatggacaaagacaagacaagatacaaaaattcatttttggcactatgaaataggatgcanatggcanaaaaaaaaaaaaaagcctacagccgcggccgctccaaccctcgtgccgaattct

SEQ ID NO: 212623 - DNA, 626 bp, Homo Sapiens; identical to SEQ ID NO: 55896

SEQ ID NO: 212624 - DNA, 702 bp, Homo Sapiens
  misc_feature (607)..(607): n is a, c, g, or t
ttttttttttttttttttgaaggaggctgaacactggggagctttaatggcctgttacagggtggcagaaacagtggctgggtctgggagtcacagcaaaatcaggcgcccagaaccatggtggaaggtggggttgctagttcatgaaaacttgaaggacattaggaagaggcggcatttgatgctgtcaagtaactacacacagaacaagggcatgataaaagtcctaatgcacatagagaacaaagccctgctcagaaatgctgtcctcaccagcagaaaggactctgctccacagagcagtcctttctccaaagctgtcccttacataaaaaagaagaacatactgggttagcacttgatatccaagaagtgaaatggtcgttttcgaagattaacagtttgcttcaccaaatccctctgaggtaggtaagaggcaggtgacattagccccattttacaaatggggtaaagtgaggccccaggacctgttacatcacgaatatgcatcaacagccacaaacagcacgctctcagatcttccccttcacttagcttagaaccgtgtcagcaggtaattggaaaaacatggaccatttcgctgatnattttaaacttggatgtactggcaagaaagggctctatattttgaaatcagccaaagccaggggacctgggaacctgtgaatgggggtacccact

SEQ ID NO: 212625 - DNA, 748 bp, Homo Sapiens
ttttttttttttttttttaatatcagaaatcctgaaatagcatactgtaagaatttggacttcacttaacccaagtaaatacaaggaagatttttgtctaagaccctctccacaaagacaacttgagagccaggtaaatggctacatctgaacaaaatattcatagcaggtatgttttccaggtctttctgaaaaagcagtacctactgcatacgatgcaatgtaaattgttgaaactccttgaaacagatgggaaatacaatggcaggggaaggggtgggtgaagaataacttacacttgaaataagagatttcactgtatcaagaatctttatattaaaagagctgcattaaaaacaaaagcaaatcaaacccaacacataatgagaaaatgcaataatttctgaggtgtggtcttctttggtgagttccactgggatatatttatatgctctctttcaaccaggccatcaccaaacaattgtttgttctgtacttaacaattaaaactgacaaaaagactttttcatcatgagcttcaagcagccataggagttaagaacacatatggtgcttttatatttacacaagcaatctctcatgagtcctatagagattggggaaatagagctataatagttattcctttttagaaagagacttgtaaaatacggaaagtggttagataaatatccctctatacagaattgatcagttaaagactttagaaagtcagcattcatacctg

SEQ ID NO: 212626 - DNA, 619 bp, Homo Sapiens
ttttttttttttttttttgatttgataaatgtttaataatttatcaaactcagaaaattttgggacaaagtaccatttaaagataaagcaaataagtacagctaaatattgtaatagtgtataggtgttacactgaagcctgtgtataagcattaactatgtaccaataaatgcaaagaaaataaactttggttatagcttatctaaattaatctcagaatttgacaattaaacatatgaatttgtaataaacattctgcatttttttaaaattcatcatatttgtaacagtgccaaaataatctaaaatcagaacgctttctgagtataattatattattataattctctaccttgacagatgacaattttagaacaccctaaatacaatttctagtatatgcactaaaataaaatgtaacagatagacaactcaccatagtataagtaacacattcaaatttagtaatttattttccaggtggaaaccaggcttcttggaagacttcaaactatgccaaatggtctgatttcaccatagaggtaggcactagaggactaaatttacttctgtgtaatttttgttagctacattttacatgcaaatgtccctcgtgcc

SEQ ID NO: 212627 - DNA, 660 bp, Homo Sapiens
  misc_feature (187)..(187): n is a, c, g, or t
  misc_feature (533)..(533): n is a, c, g, or t
  misc_feature (540)..(540): n is a, c, g, or t
  misc_feature (558)..(558): n is a, c, g, or t
ttttttttttttttttttcctcttctggagtttatttgggagcagctgggatgatggggaccccacatccatagggctgggaggtcagggcaagggcaaggggaagaggaaagaagggtgcctggagaggagcagaactggggttgccggccaggccagcagagcgacaccctagaccgggccgtanaagcgccgataggcctcctgaaagccgatgtggtcagccaactcgtcacagtccggattgagctcacacacctccctcctgggctccaggggatccgggtaggggactggggctcccagccattgatacaggtagcgcctgggtctcttcactacctcgctgccctcctgcttggacacaaaggctgcacctttgctggactctgcaccgctgggcttcgcacctgccaggcctgctgctgggcctggacctgtagctgcagctcctccacctgcctccgccctgccaggacggcatctgccagctgctggttctcggcctcctgtttctgcacatggcgccgcanggtgtcncgttgctgcaggaagtanggtgccataacactgtgcagatccttctctgggatcccgctggggcgccaggctggctctttgcggactttgccttcttccacaattttatccaaggcattc

SEQ ID NO: 212628 - DNA, 416 bp, Homo Sapiens; identical to SEQ ID NO: 54376

SEQ ID NO: 212629 - DNA, 1000 bp, Homo Sapiens
cccaaggcgatggcatcactggtgggctttgggagatgaggaggatatgaatgggaccagtagcctcataagagttttgagggtcctggttgcccttccccaccctcccgtccctgccactgggtgaggacacagcaagaagccgccgtcctgggagcagagagcagaaagcagccctcaccagacgctgaatctgctggggcctcggtcctggacgtcccagcctccagaactgagcgatgaaattctggttacaaattgccccctctgaggtattttgttttagcagaaggaacagacgaggatgaccaccgaggcccttctcaggctgccgcgggtctccaggatggggacagtcagctggggccaaccgagctgcatgtggtcaagggcccatgcatgtgaccagggcccgcctcccacgtcacccagtgcaccctcagcatgggacacggacctagacactgccggggtctccgtccttgcaggcactgccaggcgcccctccctgggagaagctgcagctctgaggctacggtcttgcaggtcagccaccacctggctttgtggtctgttatgcccggcctagtgtccagggtggtgacatttatttgaacaaagaccagtctccaccaccaaagtcatggctctgctgttgcttccagaaccaaagaaaggctggcttctgggctgggcgtggtgattcacgcctgtaatcccagcactttgggaggccgagacgggcagatcacgaggccaggagttcgagaccatcttggctaacatggtgaaaccctatctctactaaaaatacaaaaaaaattagctgggtgtggtggcacgtgcctgtaatctcagcaactcaggaggctgaggcaggagaatggcttcaacctcggaggcggaggttgcagtgagccaagatcgcaccactgcaccccagcgtgggcaacagagcaagacgctgtctcaaaaaaaaaaaaaaaaaaaaaaaaaaaaa

SEQ ID NO: 212630 - DNA, 478 bp, Homo Sapiens
atatattgttaagactttgttaaaaataactctttacacagctttcggaaggtaactggcaaacaaggtttacaagtaaaagataaacttttcaaactaaaatcagtttgttgtctttacgcaatttacagaagcaagttatgattcaatttaagtatctgaagcagtttccacaataaagcattcccaagaaatagaaaacggagcttagataaagcaccagctgtcacattgtcaccaagttaacactggttcctcactggtctccataacatgatggagagcaggagaagaaagggaaggaacacttagagaggaaaaaaaaaaaaaccctgaaatctgaaattacatttacttagggcatcccctaaaggcatcttggttaggttattcaatttctgaggggcagaaaaagattatagtagttaaggcttgagatcatgcattcagaataaaatacaatcactgatacataaac

SEQ ID NO: 212631 - DNA, 573 bp, Homo Sapiens
gagagccagaacggaagtcttggttttatttatagttgataacttacatccggcctgctcctcaggaagcacagcagggaggagacagagcccaaaggagacggcgacaaaaatgcccaaacccctgagctaatgtggtgactgagagcaagcctaaagctcccttctgagctccccagcagccaaagcaaagagagaaacagggtcctgcagcatgatgtcacagaaaaccagggaccctggagcctgggttccaataagaaccttacattctgacgccttagatttctccctggaaaatggggagaaaaatactgaattggttgggagggccatgcaacacacccagcacagtgtctggatgcatttcagaggccccaccagtctagggtctacagaaagacagtacaggcgcctcactctccatgcctgtacgcatggcagacatcactcatggattgcaacacgcttccctggagccagatgcagcctcgtagccccattgcacaatgtctccaggggctaccaccaatgccccagtcggctggagctgaacttgcgtgtcctcccagc

SEQ ID NO: 212632 - DNA, 455 bp, Homo Sapiens
tttttgtgtttttatatacttttaatttatttcttatataaaacatggcacagagtgaggagagggtcatgttctccacttttacccagaactcagccatacttgtttcttgaggactggaaggtttggacgtatggagcatcaatcagccaatgtgaacgaatagtggttttcttctggggtggcttcacaggagctgatgtggacaaggggtggggtcaaagcagggtggaccaaaatggctcagggcctgcagtgccaaacttgactggttatcttgaggagggctgttatctggctctcagacctggagtttaatctctggtccaggttgcttatttttgagatgtttctctccagctttaaagtaccatgattctatgatactacttcttctcagtcatgcagcatcagaagtgggctagttcccctcaagtctcttagcccctagtcaa

SEQ ID NO: 212633 - DNA, 476 bp, Homo Sapiens
tattttcagtagagatggggttttgtctttttacccaggctggttacaaactcctgggctcaagtgatccacccacctcagcctcccaaagtgctgggattacaggcgtgacaaccatgcccggctccatagttcaatgatcaaacccagaaggttaacttcgatacactaccattaactaaatgattaccctaatttgaacatcacgagtttttccattcctggccttttgttccaggatctcacactgcatttagctgaactgtcttctttgtctcctccaatctgttgcagcccctcaatctgtgtgtcgttcataaacttgacacttttgaagcgctggtcactctgcagaatgtctccccgtttgggttggtctcacgttttctcacgagtagggagttgcgcatcattggaggaatgtcacagaagtgctgcgcctcagtgcacccactggctgtgcctcctgctttggc

SEQ ID NO: 212634 - DNA, 377 bp, Homo Sapiens
cttggttctcattggttataacacagtagcttttaaaagcaaattttcttcagtaagttgaaaacaataaaaaagtatgagctccctctgctggctctgaagtggcatatcaaggtacattttgtttatttggaaacaaactggcacacggtacatgccattaatgcaatttgctaatattagggagaataattttaaactgttttccataattttataaaagttaaattatgctaatgtgccactaatattggcaagtaagattagcatttcaatataagtgttaaagttgtattcactatgtacctgagctatttggtatatccctatatagtgccatataagtgtgttgaacaggaaaagtttctgcatgcacc

SEQ ID NO: 212635 - DNA, 501 bp, Homo Sapiens
tttaggttcttaaaattttaatacaaaagttattcacaaattggttaaaaagtttccatttcctttttgaaaaaccttattgaaggtgagggggaaaacacactgcatgtaaacaccattcttacacaaaatcctgctccaaaaaaccatggtttgtatattaaaaagcaaagaatgctccctcctttacattcacaacaaacttccattagaaattctgctgtgtggtgatgaacagaaaggtagtcccatccagctcggtgtcttctgaaacgtcacctgccccctccacaagagaaccgctggctgcataataatgggcaccaggagaccgcggtgctgggtcttgttggtttgaacaagcaaaatgtctgcatggtatctcggctccgcaaagaacctgtcaatgcattctccacaccaggcggacaatgtaacgtaacagtcgtaagataaccattcgtgggtggtcttcggctgcttggtaattattcaaaaata

SEQ ID NO: 212636 - DNA, 570 bp, Homo Sapiens
ttcatattcttgttaaacctcatctagccattaaaaattactaaatggggctggtaactctagtaccagtgtaaaattgcttctggggaccggaatctatgtagtaacaggaggagtgtcaaatgcagaaggtaaaggatatttaaagcgaaggcaatcttccagcttctgtggactgagtcttacttaaaagtggtacagtggacgctactggataggctctacaccaaacttataccttgctattagtacacaattcagaccatccttcttaaacataaaaccattttcagatgttagaaattcttctgcaacaattttctaaacccattttaaaaaactgcatacctgtctttaccagaatttctttttatcttcatcggtcacaaaggaatagttgtgtttttgttgtttcacagttgtcttaagtattatctaaaacaatacaattatttttattctgtttgcatgtcttccatgtttttacagggcagagtattttactctctcggcttccacattttttcatgtcattattaaactcatggagaatacaaccagaagctgagc

SEQ ID NO: 212637 - DNA, 1000 bp, Homo Sapiens
agaaccttccgttgttggtgtgacgtccccacctgctgcacccttgagtgtgaccccgaatcccaacacgacttctctccctgccccagccacaccggctgaaggagaggaacccagcacttcgggtacacagcagctcccagcggctgcccaggcccccggacaggagtaaccgaggccgcccctcccacgccccccagcgcacatgtagtcctgagtcctccctgcctgagaggccactggccccgcagcccttgggaggcccccgtggatgtggccctgtgtgggaccacactgtcatctcgctgctggcagaaaagcctgatcccaggaggccctgcagttcccccgacccgcggatggcagtctggaataaagccccctagttgcctttggccccacctttgcaaagttccagagggctgaccctctctgcaaaactctcccctgtcctctagaccccaccctgggtgtatgtgagtgtgcaagggaaggtgttgcatccccaggggctgccgcagaggccggagacctcctggactagttcggcgaggagactggccactgggggtggctgttcgggactgagagcgccaagggtctttgccagcaaaggaggttctgcctgtaattgagcctctctgatgatggagatgaagtgaaggtctgagggacgggccctggggctaggccatctctgcctgcctccctagcaggcgccagcggtggaggctgagtcgcaggacacatgccggccagttaattcattctcagcaaatgaaggtttgtctaagctgcctgggtatccacgggacaaaaacagcaaactccctccagactttgtccatgttataaacttgaaagttggttgttgtttgttaggtttgccaggtttttttgtttacgcctgctgtcactttcctgtctttgggtccctgaacttaacagaattatttagttgctgcttagacagaaatgacttttttccttagattttccc

SEQ ID NO: 212638 - DNA, 499 bp, Homo Sapiens
tttttgagacggagtttccctcttcttgcccaggctggagtgcaatggtgcgatctcagctcactgcaacctctgcctcccgggttctcctgcctcagcctcccaagtagctgggaccacaggcatgagccaccacacccagctaattttgtatttttagtggagatggggtatcaccatgttggtcaggttggtctcaaactcctgacctcaggttatctgcctcccaaagttcccaaagtgctgggattacaggcatgagccagggcacctggctcaactctcattttaactggacttatttctttcaacctccaagcaagcccacaaacttatttgttctgtttttgtctgctcagaggaaaatgtggtcatgttggaggagaaggcaacttcactggctctgaaaagccaatgaaaatagtactttgcaaaaagttgtgaataactctgcatgtcaaaattactcaagggcaaaaaacaaaaacaaaaatgaaac

SEQ ID NO: 212639 - DNA, 446 bp, Homo Sapiens
ttttttttcatgtgacataagatttattgattttatatcagcatttaaatgttgttaactttatgtaatagcatttaggttaaggattagtgtgcttctggttgtatgaaggatagctgtattacgttaggtgtaattatgaccttattatttcctttatttggagattaaatatgatttcaggagatgtgtatgggttcaagttgacaaggggttcaagttgacaaggacttgtgatgttaatatatcaacctgatcagattgaaggatgcctagatagctggtaaacttgttcctgggtgtgtctgtgagggtgttgccagaggagattaaaatttgagtccgtggactgtgagtggcagacccaccctcaatgtgggtggacaccatctaacagctgccagtgtggctagaacaaaacaggcagaaggtgggataagttggct

SEQ ID NO: 212640 - DNA, 450 bp, Homo Sapiens
ttagatggaatctccctctgttacccaggctggagtgcagtggtgtgatttcgaagagagccctttcttgatatactttgtcatcttctgctagaagttttttatactcattatacaaacccaccctatctgtgatgtacacaccctgtatggccctgcttccaccccagcaaaaatgcttgtggaatgaatgaatggattggtggaagtcagggggactggaacatctgcaaacaaatgtcagtgtgtgtggccagtgtctgtgcacctttcttgattgactgaatcttctgtgcattgatttcatggtattgggcacagaatccccttttttggcccttaaccaccaaagatttgtcaagcacccactcactgtgttcacttggggaattcagacatgaacaagacacaatttcttgatttaagaagctgagattctagaaggccagg

SEQ ID NO: 212641 - DNA, 484 bp, Homo Sapiens
gctcgaccaggagaatggcatgaacccgggaggtgtagcttgcagtgagctgagattgcaccactgcactccaggctgggcacagagcaagactccatctcataaaaaaaataaaaaaagacaaaaagaaaacattttggtcattaaaaaacaaaataaaaatgatacgagagagcacccagggattataagaggaaacactttattacatcactcatctaacattccagaaaatggaaagtactctactgtacagcaaagtaaatcattggttgtctggagaacagaaagaaagcctttataaaaaggttccaggtaaatataaaggtgttaagctcattattgtgactatgttaatggtttcatgggattatgtgaaactcaagatttatcacatgctacagcttaaatatgcatagcttactgaatgtcatttataactcatcacagctttaaaatatacttcagactggcaaaaaaaaaa

SEQ ID NO: 212642 - DNA, 535 bp, Homo Sapiens
caataaagcttaactctgagagataaagatgacttcaaatatcacgcccccaagtatatataacactaccatatccaaaacaaaaaatatgactgtatacatactcagggtgttaactacgtaaggcagtggtcgcaaactggtggcccccaggctcaaacaaatgtttggcccacatggtgttttggacatttttttaattacttgtttaaaaatcatcaagtttcactttaaaaaaaaaaaacctgatttccagcttgttgccccatttttttctgcatggctgagcaatggccccctctttaaaggtgggcacagcttcccccccacctcccacccctgtttctacaggctgctgagtttgcgacccctggttggaaatagcactaaaaacatgtttcctaacccaaacctctctcacaccctcacgccattttcacttcatttccccttccctctcttgcttcactttcatcttaagtcctccttccccaggtctttggatttctcttggttcactcgaattctcctttct

SEQ ID NO: 212643 - DNA, 533 bp, Homo Sapiens; identical to SEQ ID NO: 61772

SEQ ID NO: 212644 - DNA, 627 bp, Homo Sapiens
ttttttttttttttttttagacgttcctttaataacttaaaagacaaagcatacacaaccagcatattataggcatgtaaatacatgtgttcttaaatggatcttcacttggaagaaagtttttcgtccttctcagaaggagattagacacaacatatggtaaagccaaaagcaggagcttatagatttgcatgaaatgaaggcgttcttcagacttcttcataacccacgtgacatcagcacttccttttcccactggtattttctacacttccgagactccgtttctgtctgagcacggcaacacaatcattcctgtcagggtgttcacttgcttttattgtctgcatacatttaattgttgtaagaaacttggcacagtctggaaatccacatgaccaagcgagatcttcagctgtttgcccgttcttattacataaatcaatttgggcatcactggctacaagcaggcttaggcactccaggcttccaacttttgctgccttgtgtagtggagcttctcctaaaacatcctgctggttgaggtcagcgcccgtttgcagctgccagagaagaaagcaagcaaggccgcttcctgcggctaagtggacaggcgactgcttgcag

SEQ ID NO: 212645 - DNA, 646 bp, Homo Sapiens
  misc_feature (1)..(1): n is a, c, g, or t
ntttttttttttttttttcgtgaaatatctgttttaattcagcagtaaaaggcagcacatgatcagaaatatgtagggttgtgaaagagcttgccaggaaatgagagctgttgcacagggtatcagcaactgtgtacagcttggcaaggttttcagtcctgtcctccagggaggatcttgacttctcagttcccacttcaggaatacatggtcaactgcagccattctttgatagacacttgaatcaggccatctctatctctatccagagacttgaaggcacgaaacatggcatccaggcggaccaagcagctgatgaaattgttaaaatccatatctccatcttcattagcataccggcggacaatcatttggtaaagttgttcatttagctggaagcctgcggcctgcagagctccccgcagctgagaacttcccagagacccagaatggtccctgtcatactgcttataaacacactgccatttcttgatgttgttccacagatacttaaattcttcaaagcccagcttaccagtcgtgtcactgtccatgacagacacaatgctccggcaggtgtcaagactaaaaccgtcagtcttaagatctttgtgcttagaaaggactttgttgagaatattcatca

SEQ ID NO: 212646 - DNA, 716 bp, Homo Sapiens
ttttttttttttttttttaccaaagactttttttttctttttcttttaaagctgttgtttcctcaagggaaaactttatctgtgtgtgggtaaaatgttgctctcttaacgaatcgaaagcagaacatgaggagaggttttcagtccctgtgacaaagaacaaagaacaagctcgtgggccttgggcggccactgtcaccctccccgcccctgacatttcccttgtcctctcctcccatcccagtggagccaagagctgagtgcatgtcatccccactctggagcccagagtgtggctttgatcacgcggaggcagctggcctggcctgcaggaaacaccacactctcccctgttgagagcctgggagggcgacgcggcaagtgaggggatgagtgtgcttttagggcggcgtggcagctgccattcccgctggcttggaggacagtgaagaaaacgatggagggaggggttcagagagtttgtttgaccagctgatgtccgcttttcctcaccaagccaagaagtctccccactatctctggtcttggagataaggcctggttttcggaagagctggtctgagcatttgagtctgtgggaggccagaaggttcattcagaggactcttcaggccactcccacgccccttgcactcaccctccttggccccttcactccagcaggtgggaacagtttctggactttcactttcagt

SEQ ID NO: 212647 - DNA, 713 bp, Homo Sapiens
  misc_feature (696)..(696): n is a, c, g, or t
ttttttttttttttttttgcaggggaaagccagctttattgagtaaacttcccaggacctgggacatcttagatctccccttcccccaggagataggacccctaaacctcccctgggtcctaggaccacctgacccaccacttgtagtctccagtgaggaggggacccttatttggcaagagatgaacatgtaagcagctgtccgccggaggaaaggacgatggctgaaaggaatgaaccaccgcaggcggtgtctctcctgtccagctgtggacaggacctccacggcccggccttcctggcctcgggcactggctggcctgggcctgccgtggcagcacagcttctgttgaaggcttggggatggccaggctgccggtctggggcaagatcactcgatctccaggatgaggtcgtcaccttccagtgtcatgtccttggtcacatgaaccttgcggacagtaccctccatgggtgaggtcaccacagtctccatcttcatggcactgagcacacacaggggctggcccttggccaccttggcccctgccaccactttgatgtctatcaccttcccaggcatgggcgccccgatctggcccttcacgtcctttagggccttggggtggaagtgcatctccttcatggcctgggtgtccttgaccaagatggaccgcagctgcccattgagctcanagaagactgcctctggc

SEQ ID NO: 212648 - DNA, 720 bp, Homo Sapiens
  misc_feature (627)..(627): n is a, c, g, or t
ttttttttttttttttttggtcgctgagaatatttattcaaaaacagggattgaaaaaactgtacagagtgtctgctgctgagaactgggcccctgccccatgccactcccccagctacctggcagtgccccctctttggggtgccccctgacaagcccagccagttcattccagtcaaaagggtatcagtggaagcagcaagaaatctgcaggtggtggggagagaagcctggccccagctacccaacgggccctcctccctgactcccacaaggatgcagtaggccaggaagccctaagggatggggagtgcgtgagtgacacccgccatggtgggggcactagggagtctcctggctgctccctgtatccaagcacagagctgaggaggtagggccccctgccctggggctgccgcagctcagacccctgggccagaaactgcccccactctgagagaaagaactcccatagatggaggcagggtagggggtgcatccatgcgtctgggcgttagcggcgtttgggaccccagggtggagtctccttgggcgggtagggtgcagaggcagccccctgctggtggtcctgcctgcccctgcctgtacctcagctggcctcagtanggggagaatttctgccgctcagccttcttgctcccattagctgctgccatcttggcagtgtaggccgccaagccggcggcggccaggcagtga

SEQ ID NO: 212649 - DNA, 727 bp, Homo Sapiens
ttttttttttttttttttgattttgaatagtttattaaaggaaaggtgaagcatcagtttcaaattgtacaaaaggaaaaaaaacctcatattgcaaatgtacaatttacagaattactagcaaaaccaatcaaggagacaccgaaaatacaaaaatttgattgacttcaaactgaactggaaacccattggagtagatatttagcctttttgtgtggcatggtagtctacaattctgtcagcatctgttttccatacaagactgtcacgcaaaggatcaatttgtgcatgtgccagggcacctcatggcttgctccctggccaaaaccacaggcaggcagggctggggtggacagtccagtcattcctgcaccttcacttccagtgaagcccacaattctgggagaaagtgaggccccagctcccctaactggagcccaagaattgctgaattagcagagaagatatttttggtgaccaggtttttttcagaactgtacaaatgttgagaaaaatgttttgtgtctttactaaaaggatgaataaaatcatccatcatcatcttgctttcccgcacaaaagatgatcactgggtgtgcagaattttaaaaaatgtttttcgtatttgataaaaagggaaagcctcatgattctgttgcagctactttaaaaaccagcccagaaacagctgtggatgaattggtttggaaattctgaggcttacttt

SEQ ID NO: 212650 - DNA, 612 bp, Homo Sapiens
ttttttttttttttttttaaattttaacatgcatttattaaatttatatgcagatgactacactactgcaattacagaaatgagtaagaacatactctcaagatcttacagtcattggttggggtgaaagtatttcttctgtcttcatgaaaaattaaaaagatagaaaatcttgaagtattttgctaccttaaaacaactacccaccctacatttgtactaaaataggcttttgcttgttttaaaagcaattctagatgaggttatatttttacaatactgtatctcatctcaaataaatttatacattctttaccctgtctaaacttgcatgcaaaataagaaccagcaagccttcaaacttcaatcacagtattccataggctatattttaagtctattgcattagttgaaatttattttgcagagtatgttaacaaacatattctaacacttaaaaaatcattacaattttttctgtttttgtcttctaaattactctgagcagtgaattactggagggaagatacccatgtctaaaatttgtgtctggtgccagtctcagatttctgccaaacaccagtaggtattcaaaagtgtggtccctttaaa

SEQ ID NO: 212651 - DNA, 519 bp, Homo Sapiens
ttttttttttttctatttaacagctctttattaacaggtattcacaggtattggcatctcaaatcgcttttggaacagttttgttaaaactaatgaaatagtgcctgtctctttcaccatctatcttgaatatcaatgagacaatccgaagcacttccctgacctcacctagtctctgggctgtgggaggagtaaggaagagctgtccgtttggatttgggctgagagggacagctattcttttgccggtgcacgttaactcagctcctttgggtctgtgttacagggatcatgtaccgcaagtcctgtgcatcatcagcggcctgtctcatcgcctctgccgggtaccagtccttctgctccccagggaaactgaactcagtttgcatcagctgctgcaacacccctctttgtaacgggccaaggcccaagaaaaggggaagttctgcctcggccctcaggccagggctccgcaccaccatcctgttcctcaaattagccctcttctcggcacactgc

SEQ ID NO: 212652 - DNA, 438 bp, Homo Sapiens
agatagggtctcactctgtccgccagtgttgagtgcagtggcatgacttcagcctactgcaacctccacttcccaggctcaggtgattcatccacctcagcctcccaagtagatgggactacaggcgcatgcaccacacctggctaattttttattttttgtagagatagggttttgccatgctgtccaggctagtctcgaatgcctgggttgaagcaatccacctactctggcctcccaaagtgatggggttacaggcgtgacgactgcacccagcctaaattcaaaatctttttaaaaaatcttgttactccttccacattgctgattcattccacagagtatgaattccagttctgctcttaactgatttcagaaccaattgtttctgtatgttttctgttattacatcccattatctccataggtctttctgtt

SEQ ID NO: 212653 - DNA, 509 bp, Homo Sapiens
agatgcctacagatttaaaaatgataggtaaacattccttttgaaactaaaaatggagaatagtccatgtgttctggcatatgcaattcaattgctcagcagttcttattgacaccaactttaaaaatttactcttaatctaatcatttctcactgctttcatttctctcaaccaagccatgatctctgatctcttaccagggttaatgaaataggctgtacttggtttcctgacttccattgtgccaaaccccactacagcctgtttgacacacacagaccacactatactctcattcagattgctgcaataaaacttaatctactttttctacaaaaggtcaaacagtaaatattttaagctttatgggccacatgaagacctttgttgtcatttttttccctcttaattacaacctcttaaatttaaaaatcatccttaccttgcaggtcatgggctaaatttggctccatgggacatagtttgctgactacttgcctagacattc

SEQ ID NO: 212654 - DNA, 443 bp, Homo Sapiens
  misc_feature (315)..(315): n is a, c, g, or t
ttgagggtcaaatatctttaaataaagtgccaggaacaataaatactgtacaggaagagagtgcacgtgaacgtccagatctgtggtttcaacctcgagactccaaggacctgcaagggggggtggagaagggacccgggatcagggaggctccgggtagacaagaggggcaggactggggttgcagaggcaagggcccaggtaagtgggctgagggatcccagccacagtaggttccgtatcttgggatggaaggaagctaagggctcccccgggggattatggccaaacttagcctggggggtgagagcctgnggccaaggggtcaaggggtcagagatccctagaggagggggcccagggctaggaagactccgaggaagcactgagcctggtgtttgggagcctagggtttaaaggagagcccgtaggaggccccaggg

SEQ ID NO: 212655 - DNA, 394 bp, Homo Sapiens
tttttttttttcttgattccttaattttattctttcgtgtgcctggtgagatggcattcaggaaacaggatttcaaaatcccggtctctcttttctcctcacgttttctctctgttgttacttgccgtgttcacagagctggtcccttgacccaagagagagcctgtgaaatctgcagacactttctgaagttggggacaacagcttccagccagaggaacgcaaggaaccaagtgcaggggctggtgggaggagagtttcctgagcagactttctctgaggaggtgattgattactcggtagtctttcttagaacagcctcttcttttgaaccttattccaaacatatccgcagtgccgtcagttgccagtgtcatactaaagagcctcgtgc

SEQ ID NO: 212656 - DNA, 314 bp, Homo Sapiens
ctactactactaaattggcggcgctcgactttttttttttttttggtaaatattaacatagcaccaaattttgtaattaagtataaatgactatacatttgaatttagtttagggcaagattttatacaaggtcataagattaaatacagagttatttgccccataaaattagtactcagtactatactgaagacatacttttgcaaatcatcattcagcagaagttctttatcccacagctatatctatctacaatttcaattttaggatctcaatgccctttaaaaaattgtatgggccaggcgaggtggcc

SEQ ID NO: 212657 - DNA, 299 bp, Homo Sapiens
atttaaataatctatatttgtagggtgatatcttggagattactttactatcaatatatagaagtaataacctggtagatagcattacctatgaaaggtccattccatctgctattcttgctgaaagcttttcatgcaccagtaaactcagtaaatatcagaagataaagcataagcctaccacgccacggatttactcctaatgtctcctcaaagtgcagcccgatgcaacgattacaaatgattttcttctaatgtcattttacataacccttttttctgcatgagtagttagtgtg

SEQ ID NO: 212658 - DNA, 602 bp, Homo Sapiens
tgactttcatattatttaatctagtgtaattttaaacattcactagtcttttgcagtatttttgtaggattcaaaatggaaaaaggtatgaagatgagccttaacaatttactttcgttttcctgaggggtcttcctccccgttaactccataaaaaggacaagatcaagggcaatactgattctgtgaaatctaacttataatcaactaaaatttagaatgcttaaaaacaacccaagtggaatgcagattcaggagcttaaacataaaatgaagggtttgaattcggcacttatctgcattccacttcctctagttatatgacggaaaatataatgaaccaatggtcttaaaacacttaggaagctgactgctcaactagttgttaactcatcacctcagttaatgaaccttctgagaataagcacacattctatgtctcctttaagtggaaaagtctcccacgtaagagctgcatataaaaggagacaaaagaactgtagaagctaactgattagaaatacttaaaggatatttgttttaatatcaaggtacaatgattgaaaaaaaacttttccatattttttaggaattattaggat

SEQ ID NO: 212659 - DNA, 520 bp, Homo Sapiens; identical to SEQ ID NO: 60629

SEQ ID NO: 212660 - DNA, 508 bp, Homo Sapiens; identical to SEQ ID NO: 61474

SEQ ID NO: 212661 - DNA, 528 bp, Homo Sapiens; identical to SEQ ID NO: 58602

SEQ ID NO: 212662 - DNA, 676 bp, Homo Sapiens
  misc_feature (520)..(520): n is a, c, g, or t
gctcatttttaatttttattgattttttaatgctgcacaacacaatatttatttcattttgaatttcatttatttctttatttctgttgctgcttttattttatttactgaaagtgagagggaacttttgtggccttttttttctttttcttctgtaggccgccttaagcttactaaatttggaacatctaagcaagctgaagggaagaggggtttttcagaatcactgggggaaaaaggaaaggttgcggtgttgatcatgccctatggtgggtgaccaactgcttgtacaattacgtttcactcttaattaattgtgcttaaggctgaattaaatttgggtgttcccttcttagagcagctcgtattggcggagatgcatgcgctggatgatgtcacggcagtcgttgaagacacggcggatgttctcagtgtccacggcgcaggtaaagtgagggtagcagtagtggcgccatctccactagcagtgctgattctcagaaactcatcccgaatgaangtacttggccgggtcacgcgtgggtcctctcccggctcgggagtcgcatccctacagagtgtgtagcgagcgaactctggaaagtagtcctcaatctcgatttgccaccgggacttctcagcagcaggtcttgcttgtgtagaagagatcacaaga

SEQ ID NO: 212663 - DNA, 545 bp, Homo Sapiens; identical to SEQ ID NO: 40065

SEQ ID NO: 212664 - DNA, 412 bp, Homo Sapiens; identical to SEQ ID NO: 50827

SEQ ID NO: 212665 - DNA, 1000 bp, Homo Sapiens
tggtgcttctccctcctgacatgagacttcactgaagtgacttgccaagaagaaatgagaagatggcacgtggagagtcatgtggatgctcttctctgcctcaagctcagctctcacgtgcttgatctgttctgtctgtgtcctttaatataaatgtttaaatgtttaaatgtcattgggtacttggttataggaggaggcagagctctgagtggaatccatgatggtcctgagaccaaagatatgtatttttttcttttcatgtatgtatgtcttatatccccaattgagaattctatcactgtgagtgatacagcttcagaatcctgaaggctaagctattaggtttgaacaatatgaaattgctggtttgcaactatattatatctacaaaagggcaagttcatatagcttaacctaaaaagtaaaaatcaaatgacatcaggtatgtgcaaaaatgtcataaatggctggtgaatatataagaagttcaacattactaagagccaaaaattgaaaattaaaataagaaaccttttttttacttcatcaaatagtaaaccaacaattagtcctatactttcctggtttgagcattgattaatacaaccagtaagtatgcaaatatttaaactcagtgtttttcactgatagatatttatatcaaggtgctagattgatatgcatataaatatttttgcacaaatatgttcacaatttgtttataacagcagaaaatggaaaacaaactaaatagcaatagggaacgtaagttaatcatgctgtatccatattacgtagtgttatataattaaaattacataatttattaaaatgatatttaccaagtgtttttaatgacactggaaaacatgtagaatataagaagtgaataatttccgaatagtatgtacaatatgataattgtgtaaaaagctgtaaacatagaaaagaacaagaaaatacaccaagacattgataatgaaaaaaaaaaaaaaaa

SEQ ID NO: 212666 - DNA, 595 bp, Homo Sapiens
tatttattttttctagaaaaagaaatttttgcaatagaattttattaacacctttctcaaacaaggtttccatgacagaaatcttgacagcaggagcactagatttttttttttttaacatgttctttaaaacactgtgaagattaaaaaacaatcttggcaggctgatggctgcgtcagcacttccgggcctcctgctctagggagcatcaccagtattttgccaccactgagccagtcctcttggtagtagcagtagaaatttaattatttgaaatgaaaccagaaacatccctcgcaactaacctagttttcttatcaatgcattaatgaaacattcttttaataaaaatatttaatacaagacacattttgctgtgcataataaattcctctgctttgaatcattctttccttttgaaccaatcatttggttgaaaggttttctttctctgacataggtgattacatataaaatccacaaatatagaaatggggaaacagaatctcctggcaatcatatcacgggagttgtttttgtccttttgcattaaacgatactcaatgatagaatgattttacagatgctttggag

SEQ ID NO: 212667 - DNA, 476 bp, Homo Sapiens
cttaagagctctactgcctgaatagatcattaaaagttaccataattcaccttcccccctccccccagtgaaaatgcaactagacctacatgtccataaataggatgaagcaatcggtatctgcttgttttcaggcaaggtcttgggctcagaggttggtgctggggccttgggagggaaacccaatgctgggctgtgggcatttacatgtacactggcctcccctccacctgccttgtccccatttagatctcagctttacaaagcatttaacaccactttaagttaatggtctttttattggaaaaaaaaaaaaaaaagactagcatttacaacttggaatgggcgtaaactgtaatttctttgaacagcaatgttgatggttgtgctgaagtccacagccacagcctactctgccggctccaagtcatggttcagaaggttttaaaaacagagagtccaaagatgctcccttg

SEQ ID NO: 212668 - DNA, 621 bp, Homo Sapiens
ttgcatagcttgaacattttcatattgattaaattgtttttcagtagaatcactgacagaacaggtcagaatgaaaaacattccaaatatacagaaaaaagattactgctcagttaaggtccttttccaaataacttcacacaaatcctttggttgctccaaacagaatgagagctatgagaatggtggcccagcccggccatcagactcccaagcatttggtccccggtctgaggtcacagaatctttgccacctttaccgagactgctctcagctgaggacaacaggcaagaaccagaaggtggccatccttgtctttgcattcaacagcgccaaagtctgagggacaaactcttggtgacaagtctcagaaatgtgacatgtctctgtagcagccataaagctttggtttaggattaattttgattctctggaatatcagcctcccagaatggcaaatcttgacctcatctagtccagcccaaccttccctttttacatataagaaaactcagggttgagggcaacatatcttgcctaagtccaggtctagacccaagccctgcctctcacaatctttccccatttctgctgcctctttgttgcctctggaggatgaa

SEQ ID NO: 212669 - DNA, 636 bp, Homo Sapiens
atagttctctcttccaaatttacagaactctaacatactgtgacaatgtccggcatcctttagggcattttgttacccagaattttctaactatggaagttactaatgaatgcttctattacgcttattacagggtgtgaaaaaagttaaatcattacaaaagtaaaaaggaaaataactacaaaaccaacattagtgctgttagaagtcccacgggctgagcaagtgctggctgcaaggcattgaggcaagcaggcagggctgctgctcaggagccacggcaatgccaccgtgtggccatactatcagtgcagtgtataattcaggctaaaaacaaatctgcggcatttgcattatttcaaattttgagcattaagaagggttttatttttcaaatagcataacgaaaattagcataaaatgcattgcactgctttaaatcacctatttgaaaccttcatataatggcttgaagttattagtattgaattttaggtgtttgttctggctcttcagcctatatttccattcctcgaaaatatacttgcatcataaaattttaaacctatgaaatctattctaaaaaaatcctaaggaaaaaaatatatgtatacacacacacacacacacacaccg

SEQ ID NO: 212670 - DNA, 777 bp, Homo Sapiens
taccaaaagccaaacccttcatatgtatggatttcataaacatttattgatccttttttgaggtaagtataaatacctttacatggctaaccttctaacgcttgaaaaatcaatttcaagggactctttaatcagttaaataatctgctttagaaggcacaaatgatcatacttcagattaaaatacaggtaagtattcagggataaaatggtacaaaaaaggctgtaactcttttacttcacattgatcacagacagaacttacatcctttcagaaagatgatgtatcagcactgaacatttcttaaaacaaatttccataattacgaagtttaaaaagtacctgagcaaagggtttcaaccaattatttcaggttgatatataaatttctttcagagtatatgacaactacagtcaaggtatgattactcaaaatctgagtctactcagtaagtatcatagtatcagatgtgatagagtagaatcattccctaggtcagcagccaaaaatatctatcagattcaaagaaaataaagatcctaccttctttagacgtttccatgaaatatttgtttttacatcccgcgactccagatagctacttttcgccacccaactaatatctggctcaagaacagatcagtcttttattaacagggaatggaggcacactaccaactgggaacaaatcaccattcaaaaccctcaaaatgttaacagactttcaaagagaagcaagagaaacagggttttgactttcaacaaaaactcccat

SEQ ID NO: 212671 - DNA, 555 bp, Homo Sapiens
gtattttttatagaaatggactttcgccatgttgcccaggctggtcttgaactcctgagcttcagtgatccgcccgcctcggccttccgaagtgccgatcacaggtgtgagtcactgcgcccggtctccactgctttctaattccaagggatgcgatctgtttagagcctcatctggtgactctaatccttatgaccagaatgtgcagggattctgactgcatccacactgtggaaatgtaacagctttagcctgggcacagaaggcttttctctttcctgttctttcctgaaccagcaaacttcaggaccctgactggactcccgctggaggaatgaagcccagctcctaggacttattaaaaaaaaaatgacattagatttatggaggctgagcgggaagatctctgaactaaaacaattactgaaaagagaggagcattctgatgtgctgttctttggaatttctataattaaaaaataaacacagaactatttcgtaagaaaatacatcttagtgtgcaatccaatgcacatggattggtagatgaaaggt

SEQ ID NO: 212672 - DNA, 654 bp, Homo Sapiens
cctttataattccatttacttttcaaatttaataaatatatttatagattagtaataaaaatgactaaatgaatactaacaacacacttgatattactttttttagaaagccctaccatcaaccctcaaattgtacacgatcattaaacttctctgtgtagtctctccagccaattccaatgtatgtgcaatcatccacctgagtgaattaaaccagctgaacaaatacaatatggagagatgatagctttcaccaagtccaagagcataactcactgccctttttattcactctttctaaaagtgtaactgaaaagatatccttgataaattgaaactttatgatgcaaaatcaacatttttcaaaaagattctaacacagtttaaaggcttctaaaaattaataaatacaaccaatagagaaataaacataacatggacatttggcaacacagtatctcaaatcagatataaggttgctacaataatgtactatataactctgccatttttaagtatatttcactcattgacatagcaatcacaactctccttcattccttcagagggttgctggtaaattgatcaagaaatgtgcttgaaatgtatttgattgatgcattacaactataaaatagttccaaagtgcaaatc

SEQ ID NO: 212673 - DNA, 810 bp, Homo Sapiens
ttgagagttacacaatagacctttattcacttcaacatcacaatttcacacgaagttggaggaagcccttccctaacaaaacaagcattcgcattaggggaaggaggctgacctgctctagggatgaaatacatctaccaagatatagataaaaacaaaaacaaaacagatggtagagccaaaaaacagagacattaaaggaaatgaaaaacgttataccaagtaatgtttataaatccagatcataagtgaacgtaggttacaaaaatggaagttgtaagtattgttattcttgtacttttcacacaaacagaatttttagaaaagcttaaggtcagggagtgctagagagtttctgtatggcaggcaagaattcttccttttgaacaagaccgaaaaacctcaggacaaagagaaagtatatcttttaaaaactgatttcatagtaatgtttctacatattttgaagcacctttatgtatttagagcatatcaaattaattcatttctttccctgttaataaaaaaggtacattcacagaatcagtgtacttagaataaaaaataaacagaggaaataagaactaactcgagttaataacaacatctttaaggacaagtttggtcatttaaaaaactaagtcttgttttgttttgcttgtttttaattactcctttcatacttaatatttcaaatatagctgcttcagcaggacagcttttcagtatcacagtaagtacagcccaatacaggatcatccaaaaacacgttgacacttccaagacactggcacggggtccacggagttt

SEQ ID NO: 212674 - DNA, 670 bp, Homo Sapiens
ttttttttttctttttttcttttttaaacaccctattaatattaaaattcttatttaaaaaatcgaaagctttctgcgcccggcgctgttggggaaccgcgccgactagctgagctccaagttcggggctgaaggcccggaggacagggcagagggctccctgcctacagggttttcttttccatatttgagaaatgtttgcacaataaaataaaaagagaaaggaagaaagcaggggaaaacgcaaaaacaaaaacaaaacaaaaaacaaacccaaacaagccacaaagaaaggagttggacccagacgggaaacaggccggtcctgaaggtcattttggcaacaatcaccaccgatatttacaacgaaaagcgaaatctgccaccagttgtcagaacgtttacatggccataaatatttagcattttcttatttttttttaaaaaaaggaagaaattctctgtatttttaaagtgttctccacttgctttagaagacggctgacaatatcgctactcacacaaacatattttacaaaatgcacgaaagcaggggtggggggtcggtctttttctcgttttcaagtgacgacattaacgctgggacggtttggtccccccggggagaggcaaagaagcgaagctgcgcaaacattctgtaaacacggcg

SEQ ID NO: 212675 - DNA, 621 bp, Homo Sapiens; identical to SEQ ID NO: 51570

SEQ ID NO: 212676 - DNA, 799 bp, Homo Sapiens; identical to SEQ ID NO: 48447

SEQ ID NO: 212677 - DNA, 645 bp, Homo Sapiens
  misc_feature (645)..(645): n is a, c, g, or t
cacgcgtccggtgagatgttgggaaaatatggctcctccttagagttcacagaactcctcacactggtgaacaggaaagtttctcagcgccgagtggacttttgcaaagacccaagtgcaattggaaagaagcaggttccctgttttgcctcaatgctaactaaaaagctgcatttctttccaaaatctaattaattaatagaggctatctaattttacactctgtattgaaaatggctttctcagccaggcgtggttactcacacctgtaatcccagcactttgggagtccaaggtgggcggatcacctgaggtcgggagttcgagaccagcctgaccaacatggagaagccccgtctctactaaaaatgcaaaaaaaaatttagctaggcatggcggcgcatgcctgcaatcccagctacttggaaggctgaggcaggagaatcacttgaacccaggaggtggaggctgcggtgagccgagattgcgccattgcactccagcctgggcaacgagtgaaactccgtctcaaaaaaaaagaaaatgtctttctcttccttttatataaatatcgttagggtgaagcattatggtctaatgattcaaatgttttaaagtttaatgcctagcagagaactgccttan

SEQ ID NO: 212678 - DNA, 631 bp, Homo Sapiens
ttttttttttcagcttaaaataaatttattgtgcaatacaaaatgtaggcatactggaaaataaaggtacattattaaatatacaaagcaaatgaaagctaaacaacacaaatgttttcatccaaacactaagataaaatgcacaacatttatgctaaaaacaaagtacttcaagaacaatatgcatttcaaatgaaatgttaatgatgccaaaaaaagaaagaaaaaagaaaatcaaatatgctacattgtaaatgcttgaatatcaagaatcaataatggcataaaacaaacccaataatagtgggtactatcaagaactttgtttaaaaaggtgttaagaatactgaaagaatcaaaatatgtccttaaaactggcaaagttttttcttttttaagtttgagggcctattcgcagtatcttatctcttcttccgtttatacttttctataaaaatttctgctcattcttaacattttctaaacacagtagcttagataacagtacttcatttttaagtatgcatttaaagcattaccaacacaaaaatagtaagtgacacaaattaacaacctaattttgaaatctatacagctatgtatacgatatgaaaactaaatcttcatttaa

SEQ ID NO: 212679 - DNA, 495 bp, Homo Sapiens
ttttttttttttaagcacaagcaaaaaactacctttatatatgatgttattcaaatacatggataagataacacattttatgatgtaaaaagtaatatttaaaaattaaaaggcaagtctttctggtattcagaagtctgaagcaaccactgtccagctctttaaaaagagcacattccattctggtgcacacaaatgtacattaaaaataaaataaaaaagtgtaagagtacatttcaagggaatccctgcctctcccttggctcgctggcaaatgattcacaaccaaaacatttctgggatatgtgacttaaggaataaaaaaactcagtgttttataaaagggaatggcaggatgaggaaatgatttatcaagatacaattttactaataattacttctcaaataacttaaaaatgttttataacaaaaaatcaaaatgaaacaaaacttggtagttgaatataagtattttcaactgttacaatacttgag

SEQ ID NO: 212680 - DNA, 610 bp, Homo Sapiens
tattaaagagatgaatttattggtaaatagataaaattaacacctattttaatatatccaaaccccttccttatatatattaggtaaattaaaagaaaaaaattatcaaagcaatactacagccagctacatcgccaatttacaaatgagttagtaagtaccataagtttgtttgaatatcaggtgcttcagagtttttctcaaacagttacaaaagagattaggttcccaatcagttcacaaaagctaatttaaagaatgtagcttaactacagtactgaggttgtcacacacttaactttcggtctcttgcttatttattcatatctgaggttcactgtttctactaggatacattccgcccacacccacaccttggtccccacatcaagcagctcctcacagcaggaagacatccgctatcagacatggttttctgaagttgtgcttaggatttcagaggaggaaaaattcagaggttctaatagccttcggtaactgaggtagaatatggggctcccaagaatatcttccatatgccccaaatctgtttccctcccacccccatccagctctgttcaaggtcaagtttgagaaagatacgtgttct

SEQ ID NO: 212681 - DNA, 582 bp, Homo Sapiens
aaaaaaagcacaaaatcagttaatcacaactaataaaaattacatttggtcaagaactaaaaagtcaattgcaaaaatgagaatagctatgttacgctgataaattatgagtgattctttcatatcttttatgttgttgccaataaagaaattttttttaaaagaactaccctttataggggttgtcctactgatttctttgccataatttggctgcattcaatctgtccttttcagataaggactacaattaaccagttcctgttaatgtcttcaaactttcctttttgctgctaaataatggtcccattccccatacatgcataccctctaccccatccttccccccgccataacatttacattttacccaactctagagcactggccaagctaatgcctctacttcttagcagtctctttctcgcagagcacttcctaagcttatgggttctctcctcaccaaggagttaatgaccagactcaaggactaggtaagtcgtaagataaccatataaagagggagaagtctgtgtctgtttttatgagatctctggaatggtatccattggggtctaaatg

SEQ ID NO: 212682 - DNA, 468 bp, Homo Sapiens
acataactgtggacatataaacatttaataaatcagcacacaactgtgatggtgattgatcctttgacacgcacgctctgtgtggacgacacgtgctcccagcatggtaggggaatgacctacggggctgacttcggaactgaagactccccatatatgcacactgaacacttgcgtgcagacgctcccgaataccgcaggtcttagccaggcaggggtgaatggagggaacagagcagctccttccagcctctgggcaagcagagtgcttcctttttccagccccaggcatcgccttccctagacacggttttctctctgtgtgttctctcattctttccagcaacagcacagacagagctcagactggctgtgtgtggggtggcccacaagacagcgagcctgcttgcgctgccgttgtgctgtgtgatccccgcccagcccttgcccctttcctcacttctgcta

SEQ ID NO: 212683 - DNA, 710 bp, Homo Sapiens
gagacggagtcttgctccgcggcccaggctggagcgtaagtggcttgattctggttcactgcaacctccacctcccgggtccaagcaactctcctgcctcggcctcccgtgtagctgggatcacaagtgcccagcaacatgcccggccaatttttgtatttttagtagagatgggatttcaccatgctagccaggctggtctcgaactcccggcctcaagtgatctgcatacctcggcctcccaaagtgctggaactacaggcatgagccaccgtgccaggcctaggtttcactacttaactgtatgtattaatcattgctgagccatactgtgtagtcaagttctttccttataccgtgttttgcttttctgaatttaaaatagcttaattttcagttaccaatcattatttcagcttgaaattctagagaactaacaatatcctctggataaagatagatcaaagattttgtctgttttgagcagcttcttttcttttttttggaaggacctttctggagcactatgtcttccagcttcaatctgggcttgtgccctctgatattactgcctggctttctaactttgctgggggatgttaagacacaaaattgatctacagattcaacacaatctcagtttgcagaaactgatgatctgattctaaaatttatataagaaagatataagccaaaacaattttgaaaaa

SEQ ID NO: 212684 - DNA, 707 bp, Homo Sapiens
ttttttcgggtttaacctgctataattctgttgatatttgaatcactttcagtgggacatttgctttaaaccacaagatatctccatctccaggtacaaaaatcccttcctccctcccctgccaccccccaccccaccctgcaaccaaagaaacaaacaaaacccaaacccacaactcagcttcaaataagtttgcaagaaatgagactctaaatatttacatatggggcaagaaataaatcacaaaactatttacaaaaatacacaagcttatatgcattaacaatttacaccagttcacaaaaatattaagacataaaaaaacactatataaattaaaattaaaaactcaaaagtatgatctaagacttcctaggatgcttctctcatgcaggtcatggttgaaaaatcaggttttgctatctcagaatctaaactgtaaaaccatttttattctttgaacattaacagtactaatcagataaggaaaaaagaccctctgtgcacactgacattatcttgcacacgttataatacaccattcctgacatttctgtaacacacagtgctgaaaatcacatgcctctaaccatgtggaagaagtaactgtctgacatacttttgctttcattattactttcttacacattctgctcaagcagtactttgccaacatcctaaatgggtgactgacagggctgaaaaca

SEQ ID NO: 212685 - DNA, 606 bp, Homo Sapiens
ttttttagacacagtcttcttttgaggcccaggctggagtgcagtcgcgcgatctcagctcactgcagcctctgcctcccaggttcaagcgattctcctgcctcagcctccccagtagctgggattacagggacgtgccaccatgcctggctaatttttgcatttttagtagagatggggtttcaccatgttggccaggctggtcaagaactcctgatctcaggttatctgcctgcctcagcctcccaaagttctgagattacaggagtgagccacagtgcccaggcttcttttttgtaatgcagctactagaaacattttaattacatatatggctcacgtgtttctattggacagtgggaatctagaacttctccagtagaacagcatctgagataaggaacttagtgttttttaaaaagtatttacaacccactgcccaccagcaaggagccctctgtgacataagaacagttgaagaatgaacatacccaccggaaagagacctcagggccctcctctgagctccttgacccctgaggcctagagagtagtgtggctggccccagtctcacagaagtcagctgcacagctggaaccaagccg

SEQ ID NO: 212686 - DNA, 793 bp, Homo Sapiens
ttttttttaacatgatatttctatatttaaaaagagcataagaaaccattaacgtttaatttatgattcccacttgtcattctaatttatatttttaaagatttacattattttgagtaagttctaatcctatgaaatgatgcagatgtcaccaacaacttaaattcaattctgatcttatactaatacataattctaaatatattactttgagtaatacatgtttacttagatttactatattaagtataggttttgtgaagtcgtaagtgtatacctatatagtttcttgctattcttgattttcataataatgaaggtcaaagtgcccttctgctccttcttgttctgggctctcatgagcattgtcaggatcatcgtgatcttcactttcatcatcatcatctggaaatctcctgaaaacttgtgtctttagttgtattgtttgaccattagtgcttcgttgttcaccataataaatagtgtgtatatgagggaagcagaagaagatgtatgagcttattggttcttttagtttattttggtccacacgaatgtatgttaaatggtggtaatgtagtgggtcaatagaaggacacatcactgtaagattcatcttttctatttcattattttggagggataggtgttccaaatttcttggaatatagaatgcttgcttcaatttgttgtgtccaacactgagttctacaatgttgggaagattaaaaatattatatgggatgtcttgtagtttgttgtgtgacattcttagagtatgaagttttggaag

SEQ ID NO: 212687 - DNA, 684 bp, Homo Sapiens
gcggtggttctcaaaaagacaccttcccaaccccagacctgcccactaggactatctgggaattggccctttttacagattcccgaagagtttcttctacaggtgggccctgtctgctttgacccacactgacactgaactgcttagggaaagaggcctggatgtggccatctgttctctgtctcccggttgctgatggtcagagattgctaaatctttggatgctgtgtcctgcttgaacacgtactaagtttctgttttttggctggtttcctctgtttacttctttggcctttttgatgacaattcagcccttccttttcttgacccacaggaagaggtcaagagctattggcctccacccttttgttcctcagcaccaacccagcccccttctccaatctctgcttggtcctgcctagcaaggaatcccagcactttgggaggctgaggcggggggaatcacatgaggtcaggagttcgagactagcctgaccaccatggtgaaaccctgtctctaataaaaatacaaaaattagctgggcctggtggtgcatgcctgtaatcccagctactcaggaggctgaggcacgagaatcctttgaacccgggaggcggaagttgcagtgagccgagatcgagccattgcacttcagactgggcaacaagagcgaaccttcatct

SEQ ID NO: 212688 - DNA, 690 bp, Homo Sapiens; identical to SEQ ID NO: 42643
  misc_feature (635)..(635): n is a, c, g, or t

SEQ ID NO: 212689 - DNA, 714 bp, Homo Sapiens; identical to SEQ ID NO: 46255

SEQ ID NO: 212690 - DNA, 689 bp, Homo Sapiens
tttttttactgttcttggctctaaacagaatctttatctaaataaaattcttgccaacatttgtatagacctctggcgcctcaattacagtcacagattaaaagtggagttttaaatgtctggtttatactagaacagtggttctcaaagtgtggtccctgggtcgccagcaggaactcatcaggcatgcacaggagttttcagaagccctccaacggcctctgtgtgtgcgtcagagagaaccatagcaccagaactttcaatgctaattctctagcaaaacagtaggcaagaaaataaaaacttctcctgcctccttaactccgtagtcaaatttttaaaagaagattctggttctgaattcatcttgaggatatgtaatagctaatatgtaatatgaatagtctagcaactcatgcaaacatatcttaaactaatgaggaagtatcaagtcccagagatgagagagtggggacctccgaggtcctactacatccatagctaaccatggtcttaagtgctgaggaaaggaaactcagctcttacagtactgggcccaagagacaaagcccggtcctgcttgtttctgccatgagacactgggctttgagcacaggcaagtcccaaaaaagcaaaccaaacgcaccaaaaaaaaaaaaaaaaaaaaaaaaggaaataaaatatcaatc

SEQ ID NO: 212691 - DNA, 566 bp, Homo Sapiens
atggtcagtgcattttattgaatcagcacagtacaaaaataaataaaaataagggaaggggaattaaattacagccaaactgagcttcatgactttgtcagattataaaccacacatactcacaaacacactacacatacatacaaaatgagacaaatataaattaatattaacaatacccacagtttggtcaaagaatagctacagaagaaattgcactaaaaaaccaacatacatcacacgtgtgtaattagcagtttcaaatatacagctatgaataattctgagtgaaaaaaatggcacattttcttttcattgcaagtttaactgttggaacaaaactaagttctaataactgcatggaaagaatatatcaaccctccaggtttacaagaaaaagagaaaaaccaaatcctgaactattattcctgtggcttgttctgtgcatgggtgtaattttcacagccatctgttctaagattatttttcttaagacacaaaatgctcctggtttgcatgcacaatatcaccgtaaaagcaacaattaaagaataaaggtttttttg

SEQ ID NO: 212692 - DNA, 610 bp, Homo Sapiens
ctattcatttctaccttgtctattgattatgtcatttattcattaataatactttcaaggcccgtgattcacaaaacccagtaacactcttgatattccctatcagtatacagaatcactcaaacattgggtgtttcattaactatcctgttttttatatatgcatcatcaatataatacttcatgtcactcccatatcactggaataacattggccatctttgactgtatttcacacttttaaataatacgttgattactcttaaacaaaccacccaaacaaaggtaaggactttgactattactccccttggtcttcacgctccttcctaagcgtggtgcaaacagagtatgtgaccttggaggcatcctcaaatcagaacaaggacatccattattggtctccatgctcctaataccctgtggcaaccataaggcttctgaccatggaagcgtgcttaaatcagtttaagagcatccattgttggtctccatgctcctactgcagacagcctccaccactgacacagagcaaggacattaactatttcatacatttttctcagtgattctgaaaatatttctcaggaggcagcatcagcatgatttg

SEQ ID NO: 212693 - DNA, 621 bp, Homo Sapiens
caagttcaagaacatcccttttaatcacaaaccactcatccacaaatgtggctatggggtaagcagtctaggctgggaccctttccagaggtaagtcaaggtcacgtccctgcccccttcctagggtggcggtggcctccagccaggggggcttccaggttaataccagagcctcggctactctggactcctgtgagctcttcttggctggaagaaggggggcattgtgggcctgctctgtcccaaggctccagaagctgcccctacccaggcctgcctggcctcaccctgcagcctgggtgcacccgcgggcagcctgggccccgcctacacaatgccctcagtgcgcttgctctgccagaccaccagtgccgtcaccagcagggtcaccgtgatggggaccacgatgaaggggtagaggatgctgccgggcgggtcccgcacggccctgcctgagatggggcagctcctgaagtagcggccatgcactgccaggaagaacctgtccacctctgcattgggccagaagcagcccagcttctccgccatgtgccaggtgcagtcggccagctccctgtagctcctgatggtcctgccccagtcacaccacagcgtctcccc

SEQ ID NO: 212694 - DNA, 553 bp, Homo Sapiens
tttttttttttttattttttaatgcagatgatccaagttttattaaagtttacatacttaagcataaataaattaacagatttgtagcaccaataatggtggcatgatggtacacctggaggtaacattatcaagagcttttgttgaaacctttcattttcaatcaggtgctgatttttttccacccaagtcttcaattattactgttctaacactgcaaaaaccattcaagcataaaaaagcatgcaagaggcagtaaaataagcccaaataattgagaattgaacaagaaaacaaaataatttactcttaaaatgacaaaagtaaaattaagacaacctctaaaccaggggtctggtgaacttggatgggaaaaattttaaatctttcttttcaccaacttctaactgaaatataacatttccttcaattacgaatataggaaacagtccacagtaggatcagagtacctgtgactttgtcaccaatagaaatgagacatttagatatattacagttgttagatatttcaagatatgaatttgaattatag

SEQ ID NO: 212695 - DNA, 443 bp, Homo Sapiens
gcagtttaaaacttatacattgtttatttctggaattttctgtttaatattttgggacctcagttgaccatgagtaacacaaaccacagaatgcgaaacagtggataagagagggactactgtacatactttcgcctaagacagttctgtatattcttctgttaacggggtagcaaaagcatatagaaaggttttggggggatgcagtgcattgctcttctgtaatgacagtaatttacttcaagacattgcaggagaaggggttaaaggagtaaaggggaggaagagaaggattcatttcatgcctacctgtacagagacactttcttgctttctacttttttttttttttttttttttgagacggaatctcactctgtgcccaggctggagtgcagtggcacaatctcgatctcaactcaccgcaacctctgtctcctggg

SEQ ID NO: 212696 - DNA, 566 bp, Homo Sapiens
ggttcaacagatacacactgattatctaacttatcatcaattggaaggtctagttcctcattaaacatgcttttcttatctcccatgtcaagttctggatctgtatatgcaatgatatcaaactctcctgaccttaagaggtcatccaggttgggatcattagtttccaaattatctaaagtatccaattcaactaccttgccatcctctgtatctaaatttaagttttcaagatcttcatcatctaagtctttgacttcaaccccctcaaggtctttaacatccagttccttcacagaagggtcatcagaatcaagtttttcctctagaccatcagaaggctgggtggttatctgtaaattatcagacgttgtttcagacggtacagatgttgacaaaggagcttctgaaaattcaccacctagtggatggttcagagtcctcatgaccatagaagatgaatggacagaatgaccttgctcttgttgagatggtggcacttgttccaaatctgggtgcacaggtagctgattaggtagaccctggggaggccgccgcatggggtc

SEQ ID NO: 212697 - DNA, 675 bp, Homo Sapiens
accctttgcagtaattcagagacaccactgctgagaaagtcggaattactgaccttcagcagttctccaattttatggaactaaataggctcttcaaggaatcaaaattctatatgcaggtgtcactgtttctaaatcttcccctgactctgggtgagggttcacgctggtctccagtattctggccttctcaggatgagggcaaatgcacccaagctccttctcttccccaggatgacaccgttctgacagattgccaggagaagcgggtgagaagtttagaggaagctgaaaccgtggtaatggtagaaccttctacagatggctgaggtgctgctgggacgactgagctttgccttgacccagcccaaagaactggtctgaaatttgaaacgcaccaagcccaggtacaggtctggcacctcagcccatatttgctgcatgaatgtgaaacaaaattttgtgaagggatgaaaggaactgaagtgcaactaagtttacaacacaggccaagagctgaacacacaccatggctttgcccatggcaggcacgcccctaaatgcctgtcgcacgaagagggaagagtttcccgtgagccccgcaggagagtccgcacctccctgcaaacgccagtccttaaccacaaggagcagactcaaatggatttctgggtg

SEQ ID NO: 212698 - DNA, 784 bp, Homo Sapiens
tgttctactgttttattgactcgttgcatttacaagttttgctaatgatacacagtctacacttactaataaattatactcacagtgtttttactgatgtgactttgtttcaatattttataataaaagattataggagtaattacagacaatgatagaaaagtttgaggcatcgtgacaaaatagtgcaaaagcctaagttatccaaaagatgtagtgatcataattataaagactgtgtagtgtccctgggaaatgcttacaatgagataccaagcagtcaaaacggaatctaaccacgcacctgtacagtagttacaaaggtattacaaagcttgtctctgcatgaacacagtaaagaagtcacacatacacaaacgactacaatggtgttctggtattgcgactgtttgttttttctttcttttaaatattattttgctttattgttgtaatgttatttttgtaataaataaattcagagagaacatcctactattagacataggaaaatgcctagaaatcttgagatatttttccttctttatgccagtattatatttggtttacacctcagaagtaatagtgaaattggtagagacaaaatattctagtaaccaatttgctattttctgttgaatttaaaaatttaattcaatttatatttgattcaatagttgcaatagtattaattgagattttaatgtccataaaatactatttttctccaattattatttagatcattatagatgcataattgttcgtgaaatggctttgctgg

SEQ ID NO: 212699 - DNA, 780 bp, Homo Sapiens; identical to SEQ ID NO: 48536

SEQ ID NO: 212700 - DNA, 807 bp, Homo Sapiens
actcctccatgctgcagatcccacagtttcctgccacaagaacataaacttttgtcccccacacatgcaaacaccagtgaaaagtaaactcgagtttaagaacttgttcctaatattctggattacagagtggcaagcgggaaaatatctaaaagtcagtagttttcagcaagagattaggaatcggcattttaaggatctctaagatctttagccatgatcttcgttgcttgttctcctctatggacagcactgtgggttctgctccagccacacagcatcggcccaacagttcccctcacctagccaaggctagaacgctgcagcagacccaaggagaggtcacagccttttccctggcctatttcagagaaatccacacctaacccactagatctaaacttttttggatcttgaaccctgtgagaatctgataaaaggtcattccccccacccccacaaaaaatacacatttgagcaaataaagacattttgcatgcaatttcaggggcatcatctaaggcccattcataggactggccaagagccagggctcacacagtaaagcgcttacttttaaaatacttcaaagaaaattcctggctctccctctatgtatttataatcccagttctctaaaaactaaactaaaagatctttgtatcagaaaaaggaggcacttaacacctgagttagggaaggcaaaaagttagaagaaatcactcactctagatactcttaatgagtacatagaaatctcaaaaagaaagaaaaagatatttccctatcaactgagtctatgccttc

SEQ ID NO: 212701 - DNA, 744 bp, Homo Sapiens
gttggagtaaataaattttcattaaacagtttcttggttacaacttcatctatataaatccccttattctaggatctacacagttaaacctaatatttcacagcacatttccaaaacagtacagtttttacactaagaaaaaaaaataaaaataaaagcctggttaccaccaaggtgtattgtccatgaattgaaaggctttcctatttaagtagcaggtacatgtgtaaatagggcaggcagcaacagaacagcaatattggagaactctttctttgtagtaaatgcccttgagtatgagatgtgacactgaagcaataaggccaattctttaaagcaaaaatggatactgatctcattgttttatagccatatcttgtggtatgtttataacgtatttctttcacatgttaaaacagtatctactaaagatgggcttaattttggtaaagtcaactgaaaaaagttatatgttaatgcaacatttgttgtaaagattccagaaacacaggagtcaaaatttcaaattatgattcccacagtaactgtaactctggtatacaacatacataatggaagaaatgttatcaatatataccatagtagaaaatactcagtaagcagaaacaagctgagttatgcttcttgtgggaatcatcattttcaactagctgggaatatataaaaatcaaaaccataaatgcatggattattttttgcatttaattctaatatttcttgatc

SEQ ID NO: 212702 - DNA, 638 bp, Homo Sapiens
tttttttccatttgaaaagcccttttattatataccaatatacactttctgtaataaaaaagaagcctcccaatacattgagccatcttataaatgaaataagaaaataaaattttcatctgtttacaaatggggttaaattaatcagcacaagctatcatatgtatgtctgccctgcagtatatatgaattttaatcctggttatgaagaaaaaaatggtgctttattatttggcactataggatgctcttgaacattcagaagatacctttttccactttttatttttgtatactttttagatgagtgaaaatgtaaatatatcctaaagatgctatttggcagatttttttcaaataatagtagctcaaaagtacgtgtatgatacttgtacttcataattggctttactaaaatataaaatacacaggtgatcttactatgatttgaaaaaaaggtagtgaactccagaagttttaggctgtgagtaggaatttttaaatccattttatgtaagtttgttatagaagtgagcaagaatgatcgtgtgcatttcttcgtagtgttagcacttatacttttacggagaaccactcaacactgtattaaatggccaatgaatgtcagcaaacacctg

SEQ ID NO: 212703 - DNA, 454 bp, Homo Sapiens
cgcttccctgtaagagttctccacaacggactgggtcgctatgtgcagcagctgcagcgtctgagcttcagcgtcagccgcgacggcgcctcgtctcgcggcgccagggagttcgtggagcgggaggtgatcgacttcgcccgacggaatccaggggtcgtaatatatgtaaactcgcgtccgtgctgcgtgcccagagtagtggccgaataccgacactggcctgagactgtctgcagttgcaccgcagatcctcctgcccggctggcccgacccaatatcagttcagtcatccgatcttccttggggaaatacccattaccgtcctgaacccttgtcatccactacttggctataagctccagaagtgacaagacacttcacatcttaaatatgtttcctagtttataattcatttgggcagtaaatgtttgttgagcacttaaaaaaaaaa

SEQ ID NO: 212704 - DNA, 567 bp, Homo Sapiens
ggtggtttcaattcatgacaatgaggttgaagaatacacaaaacttggaccccaagagagcaagaggcagcccccatcctgtattcatggttcccaccaccccggagtcaaggggttcaggagtggcagggggagggtgtggcacaagcaatgttggtgagggaagtggatggatatgcccaggtggacacacctggtcatctgtcccctgtcctgcaggcctcccctgtgtacagcttcagctttccccggaggaaattggagtagactcggaagagtttgcggaaagtgtcagcagtgattgttcggagtggagcagctgaggccgcatctggaggggagatggcttccttctgggctcccagagcccgaagcagagtggtgaggctgcgaagccactgacggctttatccacatgcagctgcaggggctcccacggctgggaagagtttgaccacagggcatggcccgcaggacagctttcgacagaagggccagccctccagacttctacgggctgctgccgacttcattctttgcaggcatagaatttaccttggtgtctgg

SEQ ID NO: 212705 - DNA, 434 bp, Homo Sapiens
aacagtggaagaatgatgtatttataatgtgaatatacatgtgatgtccaacaatttcaattctaagtatgaagagtaagccacaataaagaatgttaaaaaacaataattagtaagtaaatataattataaaaccaagtcagaaatacaaaaaaagggacaactatactggaatgatgaaattcgatttctgtttcctgcctcctcccttgctggctctataatttttttttttaattcttagaataggaaaaaaaggtaagaatgctatggctggaaggccactagtaaacaagcacatataaagggtcctcaagacaagacctaatatgggtatgaaactaaatgttataaggaaggtcattgtcctcagcaactgactctgctatttttaccccaaacaggagcccatacaaaaccaccccattctttcc

SEQ ID NO: 212706 - DNA, 468 bp, Homo Sapiens; identical to SEQ ID NO: 48976

SEQ ID NO: 212707 - DNA, 426 bp, Homo Sapiens
tggaatgatgaaaataaatttatttagagaaaatatatcatatttcttttctagacaaaggtaaatacccaacccagcagagttcaattgttaaaatgagtgaccgctgctacaggtcacttccacatgtcatgtgtgtacaactgaccattagcacaagtgacgaggcagccaaatgattccatttcttatttatcccactggctatgcaaacagttgcttcatatcatgctgaagaaaacccacaggaaaacaggccaagaaatgtccactgcatgagcatgaggtctttttgttgatttaagggtgatttttttttttttttgagacaggatctcactctgtcacccaggctggagtgtagtggcacgatcatggctcatggcagcctccacctccagagctcaggtgatcctcccacttcag

SEQ ID NO: 212708 - DNA, 509 bp, Homo Sapiens; identical to SEQ ID NO: 40708

SEQ ID NO: 212709 - DNA, 1000 bp, Homo Sapiens
cacatatttacttttgcattttgtagtaaccatattttaaaaagtaaaacaaaagaagtgaaggtaattggaataatatcacagatttaaataaatctatccaaaataccaggtctacatgtataaactattttaacattaacacaatgctttctttttatattaaggcctcacaatctaatgtgtatctgacacttctcacacatctcagtatgatggcagcaccccatatgggaggccctcccatgatgccaatgatgggccctcctcctcctggaatgatgccagtgggacctgctcctggaatgaggctgccatgggaggccacatgcccatgatgcctgggtgcccaatgatgagacctcttgcccatctcatgatggtgcccagttagcccagaatgacttgaccagacagataaggatagaggggaggcctcattacatcagtgttgtttttttgttgttgttgttgtgtgttttttcttttgttttgtttttgagacggagtcttcctctgtcgcccaggctggagagcagtggcgcgatctcggctcactgcaacctccgcttcctggattcaagtgattcccctgccttagcttcctgagtggatgggactacaggcatgcgcaccatgcctggctaattttttttattttggtggagacggggtttcaccatgttggccaggatggtctcgatctcctgacctcatgacctgcttgcctcggcctcctaaagtgctgggattacaggcgcgagcagctgcgcccggcctatatgactttatatttacctgctcccttcaccaggagatcatgggctgtgatgctgggttttcttaacagcataaggaagacttgcccccttgccctatcaaagagaatagttttggaggggagaagtgggaccaaaaaagatgcagttttcatttgtattgggaaatgtgaaaataaaattgtcaattcttttagttaaaaacaaaaaaaaaaaaaaaa

SEQ ID NO: 212710 - DNA, 1000 bp, Homo Sapiens
tagcaaagctgttgtgacccaggtggcctcattcaacagcctcctcaaagctttcctgccacccgttagttacggcaagccctggtctgggcacacggtgtgtccctggcggccgtgactgccctctccctcccagtctgtggcagagggcagagtctgccttctcaggtcctggctctttggatcccacacagctgggtgacctcagggttctccccacccatgacagcatctcctgcaaccatgcttttttaaacaaacacagcaaaagcaaggtaaagcaggtggtgggctggaggaggcaggggctgtgcagaggagacaggacacccctgagaggcagagccaggtggggcggccagaaggagggcatgcagactataaggggaagtggggcacggccacaacactccccactctgtgccctgtctggttccacacacccagccataaaggacacagctcctctcattttaagagcccatataaaggcagaaggaagtcacatacacacacacacacgcgcacgcacacacacacacacccacacacactcatgcaccaaagccctcaactcagcaagaagccttgtcttttcagatgccaaacactgagcaggctttgttctccacccacaaaccagaggctgtctcagcaggaaggagttggagttggagaaaaaggagaattaagaatctatctggcgatgtggattaaataaacaacaaattggcagattgtttttaaaaggtaacatccactattggcaaacagacatttctgatacactgcttgtgggagggtgaattggtatgacctttctacagggcaatctgcaatagtaataaaaggcttaggccgggcggggtggctcacacctgtaatcccagcactttgggaggctaaggcgggaggatcacctgaggtcaagagttcaagaccaccctggccaacatggcaaaacctggtctctactaaaaatacaaaaaaaaaaaaaaaa

SEQ ID NO: 212711 - DNA, 1000 bp, Homo Sapiens
agagaaacagaacccataggaggtatagagatagagaaatatggaattggctcccatgattatggaggctgagaagtccctcaatctgctgtctgtgagctggagacctaggaaagcttagctggtggtacaaaccagcccaagtgcaaaggcccaagaactaagagcaccattgtcagagagcaggaaaagacagatgtcccagctcaaaaagagagagcaaattcaccttccttccaccattttattccgtcctgttccattcctcaacaggttggatgatgagggagatctttatccatctcaagttttttgtgcaaatatggaatacaaatgaaaaatacttaaagcacatcatcattgatttccaacttagactagtttaacttccctttttcttctatcctgtcagttccttgagggatcctctctccttgttcatctctgcatctctagtaattagcacagtgccaggcacatggtaatatggctaaaacagtggattattggtctccaacataattaagcccatccaaaagaaaaaccaacctcataaatctgctttgcaaagttcataaacaatggatatgctatgtctcaaaggtgctggccaaaaaaatttaagaacttgggaattatgtgttattttgtttgtttttttcaccaagcctacttttctgtcacaagagcccatatcaacaacacacccatgtatgtccttctttttatctacttttctccatgaagtttgtcaccatcaactgttaaaactgtaaagatttgatcagctaaataagtggtctttgaactaattcctctcgtacttcctaaaggaactttgaaaaactatgtatccccttgcacattttcaagcagacacctaagatttttcatcataaatttgaataacttcaaaatatgtacttattagcatattgtaaatattgatttttaaataaaatatatcacactttgtatccaacgaaaaaaaaaaaaaaaa

SEQ ID NO: 212712 - DNA, 408 bp, Homo Sapiens; identical to SEQ ID NO: 60331

SEQ ID NO: 212713 - DNA, 430 bp, Homo Sapiens
ttttttttttttcatctccccaattttttttttaattagctggagccagctgagttaaagacaacttatgattacaagtgactaggatgtacatctcttaaaaatatagacagtccatcatcaagattgtaaggacatcatatcaattccttatagttgttatattgtcattttagagtcaaataaattgtaaatatggataggacaatatacagacaccaagtgatatttcatctaagaagttaaggagattaaatgaaagctggaggaaatctttcaccagccccaaataaatgtgaagtgggaaatgtaaagggaaaaaaggggaggcaagaaaacctcttctcacatatttgggaaaagaaacttgtgtgggtaaggaatgggtaaaatagaacctggttaggaccagccattcacatttgatagt

SEQ ID NO: 212714 - DNA, 1000 bp, Homo Sapiens
gtagagatggggtttccccattttggccaggatgatctcaatctcctgaccttgatcccctcacctctaattaaaagaatttggaatatggttgtttagaatatgcttattatgttttccaaatagcttgtttactttttttactttgatttaggtatgtaaagattggtctcagtgaaatataaactttacatgagagtataatatcctactatctgtagataaataagtaattttttttttgagaattatttaacatgaatgtttttaaaaagaaaatagaaatttaatttattaagattaaatgttttcttattataattactgtaattgaaaacagattattgtttcattgaaagagttctaaaagtaagtagcagaagcagctttcttttaagaaatagacactgtaaaatgtacatattttaaagtttaacatactaatattttttagatttcagaaaacttttattttgaccttaattctgagcagatgaaagggttgttacgtccacatgtaccacctgctgccattactaccctggcaagatcagcaattttttctatcacttatccttcccaagatgtttttcttgtaataaaggtaagaataatgttaaatatatttgtttattttgtagtgtctgtatacttgtctgtcagtattataaacttttcaagggcaaagatttgacctttacatatttttttcatcttgatattctttaacacaatattggacatacacagtaggtgctacctaatttttcttgaactctttattagaattctccaatgaaacagaactaataggaattatatatatatcttagatctgttttgattattgtagtttataaatacattttcatatcaggaagtatgagactttcaactttcttcttttttccctaaatttgttttgattattcagggtctcttgaatttccctatgaattctaggatgggtttttctatttctgcaaaaaaaaaaaaaaaa

SEQ ID NO: 212715 - DNA, 442 bp, Homo Sapiens
atttgcgtgtcatccttgcgcaggggccatgctaatcttctctgtatcgttccaattttagtatatgtgctgccgaagcgagcaccgtgcttagttattctaagtgaggtcccaggatccacctgcctaggcttcccaaagtgctgggattacaggcgtgacccaccgcgcccagccaagttttggtttcctcaactggaggtaatattacatattttacttatacatatgcataagtaaacaaagagggttgttttgagggtcaaataaattgatggatgttaacgctctctgtaaattataaagcactatacaaatacaaggcattattgttaataatagagcttaattacacctgtcctcatttgatctctcacagaccatcagaggcatgttattagaatgtactacattattaagataaaagacatcttcttgtgtc

SEQ ID NO: 212716 - DNA, 471 bp, Homo Sapiens
aagactagtcaagtgcaatagtaagggaggaaagactagaacgagactgttcgatccgtaactgactgtgaacaatcaactgagctaactcactacctttggacgagcatcaatgcttttctggagtcaatacacagagaggcttttctcatcaacaactgaaaacaccttggttagaagctagatttactagagtgaaccagagaggtagcatggtatatggagtgacccagacctcagagtaagacagccccagattcagctcccatatcagcctctcatttcctacatgctttcgtgtaaggaacagaagtaattcatgagaagtacttagtgcctggctgaatcatgagcacacaataaacagcagctcttgcaaggatcaacttgactcaccaaccaatgagagagagctaaggcaggcaaaggcacaggagaaggccaaaaacctcactgggcgaatacttaact

SEQ ID NO: 212717 - DNA, 479 bp, Homo Sapiens; identical to SEQ ID NO: 60903

SEQ ID NO: 212718 - DNA, 485 bp, Homo Sapiens
cataaattgctataaggccaatctcccacggctagcatttctgggttttggattttttaaatttaagcacaagactttcaattttcttccagttaatgtcatattgtcattttttttttaatttaaaaatattttgttggtaaaaaaatgctaatgatcatctgggccttcagcaagttgtaatctttttgctggtggagggtcttgctttgatgttgatggctgctaactgaacagggtggtggctgttgaagattgggtggctgtggcatttctttttttgcaattcaacttttattttagatacagaaggtacatgtgcagatttgttatatgggtatattgctgtctctgaccaatcattcctgaccaaaaaatctttcaggatagtctatcacccacctgactatatgcctttatccgtgtcaggacatgcagacacatgactttccagtgcatgtctgccatgtggtacatttaaaacg

SEQ ID NO: 212719 - DNA, 426 bp, Homo Sapiens
tgtaaagagagggtctcactatgttgtacaggctggtcttgaactgctggcctcaagcaatccttccaccttggcttcttgcaaagtgttgtattataggagtgagccactgcactgcacacagcctcaattcatctatttttttattaataaaggtagtttaaaaatatgtatccaggaagtttccagttaatataacctacttttggttacatatgatcaacacctggctaatctgttattccatggccttgtacatttggaaggaacagtaattccaatccattaccctcttcctgggttcttaaaatttcagctacttagagagtcctcaaccctttggtgcttacctgcatttgggaaccaataactgtgttattacaggccaattcagtcttattaatagtgtctaaaatagtaggtttg

SEQ ID NO: 212720 - DNA, 464 bp, Homo Sapiens
aacagaaattagtgaatgatgataagtggaaagattcatgtctcaatatacactatatattacactagacttttaaaattaaaaatccataattccctctccataaaaaagggtgtctatattcccagtgatatggttttccagaaatctagtccctatcaatataaatctgggaatttctgccattccagaggatctaagcttctacactaccaatactgcatactaaggtatcagcaaatgtagcactcctcctcagtctgatgtccacagcacacccgggttgatcacaggtagacccagaaaggtggttacagcactccttcctgcagagcccagatgtggtctcagaagtcttcccagcaaagtgccctagacagctagcccccagtggaccccaagatattcctggttcgaagatactcattttcagattgaaaaaaaccaatgggagtctaagtaat

SEQ ID NO: 212721 - DNA, 406 bp, Homo Sapiens
ctgcttcttctgtagccgcttttctccgtgcctggtaagaaaattatttttccattagaacagcttgttagggtaatcttagaaactgggagacaaattatggcatatcaactatatttcttataaattataatattcactaagactaataacaagttagaataagtcttttccattgatttcattggtgtctattgatagataaacccgctgtgtcctcacggctatcgttattccgtttgcagcctgggaacctaagggtctcactggcagaaagtggagcagccgggatctgaatgcgggaacctgtgttctttcttagccaggacgccggggcttcccatacacgtggctccttcaaatgacatatttacttatttacgtaccgagtaactgagtaacttct

SEQ ID NO: 212722 - DNA, 442 bp, Homo Sapiens
ggagacaacatctttaaaagttcctggaaattctaaaaagtgcctactaacttaaaaaaaaattgtctttaggtatttcatgctaagttggaagcttctttatcaaatatgatgcaaccaaatacagcatgaacccatagctaaaaaaaaaaaaactacccatgtgattaaatttttgttgagaacgaacaatttttttcttgatgcacaacctcattctacttttctgtacaactggatagtaacttctttttggtaataaaaattcaacatatgttacattggttttctgacaactttattttcaatatggctatttaaaaattcttcctaatggaggatttggaaaagccaacttttaattgagccaacaataatcaaacaatgcagctgatatatcagctactattttcagagtgaccgttatgtgctagcaattgtt

SEQ ID NO: 212723 - DNA, 591 bp, Homo Sapiens
taatcaagccatttggtgaaaatctgtaattcacaagtcaaatagcacagaacagagacaactttcggagcccactgtggacatggtgggggccagcctgtgctgctaaacatagattttgctgatctgttggcttctcagtttatagcattcagccccctggctcctcagcagctccttctcttcggctgtgtctcgagctttcagctgcgagaagtgggcaggagaggcgatgagatcatattgttggtccagataccgcaggtagatgagcatgtgcagggcataggccaacaccagcagcaggatcagggacattgccaggccgatcagaaaagctggcgagaaggaggaggcgcagtcttgggctttggtaaatcgtccccccttgatggcaaaaccttggatctggaaatcaataaaagtgacctcccacaggctcgacccatcatccgtgtcgctgggcagcaagagggcctggtcctgctgcaggctgcccacgcgttggcagcggtaggagtaaccagagggagcatatacgccagttgggttaaagactgcttggattgaattgttggaaatgatctcgac

SEQ ID NO: 212724 - DNA, 564 bp, Homo Sapiens
ccgggtaggtgttatagccactttataaatgaggatgtgaggaacagagaggttaagtaaattaccaaggtcatataactagcaaatttgatagccaggattgcagtctatgtctcctgaattccagatcccacattcctatccagtacaccatatttatgcaaactgtgcggaactctcaacctcctgattacttaagttaaaaaagtccagtggttacatatatgcatacaatgtgatataaatagagaaagaaatatattaatgaagatgtttaaaattctatatgagtagaaaaaattctgaagatttaatagatacatctgttgtaaataggcagcccatatattctgccagagaaaggttatacattttaaaatgtgtaattagagaagcctaaaacaatggcagtttgaggccaggtgcagtgtggctcacgcctgtaatcctagcactttgggaggccaaggcaggaggattgcctgaagctgggttcaagaccagcttgggcaacatagcaagacccctgtctctacaaaaaaaaaaaagaagaagattagctcg

SEQ ID NO: 212725 - DNA, 567 bp, Homo Sapiens
gagatggagtctcgctctgccgcccgccgttctctcagctcactgcaacctctgccccccaggctcaagcgattctctcgcctcagcctcctgagtagctgggattacaggtgtgcaccaccaggcctggccagtccttccattcttagttcttgaggttatgcagtgtctttgccctgtgcttctcttgtattatgatccaaactcctttgtttaaaaaaaaataaaacacctaaatataatccaaatgtgctaataaatgtgaaacagcctctttctctgaaacaagttcttcagtaaaataattctgtaatgtattgctttgcttttcttacatgaagttatgctattacaaaattaagtttcaattacaggcaaggttaaactctgcaagcaacccaaaactcaaaaagggctgaatgataagtcattcaggtaaagacaaaagaatggctccttatcattcaacttaaccaaccttctaaaggttcctccatccccactgtctattacgctcgtggtatccttgtcttacacacttatcactatctgcaattgtctattatg

SEQ ID NO: 212726 - DNA, 598 bp, Homo Sapiens
agacagagtctcgctctgtcacccaggctgaagtgcagtggtgggatcttggctcactgcaacctccacctcccaggttcaagtgattttcctgccttagcctccctagtagctgggattacagatgcgtgtcgccacacccaggtaacttctgtgtttttagtagagatgagatttcaccatgttggctaagttgatctccagctcctggcctcaaataatccgcccacctcagcctcccaaaatgccaggattacaggcacgagccaccgcgccaggacatagacttttatctggcaaattagaatcacaaggacagtggtccttgtgaacatggctttacgtaagaaatctaaggtctctcttatcaagaaactctttaaatacccatccaataaaagcttgtttctcttaactgaattctgtaatcctttaagattcatatgctaacatggcaataaaaacactcaagttttctgataccagatgttctactactaatgatcttattctattataacccaagaatctaatctaaaatactgaagtctctcactgcttagaaatctctgctttatggataccaatcttatggggg

SEQ ID NO: 212727 - DNA, 541 bp, Homo Sapiens
tgctctgtcaccaggctggagtgcagtggtgcgatctcggctcactgcagtctccgcctcgcgggttcaggcaattctgcctcacccttctgagtagctgggactacaggcatgccccaccatgcccagctaatttttgtatttttagtagagacggggtttcaccatgttggccaggatggtctcgatctctggaccttgtgatccgcctgcctcggcctcccaaagtgctgggattacaggcgtgagccaccacgcccagccaggcacttcaaattttttgtctctgtgtgtctgcgaataactgagaaagtgccacagtattgatttgggggttacaaacatattttagtgagtaggcaaattctcaaatacaaaatctatgaataaggatcaagtatacgttcatttggcattttaagtaccccaggttccctcattatctgagggagggcagcatatgaaacttatttagacttcttcttaaacatttaatgtaatttaatttatttgagacaggatgtctgttgcccaggctgga

SEQ ID NO: 212728 - DNA, 547 bp, Homo Sapiens; identical to SEQ ID NO: 51842

SEQ ID NO: 212729 - DNA, 534 bp, Homo Sapiens
ctgagaacctgccagggtctgtgatctgccttttactggcatcatctcctgggatcctcccaacctctccaggttctccaggtgaggaagctgaggcttagagggactcctgaatgtactcaaggcaacacagccaggaaatgattcagaagtctgtgcccttaacctctcagtatcaaattgcccttgagggttaaaatcccagactttgggggttcaaatggtcttacgttcatatctcacatacgacctcgaagcaatggcctagaatatctcaagagtctgtggcctcactctctgcttgctataaggcttcactccagtgacaaaggatggacgccccattaagggctcaatggtgcagctggggtcacactggggaaaaagaggtttgctccagcaaactctaaactttgtagtggttctggctttaagccttggctctgctggagcaacctgagctcaccgtcccttctcaatttccccacctaaaaaaaaaacagggctggaccccactttaggagaggcctcaaa

SEQ ID NO: 212730 - DNA, 592 bp, Homo Sapiens
tcatgtacacacaagtttgtattttttagagcaaaacaacagttaatgctggcaaagatgtttagttatcagggattccataagctttcaatacactgaaaggcaacattttttgcatgtctacaaattatacatttgtttccacacatgtgccaaattttaccctaacagttaggactttttcaccaaatcgtagacatagatatggaaatcatcatcaaacttgatgaaatacacagagggtttggcttccacttggtgaatgaccatgccgatccttttggagccatcttctttggtatattccacatgcttacctattaggccatctacaactcctcctggctccctctctgttggaggagactcactggattctggcatgatgcggaggtcaccttccttataatcatctagaagctggtacatgtacaagacaggatctttctcataggtaatataaaaccaggctttcatgataggtgcttgagctaagaccatccccctccattcatccttagaaccatgctctccctcaaacatatgttccactgctttgccaattatggtatttgcaaggttggcatcacta

SEQ ID NO: 212731 - DNA, 606 bp, Homo Sapiens
tttatgtagaatgattataaatttatttttaattatgtaaatacaagttttagaatgaatcatcttcctattcatgtggcattatctgtcattttttaaaaacaagtttaaaagcactttgtatgataatgggacaaaaaaattagaattacaaagtttagattatagggtgacttcttaatatggatacaaaaaattgagacaggttccaaaccaaaataaagaatattgagttacttagtttacttcaacggagcaggtttttttgagggaaggcgatgaaagagtaaatgattaagcatgtgaaaaagtattagaaaattgagcatagaaatgaagaaatattgggaggaaggaaaagatagtacagattcttgttttataaggtgtcaaattatgtgctagccatatgtattatttactaatctcatggttgtgttacccctatgtatacttttgtttgtttttgtatgtactcatctgaaagccctctatttttaaatagaatttttgatagtgtaaagaagttaaaggatgaacaatggtttggaaagagcaagtttcagaaggtagaaaaaactttacttgtttggaactcaattattt

SEQ ID NO: 212732 - DNA, 488 bp, Homo Sapiens
ctaaccaggggtcataatttcccttgcccttctaaaacattcacaaggtcactttactaaaaacctagctaacctgtatgtacaaaatctaaacaatgtaatacaactttctttgtaaattattaaatgatgctacgaaatgtaagcaaaatatgtgaatgggtaagtaaaaatgaggcactataaaactagttttattcttataatatgcctaatgatccaccatctactgtcttccccccaccccttatctaactagtcacaatacttggtacttctttgcctgaataaaaataactctgaatttctgaaaccttttttaatagctggaggtggttcctggaataaagctgggcagtatggaaaagggttaaatgattatccagatgatacatgtggataatttaaggtattacaaagcatgttttttgttttttgattattcatgccaatacttcctcttcactgtatactaaactgaatgatta

SEQ ID NO: 212733 - DNA, 595 bp, Homo Sapiens
ggtttgatatactcaataggcactggcttttttttgtgatgtggctttttttgtgatgtggctttccacactattgtagaagtccagaatcccatttaataagatgcatgagctattagtcaatgaactttagggctggatggatcaacgaagtgtttttcactgccccagcttccttatgaaccagattactgaccagcggtgaactacaataaattcgaagacacaactaacaaaaacttaggaaggcctggaagagaggtgccaaactgcactgcaaatacaaaataaaatattttcatgttcttgataaatatttataaaaaaatatacatataatgaataggccattttataatgctagttaaaactttgaagagctgttaaatctgtaggtccatcaatatcctggcttcaaatcaatatgtagaaatatttttaattaaatttcaataaatacaccagagggatttaaatatgataaaaacagtaatttcaatctctgtttttaccaacaatatgtttaattagttcgtgatgggcttgaactaatcaataaactacagtctacaaaaaggtttttgtaaaaatgcat

SEQ ID NO: 212734 - DNA, 599 bp, Homo Sapiens
gttatttttactttttaagttatataaataatatacattttcaataggaaaatgggaagatacagataagcagtggtcttatatatatccttgcagctttttcccttcggacatacatattttgttacagtaattcctgcatctcaaaaataatacaaaaagtgaaaataagtttagaccagccttaaccttagctcaggtgctaatttatatataaatctatgtgcattcatttcaattttgacttacaaaatctaaagtgatgctgttataatactaaaagattccactttaaacagcagcagtttcagaataattaaaaatttgattcaggcatgaggctgataaagaacgaagttttactttttttcattaaaataagtagctttctactattgcatcctttgaagagaagaatgttctgctggtttggccacaagctctttagatggttacttttagtaaactcttcattcatcctggcattcttgaaaatattcgtcaaacatagaggaagactcatcttcacgttcctttggttctttaaattctaggtcttctccatattgaatggcaaaatcaatatgctgcaatacaat

SEQ ID NO: 212735 - DNA, 617 bp, Homo Sapiens
cattattgtatataaagaacattgtgacttttaatattagcatttttgctttcaacagcaattagcaatctcttggtttgctgtttggtaaagcatcggttaatgaggtcatctagtttaaaatcccagctacttgaaaataacagggaggaggtcaaatctatcatttcatgttatattctctgctctcttttcagttctctaaagaaaagatatctttgttatccacaataagtcattacgacccgttactggccctctgtgttttactaccacctcaagatacagttaggttctctcttgctgaagtactgaaataggataattcatctaataaacaaacaaacaaaaaaaacaactttgagcatctgaggatgaggaattggtttcgcgttggttgtgttgtctttcctccgacagttctgagttcacgtctagcgaggggttgtctctatggtggaaggggttcccggggtggttgacctcggagtggctgctggtggtgtgtccatcgggctcccagccccgctgttgggcgtgacagaggagctgactgcaggtgtgtctccctgctgctgggcctgcagggtctgtccacagatgtgatggtgcttctc

SEQ ID NO: 212736 - DNA, 444 bp, Homo Sapiens
tttttttttttcctctttgtttctcctagccctattagggcacactgtagtcaccttctatgagagcaagggaaacaggaagatgggctcctggagtccaaacaggatgtggacgtccctggtagttctctcttttcacacaacttttccctgagaactgtcccagtcaggtggaccttcacaacaacacgaacagctaaaactctgagagaaaaccctgactttcagaaagcataaagctgagaaaaaacaaccctggaaattggagacatgggataaaccagacagtggagaaagctggacgagggatgctctaattctgtatatgaatcaacagaagtcccaggctcacccccgagctgcaaaaatgtgcccaaacccaaataagcacaggacaggctctgggaattactcaggtcctacacaacaggccctgacaagcac

SEQ ID NO: 212737 - DNA, 489 bp, Homo Sapiens
ttttgcatggagcacagattactgctctactctaggttacaattccaaggaaataatgactaaagaaaaatactgctgtttcaacatttctgagtcatttagtaagaatggaaggttaacattagcaatttaacatttcaaatgtggtgggagtatttattgatgtactaatttgcattttgttcctgccaaatctttttactctgttggctccagggagtttgaaagtctaggacagaatttttcttcctaggtttgtttacatattgtggaaaagaagtgagcatctttggagttaaggagagttaagacccaaggagaagaaagaaaaagactatgaaagatttttagaatgtttatccctgtgtaagatctccaaagcccctcccttgacccagtagtagcatatggagccacagtgatggctgaaattgaatatcccactaacttggtaaaagttgggcaggctcacagtcagacttaaatcat

SEQ ID NO: 212738 - DNA, 474 bp, Homo Sapiens
aaagacaagttatttttttgaagatatctgctcctaatcggcatgtcccagtggttacttttctgggcttcagcttcctcatctgtaaaattagctcagcagtggagtctccagaggttttgcccattctgataaactgttctcacaccaatcccaagagcttcagcttttctgggcctttctgggcctcagcttcctcatctataaaattagttcagcagtggaatctgcagaaggtcagcccattctgataaactattctcacaccaatcccaagagcacgggacaggaaattgtgacgtcacatctgcattaccttccaggaagcccaggtccagcctctgagaattcacaaatcaaaaatgtgacaaagagaaatctttacaagatttcccccctccccactccaaagcaaaacatgttcccagcatctacacagtcacaaatctgtctaggaaataaggatgccccctt

SEQ ID NO: 212739 - DNA, 477 bp, Homo Sapiens; identical to SEQ ID NO: 59515

SEQ ID NO: 212740 - DNA, 442 bp, Homo Sapiens; identical to SEQ ID NO: 61968

SEQ ID NO: 212741 - DNA, 439 bp, Homo Sapiens
tttttttttggattttggttgctgtgagtgcattcaccatgaattaatgttcatgaaaaagctgactatatgagatcaccactttctttgcttatactatgaagttgaccattctgaggctaagggctagtcagacaattttaccagacctggtaattctttctgaaccctgaatctgagagggctaggctttccaacaactcaaaaactgtaatcaattaatgaatagggattgcggattcagaaattatgagatatgagtttaggtgtcttaaagaagaacacgcaatgaaaatgtgttgagtcctttattggttattaataattgattttgaatactacatgtaggatattatgagttatatacattttttgctacaatgaagcactaaacttttgaatcatctgaagttatagaaacacactagtattaggcagg

SEQ ID NO: 212742 - DNA, 506 bp, Homo Sapiens
  misc_feature (480)..(480): n is a, c, g, or t
aagtattttaggtaggtatcaccatttaggttgggtagaagtaattcttaaatcttaagaagcaatcatagatatgtgaaagccaatagtcattactagggatcatgattcggaaaaacagcctctcttcaatgatcctgaatgagccctttgaattcctctcctgcaactgatcaccccatgggtagtggtgagggatgggtgacaggaagggaccctaacccaaagtagttcagagcgggtgagttttaggagcatttcggtaccaaacacagcttcacgattgagaatcatcagtcatccccagctttctatttcatttgctaacctctctaggaacaactggatgttgtaaatgtttctcatctggccttaaaatccatgaaagctggaaaatcacaaggcatctgtacacatactggtggattttaatgagagtcctgtgtttggagcacagaaataaaacagtttcagaagcanagtaagaaaaggcccttgattatgac

SEQ ID NO: 212743 - DNA, 427 bp, Homo Sapiens
gttttttttctttttcttttttcttttaaagggggagggcataacaaagaatgacaaaaacaaaaaaactgaacccaaaaggcatggctggggtctgtgtctttgtcagctgcagtttcaaaactaaaagataaatttgatgccaggtaaaggtggcagggctgctatgaccgagtctgagaggctctttttgccctgcttcttgggctctcaatttactctctgcagagagtgggccacaagtactgcgaaattctgaaaaggagcaaaagaaaaaaaggataatgtcaggaacatgaaataagaggtggaaacaaagggatggcaggggatagtactagaaaacgagcaagccagaactaagaggctatgcaagagaaagggcaggcagaaaaggtcactggactacaggtaaagcagacaggct

SEQ ID NO: 212744 - DNA, 495 bp, Homo Sapiens
atctttaagacagtctcactctgtcgcccagggtggagtgtaatggcatgatctcggttcactgatcatgcctcactcctgcctcagcccttcccctcccgacctctgctcttcctggtccctcatcccagatcttcacaccaggcccccaccactacctcctgacctgagattatcttgcctattagttcacttgtgtatcatccttcttccccgctagagtgtcagccttcacatgggcagaaacatttgaatcaccagcttccactacacaggctggcacgcagcagtcatcaaatatgtatttctttgaatgaaggaatacaggaattaaagtcaaggtgcaatacttcctaccaaatccagcaccatctcaataatttccattttgtcttctgacagtggaccattgggattcctagtaaatgagtttgcaaatgacttgggaattcactcttttggtctgcaagacgactagcaaaatttaacagggga

SEQ ID NO: 212745 - DNA, 543 bp, Homo Sapiens; identical to SEQ ID NO: 58735

SEQ ID NO: 212746 - DNA, 431 bp, Homo Sapiens
ttttttttttttaaatgatcctcccacttcagcctcccaagtagctgggattacaggcgtgcatcaccacaccaatcatagctgtgacttctgtctccctccccaaaacccactcagcactaaggtccatgggaagacagatatttttatctcatacaccactgaatcccagtgtatagtgcctgggcactagcatgtgttagattatgtgataaaaaataacattataaaagagaaatacaccttatcacacaatgactcacattggtttcaggataggctgtatccctgacatctaacttgttaagaggcagaaaagtaacctctccaggaagattcattttattaaactccattaaaatcttcgtgctgacttcatctgaatcaacaatgtgataaaataacctaaatataaacagagtaagacaaat

SEQ ID NO: 212747 - DNA, 1000 bp, Homo Sapiens
agtcaatagttgtagaaaaatttttgttgtttaattttaagaaattatgacagccacctcaaccttcagcagccaccacgctgatcagtccagcagacatcaacactgagatccatgcatcaagaagagctacatccaaggaaactcatccatgcctggacttaatttatataatgaaattctgaactttcaatagatgctgtaataggatgagagttttggagatcttgggagggaatgaatgtgttttgcatggggaagggacatgaatcactgaagcccagatgatggacaatggctgacagactctaaaaatggccccatgatctccacctcctggtatccatacctctacaatcccttccccttattcaatagagtacaaaagaaggataggatttcacttctgttattacattacatacaactgtagtacctgtcttgctggaagacttcccctttcctggctttaaagaaaaaagttacaaattgtgaacagctgtcccctgtagaagccatgttacaatgaactgaggaaagccaccggccaacatccagcaagaatctgaggccctcagtccgcattcctcaagaaactgaatgctgctgacaaaaatacaagaggaagtggatccatccccaatcaagcctccagaaaagaacacggtcttggccaaaaccttgatggtaaccttggagaagactcagctaagctgtgcctggatttctgactcactgaaactgtgggataataaatgtgtgttattttcagccaataaatttgcagtaatgttattatgcagcaaaagttaactaatttattatctttcagtaccttatccttgattgatgtttgttctgtataaaattgcatacttaaaatatataatttttactcaaaattttgaaaaataatagtatcttctaacccataatgttgatatttagaaatctgatacattataatttttgaacccttgtaaaaaaaaaaaaaaaaaaa

SEQ ID NO: 212748 - DNA, 1000 bp, Homo Sapiens
tgagtgtgtcgttctggctttgaagggtggggagtggaggggagactggccagaagcaggacctgctaggtgattctagcagcaggggatgatacctgaactagggcagtgacagagagttatggggacagggcagagatgctgcccataattaccccaggagtgtggacagctttaaaggcaacacgtgctagatcatcctccctgttccacaggcgagaaagagagagagaagaggaaattccctgaggcctataggccatgggcttgggtagactgctcagccccactggctctctgctcctgcctggtttgtgccgggcactgtagggtggtgtgaaggggaaacacaaaggactgagaaagccaggccccatcttcatccattcaggggctgtagaaagacaccatggaccgtgtggctcataaacaacagatgttattcctcacatacagttctgggggctgtgaattccaagatcataaagccagcatatttggtgtctggtgagggctgactttctggttcacagatggcgtctctcactgtgtcctcaggtggtgaaaggggtaaacgggctccctcaggcctctaatctcattcctgagggctccaccctcatgacccaggcacctcccaaaggtcccacctcctaagtctatcacattgggaattagatttcaacataggaattggggtgggggaggcacattcagaccatagcattctgccccagactctccccagttcattttcttgtcatatgcaaaatatattcattccatcccaataggctcccaaatcttaacttgttccagcatcagttcaaaagtttcaagtccagagcctcatctaatctcacctaggccaggcacagtggtcatgtctgtgatcccagcactttgggaggctgaggcaggaggattgcttgaggccgggagttcaggaccggcctgggcaacaaagtgagaccctgtctctacaaaaaaaaaaaaaaaa

SEQ ID NO: 212749 - DNA, 420 bp, Homo Sapiens
ggaggggggagtagctataaataaacttgattgaaaaggcaggttttcttcctgttttaagcttcttcaatgctattcagaactactcaaaggaagaaagaaaaaaacaccagacttttagacacccagggcagtacaatccagcaaccgtttaaagtaaacagaaagcatggtgtactactaagcttctttaaaaaaaaaaaaaaaaaaaaaaaaagccatttccaaagattcttatctggtcctccttaggaaggcttattccacctgaggcaattgcagcaacgaagagctccgcggcttcctctaaggcacaggcagcgtaattcacattgagcagaaaacccagggactacattagcctttgaaactgaaccaagttctgtggccgcggtatggccttcatttcagctggggcta

SEQ ID NO: 212750 - DNA, 625 bp, Homo Sapiens
  misc_feature (613)..(613): n is a, c, g, or t
ccgggaccacacactgggtcctggtgtgaggcaaggcagggatccaaaaacaaacaggaattcaccaccctcgccttcagctcaacaaaggaaaggaaagtctctttgctttgccaatgcctgcataggtatctgttagtttatttctcttcctagagctggacctgagtgcctgtctttttaactgatggccatctacatcttttgaccctctgccttcttgactgtccatttttagctaatcaaaacccttcatgtcatatttggtagatgcgtgaccctcttttctctctgtgttttattcattaattccttcttaataaaatgagtatctgtaaacctgatatctaataatctgaatatatgtctatccacgtgctcctccctgcctctctccctccaggtaacctctggtttgaattttatgtgccaggcgtggtggctcacacctgtaatcccagcactttgggaggtcgaggcaggcagatcacaaggtcaggagatcgagaccatcctggctaacacggtgaaaccctgtctctactaaaaatacaaaaaaattcgccgggcatggtggtgggcgcttgtagtcccagctactcaggaggctgangcaggataatgg

SEQ ID NO: 212751 - DNA, 574 bp, Homo Sapiens; identical to SEQ ID NO: 44127

SEQ ID NO: 212752 - DNA, 359 bp, Homo Sapiens
ttttttttttttgttttgtttttgttttttgagatggagtctcactctatcacccaggctggagtgcagtggcagaccctggctcactgcaacctccacctcccgaattcaaccaattctcctgcctcagcctcccgagcagccgggaccacaggcaccagtcaccatggctggctgctcttcgtatttttttttttttagtagagacagggtttcacaatattaagcaggctggtctcgtactcccgaccctgtgatccacttccctcagcctcccaaagtactgggattacaggcatgagccaccacacccggccacaaagacatttcaaaatgccgcctataggcaagggccaggc

SEQ ID NO: 212753 - DNA, 391 bp, Homo Sapiens; identical to SEQ ID NO: 60444

SEQ ID NO: 212754 - DNA, 476 bp, Homo Sapiens; identical to SEQ ID NO: 61911

SEQ ID NO: 212755 - DNA, 446 bp, Homo Sapiens; identical to SEQ ID NO: 60993

SEQ ID NO: 212756 - DNA, 442 bp, Homo Sapiens
aatcggagatggcggtcttgccatgttgcctgggctaatctcaaactcttggcctgagagcattaaaacactttacaagtaattatctgggcttctgatattaatggtattgaaatttctggttttctttttctgcaccaaatctctaatattaccaaagttaataattttctacttgtatttttcaaattgttccttctttaaaaagaaaataataaaagcagctcattgactcactgcaactcattgagacagtgcaattacacggcacttaagtgtctcaacaaattttcataggaattgtacagaatacatacttttgactcagtgcaactacatgccaattaagtattcaattaatcttcacaggaattgtacagagtacttattattcctattttacagatgagaatactgagctggaagaaggaaataacttatc

SEQ ID NO: 212757 - DNA, 503 bp, Homo Sapiens
cctggttcaaagcctacatggtttttctttttgaaaacctacatggtttctttttgtagcctggctctcttgcttgttcctactggatccaggacgagcgcccttcctgggacagaagccccatggctggaaccccctccccactggctggccttcagatttggtcatcatctgctccaatcccccttggctgagctcacaccataactgtgcacagtgtctgggatcctcttttgctttctaagccacacagtgagcaaaagacaacagcagtcccctggtcccagtgccttctgcgagacgtcttcttcctcagccctctatgctgtggttctctgctgcccacccaagtttgcagggatgtcaaatacaaagaaacctgctgttacctgggtaacagagatatgcaaagtataacatgacatgatatgtctagaatctacttctgggataggactagggaaggtcaatgtgctgcattgcagagagctggtaacatttac

SEQ ID NO: 212758 - DNA, 487 bp, Homo Sapiens; identical to SEQ ID NO: 59888

SEQ ID NO: 212759 - DNA, 472 bp, Homo Sapiens
acaaaaaggaaaactgacagagaatttaaagacagacacaccctgtctctccaaattagaacaaaacatcactagctctaattggcagggatctcctattaaatggtcagaggtatactagtggatacaaacatactaacattttttaaagcttgccaaacccatgttacgttgtgggagagaaaaaaaagtgtaaaaaacaacctggtcatttactaagggttctatcaaattcgcagtgatgaggggtacaaaaggaaaagatgtttacttgtacaagaattccttactgccttcaactatataaaaatgaagcaaaaagaattgtgcagtgcaaatatgactcattaaaaatgcttctgaaagaattcctggtaaatatctaaattaattatctttttttcagcacctgatataaacacgtgtgcacgtgtgtgtaatctgaggaaaaccccacagcacaggttttcca

SEQ ID NO: 212760 - DNA, 422 bp, Homo Sapiens
cacactgccttcactcaggaaaagagagacaaaaaagagaaaaagagaaaggttctaattactggaaaggaagttagtttcatcatttattagttttgatgccaaatgaagaggaaaggagaaagctatctcaaaaagaatatcatttatatgagtaatgatagctctggcctaaagaggacagtcaaattctagatcttctcagtcagagggcagagctcagggcacataggagggcaagtacagacatagcagctgaagaagtcagaaggcagtacaaggaaggcccacgccactctgggtttgatacagttcatatcgttagtttgcatggatgccaagaaaaacatctttcaaaaacaagccggctggtgcaagatcaccaatttcttgaaatgaatagcaagagcaaattctatctc

SEQ ID NO: 212761 - DNA, 545 bp, Homo Sapiens
tactaagtctttggatgccagcatatattttatacatatggcctatcttgattggggctagctagccacgcttccagggctcaagagccacatctggctggtagctaccatagcagacagtgcaggactagaagcatttcaagatcctggcctggaagagtttctgtgtggtaagggaaactgacactttacatactgtcatcacttcccatgcttgaattgggattgcagagctatggagccaaggaacggtgctaggaaaggagtatcaggaagcacagagtttccttgaaatgttcctactgctttctctacatgtggcctgcagtgtgtataaatgaaagtgcaagcaatgaatccatacgtgtacatggggatatgtgtaaacacatatggacccacatatctataagttccacagctgatattcattctgtcacctgtcaagataacagtaaggaaggcttcaatcaaagggaaggagacagcacagcattctcctcccccaggaaaaaggataatttaacaacagtctcatttatgtg

SEQ ID NO: 212762 - DNA, 458 bp, Homo Sapiens
tcacagacaaggttttgcccaggctggtctcaaactcctggactcaagcaatcttcttgcctcagcatcccaaaatgctgggattacaggagtgaagccaccgcacccggcttgccaaatcatttctatcagcactctcaccatagcttccctgctcaatggcctatggtatttcccatggtctgacacagaaacttccaattctgcctgataagactgatccaaccatatttttgacatcaatctaccacacaccctgtgttctcactgggcagagaacatcaatatgtataagagaacccatacaaatataatttgttgtttttaagttatagaaatgtcatgttgttttcttttctcttttctttattttcagacggagtcttgctctgtcgcccaggctggagtgcaatggcgcaatcttggctcactgcaacctccgcctcccaggttcaagc

SEQ ID NO: 212763 - DNA, 464 bp, Homo Sapiens
  misc_feature (201)..(201): n is a, c, g, or t
ttcagaagaaatgtttttattccaagggaacaggaaatatgtcgaaaagttctctctctaaaacactgatttcccatttatattcatgtgataattcagctcaaacctgtgatttcctttacggttttcagaatatccagttcctgtggatccagaggaggagtatgtgtgaaggagtcacccctaaatgccaccggaggnatgtggagatcgccactgatggaggtgcagtttttgaagtgtttaatattcgtagcatttatggagagtgagtctttaaattcaccaatacctattccgttacacactttgcggcaaggccttcgcacttcttacacttgcggacgccgtcttcctccatctcatagctgtcggccccacaggctcggacgcacgagcccgtgatctgtcaccacataattacggggacacttcttcacgcaggtggcaccaaagctgtattt

SEQ ID NO: 212764 - DNA, 460 bp, Homo Sapiens
agagaggtacaaagacccacaaacaaaaatgtggtttgacatagtttctctgttggagcctttccagcaccagaacagacaggaagtgtgtattaccaacaactgcggcacaaatccagggctgggctctgcacacagggcagtcaccaactatctattttttgatacattaggattcatcgccaccaagctcggcatgttcaatgttggcaagtgggtctgccttggctgcaaagggactgactctacaggctcatgtgccgcctgcatgagggcctcggctatttttaggtaccagctaatccattcaatgcataatgttaccaccgatgactcacagctcacagaagtcaaccaaaaaatagtagaatgaaaggaaagccatcggtagacagccagtaagtacatcatgataacaactgctgtacgagcacacacacaggcacactcacacccacgc

SEQ ID NO: 212765 - DNA, 458 bp, Homo Sapiens
gtaacgagatctgttaacgagacaagtggatttcttattttttgggagaataacatttcaagtcattgggattcaaagagtgttccataccatcaaattgactgcaacgtttatatgtacaaataattcttagctcatgactgtacaaaaattgggagctcagttatagtttggtgattgctgtggtactcctgtgattggggtggagcccaggaatctgcattttacatgcctctcacgtgattctggtaatgggccatggacccaatggactatccaatcctcggaatctctgtccaccaaaggggcctgtggttttgcagtgcgagaacccggctgtgcacctaccagttgctcaacctctccaaaaatcagatgattcatcctcacaacaggggtggcattgcactgcttggcctacccttaaagagttgctgggatgattaagtgagatgatc

SEQ ID NO: 212766 - DNA, 468 bp, Homo Sapiens
cctaaaaaaaggtcttgctctgttgcccaggctggtcttgaactcctggtctcaagccatcatcctgccttgacctcccaaggtgatggaattacaggcatgagccactgcaccaggcccctttcttaattcttatatctttccttcctgaagtctttcagctgccctctgctgccatgcccttggtctagtagtcaccagaccctcagcatagattttacaatagcttccaggtctttcctctcatccggtttcccaaactgcaggcattcgtcttccatctttacaatttttggggtcatattgacatatcacctgttctacaatttaccttagtatttttcttaaattaactttttaaagaaacttaaatagaccgattttaaaagaaagctttctagagttgaaagcggggagtcagacagatatttgtccacccatgtacctagcaagattattcacaatagt

SEQ ID NO: 212767 - DNA, 404 bp, Homo Sapiens; identical to SEQ ID NO: 61970

SEQ ID NO: 212768 - DNA, 468 bp, Homo Sapiens
aatgacgactgacatggtcagaattgcccttctgatcagtccctctagcagtgatgtggaagacgatagctaagagatcaattaggaggctggtgcaattgtttcagtgggcaagaagggatcagggtggtagatatgaggaaaaagagaaggtaagttgtccactttcggcagagaaaactaaccagacttggaaaggaaagtgaggaaaaggagggaatcaaggatggctcccaggtttctggttttgatgggaccattaaccaagatagggaatgaaatgcagcattgagcagatgcagcaaagtacggggagtaatactgggatagccaggccagtgtgctgcccagctccagggagcaccagtcacactgctgtgctccaggaaagtcacgtgaaaatggtattccctgaggttgtacaatggggcagcccgggtttcagcaatggatgggaaatcatctgct

SEQ ID NO: 212769 - DNA, 570 bp, Homo Sapiens
aaaatttttcttaaatttaatataaaaaaatgtggctttatgttaaaactttaggaaaaatatgcatatatttcatcaggttaaaagtttacgagaatatgaatatatatgaaaatgatattaaaatttggaatataaactgtgtttttcataaccaaatcatagaaaatttatggtagtatatgtataaactgtaatacgaagcaagataaatggaactataaaatgtagttttaaatttattaacggagtatgttttgttaacatactacagaatcacaaacgtttaaatagtttcattataatgccagaaaatgaaggctaactggcacaatttggctactatccttattgatgttttatgttactacaaacaacagcatcaactaaatgaatacatataacaacacattcacaataatgcttcaagctatcttaaataatagcaccacagaaaagatcaacaccagtgcataacacctgtctaaaataaatgttaatatccatgggctgaaacagtccatctcaaagaaaaccagttagactctcattctctcattgtttataaat

SEQ ID NO: 212770 - DNA, 588 bp, Homo Sapiens
ccaaactttctgtaatgttttaatattgtcctgttcatgaagacaaggaagaatatctcaaagggctttagttatggttgaattttttcctattcttggtagcttagaaaatttcccaaccaggagtgaggtctagctatcaatgtcaaggtggaaaaaatatgccaagagtggtgagcttgctctttttggcttcctcctacatttctgatcccatcttggagtggagaaagattcctccacccctccatcacacaccactgctcctgccccagtgctcaccccatcctagtcccatgcggttagggtgatatgttccagtcttcatttgaggtctgaggcaatgtgttgaccttgctcctcagcttatcttgagtaagggatgaatgtcatggccatatgcttcccatgaccacaattctcattctcatcagagatccaggaaagcttcctctgaattcagccaaactgcaatgtgtaaacatttctgctgtgagatttgaaacttgcgatagaaattccaagccagaagcttctgcaaaatatgtgaatcacagggaaagaatctgctcttttctgattgaccct

SEQ ID NO: 212771 - DNA, 478 bp, Homo Sapiens; identical to SEQ ID NO: 60403

SEQ ID NO: 212772 - DNA, 527 bp, Homo Sapiens; identical to SEQ ID NO: 60575

SEQ ID NO: 212773 - DNA, 501 bp, Homo Sapiens; identical to SEQ ID NO: 60378

SEQ ID NO: 212774 - DNA, 512 bp, Homo Sapiens
  misc_feature (464)..(464): n is a, c, g, or t
ccttttctactttaaaactacagtaaggttatgctttgaaaagcaatttttgaagttaccattagccaaaagaacatcattaccattgtttgtcctgtcaaacatataaaaatattctaacccaagcatttgccatcttgaacagagtatgtgtttgcaggcagacagttcaattctcatttctactagtgaccagaaacaaattacttaagccctttgagcttcaaattccttatctgttgaatgagagtgggaagatcaacttcagagtgtaataaggggattagacgggatgaccaacctaaatcaccaggcacagtgtgaggcacagaaagggggctcctcttcatccctgggagggaagttagagtgaagcttccactccccctgcttttacatataaattgttcactcccctgtggaagaacagtaaattgccttaatcattttttattaccacaagntagttaaactggtaatctataatagtttattcattatggttttctacc

SEQ ID NO: 212775 - DNA, 470 bp, Homo Sapiens
cctgtatataagtggttggtggattttaacacaccagttattcctcctgtgaatgcctcatagatgttggaaactgaggctgatgggggaacaactttagctacggaaggagggtattggttctcacatttgacccacactcctcctgcccggggttgttcctctctgcctcccttccctacactgctgctgtcctctttttgacatttctatttatttatttttctgccctctcagatcagcaggagagcacctaggtctcagccagctctctatggcaggcctctgcagcagcacttgtgaagtgctagtgattcacttccttctctattgctcacccttctctttcttggcaggcagtccagggagtggaggagggtggagtatagcagggaaagccaggcactgcctcacattttcactggaagcactgctccctcttattggcaggcaagttttttagtctgagc

SEQ ID NO: 212776 - DNA, 533 bp, Homo Sapiens; identical to SEQ ID NO: 60842

SEQ ID NO: 212777 - DNA, 502 bp, Homo Sapiens
gtcttcccatgaaactataaatggctaattcaggaatctgaattcaggaacactccatcttcctttaagttccaccttcccctgacccgttctctttctcagtgaaagcatttcttagaatgttagccattttcactagaaaactggctttctgagccttttggcaatcacaacataggtacctacaagtgtacatgtagccctgcggttttcagctttgctgtacattatcacaccaaacagagatcagggaaaaggaatcaacaaatgacaaggcaaatgagacatttgccaggaagccaaaagtcaacgatatttcctctgcctgctaaccagaaagagatgtatataggaaattcaaagttcctgctagagtagtaaacccctttgtaggtcacaattaatcacaaaaaccagaatgggatgaagctatcatcctgactttccaaaggaagccaagtctcctctactcctaactgtttaggcataagagcagatttgc

SEQ ID NO: 212778 - DNA, 431 bp, Homo Sapiens
atatcactatatcagtaatgttttctgccttcctatttccaaaagttgttagctctctacaaaattctaacagttcattagtgatacaggaacaaagcaaaacctgccatttttaattatgctacaagcttcttaaactatgcgttattcaaattgatgccaattattttgaaatgaaataaaatgctacttatctatgaataatatataggtaatatattatttttccatccatctaagagtctcaattttatgatttagaagtcatcattgctttttctctagagataaaaccataacttaaaacacatgaacacactttaagatacacaaaaacatccactatcaaatatgagaaacaatattgggacatgttctatttcaaatgtgatataagatttttagattaacttttcagttgcactgggagc

SEQ ID NO: 212779 - DNA, 592 bp, Homo Sapiens; identical to SEQ ID NO: 61601

SEQ ID NO: 212780 - DNA, 483 bp, Homo Sapiens; identical to SEQ ID NO: 60491

SEQ ID NO: 212781 - DNA, 401 bp, Homo Sapiens
cctaccaggcacttatttcttcttctcttctaaaatagcatcccaatttccctttcaggaacttgtccccctggctgactatcagccagtatccttgcctcccctcactatggcgtatacatgtaccctgaggttagccagcctctctcctgtgtcctgtattttccaaagccacattattctgctcttcctgtgattctgaagctcttctgtgtccttccaataaattccttttttattgcccatgaacaatgggcacgtggaggaaatacggaaggtaatttagcagattgttggcaagttaagttagcaagataagtggtttctattgttgcaactaaatatctttaaaatatatatcattggaaatagacattgtaatgttctttttatgaataatg

SEQ ID NO: 212782 - DNA, 611 bp, Homo Sapiens; identical to SEQ ID NO: 61840
  misc_feature (511)..(511): n is a, c, g, or t

SEQ ID NO: 212783 - DNA, 462 bp, Homo Sapiens
ttccattttgatggtcgtttgtatacattctgctaaaaatcatgtatgaaaagttttcatttttggttgacagaggggccacttaaactttgccatgctcaaatgtgtaaagccaccctcgtataagggaacatgccaataccgtgcagaactcacgtgacagccatctcctcacggtggcacagtaatagatttagagacctgacagctggggggccggagagagcactgtgtccctctcctcatgttatggatgaggaaactgagacccaccagtggtgagttgagtatctcatggtcacagcatcagtcactgaagatccaagactcaaccaggcctcctaacttcccggaaatattcttttccccaaccctggctacctgtttcatggacttgaaatctggaaaccaatcactgccctgctgacagctcaggattatgattacatgcctcgaatcaca

SEQ ID NO: 212784 - DNA, 600 bp, Homo Sapiens
  misc_feature (504)..(504): n is a, c, g, or t
  misc_feature (550)..(550): n is a, c, g, or t
aagtttagttgcttctgcaggtaggctttggaaggcatccattgtagattctgacattttctcatcttgcagcactgcttctttatattgcgaccaccaaacttgggcttatctaagcaattagtacaaacaccacagtcctcaggcacctggcagccgggacactgcccacaccgcctcgatcgacgtcctttctttactggaggttcctggggtgccttgtttctagtgacaggtttaattggtttgatgggtggagcaagaggttcagcatcttctgagccagcaattgatgacttgtcatcattccccatggaagacaaaatcttttctcgttcttcgcatggtaaggcactcagggtgggcatgtcatcaggaaacacagctcgttttcggccaagggaacagctgctcttctgcagacatgtttaatccggggtcctcgcacagaggtctctgatgagtcactttcttgaccctgtgctttgggctggtcggcttgtntaagactcttactcttctcaatcttgcagagctgagctttggcctnttttaggaggctggcagcgtcatgtcagtcactggaagctgtctgcctga

SEQ ID NO: 212785 - DNA, 595 bp, Homo Sapiens; identical to SEQ ID NO: 60344

SEQ ID NO: 212786 - DNA, 466 bp, Homo Sapiens
atcatttttattttattttttttagagaagcttcaacataaggacttcgaataaatccaagattcccttctcaactggtattcaagcaaggcctttctttagtttactgctgtgttcccagcacctagaacagcatctggcccattggaggacctcaataaagacctgttgagtgaatgagtgaatgaatggactcaactgggaggacagcaagttcacatgtcactgtaggaccgatccgtgaaatactcccactaacagccataagacaggacagcttttctttgccctcttcttgctggtcacagcgacatcagtgggctccccctggcaccagggatgtcaacatgataatgctgatggacgaaataaaagctaccagcaaccacctgctttccaaggccttttcagtttatctcatctgatcccaggagtagagtgcattcaccccattttacagatgggg

SEQ ID NO: 212787 - DNA, 446 bp, Homo Sapiens
aaatttatattattattcatttaaacacccccacacacaaacatacacacactttaagaaaagacatatgaaaaaggtaagtaaaaagcctggggtttaatttttgtttctaaggttcctcaagcatagctgaactaacactcttacttttacctggaaaatcatgactacagaagagtttaatttcaaaggccccgttaagaaaatcaaactacaatggaacttctttacaacaacctttcctactagtgaaattaagtttagggctggtctttttctggatctgatccaaagagagttaattagtgaagtaccacgaggacctcatggtaacgggctgggctctcggtgcagcgtcataacatgcttccaacacagccgctgccttaagcgcactcgcatggctcattcctgaggtgagacagtgcgcaaagaatcacttagtc

SEQ ID NO: 212788 - DNA, 473 bp, Homo Sapiens
gagacaagatattgctctgtcacccaggctggagtacagtggtacaatcttggctccttgcagccttgacctcccaggctcaagtgatcctctcacctgtgccaccatgcccacctagtttttgtagttttagtagaaacaggatttcaccatattggtcaggctgaccttgaactcctgagctgaagcaatccacctgacctggactcccaaaaggctggaattacaggtgtaagccactgcacacagcccctaactttcaatatatttgcaacaacccattatcatgtttccaaaaattacaacagcctcactcatcattattgggttgtagtttttaaagaaaaaaacaggacaaggaagctgtcctattactcctttgtgaaatccactaaaaatcactgatgctcctttggtaaagatagacaagtggaaaatacaccaataagagaattaaaaatcctacattagga

SEQ ID NO: 212789 - DNA, 437 bp, Homo Sapiens; identical to SEQ ID NO: 59684

SEQ ID NO: 212790 - DNA, 364 bp, Homo Sapiens
aaagacagggtttcactctgtcacccaagttgtgcagtggtatgatcacagctcactgtagcctcagcctccctagtagctaggaccacaggcactggccttattggcttttgttaattcaagttaaggctctgacacctacaactagaagagtctggatctgtttcctaagaccatgtcttatacttcctctggatttctgcacagctttaagtaatagtcatttaacaatctagactaaatactcaaattgtgatctttaaattagacaagctagttcttaagggtctgcgattgtctgaatgtttgagctccccaaatatctattttgagtgatggattatgaagtggggcctttgggaag

SEQ ID NO: 212791 - DNA, 555 bp, Homo Sapiens
ttttttttttttgaagctttcacttaatttttatttttaaaaccacagtcattacttacaatgcgcataacagatttatcatctttttctttgttaggatttgacaggtctggaacacatgctaataaattgctcaaaaatgcttcctgctgatatcacgcagctaaataatattccaccaactcaggaatcctactatgatcccaacctggtaagtggaatgggttacttttatgtacaacagaaagtacatccttatcaagtgttacttacagcatttctgtatagcacttcagaactagcagcaggctctatggttttatatgtctttgttgcaaaacagtagcacaggtaatccgaatcattcatagcttgctttggaatcttactgttcaccccatagatgcgtaatttggatttgttgcttatattccataagcggatgtcctgtttactaagggtgacagaaaatagccccagagtattctcattggccagagagaacaatcctgaggtttaaccatcaaggaaatattcatcacatggaatatcatc

SEQ ID NO: 212792 - DNA, 511 bp, Homo Sapiens; identical to SEQ ID NO: 59063

SEQ ID NO: 212793 - DNA, 546 bp, Homo Sapiens
acaggagaaaaggcatataaatttatttgatcacagttttatgtaacatgacagccttcagaatgaagacccaaagatggaggagaaattgtctactatgtttaggtttaacgaaatatgtacaggcatgcagaaacatgactggacaaaaaggtatgatctactgctcaagagaagacaacacaaggcctgtccgtccagattcttcttggcctctctgagcagcattctttccttctgggtatggggcaggaccctctctggaatgggggttttatgaccttaactgaagaccaaaactgtcgttgaaaaaacaagtaaggcccagaatttttattttctaagacatttttgggatataagggcataaatacatcatcatctaaagttcttctcattctcaataaaagtgcctttaggtatacctgtgtatttttattttctgcattcactactgaaggatatccattgattaattttagtgtaattccaccattcttgaagtctgtgttgtagaaaagggtcccacatattttcactcgtgcc

SEQ ID NO: 212794 - DNA, 470 bp, Homo Sapiens
gtgggtaaaagcatctcctataagctgtggtctggggtaaaaacagctcactggggcaggagctttactgaatagtaattctgtccatgctgggctccccaggcctggtcagaaggcctgtgtgttttgattccatcctacctccagtaagggaaaaaagatgaatgctctcaaactgaaacctctactggctggtatgtttctttactatctgtacaaaaccaattgcaaatatcaaactattacacaacaaaggaactcaacattaaggggacactgcctaatgataacaaaaacttaagttataattagagtttcagagatagatttagattggggtttctgtatttttcttacatcagctggaaacttatgcaccaattatgtgggggacactgtgctaagagctgcatacacattatctcactaggtttcacctgaaaaggcagggtaccgtcccctttcacaga

SEQ ID NO: 212795 - DNA, 532 bp, Homo Sapiens; identical to SEQ ID NO: 60727

SEQ ID NO: 212796 - DNA, 790 bp, Homo Sapiens
ttttttttttattgtcaattattttattcaaatgtttggaacttaaacacaaaatcatcattaagttttcacaaaatgaggcatctgtcgcttgaaaggcaaaaaatatttcagaaatatgtttacagaaatgtaaaaatattaggcatcaagacagatgtgaacgtattcagtagcttgtcttgtctgtcagtcttcctctgagccgaagatcttactgtactcactcagcatgagctcagctatctggttctggtagaccatgtggatcgccatgtttcctgtttcattttcagctcgcagaagggtaggtccaaatacaatccccaagctttgcgtggacatgaggttcttggaggctttggcactatcttagttagatgtccaaagaggactttcatggtgtcacgatttggcggagggagtttttgtacaagagattttacagcttcaattcttgtgttgttgtcttgctttttgatcgcttccacaaactgctcaaagaaactgtaagggaagagcggctcaggcagctcccggaaaaacatcttcagtgctccggtgacaacgtggatgtcctcccactggctgtcgtccaaattcagcttctcttcttggttgacaataaatcttaacttctgtattgtttgcagattgccactaactcgatatattgcatccacatctagacctcttttctcacagcttcaatgcattgctttacaaaacacggaactgtggaattttcacgttcacacactttgtgcagatgagaggcaaaaatttgatc

SEQ ID NO: 212797 - DNA, 349 bp, Homo Sapiens
taaattcgcggcgtcgacttttttttttttaagagacagggtcttactgtattgcccaggctggtcacaaactcctgggttcaagcaatcctcctgagaaagttatggctaattttcctttgcatcttccattctggtaaatattgcagcaaaggcaaagcagcatcataattctctctctcaggcaaggagtctgatctgcagcgaaagtaggtatttgcactgaaagcttctccaacgtgccaagtacatcagggagtgagactcaaatactcaccctgacccggcaggagtgatggcagagtgaaggaacattagcctgtggtttttctttctcattctgcgtcga

SEQ ID NO: 212798 - DNA, 315 bp, Homo Sapiens
gagactgggtctcgctgttgcccaggctggagtgcagtggcgcgatcatggctcactgcagcctcaactgcccaggctcaagcgatcctcctgcctcagcctcccaaagtgctgggattacaggcgtgacgactgcgctccatcccggcccgacttttggggagtgaagctttgtcctctgcagtcacacaacatgacaacctgggaggaactgcagtttaaatctgattccaaggctttttcccccaacccaggtcaacacactcaaccaggcagggtggctcaggacatcagcacagcacagtcccctactcg

SEQ ID NO: 212799 - DNA, 550 bp, Homo Sapiens
ttcctgcctaattttgacaaactgatgtgccaggaattaaattcatttattttggccacagactgatctaagaagtgagcccagagctctttatttttgatccaagagtctgtgtatgcaactagatctttcaaacattaataaccaacattctgtcacaataaaattaatgtgtttttaaaaaaatcatcataaatgaatattaccatttggccatatctataggtttctattctgatactcagatcattcacaaaagtgagcctatcacaaaagtgattatttgactgattcaactctaacagttaaaatgagatgtgcctgcagaaagacacaaacacacacgtatacaccaatacacacattcacacacacacaagcacacatgcaaatggtacagtatctaaatatcccatttatgataggactagtccaatagttttcagaagactttccaaagcatttttacatacttgaacttcttgagccttccagttgtattactaatgctaaatgattaattcattcttgatgacctttaatatataaa

SEQ ID NO: 212800 - DNA, 560 bp, Homo Sapiens
ttttgaagtaattatttaatgacacaggaaaataacatgttatgaaacaagctggttacaagtagtaggtagatgacttaatttttgataaaaaaattaaaaagcataaacatgcatataaaaattagattatgtacaaaataccaacagtatttacttctgctcagtaattaaatattcttccctttgtttttgtcttttaaaaaacattatttctgaaaaaaaaaatcagaaaaacatgatcgtggagagaattattaaacaccaggaattaggaacccaagaagctaagccaggagctcagcagtcaaggttggaagtccaggacaggtccgaccagggtgatggtggccaagcccagaaatggaagattgttcttttcttttcctactggaatgttctttaccagttttctctatattcgatgttagcacacttatttaatgggatcctatgattaactggcacaacagcaaaatgatgctagcaactttggctttgaactgctacaaaatgtactatcttgtagttatatactgtacaaaacacactagaaatca

SEQ ID NO: 212801 - DNA, 580 bp, Homo Sapiens
ttttataatatttattcttgcattctaaaaaatttgatacataacaatataaaagtccttaaaatttattgaaagtgtaagtaatatttttagaacatatactcatgtaaccaaattcaggccaaaagatagtctgagaatggaaatttacattccaaacacacactgaaatagagatgcaaaaatcctaaacaaaatattaacaaataatatgattgatctcagaaacagtattgagtaaaacaaggaagacacaaacacagatatgtacaattccattcacataaaattcaaaatcagacaaaactgtgtattttttaggaatgaatacatgggtggtaaagctatcaagaaaagtaagaaaagtattataaaagttgaaataaagctaaccttggagttgaggacttgtgattaaagaggtgttcatgaaggatttcttggttgcaaagcagtcttctatcttttaggtgtggtctcataaagtaagaaacaggtggggggactcttctttattttttctaatctcaggaaagtttgtgtagacttgaattattatttttttgaatgactagtagaa

SEQ ID NO: 212802 - DNA, 542 bp, Homo Sapiens
tctttttttaataaaaaaggttttactccccaggagcaaataaatcattttgaactactgataaacactgctgcagtgaaaagaaagatggctacatgtatgcaatagcacaaattcagtggaagaacagctgtgttgacgattagagataaaaatcacttatccattccctcctttcccacaaaccaaaccgaggattcccatagggaaaatgtctaactcaatagctcctcccttacatgacagggggtgtgtcattctcttaacagtggaaaacaaatgccaggtctccgcccagtggagatgctcttaacaccctaactggtagcaagacttctgcaaatgaggacacacacacacacacacatgcatgcatatgcacacacacagactcagacctccttccagcagccatagagctttatcccagtgtcttgtccactaactttagggctccaaagctaagggagcgaggcagcagggaagggaaagatctaactgaaggaaaaagctcctcctcgccccagtttctgcagggagca

SEQ ID NO: 212803 - DNA, 506 bp, Homo Sapiens
ttttgatagagatggggtatcactgtgttgaccaggctgatctaaaactcctggccttgagtaatcattgtgcctcaaccttctaaagtactgagattataggcatgagccactgtgcctggtcatactgttttctgcaatagaacttacctcctctctctcatgcttctgtagcaccaagtatcagaaaacataatctagtcatttctagataagcttacatcattctgattttcctcagtaatttctgcatatgctcatcttaagaattcatgacttctcatccttctcttccctaaggtgagggttacgtggtgagggaagttcacacagcagccgcatggtatcggtgagaggcattggacctgtagcactctgatttggcacctgtcaagtctctagtcacagcatttgtgtgatcgggttttcagtgaactatctgtagtcttagtagactctaatcatgtattccatactaccattcctggcttcttctcacattactg

SEQ ID NO: 212804 - DNA, 595 bp, Homo Sapiens
gaggctggagaatttaattcctaatggatgacctccaggattgggacatctgccagagctctcccatcatcccagatgggggcctgggtggggctttgctgattgtcacagttgaggtgccaggactgagttttgggggaccccagttgtccacccctggccaggacagagaggcaggtgcagatacagctggaggagcagcaggagagaggcaggtgggcttgcaaaagattgaggcagaatggtggtcaccttggcccatctgcctaccccaccctcagggccccaggcccccttcctccagcccccgatggccctggggactaggagacaggctgttgggcgccagggcctcccgatcaggtccccaggagccaccaccaccagggtctacagtctctaggcgcaaggcgggcaacaggcccaggcttcgaggcacagctggtgggaaggcccaggggccaggcaacccagagggcccctcttcactactgccccggctgctgccattactgctcctgtcaggagccactcgggacaggcggcggctctggggtgaggggctacggctggcaccacggcgttcacgggatga

SEQ ID NO: 212805 - DNA, 580 bp, Homo Sapiens
aacaattattttttcctcatttctctcagtaaccgcactaatgacttttaagtgccagcaagctgcaagtgctgccaatgagcccctgccctagaagggctacagttgggcaccatgtgctcaggggagggccccatggcagtcagtggagggtgggaagctggatggccctggccactcagcccagatagcaaggagggccttctcctcccaaggactcaaagtctcagaggccggagaaaggtgggggatggtctcccaggaagcagaatgctagaaggccttgcagggcaaacctgacgggccttcagggcacctgacagggctgggactgccggcttccctcacttctctcccgagcacaagaaaaccttccagcaggagccaggtgggcctgaggctgtgaggctgtcactcacttaccaggggattcaggcaccttgaacatggctttttcttgaagcagctgctcaggttggttcttgttgggtaggtccctcatcatctgcagctcctcgttccagtactggggcggttatggtaaaagccctgtgtggatgtggtaatgctacctcgctgg

SEQ ID NO: 212806 - DNA, 470 bp, Homo Sapiens
ttttaggtcaaaaggtttattgtaaatcatcttgctctgtgtattctttccaaacagaaaaaaataaaacttctccaaggctcttttcttccacatgacagcaaacagaacttcaggtagcttacaggaaaattcataccactctcactctgcacgttctcaattctgaaccacatgctttaaggagacattggatgtgcaaaagcctgtgttttctcatctctacaatgaggatgtttttcaggattcacagtaatctcttaacacaggctattaatacagatgtgtgctgttgctccacagctgacaaataccatagaaacgcttgaaagtattaatgtttgaatcaatccccaacctccacatccaattttacttcggaagcctagaaccttctccttaaatactcatgtcctccacatgcactgatgtattggaattgcctggtctgaatttcaatccccaagcac

SEQ ID NO: 212807 - DNA, 424 bp, Homo Sapiens
tttttttttcaggtttaataaactttttaatgaatatttcagacataacaaaaaactgcagagcttcgtacacttgatttaaataattcttgagggattttataaggtcatcttatagacaaaattatgagaaaccagtgtggttatcaatgctttcagaatacttgtgtttatgtaaatataccccagagtccaaaactctgatatattcatatatattcacaatgagaggatgtctgtgccaaatctgtcaatcagtacaatagaaaagttaattatataactacaacacgaaacacaaatttttagaagcaaattatgtcctgtaatttacccccctccccgctgctcctctgctaactcattttcctcttttcccactctaaatgtaaggcaacccttggctttggagaagcatctgttc

SEQ ID NO: 212808 - DNA, 1000 bp, Homo Sapiens
acctcagcctcccaaagtgctgggattacaggcatgagccaccacgcccagccttaatttccatgtggagtagtgttgttctgtgttccatcacatatccttacatgttctttgccatgccagtatgtttttggtgaaatgtctgttcaaaaattttgctcagtttttttttttttttgagacggagcctggctctattgccccagctggagtgtggtggcacaatctcagctcgctgcaacctctgcctcctgggttcaagcgattctcctgtctcagtctcctgagtagctgggattacaggtatgcaccaccacgccctgctactttttcgtatttttagtagtagagatggggtttcaccatgttggccacgctggtctctatctcctgacctcgtgatccacctgcctcagcctcccaaagcgctaggattacaggcgtgtaagcccaccatgccccgccaattttgcccagtttttattgggctattcccttattgagatctaagggctctttgtattctagtcaggagtattttgttaactgtatattttgcaagtgttttgtctgtggcttcctgtttaatttttgtaatggtgtcttttgcagagcaaaaatttcagattttgattaaaatcagtgttgatttttttttctttatatagttgatgttttttgtgttgtattcaagaaatctttgtcatgcaaaggtcacttaagattttctgtaagtttttggctgggcacagtggctcacgcctgtaattccagcaatttgggaggccgaggcaggcagatctcttgaggtcagcagttcgagacgagcctggtcaacagggtgaaaccgcatgtctactaaagatacaaaaattagctgggtgtgttggtgaattgcttgaactggggaggcagagactgcagtgagcctagatcacaccactgccctccagcctgggtgacagagcaagactctctctcaaaaaaaaaaaaaaaaaaa

SEQ ID NO: 212809 - DNA, 1000 bp, Homo Sapiens
ttaggtatgtcaacctcctgggccaagaaagatagtctctgttggagcaccttgcacagtgcttgatgcatagtaggtgctcaataaatttcatctgaagctggatcatagaatggtggccttctaatcccacaaggctgttatcctgctgtgggagtaaccatcttctctggtggtctaatgtcccttatagaatgtgcgtattctctcctaagagaagagtggagatgaggcctgagtcaaatatcctaagaagctgccaaaatacctgtggagaattgcataaccttgtccctctagggcttagaaaagaatgagtcagacagtcagttctcagacacggtgcccaggaaaacaggaagaaggttcacttaggcagaaatccatgtatgtgaccttggatacatcactgaacttcttcaggggcaacaatttgaaagacacatttgagacactctgcctaggatgacgtgatccttctgtagctgatcttctgagacccgtgaattttatgtactattttctaattatattctcattattttcaagggcatcagactgcatttcaaacttgacaattcctttgctataatttcagctcaaattttgactaatttatactttaaatacaaatatgccccattttctgcttgtcatcatagttcagaaagaagttataccgaccatgttatataaagtaatgaggggtcctattcagcttgttaaccatgtttcttaaaaaaaaaaagtacaatagaactttctttgtcaatataaaattcgagttatttatgatgtggctaaagatatgataagaagtctcaggaatggaatctgttattgcttggaaaataaaatctcaagaccttctttggaaaaaaatggagagtgataaaatgctttcatttagggcttggctgtgatgtcaaggtcagccaatgagcttagagggaatctgagaaaaataaagagaaaaatagaaacaaaaaaaaaaaaaaaa

SEQ ID NO: 212810 - DNA, 1000 bp, Homo Sapiens
ttttgtattttttggtggaggcagggtctcgctgtgttgcccaggctggtctcaaactcctgggttcaagcaatcctcccacctacgcctcccaaggttctgtgattacaggcctgagccacagagaccggctgaggtcttcgtttctgaaggctcccacattacataaaacttacagtaaataaatgtgtatgtttttctcttgctagtctctgttatagggttctcccccattaacctagcagtggatgaaaaaagaaaatctcttctcccctaaaaatattcccataagaatatccaattataaataagactaacaataaactccttttaaaatctgagtagaaaaggaccccatggtagcaatgtatgtatgttggactaatttgtaactattctcctaagtgttgaccttaatctttctggtaatgcattttaggattagtatactacaaatgtactttttctccaaaattatacgtcctggatacatttctttatgtagatatgacatacctttcttgcttcaaatatcaataacatgtagtgtaagaagcctccaagagtgtggtctttttaaagctggaactcacatcctttattctatctagtaagccatctctcaggtctcattcttgagaagaaaaaaaaaagctgacaaaatttctacatttaaatttatttttcccttaatgtttcatatcaaaatggaagccatgtttttcatcatttcattcaagacataaaaccttgtgaaaaaccaaagtaatggaggaaatgaggaattgtcgtttagtggatatagagttttagttttgcaagatgaaaaagttctggagaatggttgcacaacagtgtgaaagtatttagcactcctaaactgtgcacttcaaatggttaagatggtgaattttatgttatgtgtattttgctacaattttaaaactttcctaattaaaaaagaagtaatggtgattttctggcaaaaaaaaaaaaaaaa

SEQ ID NO: 212811 - DNA, 452 bp, Homo Sapiens
tcgacagcaatagttttaaaagcacaaagtgatgtaaaatattttgacttttataataatgcgaagtagttttatttgcattaatcaataatgttcaggatctttttgtagtaagtatattttaaatggtgtaatttgtgtgtttatgatatgtattcaattatttaagttaagtatcagtgtatttttaaaaagtgttcccaggtgaacaaaagtttgcttttcttcaccattctgtacaggacaagcattattcagttcacatagtcagctctcactacacttcaacagaacggggcaagttcgtatttgaattctgttatatttatctaagggaagcaaaattaaccttttaataatagattatctttaatggttattaaaagaatgttattgaccaaaaagacatattttgagattaataaagatgtattagattatccaaaaaaaaa

SEQ ID NO: 212812 - DNA, 445 bp, Homo Sapiens
tttttcccaaacagtgtttttaattgaaaataaagctaaagcatgcttttcaacagtgcaaatttccataattttgatttactgcttccatcatcacaacacagtacaccagcatggcccttacccagggctagaccctagcatttgcatgttgaactactttgattttaagtgcaaatatagatagtcacctctgattgtcacttgcagtagaaactctcctgctctatacacaggatggtctgaaaacacaagttttagagagatgcagaaaaagtataaggtcataaaatccaagtgcctgagttctggtaccaaaaagccctgaaaaaactgttatttttcatttggggtattgcaactctgacccctcattttctttttcttggttgtatttactgatttgtcactatcaagagttcggccatgaaatattctgctatta

SEQ ID NO: 212813 - DNA, 531 bp, Homo Sapiens
tttttttttgcaactcgagacgttagtttactccagagtcatggagacagtgaatggagtgtgtgtgtgtgtgtgtgtgtgtgtgtgtgcgtgtgcgtgagtgagagagagagagaggaagaagggagggagggagggttacaggagtgtgggaaagtcaacaggaaaaggagggaaggttcactgtgaactgacagtaactgtgacatcacaggcatgtgcggagtccccgcccccccaggcactgtgccaaggccagtaccttcatgtcatgagaccctctcagcaactctgtaaccttgtccccaccagaatattcctttcacagctgagaaaacaacagcacagagaggatgaattaaaaattgtctaacatgctgggcgcagtggctcacgcctgtaatcccagcactttgggatgatgaggcaggtggatcacaaggtcaagagatcaagaccatcctggccaacacggtgaaaacccgtctccaccaaaaatacaaaaaagttagccaggcgtggtggcgggcg

SEQ ID NO: 212814 - DNA, 435 bp, Homo Sapiens
ttttagtagagacagagttttgccatgttggccaggctggtctcgaaatcctgacctcaggtgatctactcacgtcggcctcccaaagtgctgggattacacgcgtgaccaccgcacccggccaaaactttttaatgatgctcttggaaaacacacacaggaaggcggaagttaaatgtgtacccaactacgaagtcagatgaggcaggatcacaccctggctgcccctctggtcactagatgccttgggatggtaagctcacctcttctggcctcagtttctccatctgtgaaatgagtgtaacatctcataggctgtggtacggactcatgaattgatgcatataaagcgttcagtaagccttttctcttaataaaaaacccacaaaaccatcatcagctcaagattctatgcaaagagaagacggcacaccc

SEQ ID NO: 212815 - DNA, 551 bp, Homo Sapiens
agaacgggcgacccgttcccgtccggcgggagcaccgagcgctttctgggctctgaccacgccccagccgagaactccgcccgcaggtcgcgggccacttggtcgcatccctcctcctcgtcgacttcgccttcaccccagctgtccccctgagtaaaggaggaatacgatggccgagccacagggcccggggtgccgggaccgcggcgccgcagagccgaccgccacccgctctcagcaaacgacatggcgcgaaacacaacgaaacccgcggagaacgagcctctcccacctgccccgccccgggtccgcaacagccaatccgcggcagtggccgctaccaccaggcctcagagcccaggggtaaaccacggagagcaagggtgggcggcgggttgcaaaggaagccgcagggccaaaggagaggcggaatgcgcttcgaccagagctcgaccccagggctgtagccggaaaggggagcaggaaagcgcgcagggagaagcgagcggaggccgaaggctgtcgagtatccactccctgcggggcttcgt

SEQ ID NO: 212816 - DNA, 562 bp, Homo Sapiens
gcacatgaaatgttctccaaaatagaccatatgataggccacacaacaagtctcagtaaatttaagaaaacctaaattatatcaagtactctctcagaccacagtggaataaaattggaaatgaactccaaaaggaagccacaaaaccatgcaaatatggaaattaaataacctgctcctgagtgatcgttgggtcaacaaggaagtcaagatagaaattgaaaaattctttgaactgaacaataatagtggcacaacctatcaaaacctctgggatacagcaaaagtagtgctaagtggaaagttcatagcattaaatgcctatatcaaaaagtctgaaagagcacaaatagacaatctaaggccatacctcacagaactggagaaacaagaaccacccaaacccaaacccagcagaagaaaagaaataatgaagatcagagcagaactaaatgaaattgaaaccaaaaaaaaaaaaaaggaaagataaatgaaacaaaaagctgctgctttgaaaaggtaaataacactgatagaccattagcaagattaaccaagaaga

SEQ ID NO: 212817 - DNA, 569 bp, Homo Sapiens
ttttttttttttttttttgctattcactttttcattattttattgttgttttagtagcattttgaggtgaatgtatgcataatcagtgaattagacaagcatgcacatacatgatatctgatcaaacatttttttgtctctcatcatcctcataaaatttattcagtgggagaagctttttcttccatcagatacattccagttgtatgccaacatactcaggtaagagcaacattttggtcattttaaatagtttggtaattatgactcccagtcgcctacaataagaagaaactacaataatttagtactaaatttttcttccctctccaactgagtcttgtgttgagttgcctacttgcgctagcacatcttcccttgctggttgacatttttgctaagatttctccctctccttccaccccaccttggacacggaggtttctggcctccctttccccaaggtccccaaaaaaagaaatctgtcttatgagatagggctgccttcacatggtgtcagggttctctggatagtaattgtgtgtaataagagagggagccctcgtgcc

SEQ ID NO: 212818 - DNA, 678 bp, Homo Sapiens
  misc_feature (632)..(632): n is a, c, g, or t
ttttttttttttttttttcagttagatcaagttttttattttcttacacaaggtgttatagaaaatccaatctttcagaaagacaaaaacaaagataatcacaatgacataccagtggaaaatttataatcctaataacctgacctaggctctaaatccatgtaaaatttgccttgcttttgtttaagggattggtccaaacaaatggagtttatgaagcaatggatacttgtaaaaggtagttcccactgttgcactgattccagtcttggtttttaatatatacatattttttttccagagagtttagtgaatttcatatgccctatcgtctcctctccacttagaatgctttatagaacagcccatcatgtcctgtggcctcagtttaacccaggatttgttaaaacaaactgcatagaatggcctgttagcaatgaatatttggaggagtcactgctccccatctccaccccgatttccgcaaccttgctctagaactcttcataaaataacatcctgatgtggcctatagatcagagactttatattttctatctgggtccactgaagtctgggcttaaaatccagagctgattctgggcaaacagagaagagaccctgttgtgtcncagatgaatttttctcactgaattgggaatgtgataagcgctggtc

SEQ ID NO: 212819 - DNA, 728 bp, Homo Sapiens
  misc_feature (606)..(606): n is a, c, g, or t
  misc_feature (667)..(667): n is a, c, g, or t
ttttttttttttttttttactttaaaaaagaatttatttgttacagccctgggggctgagaagtccaaggttgaggggctgcacctggtgagggccttcttgctgctggggactctgcagagtcctgagggtggcgcaggtgtcacatggccagggggccgagcatattcacaggccagctcaggtcttccttcctcttctaatgaagtcaccagtcccactccggtgataaccctttaatccatgaatccattgacaggttaatcccaaccacgcttagaggccccacctctcagtactgccacattggagattaagtttgaacatgagtttcattgaggataaacatccaaaacagctcatcccaaatctaaatgtttcttaaatcaactaatcaattaaaaaaagaaaacctctctgggctgaacaaggcgtatcagtgagctaaagccagcctacatgcctggcagtgccaatctacctcaaggtcctcagaactctccagtcccctcacctttccctaagaccaggtgacttgtggctccctgaacacagcaagcaggtcctcacatctgagcatttgggcctgagcgccctttctgcctnagtcacaggcccaacacatcctgctcggcagcctcagcaacaacttcctcctgcccagaanggcttcctcaactgcttctccccaccataggccggatcaggtgagacgtgctcacgtgttc

SEQ ID NO: 212820 - DNA, 420 bp, Homo Sapiens
tttacaacagtatttgtagtgatgttaaaacatcagaggcacacagccctaacaatggtataagcaaaccagtgccttccctggttaagtttctgcgtggagacagctggagttggcacagcagtcccccaaagcaggacaccttacagatgctaagaggcagcttttgtgctttaaaactgtccttctagcgttccattttatgtttcatggcactaaaaaagacaaattctgtccaaacctgaaaataaagccaaatatttaagatgacagatttttttttttttaacaaatcttcgcaaacaaaggcctttggcaaaggtctcccgtgcttgcagaagcgggttcaccttgacgtttttcctctccagcagatttctccttaaaagcgttaaaacttgagataagttgggaggaatt

SEQ ID NO: 212821 - DNA, 725 bp, Homo Sapiens
  misc_feature (649)..(649): n is a, c, g, or t
  misc_feature (677)..(677): n is a, c, g, or t
ttttttttttttttttttgatgtaaaaagttatttttattatgacttgcagtcaaaaaagtttgaaatacattggtcaatagagaccaccaaaaataataaacatggagtttccacgaaaaataataaacatggagattcctggtgttaacgtcaataaggatgagtactgaatgtaaaccagtcttctgctctggaatccaaggtaagctacagagttctcagtttaccatcaacactaaggttttacttgtttttcctcttaccctacactttcaggcaggggcatgggcaacagaaggaaggaggaaaacccctagtggcaatgatttacttggagtggtatcatgttcttttgagaaaaggcattttttaaaagagtaattcccaggtggctaattaaaaggctttccttctcccctataaagtcatactggtagcataaaagtgaacagaaatttgtcattacagttttgacattataaatggtctaaaccacggcagtctgcgattttgtttctggttttgcaaaatatgcagccacagacacagatagaatgtgtgatcttgtcctaatctactttatccacctgtaaaaggaagacgattggaattatccgaaggagactgactctgtcctctccatctgntaagatgctaaacaatcattttctccanatcaaccacctaaacacatgacaagacaatgtttagcttctggctttc

SEQ ID NO: 212822 - DNA, 679 bp, Homo Sapiens
tttttttttttttttattatagtatagtttatttaatacaatgtttaactataaaagttaatacagcttccaagtttcaattttgtaaaatgcagtttgcagaaaagttcaacaattactagactaatgataagaaaagcagcattttgaaactaattttacaattgagaagacaacagctttttttctaaacttcattaaaaaaatataatcacagtgacttttgggctaggaaaagaagtgcattaacttcatttatgttttttccttccacaaagagagcggccacaattttgtacatcccacatacaaatacccaattcatttatctttcaaaatactatatacacacaaaaggggaagaaaatatacagcatgtgcttttggtaacatatggaatttgcttaaagaaaaaaagtcagaaacacaaatccaccccaccactccctcacataccttttaaaacaaactaaacccctcaacaactccctactccaaccttgttgacggaattttcttattcatgtcatttttcttttcctttaatatatacctctttgtcacacaataggccaaagactttgcacttgcccgaatccactgaaggcagttagttgggaagctcactatgggcagttgtgccagtcaatgctgtacttcctgggggcttattaatttt

SEQ ID NO: 212823 - DNA, 752 bp, Homo Sapiens
ttttttttttttttttttgaagtgataattagtttataatgatcctttgtccccaccacagattaaattgaaattctcagaagcctggactctgggccaggcgaaagctattggaaagcagaggcctttttttcttcttcttaaatttctaccattccagatcccacgacgactgagaagaagacaaacatttcagaaggaaggttctagctgggtgcagtggctcacatctgtaatcccaacactttaggtgcccaaggcttgagcccatgagttcaagaccagcctaggcttggtgtgactcttaaggtgattttccactgcaccaccgagcgatcgtgccctcccgcagtgaaggcgtagcagccatcataggaaacggccatgccggccaccccgttcgggtggcaaacaatagcagatgtcttatgtggattgccgtcaactggtaagatctgaagtcccaccttgtctctgttaataaacaccaagtagcgtttctgtagctccgccatgcttctcactgggaggacttgtgtctgctcaataggggaaccataagctggccccagaagcgtctttctgcacattttggtagtagcattaaaaagcttcactttggtagccactgttgcaaataagcaggaagagttccctggtgagtggtgggtaccagaccatgcaggtgggatagcagccctggtcggtgtggtgaaatgtcaggacttccaggtggtctttgtagctcctga

SEQ ID NO: 212824 - DNA, 674 bp, Homo Sapiens
  misc_feature (532)..(532): n is a, c, g, or t
ttttttttttttttttttcagcttcatttacaaatttattctaacccctctccccaaattgcaaggtacacagaattctagctagcagaacacacgagcagtgaaccatcctctggcctcttgcattttgagaggacgttctttccacttccacacactctggccacccctgacgccgcagtgggggaagtagatggccctgctgcccacgatgactggctgcctgtcagggcagggcagggctgagtgcgaagtctctgagatgtgagagcagcactccatctgggtcaggacagcgctggggtcaggaattggagctcctgcctgtgttcacactcccacctctgttttttttttttgagttgagtctcactctgtcacccaggctggagtgcagggtgacggagctagactgtctccgaaagaaaagaaaagaaaaaagaagagaaaagaagaaaagaaaagtttcagaacctgtttcttggctttctatctgggcagatcttggtccaggccagttttacctctttanagaagggaggtgaggatggaagtcggggaaagcccggccctcccactttcacctgcagcttcccaaaagcgggcccaggtggaatggtcacccagtttacacaatgctatgatctctggtgtgatctggggctgctgctctg

SEQ ID NO: 212825 - DNA, 525 bp, Homo Sapiens
ttttttttttttttttgtgatgggggagaaaacacttcattgggttcaaagataatattccctatcataaatcagtggcataaacagccagtgggccaggtgggcccaccgtatgctagctgacaagggcagtcacacaccggtaagtgctgatacaggatgaggggtgcggagctgaggatgttgttctctttgatgaaggcctgaaaacttcccctggcccctgctgcccacctcagggctcctcaggacgaagggcatgaggacaggttcccactctggcccttcgctgggggacatggtttggtttccccatcgccaggctggccagctggggcccaagcactgaccgtccttccccaccttatcccatcagctgccctgcacaggagcagaaaacccatgcctcagagctacttcctaaggacactgcctctagaaggccctaaagtggcagagccggggatggcaggtgcagccctggccactagcacagcagttgccctcagatctgttagctgtgac

SEQ ID NO: 212826 - DNA, 733 bp, Homo Sapiens
  misc_feature (628)..(628): n is a, c, g, or t
ttttttttttttttttttgacagcagaagtctttttattcaaatctcccaccttacagatgtccagaataatcaacatatttcaaagggtatatttcaaaaacgtactagcaactcagccagccactgtcacatggaataagaagacatgccctggccattagaaccatgctgtcctcgctcttgtgtccctccacgggacagacatcaccttgcaagacaactcgtgccactgtccccaacagttttccacagagttcttgtttcccttcatctgaatcttctctgtgcaatttgatgtcctgaactatttctgacggttgcacacaagatctcagggactggaccttttagttatgagaccagccctcttagacagcagacagtaggtacagtgcttgctctcccttctttgcatccttccagagttgccttcatcctcatttcctgcatctggtaaagtctctctgaaaatgtgaaaccgacgacagaacatggcaagctggatggagaagccgacaacccctcccccactctcacccaacgccgggccggtcctgtttcggatcctgcacactgtggaagcttcttgcttccttgttttggtgggtgaaatctttgctgttcanaaaggtgtttttgcacagaaattttaggacgtgtttattctagtaacgtagtgttttcttttttcgctatatttacatgtggagaactccagggaggccccacat

SEQ ID NO: 212827 - DNA, 595 bp, Homo Sapiens
ttttttttttttttttatgcttgaactttaggcatttattgaaaacttatacatgccatataaacaaactaaactcttttagctgctataccaagtttccataaaactgtctgctggttggggaggctacagcctgaccacattctttgccattgcctacaaggggtaagaaatggcacatggaaacatggcaggccgactcacgaacacaggcctgggccagcgctttcttcttcctcttttattcccatcagtcctagaccagagagtgaaccatgagtgctcttggttcctggcagcaggatgaggcagagagtgcccgggcacaagctgttgtagagctttccaatcttccggctccagcgccaggctgctatcttcgggtggtccagtttcagagtctgcaaggcctcctgttcaaaggggggaggtacaacacgaagccctgggagccttgttgattcaggtggtaagcctctgagccaggcatggaggtgcctgggggttagggcatgcctgcctttcagcttccagtccttgcctgtgagaatgttgagggcctgctgggcactgccaaaacttttgaatttcagga

SEQ ID NO: 212828 - DNA, 801 bp, Homo Sapiens
  misc_feature (719)..(719): n is a, c, g, or t
ttttttttttttttttctaaaaaacagtttcaatataattttattagcagttattacatcaaaattcacatttagaggatccagaggactgtcttagaaaattctaaagcatatttaattaggttttaacagtaagggagaacttaatataacacagcccttaaaaagtcaagactactactgaaaattaagtgcagttctatcaagaactagaaatgaactgcacgcgtagtgtcacttaaagcaaagcttcatgaaaatataatacacttctatgaatgtatcagtggcaaacatcattggcttccaaaaaactgacactaaaggaatttccaatcaaaacacaagcacagtggctttcattcaatatagagctatgataagtctatcaagagaccctgaatccttacgtacttgtaatatgattttatgctgtgacactagtacaaaacacatcaactctaatgcatagatgacgacacatgataacacgataccaaggaaagcctttttctatatcagaaaatgccaagttctccagtactgtgtaggctcgtcattgctgatccagtgaaattctacgtcctccagcttgagcagtattataggattcacaaatcttacatttcatgcctaatatatgaaactgaacagtggatcgtccattacagtcattgcagagaatatcacagtcatgttctgatattctgatggcatangagtctgtgctacttcatcatccagctgtctccaatacctggtcatatctaaagcagagtgcatacataatggacatctgta

SEQ ID NO: 212829 - DNA, 699 bp, Homo Sapiens
ttttttttttttttttttccctgtttgctatcctttattaaagggcccacatcctcatgggactccagccaaaccagtcaggtcccccaaatatagcaggaggcctggaaggggaggggaatgacttatgatcctaccatgcctcccaagaaacagaaaccaccacagacagacagacagacggacaggggctggggagaacttgcctcactctcagtcctctcccactttcccccacttgaaaagaaagtcaaacactggctacgcagcaccccagccccccaccccacccatagcagcgtttgtgggacacaccccctttgcaaggggtggccccgaggcagcttcctatctctctcttcactttggtttgctcctggcaactccgtgccctcttcctttcctcagcctccggctcggtctcccccttgtcttctatcacctactcggaccttctctctcatctcctgggcctccctgccccagcacttctggggaagcagcgtctcgggcgtcttcccttctcctagcaaggggccccaccaggccctctgcccaggatgtgggactcacacagctgccccactctccttgaggtcaggggcagaacgctgccgtctcattcgtgggggagtagtgtatggggggtagcggggccctgggggccgctgggctgggtagggttggggtggctgggga

SEQ ID NO: 212830 - DNA, 680 bp, Homo Sapiens
  misc_feature (646)..(646): n is a, c, g, or t
  misc_feature (651)..(651): n is a, c, g, or t
ttttttttttttttttttaccttattgaaaaatggtttaataaatataattattaaataaatgttaagactttaaatactaacccaagaaaaatttaaaaatacaaattcagtaagacttttgctctaacaacaatttttcaaaacgaatcaacaacaaaaaagtatccagtgtttcttttcttatgaagattattaataaaacacagtattggtaagcacattttaacagtatgcttttcttttgtagggaaaggagatatggctatgtctaacatcgtgggatccaatgtgtttgatatgttgtgccttggtattccatggtttattaaaactgcatttataaatggatcagctcctgcagaagtaaacagcagaggactaacttacataaccatctctctcaacatttcaattatttttctttttttagcagttcacttcaatggctggaaactagacagaaagttgggaatagtctgcctattatcatacttggggcttgctacattatcagttctatatgaacttggaattattggaaataataaaataaggggctgtggaggttgatattattaatagtgttatgcagaaaatatgaatggcagggaggggcagagagaaaaatccatttcttcatttanatcanattttaaaaatctcctcgtgccgaattct

SEQ ID NO: 212831 - DNA, 648 bp, Homo Sapiens
ttttttttttttttttttccatctactgtttattggacacctacagtagccaagccctgggcggacctgcttatacttatgtaatcgccagcctcacaataaccaggggaggtaggtgttctgaccatggcggacacagtgcgtcccggctggagctactcggcgctgtggacgcgctggtgctgaatgagcttggtgctctggtggaagcggcggccacagtcctggcaggcgaagggcttctctcgtcggtgggtgcgcagatgctgcgtgagcgtgggccgctggcggaaggccttgccacactcagggcatgcgtagggccgttcacccgtgtggatgcgccggtgctgggtgaggttggcgtgctgccgaaagctctggccgcactcggggcaggcgaagggccgttcgcccgtgtggatgcgctggtgctcggtgagccgcgagacctgcgtgaagcccaggccgcactcaccgcagtggtagggcttttcgccggtgtgtgtcctctgatgacgcgtgagcttgaggcgctggctgaagcgctggccacactcggggcaggcaaagggtttctcgcccgtgtgtacgcggagatgctgcgtgagcgtaggccgctggcggaaggccttgccacactcggcg

SEQ ID NO: 212832 - DNA, 631 bp, Homo Sapiens
ttttttttttttttttttccttttattatatcaatttattcaagtgattaaaaaacttcttggcagcaggatgacaaaacaggtctgtaaacatgatctcatccccccatcccttcttccaaggagcttcctatgacaggaaatcgaattctagttggcaaatccagtgatgaggtctgtagaaaaggggtcccgtgtcacagccaggaaggcagactcgtccctttaacccactccagccaggggtgctggccaggatgtgctgttctgtcatgacgtggtcactgagtctggttcgttggcagccccttccccaggaggagggagactctttggcagtgcggcagccctcccgggggcacgggcttctcggcagcagacacaggcaggcgagaagcaggcagctgagcctctccagcgagcatggtattgctagggttgcaggtgccctggcaggtggccaggtgaggggctgaggcacaagtgctatcaggaacttggctgccccacaggggctgaggacacccagatggtccacgccagtggccttgaaatttcccctgcagaagccagaccgtggggaaacaagctttcgcgacgtgccaccccgggcagcttgaggcttcagtcc

SEQ ID NO: 212833 - DNA, 672 bp, Homo Sapiens
ttttttttttttttttttgcattctgaagtcgtttttattcgataactaacaccataataaccagagttccatctgagaggagaggagagtgagaaggggccagaaccctttggtggctgagaagcctcctcaaggctatgttggggcagtagggaggcagagaggtgaagatcttagggaagcccctgacccagcctaggctgctgcccacagggcaggaggaaagcccaggaggggagacaagacctccctgttgcaaccaggaggctgagcaaggcactggtgtttacagcccacagcttcacccgggaggggcgagggctcctgccctgcgagagcctttaggtgtacagttggggaaagggcagttcagctgttggctggagccagttctccgggctccaggtggtgccagaggcctccatgaggtggaaagtgtaggcctggcgcgagcggtcagagaggttctgcttgctcttgtgtaccacttctccatggatgaggaccagggcccctctctgcactggggtgggcacaaagaggctgttatcccgggctggctctgacccaaggaagctggtaccaggcgctgagccaacaggggcccggaccatccttcttgacacaccacctgcaggccaagatggagagccttaaactcctcctttctc

SEQ ID NO: 212834 - DNA, 551 bp, Homo Sapiens; identical to SEQ ID NO: 46855

SEQ ID NO: 212835 - DNA, 719 bp, Homo Sapiens
tttttttttttttttcttgctgatattttcaatttattactgcagtagataattgctctgaaagtgcaacactaaatcactcttgtcatagcctctgctccgtttccactggcaaatacttggaaattcattcttcgagcattgtggaccacaagcttctctctgggtggaaaattattgccactgccagtatcatagggaacacacacacacacacacacacacacacgaacagaaggattcaaaaagcagacactggagaggagtaggggccaatttcaaacagaaaacccagtaaagggctggagaggagtaggggccaatttcaaacagaaaacccagcaaaggagttagaggagaacagctccaactgtgcaaagtggagaccgactctccactctccagtggcaacctcacattctggtactgtgcaaagcggagaccgactcttcactctcctcacattctggttacgttggccctggtagacctttatccctttgcctctgtaacggtgataccataatcataaccgtgccacatctcagcatatcagaggcccatggagtaaaaatagatgaaaagacctctcaagctagtttggaaaaatagagggtttagataaactgactatttaatctcctacttaaacctgttaggcagaatatctgggagaacactgggcgtaagatgctgcctaacaggcataccccttgctc

SEQ ID NO: 212836 - DNA, 702 bp, Homo Sapiens; identical to SEQ ID NO: 49975

SEQ ID NO: 212837 - DNA, 588 bp, Homo Sapiens
tttttttttttgttttttacaatttttatttggtgttaactccacaagaaaacaaacaaaaaaaaatcagttactctggtgtacgtgaaatcagaacaatacaaccacgggaaaaacaatctcagcccaggaatggaaactggtacttcagtgctatggaaatgcaatgcgcttcataccacagtgcgtttcagcgtttgccaactttttaaaaatgctttttctttgtgatcatccattcacaaaactaaaaagccacactttcatctctgttgctgaaagcctctgagcttcagctacttaactatgaaaacaaataaatacataatttgtgaatccctttgctcacttcgaatccgtcccattcacctgtggaaggtgctgcatcttctcacctgtgtctgaggaagtgtgcacctttgccacctggagccctttcctaataaacagcagctgtccaaaatcaactgtgctcaaggttgtgtctgaaatctatttatttggtctttgctacacaagcaacgatttctagaataatcgtcactgtagtgatatgaggaatttacaactttcaatcctcctcgtgcc

SEQ ID NO: 212838 - DNA, 675 bp, Homo Sapiens
  misc_feature (604)..(604): n is a, c, g, or t
ttttttttttttttttttcgttcaacagcgtttatttagactctgcactgtgtcagcactgtcctatgcactggagatacaaggggacaagacaaaggccctgctctcatggagcttccattctgatgagacaggtggtaactgactggaaaacataccaccgctggggcaggtgctaggaagaaaaaggcagcttgctgaggggacagagtggcatcatggatggtcacggaggcctctggaccaggaggcgtgtgcacagagccctgctctccagagctcagtcaggctgcggagctccttcgtaataactccggatgaggcaagagtaggtcactttattctatttcatttttagtaacattcggttcaaattaatttggggttttgagaacagttaattcactaatagaactgtcttaaagccagacatggggctggcaggatgggaaagctctccctacgaattctgccagctttcattccaatgtgtcagccctcatggctccagctctgtggatccctcttctttgctgcgcccatgaacaagtgtgtggtgagagccaggatcctttagtgggtactattatcatccccaatttanagagggggaaactcaggcacagagaggttgggtgatttgctgtggtcagaccattgcaagaggctcgtgcc

SEQ ID NO: 212839 - DNA, 681 bp, Homo Sapiens
ttttttttttttttttttaactttagaaacagccatttattatttggattaaatgtgtgatgtgttctgcaatttggaatacacttttcagtttatagccagtctccacatgagcagattcataccattgcaatacacaggagttcataaataagattctactcaggtaggcagtaactagcaagttttgagtcaacaaagtctcagtattacatagttctcttcaccaaagatgagtctcccggatttcagcaataatttgactggctccttgtaatgcctttagcatatcagctgcttctttcctgcgctgtgccatgtcctcagattctgtcagaagatcatccaataaggatgatttatacagctggcctactagctcactctgaagagtgtctttcacatgattaaccaaaaaatgcattactgcctttggcacactgtcttgaatattctttctgacaatgagaaaatatgatttaatgagtcgttcaataacctcacaatctcgctgttcccgagcagatagttttcgtgcaacaggaactggcacatctagcaggttcacggcatgacctttttgtggactggctggcataattggaatgggttttgatttttcttctgctaatactcttcagcttttgaagttttcagcattcctctccagttgcctgtggt

SEQ ID NO: 212840 - DNA, 733 bp, Homo Sapiens
  misc_feature (647)..(647): n is a, c, g, or t
ttttttttttttttttttcatccaagaagtgtctttatttccgtttgtttcccaaagatcaggttaggtaaaacaaattagttccatctcattatttgaagacagggaggtgtatgcagatggaggggaactgacctcttgtgtgtgtgtgtgtgtggcctgtgagggagctggggctatagagatggtaggctaaggggttaaacccttagagccaccagacaatgtcacttgaaaacacaaggtatgaaacataaataatagtcagctactttccttcaatccatttctaagcagttgtgtgatcgatcaatttataaatcgattggctaactaattcaccttctctgctgccgctgccaccgcctatggccggggtggggtcagcccagcttctggctggcagtaggggagggatcggtggcctctgtggtgggggagcagggtcactgcagctccttgagcagctggagcacgttggtcgtgtaggggttctgctgcccgctggccccgtgcagctgcacagggtggaggctggggtggggaggtgtgaactgcacggggcagtaaagctcgttcaggaggaaccaggtggagtctgggtcaccttcatcaagtggaggaagacgctcctggcagcctcttgntatttcacgggctgtttgacactgagggtaatcaagcaggcatcagccactttattcaggtcaccctcacctaggtccagtctctc

SEQ ID NO: 212841 - DNA, 660 bp, Homo Sapiens
ttttttttttttttttctcacaataaactctttattgtttagctagccccagtgactttatgcatcttataaccaagaagccttcagtagagcaagtctgagccagaggttttatcacactttgtcctcagggtccaccaggaaccaggtcttggctcacagccaggctggaaacagtcttcacagttctgagcctggagtttgagatctgcctcccctttcaaggaagatccagaggtcacctgcgcttgtagagacatggctgaagctgcaggcctgaaagctgagccttgggccctaccagagggggcccagtcttttggaaatcaaacaagaagaaatggctgttggtcaggtccttggagacaatcttgaagcctagcttggtcacagcccgcagaaaggttcgaacatcctcaaagcggctgctgacctcagccactttcaggagaccccctggcttcagtactctatttgcctcctctaggaagtccctgatgttggttcccatcagtgaaaggcaaaacacagccacatccacagactcatcctccagaggaacctgggccatgtcacacacagtgaccctagggtccagagaagccaagtcaaagcaatgcacagggttccggatacttgaagccaagcggcaatccccac

SEQ ID NO: 212842 - DNA, 615 bp, Homo Sapiens
ttttttttttttttttttcaaatcaaggctgtatttatcgtcactgattgacatgggaacagaatatttaaaacaaacagggtccaccgtggaaatgtggctgaaacacagaactgagcaaagcaagtggctcgacggctgaccccgaaggctgggaatcccggcagggacacagcccagacatcggggaacacaaaaggccgcaaggggggcagggcatgggggggctcatgtgggtgagggcaaaacccaaactgagaggaggccaggccaagggcctgggaggcgacgaccacaccgaggtgacgctgatgcctcaggcggaagaaaacacacagcagtgattttgtgtgtgtgtgtgtgtgtgtgtgtgtgtgtgtaaaatcagcctttagactcttgcacttctatacctccaccgatctggtctacagattccaagaacactgcaccatccacacaaacgtccacagcatcgcccttgcggctggagccggccagtcctgaagcccacaggagccgcccaggagtgctgttctgctggcccaggggctctgctgggggaccaacccctccacggacccaggggctgggaggtcgctggcggaaccttcc

SEQ ID NO: 212843 - DNA, 708 bp, Homo Sapiens
  misc_feature (695)..(695): n is a, c, g, or t
ttttttttttttttttttccagaaaacacaactttattcactaggactgaaaacaaaggcttgtgcaatcaaaaggccaagttgagtgcaaggtggagcgtgctcggaaatcacagacctcacctgtggccaggccgggctggcagttgttgtttctggtgttttctgtgatttcccacattttatcacaaggccacaggcatcctccaaggtcagtgaggaagaccctattgctgtttgagccagagcctcctaaagggtgggccgggagcaggcagctcccaggacacacagatgcacgatgtgattagcagtgaagccttctgtcccaggcgtgggcaggcgtcctcccttagctgcctgagcatgtgcggctgaagacatggcttttctagggttaggcactgtgcgtggtgccagccccagccctccctcacctggacgtgcccaggagggggcagcagagcaccgtggcaaagtctgtccacttgccgctccccgtcccgtgcagaagactgcttttccgtggcggccagtgtgcggccacgggctctcagaagcctgcttgttgggactgttgctgggagcaggaagggacaaggcttgacctggggctcctgaaaacagacactcgggcgttggccactgggcaacaaagtcagaagggccctggagacctctgtccagccttctanggactgggcggct

SEQ ID NO: 212844 - DNA, 515 bp, Homo Sapiens
aagaccaagttttgctctgtcaccaggctggagtgcaatggcacgatctcagctcactgcaacctctgcctcccgggttcaagcgattctcctgtctcagcctcccaagtagctgggattacaggcgcacaccaccacgcccggctaatttttgtatttttagtagagatggggtttcaccatgttggccaggctggtctcgaactcctgacctcaggtgatccacccacctcggcctcccaaagtgctgggattacaggcctgggccactgcgcccagcctaatttttgtattttttgtagagatggggttttgtcatgttgctcaggctggtcttgaattcctgggctcaagtgatcttcctgccttgcctcccaaagtgctgggattacaggcgtgagccaccttgccctgtccttcctcctctttagccctatcagtaactgagtctcatcagttctcccttttcctgtctctcaggcctattccattatttttactgtcatcacccaaga

SEQ ID NO: 212845 - DNA, 435 bp, Homo Sapiens; identical to SEQ ID NO: 40609

SEQ ID NO: 212846 - DNA, 474 bp, Homo Sapiens
acactattaaaggtaatgctaaggtgcagggaaggttggcattgcttatatttgtaattctgctcccaataagctccaggtttcttacctggacaatataaaacagtaaataccatgctgactgcccagttcaatacactgggctttaaacaaaaggaaaaaataaatcaggagctgtgagtcctcattctgtctgctgctttttagctgtgattcaggcaagtgactagacgcctctggatcagcctcctgtcctctacaaccagatcttttctacacagttctaaactactgcaccaccaggatttgcagagtggccaatgacagttcacaaaggcggaggtgccgtgtctgctaagcttctaagccacatggaagtgcttcagccaacaaatccatgaacattactgtggtccactttcaacacagaaaaatgactagagcttttatgaaacaaaaaagctgcttatctca

SEQ ID NO: 212847 - DNA, 569 bp, Homo Sapiens
agaaagaaaggataataaagacgtttatttgcatttgtcaaccaacttaacatacagctgagaaagaaagactaaaaaccctctaataaagattgttaactgacagaagcattttgtttttgtttattttttgagacagggtctcgctctgccacccaggctggagagcagtggcgcgatctccactcactgcaactgccactttctggactcaagcaatcctcctgcctcagcctctcaagtagctggaactagatacacacagcactgcacccggctaacgacagaagcattcttatgatacgatctcctctcggctcacttcatcttagtcctggaggtctgactgtctagtttcttcttcttcagaattaatgtttccctcatccatgtcatagcggaactcctcctggtcatactcccggctctcttcccggaggacgtctgcatcttcatctccaggcctcatgtccatctcaccctcgaagccctccagcagagcctgggcctcctccctgggttctcctgcactctcagctcctggagcgtcttggccaggtccatccgta

SEQ ID NO: 212848 - DNA, 511 bp, Homo Sapiens
agttatttattaaaaccacacacaccttgcaaagaaaaagggaaactggcagtctctgtagaggaagccggtggcatcgctcagagccacaaactgtatttctaaacagccctttccctggttccctctctcctgccccactttttttaaaatccagactgtaaaaaacacatctactgacactcactttactttaaaaaaagaagagaaaaagtaaagcgttacaagactttcctcctggaaactataaactgaaaaaaaaatccataaaagattaaatcctggcgggttgtggggtggcgggggccggcggggagggggcgcggagtggagattggctctctgaggtggtcaggggccctgtgacagcttgggactttcagcacctggtttggggtcatttatctgctcaactgtcaggaccccccacccccaaaccccagccaccaacacaaccatcgtagaagggaacacaacacagagggtcttttttcatttttttaaaaaaatc

SEQ ID NO: 212849 - DNA, 483 bp, Homo Sapiens
agcagcagcaagatttattgtgaagagcgaaagaacaaagcttacacagggtgggaaggggacccgagttggttgccccaaacaattgactttttaagagtcaaaggcacctttgaaaatatgattacaggccgggcgcggtggctcacgcctgtaaccccagcactttgggaggccgaggcgggtggatcatctgaggtcgggaggtagagaccagcctgaccaacatggtgaaaccccgtctctactaaaaatacaaaaatttagacgggcttggtggcgggcgcctgtaatcccagctactcgggaggctgaggcaggagctgaggcttgaacccgggcggcattgcagtgagccgagatcgcggcattgcactccagcctgggcgacagagcgagactccatctcaaaaagaaagaaagaaaatatgattacagctctgagtcctctctagtagaggcccccagtttttatgtaggaag

SEQ ID NO: 212850 - DNA, 476 bp, Homo Sapiens
ctagaatttcttttaaaaaattgatgaagtagcacacatgaaagagaaagaagtgggtgggggaaggtggcagcagcgatggggagttcaggtgccaggccgaggcattcaggaaggtgaggaagggaaggagcactggtctggagagagctctgatggcaggtggattccagagtcatgctttctctctcaggtttatcttccgtttccagcttctgtcttattttaacaggcagtgtttgtcgatcttgacttagacgaatgttatacacctatctgaaaatatctttatatcgtcttatttgtgaaagatatctacactgggcagagtctaggtaagcagttattttctttcagcacattaaagatttcattttaataatttctgactttcactgttgctgttgaaagttagtccttctttctcttggctaatttgccttttttttttaagataagcatttcaacagaagtat

SEQ ID NO: 212851 - DNA, 585 bp, Homo Sapiens
tttttttttaaaacagaacaagattatatttcaatatacaacttctgtataaccaaaaaataaaacaccatagtaaaatgaatgagaaaaaacatatttgcaattctagacaaaatgttaacatgtttaatcataaatgaactcttcagaaatcagtacaaagagactaacattacaagggaagtgaaaataaaaggaacagaggaaaatggaatagcacaaatgagttataaggctatatgaagatgatgtagttaacattaatagctgataaagcaatttcattataaattatattatcgatccttacaaatattgattatctgatgtttgtacagctttaggaaataaagaatactcaaatactgtggaaacttactagagtcatggggagtttactcaaaaatgtagatttttgtataaacttggccccagcagttccaaaccacaggaatctgtccaacaaagtaattagacacacacccacacacatacacatacatgtttactacatagaaaatgtataagtaatgtatcatcccccaaaaactacttatgttatcaactggtttataaaaaattggc

SEQ ID NO: 212852 - DNA, 566 bp, Homo Sapiens
atgctgcatgatgagaggccatatttatgtaatttcttaggaacgatttatgaaaattcatccagacaggcactaatgaacattttgaaaaaagatgggaacgataagctttgttgggtttcagcaagagaacactggcagcctcaggaaacaaatgaaagtcttaagaattaccaagatgccttgcttcagagtgatctcacattgtgcccggtcggagtaaacacagaatgctatcgaatctatgaggcttgctcctatggctccattcctgtggtggaagacgtgatgacagctggcaactgtgggaatacatctgtgcaccacggtgctcctctgcagttactcaagtccatgggtgctccctttatctttatcaagaactggaaggaactccctgctgttttagaaaaagagaaaactataattttacaagaaaaaattgaaagaagaaaaatgttacttcagtggtatcagcacttcaagacagagcttaaaatgaaatttactaatattttagaaagctcatttttaatgaataataaaagttaattatctttttgagc

SEQ ID NO: 212853 - DNA, 577 bp, Homo Sapiens
aatttttgaaaaatttcgatgtcttactgttatgaccataaaaccaataaagctactttgaaaagttaaagccaggagtaattaaacaactcatacttgattgttaaagtcagtctcttaaaagtgtaattttaaaaaggtaaaaaaaaggtataacattataaatatatattaatatgcacattaaatatataacactaattggtattaataaaattacatccaatctcataaatcaaatttattgtataacataaatttgttcatagttatgtaataatagacacaagaaataacttatgcagattccttatgtgaagcgtacttactttgcagataacaactattttttaaatgataatggagtctacaacaatgctcattcttgatcatttgcaataatgaaaattgttctctaaagcattaagatggattattttctatagattcttccaggatctggaaataatgatttccaggtactctcaaccaagagatgtgaccaaaatacaaaaaatgcaaaacatacctccattacaaagtcatgaatcctttctataaacctcaggatttacag

SEQ ID NO: 212854 - DNA, 605 bp, Homo Sapiens
tttggtagagacaggtcttgcttgctttattgctcaggctggtctcctgggctcaagcaatcctctcacctccgcctcttgaagtgctgggattagaggcgtgagccactgtgcctggccaagtattacattcttcacagaatgtactactgaatcattccttgggaatcaagaagaagaaataaatgcaagactaactttatgggcagaactctcagaatgaagagattcagaaggaggctgatagagaggaaccggtcatgtgtctcattatttattgtttattgataaggcataccgtcagagaaaaactgaaacagcactaacttctcaaggaaaatattcacgtatcactgttctgtctgaatgttataagtggttctactatattctttctgtaaagctgaacatagctggattatccttaagaaggatggatacatattcaaggaaaactttcatgaagcactaattgcattcatcacaataatagaagcattatttttacaatcaaattgtgtgagatattgaaaagctataaaagtgtggcataactatggaatgatgattatcactgtactttgaacttcatacatctccccttc

SEQ ID NO: 212855 - DNA, 474 bp, Homo Sapiens
tgagacggagtctcactctgtcacccaggctggagtgcagtggcgtgatctcggctcaccgcaacctctgcctcccaggttccagcgattctcctgcctcagcctcccaaagttctgggattacaggcgtgagccaccgcgcccggtcaatgcctgcatttttaaggtgaaatattatacagttaagtgttaaacaagtgaagaatctcaacaaaatacatattacctttaaggctctaaatgaccagagagaaagaactgtgaccattaccattaaaacgttcacgtcctggcctatacatttcttttaccgttgccttcaatttccatatattttggttcttcaagttagctggacgttctatgaggtcagggagcaagtgtatatccctaaactgctgagcctcaacactcacaggatgcctaccaacagcatccaactcttttaagagacttaaacacccaggttactgt

SEQ ID NO: 212856 - DNA, 616 bp, Homo Sapiens; identical to SEQ ID NO: 48727

SEQ ID NO: 212857 - DNA, 603 bp, Homo Sapiens
atattaactccctcatttccagctctaggataagcaaacagcaaaaaattaccaatgaaaagttaggagttcaaaagaagtagtctgaactagatagattagatgtcatcctgtgaaataggtttaccacatgatagggaagaactttcaaacagtacagggtctattttcagttattcactatgaaatgagaacatttcacagttgttataggttgctttcagaagaaaagcccaactgatgaatgtttttaaaaatgcactattgagagcgaacaacagactggatgccataattttatagtcaagtttgggacaagttttaagaaactgtgttacaattcagagaaaagacagttggtgagcatattaagagatatagggaacagatttagatgatccaatatgcttattatcagaattccagaaaaaggcatgaaatcataaagaagacagaataccaggcaaaattaatgaaaaaatattaatccaaacacatataataaaaagtatcaatttcaagaataaaagaattatataagcatttaacacacataaacattggttacctgtaaaaggtgaaaaaaaaaaacaggttcagatt

SEQ ID NO: 212858 - DNA, 550 bp, Homo Sapiens; identical to SEQ ID NO: 49141

SEQ ID NO: 212859 - DNA, 549 bp, Homo Sapiens
atctgtatttatctagtgcttaataatgctaggccctagtcgatagtcaaatagctaagtgtcttcttagaggtgatccaggacctagtcctggctccatcactgtgatactctcagaataattaggagatttccttccattctttggatgtcaaccttcccttctataaaataggagcctggaacagatcttctctaagctcctttccagatctgataatcgatgagtctgtgaccattcagtacactctactccactgctgctcctagaagttaataatgctatagactgaggagacaatgagtcacgaatcactttgtatttacagatacacatgcatttaaaatagatgtaaataaacacaatactgtattgcacttttggccacttttgcgtctttagaagtcaagaggtgttttttgttgttgttggtttgcttgttttgttttgagatggagtctcgctctgtcacccaggctgaagtgcagtggcacgatctcggctcactgcaacctctgcctcccaggttcaagcgattctctgcctca

SEQ ID NO: 212860 - DNA, 575 bp, Homo Sapiens
tttttttgaatcttcagctaaaccgggaaccattagtcaagacttcctgttacactggctataaagcatctcaacaggtggattccagaaaaggtcacagcacttacaggaaacaactgaggaaaacatccttgagttttcatgttaacaaatttctggatctgaagcacttgttttaaaagatgtcccttggaagatttgtcaatttttgttaatacaatcacataaggtaatgcaaattcttcacacatttctatggcaatattgtctgttttttgaattccaacaacgctatccactaataaaaatgttctcttcaagttccttcgttcttttagataggtctctaccatgtcaacaaaatcttcaggtgctctaaagccataacctggcatgtccaccactgtaaaatgttttccaactttgaaaaaattcattttctttgtgtgtcctggttttttggagactctgacttcaacctcaggggccagtgaaaataaagccttgattagagatgattttccaacattgcttctgcctataaaacacacctctggccgcggaaagtccggggc

SEQ ID NO: 212861 - DNA, 492 bp, Homo Sapiens
gagagacagtgtctcatcgttgcccaggctggtctcaaactcctggccttgagtgatcctcctgcctcagcctcccaaagtactaagattacaggcatgagcaactgctcccagccatacacaatcatctttatcttagtagaaaacttttagaatgccccggcaatggctgtatctaaaagaaacaggtatttgccctccataaatcaaatagatgtggccaaatcaatatatcccttgcctatatagttatatcgaacacatccctatatggttacatatcaaatattgaatattcagctaatgatcaaaaaagattaacacagtcataaatatcccctcccctcatattcagccttcaaccaaaagtctttctaaggcagcatataacagtgctaacagcaaactgacaaattaaaggggcatactaggaaaaatggagaaataatgccatttgctctgaaaaatacttcagttttatcttcagaatca

SEQ ID NO: 212862 - DNA, 472 bp, Homo Sapiens
actttattttcattgttgacactattacagatagaatgaccacaaccatattaacaaaccaaaaacctgtgcacagaaacaagatgaagaaaatatatcaagatgttaaccacactctttggatggtgaaaacatgggtgagtttctcttctacatttctgtaacttcaaagtttctataatgaacacatttcatatataatggaaatatatgtagtaaaggtggactaccaaaacactagaatgatgacctttcaaggaaaccgaaacaaaataaccataatcccacaacaaccacacaactatttcttgtttttcatctttcttcccatctttgacatttatgcatacttatcactaacaccctaataatcacagactagtgcacagatcaagatgttaacagttaattgttgttgggtgttgggaatatgtgtgaattttctttactgaatttccaaagttttgtatga

SEQ ID NO: 212863 - DNA, 571 bp, Homo Sapiens
agtagctcatcagctattgttagtgtagtttatgtgaggccaaagacaattcttcttcttcaagtatggcccagggatgcaaaaagattggacatccctgatttaagaaaacccttggtttttccaaaataaccaaataatctatagtgactctatcactgcagacaagtatatcataagcactcactaaactgaattattcagaaaaaaaatttcattttagtcagaaaaaccccatccattcaaatttctctatttaggatttatcatttcacagacacaatagatataattctaaatgaataaaactgacttcatttcagggtccactgaatattttatgatacaataatatgaagtctaaattattgtgaattatatttttcaatgactgcagttttgaatatttgtccatgtttgttcatcttttaatggtatgtgagggcatgaaactactatttcctttttaaaaaactgctttagtattcccacaactagcatttaggctttgtttatcccttttattatgaaagtcagagtttagcttaatgatgaactgacacaaacatca

SEQ ID NO: 212864 - DNA, 527 bp, Homo Sapiens
ttttaagagacaggttctcactctgtggcccaggctggagtgcagtggacaatcatagctcactgtaaattcaaattcctgggcccaagcaatcctccccccagcctctggagtagctacatgtgcgaccatgcccgctaatttatcttaattttttagaagttaggtcttgctatgttgcccaggccggtcctgaagtcctggcctcaagcgatcctcctgcgtcagccacccaaagtgcttggagtagaagtctgagctaccacgcctggccctgaaagctattttatggaagaatttaaactaaagatctccaaatattattcataattacatacccatgttggtatctatgtttacttatctaccatttttataggatttacaatatgacaatataaaataatcgtctgtatcccaaaaatagagcataagaaaaagactaaaatttgttttatttatggtacaaaagtttgttctcacaaatattttaaataaaatattgaatatgcttcattatttctgaa

SEQ ID NO: 212865 - DNA, 525 bp, Homo Sapiens; identical to SEQ ID NO: 53139

SEQ ID NO: 212866 - DNA, 624 bp, Homo Sapiens
ccgagaaatcgggagtgcactttttgactgtagattgttcgaagacacatttgtaaattttcaagcaggtatatgagttatataacatctgagcagcatagttttgagaaatatttatcacgatattgaaacaatatactgtacaggtgataaaaatattttagaagaatgttcattgttttcttaaatgagaaaagccaattacaaaaacagtatgaccccgcccacctgcccacacacacaggaaaaaaatatcgaggtacatgtgcacagacaaaagctgcacctggtggagacagtagttggttgtaggtagttggaatatagtgatttttgtctgttcttttactgctatattttccagattttctatatacacacaaatacttttataatgagaaaaactcattaaaaaagtagagacaacaaaaaattgattcaaaaattggagcatattttggcctgtgtgtggcccaggcaggagctggtaaagcttcctgcggcttctctgctcttgggtggcgaggctatgataaaccatccctccgcttgcctccctctcgcttggtgagataggtcaaaattttaattctcccactattaatcctcaaatctaatttaatt

SEQ ID NO: 212867 - DNA, 509 bp, Homo Sapiens; identical to SEQ ID NO: 52040

SEQ ID NO: 212868 - DNA, 1000 bp, Homo Sapiens
cctgattactttcaaaataacatattaattttaaggataaccttgggagacagcataattctcatttttcaaatgagaaaattaaggttcagatgttagattagttttttagtaatgccgtaacacggtactacaaacaacagaaatttattgtctctcagttctggaggctagaagtccagaataaggtattagtaggtttggttctttctgagggctgtgaagcagaatctgttccatccctctcttcttgtcttcatctgttctatgtctgtctttgttcaaatttcccctttatataaggatagcaatcatattggattaggcccagtcctaatgaccagatcttaacatttgcaaaggccctatttctcactaaggtcgtatttacaggtataaagggtgtagactttaacatctttttggggaagacacagttcaatccgtaacagatgttaagtcctttcctctcctaaatagtgtctcgtaagtaggaaagtttgacatagcacattgtagtgccactaaaatggtagttttaaaagaacatgacaatatatttataataccacatttaaaattcattttctaatactggcttatgtctggggagattttattttaaattaactaagtttctaaaatattaatagaattttgggttgtaatggtttcaaactttttcttcaaataataagtaagtgatgacaccaactgtgtaaagttattcaaaacccagtgcttagatctggctttatgtctgaacttccattaataaaatgtagacttgtaaaatgtggactcctctataagatcttgaaatgtccatcagaatactgtttaaattgttgcaagagcaatctgacagtggaatatctgtacatttcatatttatgtaaaaattgtggttttaccagtgttaatacacatcttgtgactagggatttctgagtgttggagaggtcaaagccatactaggataaccaaaaaaaaaaaaaaa

SEQ ID NO: 212869 - DNA, 1000 bp, Homo Sapiens
tttctctcttttttttgtgtgtgtttctagtcctcttttcctgacttcttttagattttttttttagaatggcattttatctattggcttttgaactgtatcttttgccttatgtgtttagtggttatcctagggattacaatgtacatccttaccttttatatcaacttagcattaatattgtaccatgtcagatcagatgcagaaatgttacaatcttataggtccatttaccacccctttgttgttcctttttgctagagttgtcatatgtattctaccaatgaatgtaagactatgtaagatgatgctacaattttgctttaggtagatatatgtgtgttgggggagtattttaaatttacccagatatttgtccagagagcattccttcctaaagactcaagtttccctctagtgtttttcctttcaccttttgaaacttcctttggcatttccttccagcagacctgcactatgacacattatcttagtgttcttttacctggacatgtattttgccatcattattgaaacattttgttggatatggaattctgggttgacaagtttatcttccttgagccctctaaaaatattgttccactctcttctggctttaataatttctgagaaaaagtccacagacattcaaatcattgttcctcactgcatgaaatgctgttttcctcagattactttcagtacttgttttttttttaatctttggtctgcagcagttggactataatatgcctagatgtattttcatcatattcatctggcttggagtttgctgaacttcttgagcctggaaatttatgtcttctgccaaactgagggaacatctggccatcattttttcaaattttttttccatctctcctacacatatattaaacattctgatattatccataaaaaaaaaaaaaaaaaaaaaaaaaaaaaaaaaaaaaaaaaaaaaaaaaaaaaaaaaaaaaaaaaaaaaaaaaaaaaaaaa

SEQ ID NO: 212870 - DNA, 1000 bp, Homo Sapiens
aggcagtgtacttgaaagcacattgcacaagcaggcaggagacttgagttcaagtttcagtgtacctccagaacaaaggccgcagggttgatatgtcaaatgagtaaactgaatgtgatagcatctttaagcttcctcaggactactattcatgtttctagtcagctcttagcaaatagaacttaggcaaatacaggaaatccatataccctgcaatacacagtacagactaagattcctatatttgggacctttgttgctaccaaggctctctgagacatattttaaacagagaactctcattttcctaagccccacacttcactttgctggttttctttctttttttttttttttttaattctcttacactttatcttcttatccggatgacatctagaaaattagacaggacctcagaagtcactaatgttatttggaacactatttgggaagtaaaggcccagggaggagaggtgactttcatgaggtcaataactcactagtggaaatgtgagaagatggcttttgattcccagttaaggcctgtctaccaactctgaaaactattaagaaatataactgccccctaaaaataacataccatttgtatccaggaaaaagagtcatgtctgaacaggcaatggtcctatatcaaaagaagacagctactcgggcccagaagcaatgatcaggctgcaaaaggagctgaagttgctgttcttttcccacgactttgtgaagatttatggtgtacatgggaaatctcggcccaaggtcctataggcagcactggatcggatctctaaggagtccctacagctatgaagttcttaacatctttatttcctgggaagagctggactgacctgacttaaaatatctggtgagtttctgaagcttttctacaaggaatgaaacttcctagtttgaaatatccaaacatgatagatttgagcaaagcataccgagctgtaacattacaaaaaaaaaaaaaaaa

SEQ ID NO: 212871 - DNA, 1000 bp, Homo Sapiens
aagggaggtggtgccaatggcaaagacatgctctgatggtgcggcttttccacaggcctttcttaagctgtgactgggtctcagatctttcttcagacctgagggatgtttagagtggaggatgtttgcaaccatcagtcttccgtcatgttacactggagtttcgtggcagtgacgtgaattaaagagtaatattttagatttgatattttattgctgcataatttattataatttttagtggtcaatctcagcatcctgattcagcttcagaaaagtttggaaagtctcccaaagaatgaggaatgattagcctaccacagaatcttcttttggaggcacagtgaaaagcgcataaaacacaaatgacagtttatgacttatgataaagcattcccttgtataagcctgatgcagggtcatgaatgaaaccttgtcctcacccctcgatgtcctgcttccaagataccactccttccccatctccagagatcacccctgatctgactgccatgggaatctctgccccctaaatacacaataggcttgagacccacccatttttagagtctttacaaagaattggttgtacattgtttttttttattttttatttttttatttttagacagggtcttgctctgttacccaggctggagtgcagtggtgcgatctcagctcacttcagcctcaacctgccgggctcaagcaatcctcccacttcaaccttatgagcagctgtgactacaggcatgcatcaccaagcccagctaatttttgtattttttgcagagacagggtttcgccatgttgcccaggctggtctcaaactcctgggctcaagtgatctgcccgcctcggcctcccaaagtgctggtattacaggtgtgagccactgcgcctagccttggttgtgtatttctatggataaaaatatatacactcagcaaataaaaaaaaaaaaaaaaaaaaaaaaaaaaaaaaaaaaaaaaaaaaaaaa

SEQ ID NO: 212872 - DNA, 1000 bp, Homo Sapiens
aagatattttgttagtttttattaagttagaaaagctcatgaaatctttgctggggctgagagaatggaattatctgattattagtattaggtcaaccctgacttaaagtccctactgatgtctttgcaaaaaacttggaaaaagcagttttctctccaggcctcaatatctcttgggagctgttataaaatggcataactcatctgaaaaagaaaaaaagaaacggaaggaaacacctttccatttgaaaatacggtgtgtacgtttgtaagtgaagatggtctaagaacagaatttttaattatgcttccacaggaagtttgacagcaacgtttctttctttctttttttttctgggaagtttagggcaaggaggacatgaaattgataatgccttgagcccggcaatgggttttcccagaagaaataatgcaaagccgttagatgaatgacagtttctaaagtcttcaaaaccaactcttgacagatggagcactgcagaggccatgtggcacgggaatttccaaatttccactctaatttcatttgctttttaaaaaactttggcagctgaagttgcagcagctgacctctaactgctaccccggggaaacaggaggccgtgtaacgggctctttatgaacaagggctgtagatggcgctggagaacacaggcttcgctaggggccgtggagaaggccctgtccggatgtctacccgccagcacagaggggctgccggcccttgctttgcatctttaaggaggcagcctggtgtagtcagatatccccgcatccgagtcttagttttaccactgacagctgtgtgactttggtcagcttttcaacttcaagcttttttcctcatctgtaaaaatcctaatttgtggtggtgtcatgaaaattaaggctaatatatattaaaatatttagtacagtactcagcacagattagatcccaataaagtccctaattacgtaaccaaaaaaaaaaaaaaaa

SEQ ID NO: 212873 - DNA, 1000 bp, Homo Sapiens
agctgaagttcttatgtccttaaggccatgcagaatctggacacttccactctcctcattcccccttacctctaaggttagctactatcatccctctgcttacttctctctggctccaatggttttcctaagggcagctacatatcagacactgccctaaacgcttaggctccatcaataaacaaaacagacgaaaagctctgccctgatagaagttgcgtaatagtgtatgtttgagggcaaggggaagagataataaacacaatcaatgaggaaattatatactgtttacttctcctggcaagaaggtgacaagtgccatggaggaaacagagctgttttttacactggctgttaccctgtagatacatgcatggcttgttgtctccgtccagtctttgctttttaaatgtcagtttcttaaaaagatgtgcctattttatttaaaactgcactcccctacgtctgattcttgtaccttgctccgttttctttatagcatttgtcaccttctgtcatactatataatttcctggttgtgtttattgtctcttccacataaccctcaaacacagtattacatagcttctatgagggtaggctttttgtctgttttattgatgactctttaagagttcagagcagtgtctagcacatagcaggtcctcaataagaatttgttgaacacaataattaaatcctggctgggtgtgatgacccacatctgtaatgccagcactttgggaggccaaggtgtgtggattgcttgagcccagcagtttgggaccagcctgggcaacgtggcaaaaccccatctttaaaaagaatataaaaatagccaggcatggtagcgtgtgcctgtggtcccggcttcttgggaggctgaggtgggaggattgcttgagccagggaggtggaggttgcagtgagctgagatggtgcgactgcactccagcctgggtgacagagtgagactgtgtctcaaaaaaaaaaaaaaaaa

SEQ ID NO: 212874 - DNA, 1000 bp, Homo Sapiens
ctgagaggcattggggaggttcactcttcaaactgagatgcttgtctcctgcatgttaacggcagccatacctgaactcgtctcaataaatttttcatagcatcgtatcttcattaaaattttattctattagcattctgaatacaaaccactaagtatataattgctaaaacatgtgttaagcgacgacttacgaaatgctggttttatcatattgttaattaacagaaagtaggattaatacattcacagatcattaggagcatttggttcaatttcaccagctcttcagcagggtggggacagttgtcagtgggcagccctggggatctggagcaagaacacaagtgttcttcggggttcaccctcagcccctctacatgttctaagactgtgtctgggagaaactcacgagacagcgactcaaggtctctttttcctaaagaaaattgttctcagatgtcactcagtgtagcctactcaaaagaacctacatggaagggtttgggtggggaggaggagaaagcaacacactcttttaagacagatgagtgaaattccatggactgggaggatttgaatcttggatccgaggacatcgtagaaatcctggttgtttactagctgtgtgatgtggggcaagccatcaacctccctgatcctatgtccccacctataaagtaggaataaagatgctgacttcagctgggtgcagtggctcacacctgtaatcccagaactttgggaagtggaggctggggaatcgcctgaggccaggagttcaagaccagcctggccaacatggtgaaaccccatctctactaaaaatacaaaaattagccagtcgtggtggcacacgcctgtagttccagctacttgggaggctgaggcaggagaatcgcttgaacctgggaggtggaggttgcagtgagcagagatcgtgccactgcactccagcctgggtgacaaagcgagactgtgtctcaaaaaaaaaaaaaaa

SEQ ID NO: 212875 - DNA, 1000 bp, Homo Sapiens
agggcccgcctcttaatactatcacactggcaacacctgaattttggaggggacacattcgtaccatagcatcttaaaaagagtacagatggctaaataaggaaaatctataatcccctgctcagcctcttcctactcacccttccctttaatcccctttccagtttctaataatcatagcactattttaatttctctattattatcttcatatacttaaaatacttttcatacacatgaaattatttttcctattttaccaaatatagactgtcttgattcttcactgtataattaggcaaacagttctctagcattcttagtaaataaattgttattcagtgtgtagaatcttgataaatgctaattgtgtttagtaataaattgcatcctaattttatttttaaacaaatttgtatttaatgcctgttgctttgaaactttcatacagagtatatacaactttttttccctaccagagaccaacagtgataataactaaatttaaaaataagaaggtttttaacttttatttcaagtttttatttaacaggacaaaaatataaaataggagtatatttctctgttcttgaaattcagaaaatatggaattagaataaaatatttttaaaaatcagtcacataatagcatttcagagaaatggggaaatgggaaatgatgaaataaataacataaacatattgactcatgctttcttagagggtagaatgatataagttcaaaaagttccagagaagatgaccacacaaactgaacaaaatgtaagtacataggacatgaagaaagatatcatggtaactctataagttcattttaatatttccttgagaaaacaaataattgttccatactttaattgatttgagaacaccaaatttaaaatattggatttataaaaagtcagtaaaattatatttgtattttgggaaaatgaaaaagaaataaaaaagttgtcactctccaaaaaaaaaaaaaaaa

SEQ ID NO: 212876 - DNA, 1000 bp, Homo Sapiens
gtggagctggaccctgattttagctggaccttgtttttagagacagggtttccttctgcagtctcgatctcatggccttgattgatcctcctgccttggcctcccagagtgctgggactacgggtgcatgcaaccacacctggctaattttcttctcttctttcttttcttttttttttttttgatggagtcttgttctgttgcccaggctggagtgcagtggtgccatctcggctcactgcaacctctgcctcccgggttcaatccattctcctgcctcggcctcccaagtagctgggactgcaggtgtgtgccaccgtgcctggctaatttttgtatttttagtggggatgagacttcgccatgttggccaggctggtctcgacctcctgacctcaggtgatccacccgccttggcctcccaaagtgctgggactacaggcacatgcaaccacgtctggctaattttcttgagttttagtagagactgggtctcgttatgttgtccaggctggtcccgagctcctgagttcaatcgatcttcctgccttggtctcccaaagtgctgggcctacaggcgtgagccaccatccccagcccaatttttgtatattttgtagagacacagtcttgctatgttgtccaggctggtctcaaactcctgggctcaagggatcttcttgccttggcctcccggagcacttaattacaggaatgactgcatgtgctgttgtgcctatactttctggagatacgttgttaggaatttatgtagttggccgggcacggtggctcacgcctgtggtcccagcactctgggatgccgaggcgggtggatcacctgaggtcaggagttcgagaccagcctggtcaacatggtgaaaccctgtctctactaataatgctaagatcagaggttgcttgcagtgagccaagatcataccattgcactgcagcctgggcagcagagcgagactctgtctcaaaaaaaaaaaaaaaa

SEQ ID NO: 212877 - DNA, 281 bp, Homo Sapiens
gacatttcctctttaatctgggtcacaaactcattttgctgccagtttaactcgagcttcttactaaccctttcactgttcagaaaatggatttggcatgatgtggtggagaaaacattgtattgggaagagagcagcctggggaaagtcacttacctacttgacctcccttttgctcttctcagaaaaaaagagatttatgttagaatttttaattttcttactttctttttttttggacaaaaaacttttgttcaagtagaattcttaagtggtaacag

SEQ ID NO: 212878 - DNA, 942 bp, Homo Sapiens; identical to SEQ ID NO: 49086

SEQ ID NO: 212879 - DNA, 934 bp, Homo Sapiens
ggacgcgtgggcggacgcgtgggcggccgcccttttttttttttttttctgtaagatgctttatttcattgaccaacaacatggggtctgaaaacccagcgggaggggtctttttatcacagagccagtcccaggcgagctgatgcatctctgctcctctgcccctcaggagctctcatcctccaaccccagctgcccccacagccccaccccattcacagaaagagggctaccacgtgcctcagcccccctgcccaggctgccagctcccaggtccttttggagaaggactgatctaggcagggaggagagaaggccaacccctccagggctcactgaggaaggccaaagcctttcagaagcagttcctgcagtgacgtaatccacagcctgggatctgcatggccctgagatgcctgcggcaggctggccaaggggctggtgtgaagaaagagggcagggcccataagctgtggccaacaggggcaggggccctgcctggagtaaagtgctctggcctaggctgcgtgggtttcactgccctgcagccccagcctcccttccctctgatgccaggcacagggagcctagtcctcactggagttgtcaaactcctcccagtcagacacactcatcacctcagaggcaaagtccgggtcggcctggctgcggtcaggggtcccgcggggcggctcagggaaacagggaagcggggccagggtgaaccacacaggccgccaggcctgaagatggagttggtccagctgggggccctttcctcccagcagtccttcctcacattcgaaaatgggccacgtacccctggcgggcttgcccccgttttgggggaacgggccacccttaacccataaaatcctggtgggcccgcaacagccaagggccaggctttccggggcgcccacccggggaagtc

SEQ ID NO: 212880 - DNA, 339 bp, Homo Sapiens
  misc_feature (298)..(301): n is a, c, g, or t
  misc_feature (304)..(304): n is a, c, g, or t
agtctttttgctcccagtttttaactgttgaattcctgctttgggattgctctttggctggggtagccaaccataccttggatttggtggcttgagtgttcaatgcctgttgcttctcccaaggagatactgattttttttttcttttgttcctggagaccgggtctggctatgttgcccgggctggtctcgaactcctgggctcaagaaatcctctcgccttggcctcccaaagttctgggattacaggcaagagacattgctcccagctcaaaggagaacttctggtcaggaaacnnnnaanaaaaaaaaaaaaaaaaaaaaaaaaaaaaaaaaagg

SEQ ID NO: 212881 - DNA, 901 bp, Homo Sapiens
tggcatgcacacattatgtttactagacatcaaagtaaaggagtcagtctttggaaaatctaatcaagggaaggaagatctatgaacctccacggtatatgagtgtaaaccaagcagcccagcagcttctggagattgttcaaaatcaaagaatacgaggagaagaaccagcagttaccgaggagacactttgtgttggcttagccagggttggagccgacgaccagaaaattgcagcaggcactttaaggcaaatgtgcactgtggacttgggagaaccattgcattccttgatcatcacaggaggcagcatacatccaatggagatggagatgctaagtctgttttccataccagaaaatagctcagaatctcaaagcatcaatggactttgaacatagatatttaccattgtctgatgtaaatttcagccatatatggattgatatggtttggatgtatccccacccaagtctcatcttgaattttaatcctcataattcccaggtgttgtggtaggtaattgaatcatgggggcagtttccctcatgctattctcatgatagtgagctttcatgagatctgatggttttataagtgcctggcatttcccctactggctctcattctcactcttgccgccctgtgaagaggtgccttccaccgtgattgttaagtttcctgaggccttcccagccatgtggaactgtgagtcgaaaattaaacctcttttataattaccagtctcgggtatttcttcatagcagtgtgagaatggattaatacctggatgcatgcatggtttgtgtaacaaacagggtctttttggcttatctagtaagtataaaacaagtggaccaaaaagaaagttgactcacaatgctttggtttcttgttggca

SEQ ID NO: 212882 - DNA, 1000 bp, Homo Sapiens
gttgtcaaaaatgaaaacagatgatactgagtaactcactagtgccctaaagtactctacagcttttcaaacaaaattgaatattcttttcaacattctctctgtaaaaaaaaaaaacaattctatattagtgaccctatatccaatagccagttcaaattttgtttttctcatgtcatacatctctcttttgacttctctgaagtcatcaatctactggccacttaccttgtgacacagtggcagaagatgtaggaaaatctgtgctacccatcattgactagccactttactatctgaggtttgttagtctcaactgtaaaaaaaaggatcaaatgatctggtgtccttttccattcaaagactcttgaggtcaaaagaattgaatagaatcacattggagaaaaaccctatgaatgtaagaaatgtggtttggccttcagttttcccagttctttttgaaaacatggaagagctcatgtggaagaaaagccttatgaatgtaagaagcatgatgaggcctttagttgttccattttcacttcatggcataacttattctggagaaaaactatgaatgtatggaatgtgggaatgttttcatttctcatatgtatgcaaagaaacatggtaatagacactgaagaaaattttataaatataagaatgcatactggattaaagtactagtagtataaaaaatacagaaaaatggcgtgaacccgggaggtggagcttgcagtgagccaagattgcataaccgcactccagcctgggcgacagagtgagactccatctcaaaaaaaaaaaaaaaaaaaaagtacagaaaagttatcacttttaacaattactttaaaagtcacgtgaaacttctactggaaagaaatcctacacgtaatatggaaagcctggtgcaaaataattattgtataatgcttgtgaaaattcacaacatgaataaaatattacatgacttataaggtgaaaaaaaaaaaaaaaa

SEQ ID NO: 212883 - DNA, 1000 bp, Homo Sapiens
acagcagctctccccataataatgtttatgacaacagattgtttttagagagtgacatatatatgggtcttatgtaataccttctctgctataggcaccaatccaaagtcagtttccagaaaaacattttaatcctctctcaccatggttggagaacaggttttgcatttaatcaaacagtatggtttatggagagtttcctggatggttggttttcagagccagcgttgttttgtgtttccttggtaattccaaagaaatcccagcatcctacgtacctttggcctccatgatggattgaccatgattgggtgttagatggtcagaaactgagtgagatggttttttttttttttctttaatgagctttccctttttttgctttaaaattttcaatgtaaaaataatgacatcatagtctatatttcatgtaaagtattgtggcttaacatgtacaaagttagaaaaatccacaagactcatttgctgatctaggtctaaagatttattttttggatgactataaaatttgcagagttagaacatttcaagaaagtttctcggctcgatgcggtggctcacgcctgtaatcccagcactttgggaggccaaggtgggtggatcacttgaggtcgggagttcaagaccagcctggccaacgtggtgaaaccccatctctaccaaaaaatacaaaaattagctgggtgtggtggcaggcacctgcaatcagctactcgggaggctgaggcaggagaattgcttgaacctgggaggtggaggttgcagtgagccgagattgcaccattgcactccaccctgggcgacagagtgagactgtctcaaaacaaacaaaccaaccaaaataaagtttcttttactctcatcttttttttttttttttgaataaattccagacatttaagcttctccttttagctgtttctgtttgcttcctcagaggaatttaacgagccgcaaaaaagaaaagaaaaaaaaaaaa

SEQ ID NO: 212884 - DNA, 639 bp, Homo Sapiens
cttttttttttttttttactggtaacacctttttaataggtcaaagtaactgtacagttcattatattcttcctgagaataatttatatcccccaacaaactaaagggagggtatattttttcaaaattaacagaatggatggtgtaactggacatcaaaagaaaaccaaattcctgttttgcttcattctctcctgggaagacagatacaaggaagggttagttaactccagtggctgtaaaatagtcaacatggctttaatctttctttataaattatataaaaatggaaaaaggggatggttctggaacttctcctcaatgcagtttggaggtgctctggtacaaagcatttctgcttccaagagaaataacattgctacaaaaaactggcacattattctgtgaaaaaagacatgagtttttagttgtgttctacagctagttcccgacccaatgcttcacatatccacacgaaagtaaaaggcaggtaagacaaaaagggctgtagttttttctgaaataactcaagtcttcaaaatatagcttttatattctttgtaaagtgggattagcatattgcaactgaagggtgttctaacaaacaaaaattccagtctggataataattctatggta

SEQ ID NO: 212885 - DNA, 664 bp, Homo Sapiens
ctttttttttttttttttgcacaggaatgcacactcttctcttaacccttacatgtcaagtgctaatgctcagtgcccaggaaagcatcctcagacacagaatagctgtcttctaggaactgccaccagggggcaacctgcccatatgcattcagattgaccgaccaacctgtgccctttgtctctcccttatttttacttccttttctattaacttctgcctctggctagtttcttcctgtaatcgtttttccaggatttcccggcgtcgtttttcttcttccagggctcgttttttggcttccatttcccgttcctaaacattatgcataacaatgattattttaaaacatactggttatacttgaatggttccaatcaatataaaaaagacaattcttactagacaaatcttggtttgtagactagtctcttataatacataacctacaagaaaacaactcataaccatgcctggtatagcttccaaaatcatcatctgcagaaatgcaaccactaaatttaattaacaattaaattgtggtcttcagtgaaaatccagcttgttaatatattcagtcatttcatcatttcatatcaaccagcaactctcccattttaaataaaaagcctcacaaactgtactttagcacttatcacgtga

SEQ ID NO: 212886 - DNA, 663 bp, Homo Sapiens
cttttttttttttttttaaaagaaaatcatgtacagattttatttctgctgaagatcacaaaacaatttcaacctctgtggttcaaaataatttaaggatcttgtacctttgtgtttattttctgtttcaactaaggatagacttcagaaggcatagcttcccttgtaacgtttttaaacatctttttcatttgtagaagaacatttcaaaagcccaaattaaattatcattaaaatactttgacactttacaatcttccaagtggaatttaagttgtatgccttgatactgtagttttacagtttccccatcattggtaaatattcttctatgatgccactataatgctactggtagaaaatatgtgcatataatttatcagtatattttcatgtaaaattttataaaaatctcaaagttatgaagatagttttacacaccctctaaactaggtgtcagcaaactataacccataagccaaattcaacccaccacaaaaatatttgctatcaggcctttacagaaaaagtttgctgaaggtgtctggaattctggacagattgtttacagtggaatcagtgtatgacttaattttgcttcctttatagatatcatatacattattgcttttgaatattatcatctacttggaaaacaaataa

SEQ ID NO: 212887 - DNA, 662 bp, Homo Sapiens
ctttttttttttttttgagtgacaaacactgcaggttttattcaatcgccactgaattgagaagcaggagtatggctcacaaatcaacttttcaactaatgaggagtgagggggttaaaatataatttttctaataaaggtgtttcacattcaagcaaagggaggaatattcctggatttttcagaaatgggcagtgaacttcctaaaaccagagtgctgccttcctttttgtcctttcatggcttcttctggtcactgtcatggcgattgtcaactgtcatggagctagcaggagcgttatttagcacagaaataagattataaaaaggctgaggtctttttaaagtcgtttggtcagctatcgtggttgtaaccagtctcctctggactggttacaaaaggaacttttcatcacaggcatcctgtttcttaaagataagcagagttagggcagggtaaaaattcagctatgtcacgcaggaattacatcaggtaacatttttaaagaagaaatttgccaaaatattaaatgagtatgagataccctttttctaaaaaataagacatttgaagtaaagattagttgaaataaaacagttctactaactaaagacaagtagttcccagagcaggtgcatttatttttatatgcaaatatatc

SEQ ID NO: 212888 - DNA, 615 bp, Homo Sapiens
ctttttttttttttttttttttcccttatttattggttttatttctccatgtagaacaaagaagagaataagaaaataatcatctggtaaccatcatagtaataattgttcaaacacaagtcatccatgaaatgctaaatctagtgggttctgaggagtaaccagatatttacagagcctcaaagtatctccatacaaaatacggttgaactacaaaaagaaaattgtaacattagcatggacaaacctggcaggtactccttaactctcctaagtaataaaaactgtaaaatgcaaataagccttcgatgacctttactaacctttactaaagtatcagtgatgacttggttgtttaaacagctgacatttgggcaatttgagtatgtcaaactcaataatactggttttcatttgcaagatccacttaaaacttaaggaggccaaaaaacatcatttaaaataccctataaattataatcatacatatgatacaaaaatatcctacttcagtaaatattggaatgttatatattttatgagaaacaattaaaatgtgtaaatagcccagtaataaagttttataatcttttaaatcatcatagaatttttcct

SEQ ID NO: 212889 - DNA, 631 bp, Homo Sapiens; identical to SEQ ID NO: 46262

SEQ ID NO: 212890 - DNA, 589 bp, Homo Sapiens
ctttttttttttttttccaatttgagatggagtctcactctgtcgcctaggctggagtgcagtggcacaatctcggctcactgcaacctctgcctcccgggttcaggcgaatctcctgcctcagcctcccgagtagctgggattacaggaatgtgccaccacgcccggctaatgtttgtatttttagaagagatggggtttcaccatgttgggtaggctggtcgcgaactcctgacctcaagtgatctgcccaccttggcctcccaaattgctgggattataggtgtaagccactctgcccagccaaaaagttaatagaaatcttaatcaaaatataaatatacattcataactgccatctacaatattctgttttggtcctatatcttaatttgcctttatccactttattattctaattgtcaactgattttaataaaactgatacatctttacagttgatgcacatattagcacattcacaacataaaaacaaaaatttagaggtaaagtttgggagtatttaggttaagttacacatgttcaaaagttaacacagacctatctgaaaagtaactaagttacaaaa

SEQ ID NO: 212891 - DNA, 640 bp, Homo Sapiens
ccacgcgtccgcccacgcgtccgcccacgcgtccggattaatagcacatttcttcacaaaattagataaagttggtcaaagaccagatattctggaatggaaattgtaaagcttaatcaaaaagaatagccagtacagcatacaatctcagaaacttagaagcaagtagaaaataattggttgatgtaaacgaaagtgccattttagtaaaggcaggaaaaaaatagcaatatttgagttatgtaaggataaaaaatccactgacttgtatttttgcacaagaggctggtctgaatatgattgttcacattaagagtgtttattcgtcggttcattttggggattttcccccttgatgttttgacagattgaagtgagctttagtgagcaaaaggatcagaatgcagggaacactaagctgtgatgaagaaagtgtggtaaaaagccagagtagttttatacagacaaaaccagtgtcaggcctttgcagtaggcttgagtgaacttctgatctagatttgaaagtaaattttatgaagacattgcccatttttacttcctcattcattattgtaccagcatcatagctttattactctaatcccaggtaagtcaagcctacaatgccctagaggaagag

SEQ ID NO: 212892 - DNA, 654 bp, Homo Sapiens
ccacgcgtccgggaacctctataccattttccatggtggctgtactaatttacattcccagcaacggtgtagaagagttcacttttctctgcattgttgctaacactgatctttcatctatttgagaaaatgcattctagcaggtgtgaggtaatctcattgtggttttaatttgcatttccctaatggctagtgctgctgaacgttgtttgcatgaacctggtatgtcttcttttgagaagcattttcacaagccattggtgaagtatgtggctcaccaccacccatactccagccctgttcccagtcactggtacctagagggtgagagtgaggctgctcatcaacgtgttctccaagtcataagctgctgctctcccactcacgatgcttggtgattcagtgatgttttccacttaaagacagtgatagctgtatcaccacagttaatagatgtctgatgtgtcccagtcacagagataatacaaatgtgaggaaataatgctggtgcctgaaagcattggagaccatttgtaagaatgccatttggtagttaaagtgaacatgaaaattgtttagtttttcttggtttcataaacattttttcttcctgtagaactgataaatttcaaacggaagagagtggcagcattt

SEQ ID NO: 212893 - DNA, 508 bp, Homo Sapiens
ctttttttttttttttagtaatggaagtattctattatttttaattttatgtatgtacagacaagagctatatgggaaagtagctattacagacccattatagtttcatcatttataaccagggttggtagtaaagcaacagaaatacatcttcaatgcagacttgctcccagcatctctttcctttcatccttgaccatattgcatcctggacaggaagaagacatcctcagcccaccaccccttcccctccaatgtggactgagtgttgggtcaactgataagcagtgcagactcttcattttgctttgttggtgccttggaggcatgtgagggcacagcctcaaattccagagaccttgccttcaggatttgaggtgggcaaagatgtgaaagaagacctttagccactcagtgttatcaaaagcaatcaccaaagaagtttttgcatctggcattgtgttgggacgtccatcagcagtaccgtacggtctctttactggacaag

SEQ ID NO: 212894 - DNA, 542 bp, Homo Sapiens
ctttttttttttttttagcagttcacttcaatggctggaaactagacagaaagttgggaatagtctgcctattatcatacttggggcttgctacattatcagttctatatgaacttggaattattggaaataataaaataaggggctgtggaggttgatattattaatagtgttatgcagaaaatatgaatggcagggaggggcagagagaaaaatccatttcttcatttaaatcaaattttaaaaatcttgaaccttagaatctaaaacttacagtaatttaaaaccaaccaaaatcacatcctaatttttctgagccctttcttttcatgaaaaattacatattataaaacagaagtttggggggaaaaaatctatgttttaccatacaataagttgacaaaaactggagaaactagaacaaacaaatccaactatgtagtactgaaaacaacaagaaaatggcttatttcattaaaaacagtataaccattcatttaaactgaatgaccagacttgctgtctttaaaaacccaaacttg

SEQ ID NO: 212895 - DNA, 400 bp, Homo Sapiens; identical to SEQ ID NO: 45736

SEQ ID NO: 212896 - DNA, 697 bp, Homo Sapiens; identical to SEQ ID NO: 42340

SEQ ID NO: 212897 - DNA, 491 bp, Homo Sapiens
agcttgcggccgcattcttttttttttttttttttttttaaactgtcataataaactgattttattagaaaaaggcactttaatgccaactgctggaaacacgcatagtaaatacatttgcacaaccaaacacagtgccctccagggggcagggagaagaagagtaggagagggtgatagttgttggcttaacaaagaagagaagagcgagagcgcggccaggggaggtagttaggtcaagtggatggttctgtaccaaggacacagcaaaggtcctcaggcactgattcacattacccaaagtcaccagataatagagttgtttccgtggctgacatttcttagccttgccctcaaacttggcaggagggaggcaagctcgtttaaagaagggagaggggaggagatccaggcaattggcctaggggttggctttgagagagaataggttgacccttcctcggaaagagggaagggggaagcagggagcc

SEQ ID NO: 212898 - DNA, 680 bp, Homo Sapiens
cgcattctttttttttttttttttttttattgcttctaatttgatttatttttgctctgcaataaaaacaaacgtatttaacaaataccatatgttgcacatttccatatatgattaagatataattatgcccagtagaaggtgggagaagggaaaggaagaagatgaaatagaaaatataagttgaatctgatgcttaatatgatttttactccatgtatacttttactcaaatgatagctcgtgcacatgcaaggacggactgtgctacttcaaggtactttctatggggaaagaaaagcaggagaaggaaaaagggagggggagatggccatgcatctccacttcctgaaggaaaaagcactttggtccccataggtaggagaaaaaaaaagttaaataaatgggagggaagtatgtgttttgcatggaggcctcattttaacaatatcttttttttgctcttctgcttccaaaccttatttgccaatgtaatgcctttatataaagttcttatgatgaatgaaaaactttcaagtgctgttgcctcattaaatgcattatttattaatttaacttctagtactctcgataaagagccagtgaaatgagttattgagttccagggaaaaaaatgagaacataattttgaatttattatctctctatacacacacagt

SEQ ID NO: 212899 - DNA, 703 bp, Homo Sapiens; identical to SEQ ID NO: 40345

SEQ ID NO: 212900 - DNA, 417 bp, Homo Sapiens
ggcacgaggggaagccacacaagagcgatccaatgtctcatctccgccctcaatcatggcctccgctgatgccaaagtaaacccattcagcttcaggaggcttttcagcaaacaaagcataatttgtacgacggatctgtgtgttacagtagaggatcacgggcatttgaaatgacacaactggaagctaaatccaacagcaggggagacccttaccaaggcgaggtatgacgctccacttggtctcactgcctcccgtctctgctccatccaatctatcttccagtccagaagtgaaggttttgtgccaaaatgcattcacccatccaaacattcaataaatatctactaagtacccactaaaggttaggtgtgcgtgaagccctggtggcaaagaaataaacagacccgacctct

SEQ ID NO: 212901 - DNA, 474 bp, Homo Sapiens
  misc_feature (445)..(446): n is a, c, g, or t
ggcacgaggggaaccagatcttgatctggcgctcggacaggcagagtgcgtgggcgatctcgatgcgccgtcgccgggtcaggttgcttgtctggagatggagccactacaggcgggcctgggcgcctggagtcgggcatgaaagaaaatagcgcctcatcgctcttatctaagcccagaggtagacttcgcttgaaaagatcgagaatggaggaggggatcggcactcacttgcagacatcaacagtttccagaaaattcggttcaattccttcaccacggacccaccaaccaaggagctggcaaaacccactaaccaaccaggagaacacagacccggtttgtcttttgacaaccgagtggaactgacggggccggcgcctgccctgcgggtcccctcccttggctgagaagaaaaccaaataaaccttgaacagccttggcnnaaaaaaaaaaaaaaaaaaaaaaaggatt

SEQ ID NO: 212902 - DNA, 444 bp, Homo Sapiens; identical to SEQ ID NO: 51558

SEQ ID NO: 212903 - DNA, 547 bp, Homo Sapiens; identical to SEQ ID NO: 43975

SEQ ID NO: 212904 - DNA, 536 bp, Homo Sapiens
ataagcttgccgccgcattcttttttttttttttttttttttgtatttctatctgaaatgaaataattgcttttcttccctggtaaaggctggatggattggtaggagatttcatttatcacataaataatcttaatcttaataatttatcagtgtgtttagattttgaatattgtgtttcctaaaaattatttttaagcttttaattcttttgtgtgaactattagatagttgcaatagttactgctttctgtaatagttaaatggaagatcagttctaatcatgaagataaaatgacagggaactgggagcttgtgacaggcaggattcctaggattgttaactctcactgtactgtaccttgtttatagcatatttatttcctaaattctccttttctttttgcctaccataactctaacccaaggttcatttcactgcttggcctttatgccagcaaggagggaacctaggtagggtggaaagggaagctattcttgacactttcagaactagttaaaaaaaacctcgtgcc

SEQ ID NO: 212905 - DNA, 600 bp, Homo Sapiens
ataagcttgccgccgcattcttttttttttttttttttttttttgtgtgtcttatattcatttactgcatgggtatcaggtcaagaagataaatgcagtttccacacgggctgtccctccacagatgaccatgggccctgttgcacctggggctccatccgcagaggggccctcgggagggtggtggcgacgcctcttacttgatatgctcctggtgcccggagccctgcaccgtcttggcaccccatctttgctccttctcactcacatcattcacaaaatcagggtcggtctcccagtcatcggcccccgcgtcatcctgggcgatggacacagcgtggcctgctgaagctttccacatctttctttccgcttggagataaaaggctgttcacgaaattctgtttaaaacacagtaatccaatgaggaatttccaggcattggggactgattccgtcgccgcctggttttggtgtttctggtaggctgggaacaagcttcctgctgctgtatcaaaatcaggtgatacccaagaagtgatggtgctgtggtcaatgggcttgctgggcacctgtcgagtgtgagtgatgggaagctgt

SEQ ID NO: 212906 - DNA, 608 bp, Homo Sapiens
aatgcttttttttttttttttttccaaatgaactagggtctttaaaattcctaagtagattcttttgagtggtaggggagtctgtatagattacagatataatttattgtgataacaaatggcttcctgtttgacctcatttccaggtgtcgcatctgtggctgatttatttcacagatgtacatttgcatgtacttgttgaactttgctaggaaggactcaatttttgaaaaatctgttattttcactgtgggccttatgaggcaatctactgcaatggaaaaagggttccttggtcatttcaagttttattttctattagagtaatatctaacttcaattattttgccaagtttaaaccttctctctgtgtctgtggttagaatttgaaaataacaatgctctgcttaaagtaagagtcacagtcagcaaaaaaagccaatggattttaaaaagacatcttagttaaagctagagaaagaaaacttcaaataagcaaagaagtattgaaggatgcccacgaattcctttgcattaaaatcaagatgaggtaagaggtagaatataagagaaagggattatttttaccatgaattgtatctggggac

SEQ ID NO: 212907 - DNA, 691 bp, Homo Sapiens
aatgcttttttttttttttttttcctgtaaataaactgtttattttttatagaaagccacaacagaaaatgattagtatataactaactatgtaagaacacttacatccatacaatcaacagatgcttcaaatgcatattttaaaaatagttttgagtgttaattatgggagggccttgatgggatcattttgtgaacagttcgcttttataacaaactcaagaggcagcttgccagcgagctcttttagacataagcatttttatcaaactgttttgaagggtttgttgttttaaaatcttctccaccatgatactttgtccgagaagacatgacagatgtggccccgttgtatgtgtatctgggtgttttgttgttgtcagatattgaaaagcaaaatatgacaccaccaattatgcacagtgaggctcctgcccatccaataaacagagcggctcctaattcatacttttgctcaacaaagagaggatcaaagaattccgttgtgattttgtttgcatatagggaacatccagtcattgagcacagccctgacagtatgaatacaatcccagccaaacaagcaattttagctttggctttatcggagcctccgactttggtacacttcattccaaagagcgcaaatatggaaccaaagaagcccaggctgacagcagcgatcataagt

SEQ ID NO: 212908 - DNA, 680 bp, Homo Sapiens
aatgctttttttttttttttttttacgcaaaatttcacattttaatatgcttagaaggagtttttaaagaagtagaaatgatttccttggcctctgactttcagtgatgaaaatgcaaccatgcagtcccccctttgcagaagggcagttcttcccaggctttctggaagcaggggcttccgaggagtctccacccacctcacagaacactcactatgagccctgcacagacagcaggattcacaatctccaatagggatggcaggggcagcccttaaaacttgaagaggtcgatgaagtgctgcggagacacaggcgtgaagcagctgtcagggtcggccgccgtgcaggggtgtcctgagtccttccaaaagagaatgctgcagtgccgacagaaatgcagtgtgtctccgtactgctccttcgctgggtaatgtttctgaagtgcaaagtacatcaacttccattcaatatgacctttttctgaaaggatcaaatgtctacaaaactgcttttcagcaaaatggtactgacaaagcttcttccacagctgtctgtcttcactaagcatatacaacgtgggggtcacctggcctaaggtgatgatgtcccatccgtctgagaaccggtataggatgttgttcagcatgtgcagaggaaggtcactgagggtgaggcca

SEQ ID NO: 212909 - DNA, 641 bp, Homo Sapiens
aagtgtttttttttttttttttttttttttaaatacagaagttactttatttgggttcacgttgtaaaataaaattgtcttccagaaaattaaaatataaaacaacttaatagaacgtaatagctaattatttacaaactcattttaaagactagaattttaaatcgaaggttgtgccactttttccctaagtctgatacacttagatcttgaagccttcgactatgttgaaagtgttttctcttgcgtgaactattaatagaaagttttttcattaaaatataatttgttcaggcaagatcacaacataaatttgctttataaatttaatatatattacatacgtttgaaaaataacatgtttaatatcctcaacactcaacactgtatagccattctttaagtcctttaatttttgtttttctccatgctcctccccttttcctctgaaaggagtgacagttttccccaccccgctccaatcccaatatatctgcttcagaaagactttgaaactacaacaaccaaaatggtgtactactaaagaaaaagtccactcaaattgataggttccaaattaattatctcagctatttcagcctaattttaggtgtaaaaagctcagaaatgaccctcgtgcc

SEQ ID NO: 212910 - DNA, 514 bp, Homo Sapiens
aagtgtttttttttttttttttttcttttattgaactgcttttattgaaaacccatttattgaccgtatagctgtggatcaatttcaggtcttctaactcaggctgtttatccgtttgtcactcctgatgccttgtgtctaatagcttatagtaaaccttaaagtcagatagtacaagtccttgttcttttccacacattgcaataaattttgaaatagataataactcatgaaaccatcacacacatcaggatatgctgtcacttcatccctttctgatatagtttggccgtgccctcacccaaatctcaacttgaattgtatctcccagaattcccatgcgttgtgggagggacttaggaggaggtaattgaatcatgggggcgggtgtttcctgtgctattctcctgatagcgagtaagtctcactaactgatgggtttctcagggggttctgctttggcttcttcctcattttctcttgctgctgccttgtaagaagtgcccctcgtgcc

SEQ ID NO: 212911 - DNA, 697 bp, Homo Sapiens
aagtgttttttttttttttttttccacagaagttttagagactttatttatgtataaacaatttaaacactttgccataaattatctttgcctgtccctagtctttgcttagcagcaaattaaaattaatataaaaactcgatgaacaattcatacatgtatattacaaaaaagttcctgtaccaaagttcttattagactttatttttgtttttttaatttttaaaatttttttttgtttttatttttattttttaaattttctctcctcgtggtgactgtcatgtgattgtctcagtttctggaccaaacaaacacactaataattttaaatctgaaacagtgattgtgcctttcggctcatgtatgtacagggtgatcagaagtggtacctgttagcaaaagtgtcacgatgctgcacctctaccgaaactgatacccacgaactacggaatctaaacagactacaccctgtaactgcgtattactgtccacaatggaatctccaaagacaaaagagtatgaaatttatctgtagtgattatagccaccattttgaattaaattttacactctgcgctcaaataaattagctcaggccagacttagttgggacctgagagttaagtgctggatggtattatttcactttgatttttgataggaatttcttttattccctcatgtttttttttct

SEQ ID NO: 212912 - DNA, 575 bp, Homo Sapiens; identical to SEQ ID NO: 44713

SEQ ID NO: 212913 - DNA, 707 bp, Homo Sapiens
aagtgtttttttttttttttttttattactataccatttatttgatgaattaatcaatgttcaaatggaagaggttttgacaatgtcactatgtttgatgtttatacctgccctgaatgcttgctcagaagagaaacagatttcccagtattttttataacttactttcccattgtcttcaattaatttgctattatcccaagtagacagacaacttcagtagtagccatctccctacatttttagatcactgaaaaaaatggatgagcaacccatgaaaataactagcttactgaaatgcttgtcttttaaagaaaagttgggattatttaaaaaaaaaaatggcccaggaccagtagctaggagatctgggagagagaagtcattgccttggttctgacactaagtaacccttttgccttttgcaggtaacttctcatctaggtcctcagcatccttctctgtaaactgaagagtttaaatgactctaagttcctctctctctctctagatgttctctaacaccaagtttatgtgagtttctttggccagattttaaccagagaccatcctccacgaaggtcaaagataattaattctgagatagcaggagttgtttttggcatgtgcagtcaacctttcaaaaaaccaagagttctcaagttaagctaccttcacgaacctcttattaaatttaagtatcactc

SEQ ID NO: 212914 - DNA, 662 bp, Homo Sapiens
aagtgttttttttttttttttttgtggttttaatagactttatattttagagcaattttaggtttacagcaaaattgagagggtacagagatttcccatatagttgttgtccccacacatgcatagtctccaccattttcaacatctcccaccaaagaggtacatttgcagtaattgatgaacctacactgacacatcattatcactcaaagtccacagtttacattagggttcactcttggtgttgtacattttagggggttggacatatgtacaatgacaggtatttataattatagtatcatacagagtagtttcgctgccctaaaaatcttctgtgctccaattattcctccctcccctcccccacccactgctttttactgtctccatagttttgccttttccagaatacatcccagtgtcatatagttggcatcatttaatatgaagccttttcagactggcttcatttagtagcattcatttaagttcctctgtgacttcttatagcttgataactcataatttgtcatagcttgatttaagcactgaataatgactacatgcaccacaatttatttacccatttacctactgaaagacattttgggttgagttttggcaattatagataaagctgctataaacatccatgtgct

SEQ ID NO: 212915 - DNA, 499 bp, Homo Sapiens; identical to SEQ ID NO: 53550

SEQ ID NO: 212916 - DNA, 589 bp, Homo Sapiens
aagtgtttttttttttttttttttttttttttacttttaatatttaataggaatttgtgttagttgtaacaatgtgtgtattggatccaaaacatgttatattttaagcaatggcttggagagaactaatcaattcatattctgcatttccagccaaagggacataggcacaactgactggtggcaccttcctgtgggaagcctcttccatccatctacagcattgatacttttataaagtatgaatttatcttgcttgaagagttaagtctcattttccatggttaatgcaggattgctcataccagctttgcattttcctgggtttatgctgctctccgtccaagactgagaatcagtaagaaggtggctctgggactctctcaatggctttgcaggaaactgatggttttcgagatttttagctgtggaattcagccctgcaggagtagatgcttgttcaggatcctggttaacaaggcaagttggaaaggagcagccatcacctagacttgaaaaaatgggtagcaaccagtacttcttctcatcaccaaaaacttgtcgcatgtttttactgaaacccaagctg

SEQ ID NO: 212917 - DNA, 534 bp, Homo Sapiens; identical to SEQ ID NO: 50493

SEQ ID NO: 212918 - DNA, 572 bp, Homo Sapiens
ggcacgaggttttttttaactttttaactttttattttctctctttctttacagtatattttctgtgtgtgtggctgtgtgtgtgtgtgtatgcatgtgtgtgtgtgtgggggtttcattcagtttgatcaatcttcttccccttcttcctcaccctgcagtagcagggtggcagcggcggtctcctcctgctgctgctgttgctgctggtgaagctgctcacaggcagcccgcttctccctctgcttctcttgaatcttcttcatctcctccgagtacttgcagaaggtgtgtccgaacttggcccacaccttgtagggcacggtgatggagttgcgataggtgggcttcacctcgctcactcgcataaacacgccgtacttgttggagcccacatcgaagaagaagcgcttgttgtccacagtcaaggaggtgccctcgggcagctcggccggctcctcctccactccgtagtcgtcgatgagcttggccagagcgttacggaactcgatgagcccctgcgcgggcagcgcaatggactggccctgcgtggagcccaggccaggcccccg

SEQ ID NO: 212919 - DNA, 600 bp, Homo Sapiens
ggcacgagggtttcctgtattaggctgacttatcctagaggcagtaacaggcacagcccacatccaggaaaagttttgataacactatttaagaagccagggctggaaagaatgtgctctggagactctcccagcattccctcaacatagggagaagagaaacaaattttcctttctcttatgattcctgtttttcatttaagcagcacattgaaggtcatgagatgcctgagcaggcctggattgcagccacctaggcaccatagtgaaggttataagataagcccatgcaaggcactagagcaagcctaggtaacagccatctgggccacatagtaagagtcatatgtaagtctgagttataaacctgtcatagtatgattaactgcttttgttctgtttctgtatccttgctttcacatcactacactttgtgccactgtaggcttgtttcaagttagcccaccctctttagaagtgtatgtaaaagttaaatgctgactttgtccttggcccagtctctggatgttaatccactgggtctgagtgcactcaataaaatcctccttttctacctaaaaaaaaaaaaaaaaaacactt

SEQ ID NO: 212920 - DNA, 599 bp, Homo Sapiens
aagtgttttttttttttttttttttttgtatagttgttaatctttcaacaacttttattgaacatgtagagagagaaggggaggttattaactctcctgctcgtactgggataaatgaagaagaaggcataaggacaataaacatggaactccactgcaaatggattttatgcagctgaggaaagtttgggcttattagtatttgctccagcgaacctccaagttttctccattgcggacaacgtaactaccagctccttggctcagtggttcgcctccactcagaagttcccagtaggttctgtcattattgttggcacataggccctgaatacaggtgatatagggcccccatgagcgctcctccattgtgaaaccaaatatagtatcattcattttctgggctttctccatcacactgaggaagacagaaccatttagcacagtgacattggtgaaatatgtttcattgattctcacagagtaattgacggagatatatgattgtgagtcaggaggtgtcacagttataggctcatcagcggagatgttgaagttacctgaagcagagacgcaagaagagtctttgttaatatcca

SEQ ID NO: 212921 - DNA, 676 bp, Homo Sapiens
aagtgtttttttttttttttttttttatattgtaaccattttattaatatgaagcaatgggataaatcctttaacaggggtactgatttactaccgtgaatatgtaccaacactttggtgcagtatcatgcctgattcagtcaaataatgtgttatttacttgcactgccacacatgtgaaaacacatttcattggttgacagaagagcacacagccatgtacctcgtttctggcttaaatgcatagaaatgttctcatgtacaacggatttttcaccactcaaggacttcataatagatgaacaacttttcaatacactatttctgccttgctatttttttttttaagtgaagagagaggggaaaaaaccaatactgtggtacaaaagacctttttacaaggtcctttctggagaaatgttgagaatacagttatagtcctataataagactataatcaagatcatcctacaaggacgtgagggtagactcactctcctggagagtttctgatcttattaagactattatatttgactggctttaaaaacaaagaatattataatgaatagaggggagaaattctagcagaagactttcctagagaggttattttgaacgtatttcaatcctataatgactgcaatgaaaacgacatgttaggtcattctactgc

SEQ ID NO: 212922 - DNA, 624 bp, Homo Sapiens
agtgttttttttttttttttttttttgatctccttccatctttatttttatggactagtcagaacacagtgaaccagccagtgaggagtggaaggggttaatccgaacaatccaagggccaatgtgggaaatgtgaagttcaaggtcacacagtcattctgctgtcaggaagagtgtcatgagtcagggaaggagagaagtattttaatagtgccctgtgggattctttctctctctctctctttttaatgtactatgaatcacaacacagtcactgagctatagcagacaggctctggaatttgcattgatgtgtgatctctggcagccgctacatattcaatggacaaagtccgatgcttcctacacagagaattctgctgggtcagctcgtggagtgtcagcaggaaaggccacccagggatgcctgtcttggttctcagtttctcatcagtgtgtactttcttcttggtgagaggaaacacacctggtccctgggcctctgcatatagcatcaggcagggtctgagggcccctgggattctcagaatagaaggctctgtcccttggacaaggccagctggtgttacttggctccacaagtgttgatgtttttcccatcca

SEQ ID NO: 212923 - DNA, 552 bp, Homo Sapiens
aagtgtttttttttttttttttttttggtatagtaacagggaaaatttaattttccaatctccactttccatttttataaactgaaagaaaaaaatttaatatattacaaaatatctgtacatagacaagatacacccaatgggggtcaaaaacgagagagaaaggaatcagtgtcaggaacctaaatcagggagaatgaggtggcaactgacacttttctgatgcagcattctctctcaaaacctgctggtaaccattttagcacggtaactatatatgcatattatatatacacacacacatacaagtggttgggtgatgtctatggcataagctaatagaagttctacttgcaaatttgtgctaactgccctgctttaaacgtatagatttgatgttgctttcaaatacttatcgttcctatggacagttgaagaaaaaactaaggaaactgggtcaagtatatttgttttcaaaaccacaaaaatgatcacggtcaaaccagttttgcctcccactcatgaacagaatcagatttctcacctcgtgcc

SEQ ID NO: 212924 - DNA, 601 bp, Homo Sapiens; identical to SEQ ID NO: 55210

SEQ ID NO: 212925 - DNA, 619 bp, Homo Sapiens
agcttgcggccgcagtgttttttttttttttttttaagaccacacacgtttatatatatttggattaagaaaatgaatcacaagccatataaaattgagataaattggaaaactctaaggtaagtaccatgtctattcccagctgcctagaacaaagatccattaaaaatccatggtgtgaatttccaccatgggtcagaaggatggaagactaaggttttcctgcaactttcccaaccgcctcccaccagtgcagcgagtgctcccctggctgagaatcaaatacaggtgtgtttctaaacgctggaacgaagcagtcttgctgccacacgagtggagcccggagctaggattctgaaatccaaacccaggcctgccatcaccaggctgcgtggagaatgaagacagggagccaggcagacggtttctccgtgcatccatcttaagatgcagccatgggaaggaaactgactgggatgggagttgtgttcctccccaaaactcatttctttggttgcccgatgtcaactcctgccttagacacccatcccaaaccctccttctccttcatttttatcccttcatgttacaatgacgcagtgaatgctgccctcgtgcc

SEQ ID NO: 212926 - DNA, 437 bp, Homo Sapiens
ggcacgagggctcgccgccctcctggggctctgcgtggccctgtcctgcagctccgctgctgctttcttagtgggctcggccaagcctgtggcccagcctgtcgctgcgctggagtcggcggcggaggccggggccgggaccctggccaaccccctcggcaccctcaacccgctgaagctcctgctgagcagcctgggcatccccgtgaaccacctcatagagggctcccagaagtgtgtggctgagctgggtccccaggccgtgggggccgtgaaggccctgaaggccctgctgggggccctgacagtgtttggctgagccgagactggagcatctacacctgaggacaagacgctgcccacccgcgagggctgaaaaccccgccgcggggaggaccgtccatccccttcccccggcccctctcaataaacgtggt

SEQ ID NO: 212927 - DNA, 563 bp, Homo Sapiens
ggcacgaggtgaaccgggagtcggtgcgcgcacccccaaacagaaccatcttcgacagtgacctgatggatagtgccaggctgggcggcccctgcccccccagcagtaactcgggcatcagcgccacgtgctacggcagcggcgggcgcatggaggggccgccgcccacctacagcgaggtcatcggccactacccggggtcctccttccagcaccagcagagcagtgggccgccctccttgctggaggggacccggctccaccacacacacatcgcgcccctagagagcgcagccatctggagcaaagagaaggataaacagaaaggacaccctctctagggtccccaggggggccgggctggggctgcgtaggtgaaaaggcagaacactccgcgcttcttagaagaggagtgagaggaaggcggggggcgcagcaacgcatcgtgtggccctcccctcccacctccctgtgtataaatatttacatgtgatgtctggtctgaatgcacaagctaagagagcttgcaaaaaaaaaaagaaaaaaaaaaaaaaaaaacactt

SEQ ID NO: 212928 - DNA, 699 bp, Homo Sapiens
aagtgttttttttttttttttttgtccattttttattgagatacaacttacatagcatcagattcacagaattcaccttttaacacgtaaaattcagtggcatttagtgcattcacagtgtggtgtggctgcctccactgtaaccccagaacatttcatcccaggagcccatcccgtgctggtgtcccttctccccagcagcaggaggagggtgaccacgtgtgtggggtcccaaggaggccgtgttctggttgtttgccgacttcggcagcttctgacacaggcctcttcattctcctttatcttcatttgagttaacagcacacaggtaagagtcagagacatttctaggtctttgtaggtgtgcacgtgtgacatgtcttatcaatgcagacccaccatgtgtgcaggggtggcctgggccctgctggttgggtgtccagctccttgcttttccctctttctgttttccccctgcgtccttccagctgcagctcccatgagctctagaggtcacagctgcgttcagctgatggggaggagggcaaacccctcccctaagggcccttctccaaatcccactgaaacccactgggcaaagccagtctctgccatagccagctgtgaggagggccgggaaccgtggacttcacccgtgtccgtgtgcccaccagagactgactctgtcactgagggcag

SEQ ID NO: 212929 - DNA, 668 bp, Homo Sapiens
cgcaagtgtttttttttttttttttttataatgataatttttatacttttattacttagaaaataatttatatttttccatcatttaaacaaagagtaggcctgagtctcatgccttttgcacagcttttaccttcaaagaaagttatctgggtaagataggcaggaaatatggggaaattgcaaattaacagtctacatacatctaatatgaacagtctgtaagatattccttttctttcgttttactgggattgcaacggaaagatttgttctggtattcaaccaaaatagacagaatcgggaattctatttttaggaagtaaatactttcttgaacataatatgagaaaatttcttcattcatcagatgaagactaatatagatatatccctgtacagagctactgtcttcatcttttattgagagccaaaccaggtcttatctaaatgacaaaaaatattacagctaacaaaagcaaaagtggtgcttttatcaaggaaaccaatattttaaaggttaatttagatagatatataaccggaaagacatttattagcatgctgaaaataacactgatgacactcagaatacacctggtctcttactttatttaacagagaaccatggcatccaggtaaccagttccaacttttcctaccattgat

SEQ ID NO: 212930 - DNA, 539 bp, Homo Sapiens
  misc_feature (68)..(68): n is a, c, g, or t
gaataagctcgcggccgcaagtgtttttttttttttttttttatgatacatgattttatttacacaanctgattttcttagtcaccttgattacaaaaaaaggaacatgatctggtttaatgacctttcataaatagattttacaaattttaataactgacagattactacttaatactcagtaatacttaatacttagtaacttctgcatttacgtgtatgaaaattccagtagagctaataaggatggggacttttataactcaggaatagacaattaggttattggtcaaggataaattggtcaaggataaattccccatcactgggtcagctgtttagacctggagttcttaccctcctgagaacaaacctgttgcagcaattcacacttactgtgtaggcatttttaataatttgagaaagtttattcttatttctgcatttagtaagactatcattaagcatatctgaaaaccaaaagtttaccatgtctatagatatttgtaaaagaacttatcacagtgtatctgaaaaac

SEQ ID NO: 212931 - DNA, 670 bp, Homo Sapiens; identical to SEQ ID NO: 49378

SEQ ID NO: 212932 - DNA, 554 bp, Homo Sapiens
aagtgttttttttttttgttttttcatggaaactcctggaagccttttcatagctgaggggttaagtgaagttttaggaagatcactctagttttagggtggaagatgaggactgggagagggttcagaccaggaactgctaagaagctcttgcagcttctggagggagctgtgatgtggacacgctgaaatcggtggggaggaagcggaagattcaagggacctcaagagacagaagagtcaggactggatgactcccattcattcacaaacgtttactgtgtgcctactatgtgtcaggttcctgtgctgtacgagggagaaggttcccaggctgcggatgatgtattcaggatgctgagggcttacctgtgggggtatcactttgaaggaactggattaaagtagtgtaagtgatggtggggtgagggtgcggaggtctgatgagagggcagcagcagacttgtttagggcctgtttgaaactagcctaggagaggaaaccttcaaagcactgtaggcgtgattggtcggggaaagctggggcagggagag

SEQ ID NO: 212933 - DNA, 579 bp, Homo Sapiens
ttttttttttttttttaatcaaaaactgtcacatggcctttctatgtgaaatgtgattcttgaaaataacagatacgcaaatatcaaaggattatcaaacgcagacacactcgcctttctcaggtggaaaggcccatttccccgcactgcatcctacctctccccactgccaacctcatcccgtgccagtctacttgaccatcacaagctcaacctgggaggcccattcacctctgctctctgcaatgcaggcctcccacctcctaagactggatcgcccccaggctcgccaggatacatcacagccctcctgcccggaggaaggcaacagagagagacttgacttagaatcagaagcttctctttaacttcaactcagactcatgtcttccaacggttaaaggggaatgatgacactgattttacaaaattgctctaagaattaaacaaaatgtctggaaacagctgtggagccaaccagcctcccagaccctcctccgcttcgcagccccctaaccacccaacaactaagccaggctgcctccatccacatccttcagctccacctcttcaacccac

SEQ ID NO: 212934 - DNA, 417 bp, Homo Sapiens
ccttttacgaaaaacctcctcctgggcttatcaaggaagatgagactaagccagaagattgcataccagatgtaccaggcaatgaacacgccagggaatttctggctcatgcaccaactaaaggactttggatgccactggggaaagaagtcaaagttatgcagtgttggcgttgcaaacgctatggtcaccgaacgggtgacaaagaatgccctttctttatcaaaggcaaccaaaagttagagcagttcagagtggcacatgaagatcccatgtatgacatcatacgagacaataaacgacatgaaaaggacgtgaggatacagcagttaaaacagttactggaggattctacctcagatgaagataggagcagctccagttcctctgaaggtaaagagaaacacaagaaaaaga

SEQ ID NO: 212935 - DNA, 576 bp, Homo Sapiens
gtattttttctttattttcagttttataacatccaactttccattcaaaataatattgcacacattgtataattcaattaatttgcacatccaactcctcaaatctggtctttttaaaatgaccaactgcttaaacttcatctgtattgaaaaatacaacattagatccagccatattttaaagtcatcagaacatactctataaatcattatcagctgttagaaaccagttcaaacattttctaatgagtgagatccttacaatggggatctaaggttggttcattgtgacaaaccccagaagagaccactggctcctcctgtcagttaatttgggacttgacttcgctgctgagtaagagagggcagctgagtaagagggcagcatcctgagggaggagtctaattactgcttccagccaccatggtaggaaatcttttcttggcagaaacaaccgggggtgggggggaatagctttcatcagaattgaagaggaaataactgtcctttccagagcttttctgaagagagatgactatttcatttttgctgtttttctcatgtggcttagtctc

SEQ ID NO: 212936 - DNA, 605 bp, Homo Sapiens
ttttttttttttttttatgttacactgtgcatttatttacaaagaggttagagaaacacacagaatctggcccccctttgcactggggagtcaccatcgtcataataaatacagtaattttaaaaaagaaaaaaaatactagattggaacagctgagggtcatcaggcttcccccattccctctcacagggagtgggggtcatgagatagaaaccatcttccttcccctcttctacctccgaatcctccataattgtccagggatcgaagtgaaagagtccttctttccaggtgttaccaacccctacttgaccctcaaaacccccaaatcagtgctccttcccttcccagggcactctgcagggaccacctgagtcagacacagagtctctgaccagggtgccaaggggatatcttaagggtccagggacatggagggggcactttgtgaatgagagggggccatagctgggcaaggaaaggaggaatgagagggctcatcaggaatgagagggagagcggtggaggggaacaaacagactaggcttctaaactaaaacggggaaattcaaaccgaattaccccttttgcatacatggacactt

SEQ ID NO: 212937 - DNA, 561 bp, Homo Sapiens
ttttgttttttttgttttttgacaactttcccctccttgtccagttggggacagcgccctccgcgctggacaggaaggggctcttcttctccgacagggaggctcgcttcctgtgctcctgcctcttcctcactggcttcagcgattccacactggagccctcagaggagtagtcagactcgcttgtcagtctcgtccttgtggagtctgataaagaactgacctctgaccaagccggggaagaaatggttttccaattgtctgtccgccagtgcttggtgtgctggtctgtgtggctggggttctgcttctgggcggcagagctcccgtgagacgaggtggaggaggcagagagggagctgaacagggaggggtccttcagcaccagcggggaccccttgaggcagccagagctccccagagagtccctgtcatcctccccactctctgaggactcgctctccgactccgaggagcagaacttgtcgctccgctttccgaagcgaacctctctgccttttgtttctttctttcgcttctttttcactttatcctcgtgcc

SEQ ID NO: 212938 - DNA, 550 bp, Homo Sapiens
tatgtacttggcctctctcctgacgcctcacaccattaagcatggagaaaagggaaaaagggcaaaggaagtcaaaaaactgaactaggattcgggcaacagcctcaggctgcccaacagaacaggcttttagggaactggacacacagaccagctgtgaccctgactttcacattgatgggtgaatggcaagtaggaggtaatgaaatctggaaatgacaggggagagaaggcaaagctgcctggagtgtcagtcccggaggcatttgcccctctcccccgggggccagccagggacttcccagttcaggaaggccacaacacttgtggcacattaattccgagcttggcccggcttctttcctgtgccctctgcctctgtgggcaggggaaggaggaagggtgtggtcccttaggatctccaagtgctcttccagctcccaggagcagggctgagatcccagagtcagtgcaatgaactgtccattccagtgaggaaaagggagggtgtggcttcgggactgcacatcacacacaagcccactgcagc

SEQ ID NO: 212939 - DNA, 705 bp, Homo Sapiens
agcttgcggccgcaatcgttttttttttttttttttttttgagactaattcaggagttcttttattgccagtgaccgagagatggctagagctcaaaattctctcagccccgaagaaggggatagatttctttttataccgtggtctaaatagggcagggggagcctagctgaagcaatttttacagaagcagaacacgcaaaaagttaaaaaaaattaatggttacagagatagttacagaaaaatacacagttccaggtgcaggggcttaaactatcacaaagagataaatgcaggggcttgggtaccatccactgagcacgtccccaggagctgctggtacagcttgcctcaatatcttatcagtaagtgcattcctggatgtgcttggagtcagcttgcactagttattcccttaagggagggggataaggggactgcaagtgaagaggctaaaatggagtctgtccagctctctcagctgagagagagtcactcagattaaaacaggatagggtatcccagatagacagttcattagatatgtaactgatgatagatagactacttttatggctcctcccatgtccattaaaactaaaaccgtgtgtgattatgtttccttgaatcattaccacttttttcttcctaagcacattaacttcctatttcaccatagaaactttcaatattttcctcgtgcc

SEQ ID NO: 212940 - DNA, 671 bp, Homo Sapiens
aatcgtttttttttttttttttttcagccaaattcatatttattccagtctctaacactctgttgttatgtctgctgtaagatgatcaggagttagtatgaagtattcttctctacgcaccaaagaaaacaaacaaagcaaacttcaagtcagtgaattagttaccacagttaaaatgcatttgattttgtccttttcctttttcacaagaacgacagctgaatactctttcatgtgatgcctgatatttttctttttctttttctctcttttttgagacagggtctttaagatggggtctcgctctgttgcccaggttggagtgcagtggtgcaatcttggctcattgcaacctcagcctcctgttttcaagtgattcttctgactcagcctcccaggtagctgggattacaggcatgtgccaccgtgcccggctaatttttgtatttttagtagagatgggggtttcaccatgttggccaggatggtctcgaactcctgacctgaagtgatccacccgcctcggcctcccaaagtgctgggattaccggtgtgagccactgtgccaggctctgatgttgatatttttctgttacagtccttagcccaggcatcctgtagcactctgtgtcccagactttttgatgcagaaacaagactgaaggaagatt

SEQ ID NO: 212941 - DNA, 704 bp, Homo Sapiens
aatcgttttttttttttttttttttttaaacataagcacatttattgtcaacctttatagtgttatgtcaaataggtctgacataagcttaaataaatatatactttaaaaattataaaatattttaagttataatttaaaattctcaataaaactcaaacacaaaccacactggtatttcacacagctaatttctaatgcagtttacataaatatttacaacacttaaacaatttcaaagaaaataacactgtattccatacatagcctgatcacagtagttgttctctcttatttcccagagtttttctgcccctttaaaagaacctctgctgttctgatccttatcacatctctgttttgactgttggctttgtcgttgccagtgttcagccagaacttctctgaaacttttttttcaacacatgctaagttaatggaagtgtaggagagttttgattctcacactcctcaaggctagagcagctttggcaattactgactgagaatttttcattgccagtgatcaactgaaaactggagattcctttggaattgttaaatctgcttataaataaacataaatgcttgctcacacaggcattcctctcttccagagcaccctaacatacagaagaaaacaaatagggaataactattagacatcttcattcgttaaaaatctaccagatgactcttttaca

SEQ ID NO: 212942 - DNA, 627 bp, Homo Sapiens; identical to SEQ ID NO: 53885
  misc_feature (576)..(576): n is a, c, g, or t

SEQ ID NO: 212943 - DNA, 591 bp, Homo Sapiens
ccgcaatcgtttttttttttttttttttgatttttcaagttacatttattactaatataatttcaattttccgtatgcatatttcaaatacagtcttttgtgataaacagaagtggaaatgttaatctatttaacaagagaacacaattttttaaaatagaaaagtgtggaccatgtagatattagtactttgaatagaaatctaatgtgaaaatttactttctcttaaaaaaacaaatatttctggaatttctctctagttgtaataactgtgcctgtttgatataactttttttttttgcatatacatacttgagccctaataggttggccctttccaatgtgtataattgtgccaaaatataaaagagacatattcagagataaatgaacaagaatccacgcatttaagaaactcaaaatacaagacaaattttaaatcatcttaatggatatttcaaacacatgcattggtataacatttaaacctaagaaggaggaaaagtgccaaattagtgtctctatgactggcatgctctctttttagggaaggctttttaatccacagtgaaactcaaactctttgtacct

SEQ ID NO: 212944 - DNA, 714 bp, Homo Sapiens
aatcgttttttttttttttttttcaaatggtaggaaaagacatatttcttttttttttttctttttccatgccaggcagttaatgtgctgacatagtaacaaggtttgaaggaggaacatctcatgcacgtgcgtggaaacccaattgtcacgtgtatgaactacaaaaggatcgggaaaagaacacatttcctcacaacaggaatacatgagattagaaagaaaaccggaatgaggtagatgcatgaatgcacagacaaggatatgtgacaggaagctgggtgacattttgcatctgacatagcagtacacctagagagcccaaggaaatccacccccaagttaccagaggcaagaaatgaacttggcgaaattacaggacacacgttaaagccacagactgcattgaaagagaacacgggtttcaccgcaaacaccatgaacagctgttctgtcaaccttgacggcaaagaccagatctttagtgttaactctaaaagagcatttgtttgggagaaaattatagaactgaagatgggaaagagtcaaggacggcaggaagggatgccaagacaccacgtcccagctgggagcagtgacgactttatgctacgttctgagttaatgctgcattcaatggggatcccttcataaaagggatctacttcaatggggatccctcatgaaacccaacaaacgataaatgaacgggca

SEQ ID NO: 212945 - DNA, 543 bp, Homo Sapiens
aatcgtttttttttttttttttttaatcttacctatagacttgcatgattcaagataaaatgctttttaaaggagaaaaggtacagaaaataattttaaattctgccggaaagactggtataatgttctaaagtcactcactggccataacctatctttgctccttaatttctcattaatcctaacatcacccttagacacagcctggtatctccaacgacactcctcttaaataagccttgcctagacctgcttctcagcatcaactgttctttctacctacaatgccctcctctcccatccaaaggatctctcttttaagacctaaattgagttcttccagtaaactttccacaacagtcacagcccattgttttctctcctctcaactgccaatttactatctgtacatctcattatttggtagtgatcatatacttgccaactaaacctgaagaaccctgtcttagccacttcccaacccaatgcccagaagagtgctttctagagtaggttctcaaatattaggcagtatagcagaca

SEQ ID NO: 212946 - DNA, 518 bp, Homo Sapiens
aatcgttttttttttttttttttttttgttagcagtcagaaaatttttatttaggaaaaatattccctcaatatttattagataatgaatcttatttaaatgaatagtttacttttacttttctgtgtagaccaatttaaaagtatgccactttcctttcataagcaaactgtatttgtctcattctacatggcagatcaaaaattaatacttctttctgccttaaaaattatgagattttcctcattatgaattagttgtttttatatggattactgttgtgctgctaaaaacaaatgttagtaaaagttatggagacatgggaaaaaaacaaactataatactagttaataatgaaatacattaaacattgtttaaatattaaacagtaaaatactcctatattaaataaataattaaaaattgcatttgtcaatgggaatataggccaataccaccaataaaagggatggtctagtgcaaagggtggccacaaaacaacaacaacaacaaaaaat

SEQ ID NO: 212947 - DNA, 623 bp, Homo Sapiens
aatcgtttttttttttttttttttttgagataattaggaaagaagatttattgtttacccttgcagtgtttatggggggaaaaggtatttacagaattactgttgctagcgagaatatacagtaaagtttaaaacattttggagaattgattttgattcttaaaatgtgtctttttgcaacatatgctctggttacctataaatacattaatttggcccttgaaaacattcacatcctattctttgttagccttatttttccagtccttgttaactctctcagtgctggataataaacctgcatttcttttaaaacatttgttcagtttcggcatcagtgtcttcccccagcactcccttaatctaaattagtaacattttactgtatgaaaaatagttgctgttaactaaaaattcaataggtgagttagacatggcttttcaagtaggattttcagtggcttcagattccatcatacacaagtgtatgttttttctgtgtaagttttttccgtgtaagttttttccgtgctcaaccgtaagtgctcaaccatcttctccccactttagtctgctatgtcaaaaaactgcatcaagcttttgtgtgaagatcctgttttcgc

SEQ ID NO: 212948 - DNA, 697 bp, Homo Sapiens
aatcgttttttttttttttttttttttgtttttataatgttttattataaaagtaatatatgatctttatagaaaaataaagaaaataaaaatcatcaataattttatcacccagaaacaatcacttttaatgtgctggtagaggttagtctattttaacatttctgaaatcatatagatttacatgattgttctcacgtaacctgtaacataagcatttcccaagttgctattatctgttaataacagtggtttgattaattggattggctgtgtggatgtggaacggaagagccttgatgtcaagaagagctgaagcacagaaggtgcagtcggttatttgggaccatattgtctgtggctttcaggacagggagcttcaggactcaggtagatgactctggaagaaaccttctcttttggaactgcagcatctccctgtcctccccaaggggaatttaggccaggaaataccagatcttccctctctgattttcttctcaaatcccaatgcaagacaatggagactaaatacggttctggtcatcaggctcttccagagcatccgggtgcatgagaagtgaataggtgattgtgttctcagccccaactttgtcagcctcatcaggattagtgggattggctgaaatccgctttttcctgcagtagatcaaggccactacagcagcaacaatgg

SEQ ID NO: 212949 - DNA, 557 bp, Homo Sapiens
aatcgttttttttttttttttttttttcctgagttcaaaataaatttattgaaatgttcaacacagacatgtgctttcagagagaatagaaaccctttttcacagtttatatacctcaagatagaaggctaactagttgaagtgtcctcagagccaatgatcagtccttaaaaagctcccacacatcccggacttaacagactcccagaactggctgggactccaggaggtcatgtagtccatcccgctgcctctaggcaggtaagagaagagcaatatcttagaatttgtggtaataaatttgctgacctttctttgttaagagtttctcctgttcttgaagctgtaaggattgattttgaagcaaaccctgcaactgctgtactctggtcaccagggtgagtttctctgcctctgacctttttagttgatcttgtaggtcctgggtatccaagctgcacaggtctctgtccccttgcaggcattcaatcttggcctgcagttcctggtgctcattttccaaaaatcgcagggcctggttcatctgtaagtccctg

SEQ ID NO: 212950 - DNA, 555 bp, Homo Sapiens; identical to SEQ ID NO: 45314

SEQ ID NO: 212951 - DNA, 635 bp, Homo Sapiens
attcggcacgaggttttttttttttttttaaaatactcatgcaattttatttctagttgatacaattttaaaggccatgtacaaatgttatacatttttatttttgttctttttttaggaaaaaatacacaaaaggcaaaacatcctcaaatggtccttttatacagtgcagaaggaattttcaaatttcaaatacgtgtcacaaatgctgcactctagcagccaaaatacaaaaaaaaaaaggagggtagtccttcatattatatatatatttatataaaacatatggaaatttgtttttacacagatcggtctttgtttcaaatttacaatggatatctaaaaaaaattctacacggcaaatattgccaacaaagttacaccattaatactgataaacggaggagcctacgcggtgttttgattattagggaaagaaagtagaataaataaacaggagccttgctatagtttttaaaagtgccttaacctttctgcgtccccgcaatcctgaatccgcgcggtcaccgggccgtcctagtccctgcgtcgcgctgtgttcggctcgttctcggaccagaaagtttacagtagaggttggaagacagaaaaatacccactgaaaaagtctaaat

SEQ ID NO: 212952 - DNA, 736 bp, Homo Sapiens
aatcgttttttttttttttttttcaagtttgaaaacatagtttattttctcattcaggcttttgtagtttatttttacaaaatagcagacaaaatttggttctttatattaatagagaatatgtaagacatatcgaaatatatatatagcacttaagttataaacacacagcaaattcagcatcacttaaacagcaaccatattttcacataatcaggattgcataaggagataaacattatttttagcctaaatatataaataatctttgatgctttatgtcaattagtatttataaaagctagtctaaaaactaacaccacctacaaaagtgatgagctttaggctacaaccttgccatcatgccataataaagacttaaaattatagaaagccagagggaactaatcacttcagtgcaactgcagcaggtagaactacctagttatgattttaagatggacactataggaatccagaagggatgtttttgaatcttcagttgttggattctttatggtccaaacatatcttaattttggttagagttatgcccccaaatcacctaactgtgatagagggaagttgcatagggactttcttcatctctgctctcttcttttagcttcttggctgcctgtgttgataacttaatctgcaagtcaagtctctgcaggaaatctctggctgacacttcctcaggctgcacaggctgaacatcagattcttgaggact

SEQ ID NO: 212953 - DNA, 710 bp, Homo Sapiens
agcttgcggccgcatatcttttttttttttttttttttttcagggtggctttgtctttattagtcagcatttgcatctaggaaaagtttcacatgattaaatcaagagatgcaatacactcaggcttttcatgaaattgacatcattattacaaatggtgctcatttgaggcaactgtgacattatgcaatgagaaacatctgtccccttccctctcaggtccccatggtggcctaggttcatgattacagccacctttaggattaaatacacaaaagccttactctatatatgcccctttgactttaacatatttctcaaaaagaagtgcaataaacttttattctttcttgattagatggagttacaattgccaaaataaaaatccaaggtccaattctggttttaaaactagaaaaggaaaaaatgttattatcagtaatgactttgggaagaattctttaacacacagtgagggtgagttcttttggaaacaactgtattctatgtttatacatatttatatataaaaggtgtcctcattgggggaggggggtgctgatgccaccaagttcctttgaagccttttctcccccactgccaatgcccgaggggaaggagtcttcaatggcggctcaatctagctcttgcgtttagacttggatctcattccaatttaggcttttctttctcttcttccatacttttct

SEQ ID NO: 212954 - DNA, 619 bp, Homo Sapiens
agcttgcgcccgcatatcttttttttttttttttttttatgttatgttcgtttattgttgtaacattttgttttgaacatcaaacactgcaccaaaatattagccattcatcttgcaacaattgctttactgtaactaagagtactgtactgatgatgtttacaattaactttggacaacttaaaacttattagtgacattgctgtctaataatcaaatacttcatcataggctgaacataattattaaaagagcaaagtttcccctccctttcttactttcaaacaaaaccaaaagagtagttttcatctggaaagagcacttacttcagggaaagactcaatttttaaccagttttattaaaccctggaagctctacaacacgggaaaacatcgaaattccccggaagtctgtttttgccaacttgtaaaaagtgaaagagctgacttccttgtttattctttaaagggttggcctgcacctgcagtgccaactgtggaagggctgtgtgcaggccccacagttgcaggggctgttccgggccagcgcttcccagtcatccaatctcctttgtccctcggttgttctgtgactttgagcagctttcatcctcgtgcc

SEQ ID NO: 212955 - DNA, 694 bp, Homo Sapiens
atatcttttttttttttttttttttaaccataaaaatgtaattttaatgatacagaaatagtatatgtacatttctttccacagcagcacttcattcatctctaaaaaatttaacaaaattaaggctaaatcagagcgagctgataggaaggggtattctatgtggtggtcttcttaaagaatgttctcataaatataggatgttctgcagacaagaaataaaaataaaacatgctgaacaagataccaaaaatgggaaatgcagtagaaaatgagcccctttctaccaatctactaagaatcccaactcccctgggaagtttcagatgggatgtgagttcttttaatgaatgtttatgatctgatgctaagactttctaaaattaaaattccacagtactaggccattttataaactaaaaccaagggcagttgagtctccaatataatccctctagaattttttaagttaaagtggacaatatttgaaagtactaattttatctgaagctgtggtgcttgaaaggacaatccctccatttgtggcccttctccctaacccatgttataaaaataaatgaagactttaaaacacagtgaaataaaaatgccatcactgccaaggcaaagggccaggaaatcaaatgtggttcttgagtaacctggctacagagactgctggatgctacaatca

SEQ ID NO: 212956 - DNA, 707 bp, Homo Sapiens
atatcttttttttttttttttttatttttacaaaatttaatattagcattcatggaacattacaatgtgctaggtaagtagcaaccaaataaacaaaataatcactagacatgtggtggtcacaagaggaaaaggaccacaattttagtgtattaccaatgtagtgaagtgcatgtttatatacaatttgtgaaaaatgagtaaactaaattttacactcatggctattaagagggcttagcctagtatagtcaaccagaaaggacaaggtaattataaagttaaatacaaaactttcaaacactctggccttgcaaacattaagttacatggtaaagacaggcacaacaaatatttagaaattcaatatgcatatattcacttaaatgttccattaaaaagatgttaatttaagaatttcattaaaacataatttatttttatcctaattgagtaatttatgattacaaaaagattaatcaccaatagatcaaatatagagaaaatccatactcaatatccagtataactaaaaatgttaagtgcaattaataacaataaaaaagggacaaatttagctttatcagggacatgagtaggtttgaaattgtggtatgaatatttagataagtagacaatttttttaaataaaggcattgcagtgggaagtttgacaaaactaacgggcggttcactgaactaaatac

SEQ ID NO: 212957 - DNA, 644 bp, Homo Sapiens
atatctttttttttttttttttttttttttttttggagggtgcacagagcaggaggctttattgagggagatacagaagcgggcgtgggctctcgtgccagccaggccgcggcctccactcgtcccacacggccctgcggctcctgcacacccctccctcccgggctcctggacagcaggcaacatagaggagtcttacccagccttggcagaggtgccgggagggccttcaaagtctgtccaggggagggttggggggacacaggacagcccttctgtgctgtcgatgacatgcctgccacatctacccatctgtccaccgcctggtccatctctgcctgaggggccctcctgtcacttgcaactctggagccgggtcctgtggtgcttctcctcggtcaggagggggatgaaggtgtcgctgtgggagagcttcagccggctgctgcagctcggcgcctccttccccgcaggctctggagggaggttgtccaggtcactgcgggagcccccggtcttgccctcgcccccgctgctggagttgagttccatcagctccagctcgtgcttggccgcggtctccaggacgcgctgcttgttgtagtacctgacaaagttgttgatgatggggtggatgggcaggg

SEQ ID NO: 212958 - DNA, 657 bp, Homo Sapiens
atatctttttttttttttttttttcactgttcactggtttattgagattcggggagatccttccccaagagacaccacagtgtgaaagggacaccacctcccaccccataggtccatctgtctatcccaacagtcaagggtgccttcctttggtcaggattctcatcaactatccactggaagcagctctccaaacctgcccccacttatttttccttaattcccctcaaaaaaacacaaaacaaaagggagcagtcttgggagaagatgattgtgagtgtagactgagggtagtacatgaatgcaatggagatggggggaatctgagcagaaatggagattctgtgacaaggagagggtgtggatggccccaccaaacatgaattggggaaaagtgcataacaatgtgcagggtagggtacatatggctctgtcagaagaataccatgatttaagggaagaaagtacacaaggtacatggagggtacacagggaaagtacatggataaacatggacgtgtgcaaataggaaagacatgactcagcatgctagacaaattgcacatgcctacccaaacacgctcaagggcagacccatgaccatgagaggggcacacgtagctgtgaatgcagggcacccgagagcacatgtgactg

SEQ ID NO: 212959 - DNA, 706 bp, Homo Sapiens
agcttgcggccgcatatcttttttttttttttttttgtaaggaacattatataggaaaagagaattccccttttgttccattacatatagaaaccttttgaagcttccaaatagcttggttttggtaaaattcaccactcttttattactttgacatgtagtcatcctaaactatccgtcatggtttctccaaaaatctccacatgaattatctgaaggacaattgaaaccacttaccaatatacaagtaacgttttattttatattctatcttccatttggcataagcctttcgatgtttgttttttaaaccagtgaaatatacaaatcacgcaagacagaaatatgtacattaaaagtacagaataaaggctagaagatatacataatatctgaatgacatgtagaatattttacattaaatagtttcttttaaaagctaggattgttaaactcaactctcttcataaacatgagtcactaaaaaggaacaatctgatttagcaaataaaaaaagtacttcatggtttttgtataataaaaaccaaaaaagtgacattttaaactaattagtgctttttgctttcaagatcttttgctcacaattcactgcaactgaggggatgtgaatatcattatgcaataaattaagagccacagttggctgaggtgatatgaaagccaacctgcctaaggggggtatgaa

SEQ ID NO: 212960 - DNA, 646 bp, Homo Sapiens
atatcttttttttttttttttttattttgaggaactttattgttacatttttgcaataattgaggcacaactacctcctgcttttccaacatcttaataaaaaagacaataaggattaacagtgaaattaaaattaaaaaatacaaaagcctaaggttctggagacaaaactgactagagtctatgtgtgtagccaagttgtgaatgacagtttagccttgcagagtttccttcttctccaattacaatgtgttacagaatttggaagggggtgtctttaaaaacgttctaattcaccccggtcatgaggaggaggaggaggaagtccagctcagcaaggccaagtgcctcggccagggcggtggggtcagcgctgagcgggtcaagagcctgcgccgggggccatccccctgcgctttctatcgagttaaacggaccccacaatatctccttcctttcatgcttctggtttgaaagtgacgagtaaatatgtcagactgtttaaaggaaaacaagcactcattgacaaggccggactactcaggaaggtgtttcaaacaactcccctgctacgcgaatcacagcgctgctgtcgccaacagcgccgcgaagaggctctccccgttggcggaggacccgcttgcac

SEQ ID NO: 212961 - DNA, 721 bp, Homo Sapiens
gcttgcggccgcatatctttttttttttttttttttttcccattttattcatttatttattttttgcaaacaattttagaggcagggtgttaaactgattaaaatttcacaagattgacattattgcttaaagtgcttgaattggttacattttaaaaaattaaggtacagattattttaaataaaaactacaatatttttagcaacaaaataataggaatgccacacaaatacagtaactattttggttatacagaaatggaagccaaaaataaattaatgtaatactggaaaacagaaatttaattaggcagaaaagtaggaaataattttccctgacccatgccacttacatgagttcattacaatagtgctgataaatgccttgaccatataatagcaaacaagggcaaaacatttagtgcacaatattttaatacacgtgaatatacaaagttgatcaaaatgcaatgttgaaagataaaatccatctgtaataaagctacactccaatatctaaaataagccctaagctccagttagaacatagatcattattaggcatgcccatgaaattaagggtatccatgaaaataaatgcatagggatcatttctgacatttttccctattttatcttaaacccaaaatacaccaggccataaaaccaaatatgattgacttcctattcaaactaatgccctgcttgtgttgtgcctcac

SEQ ID NO: 212962 - DNA, 714 bp, Homo Sapiens
ggcacgaggcggggtcccacgctgagtgtgagctgggggcaggcaagattgattcctgttttacttcactgcagtatctgcagcacccaggatgaagtccaggacaccaaagatcaaggtgcttcatgagtgaaactgtaagggctggctgtaagccccgcttctgggatgggagaaggtgaggctgatctccaaagcaggtcccccccaccccacactctatcaaagtacctgaggcagaatccccaatgatgcacccccagtggtctggctcctggggaaggcaatcaactctgccccagcaggtccagcagataggccaagtggagtttcagggtcccgtggatggacaggggttcagcaatagccgcagaaggaaccctaaggccatccaggttctccaaaagctggctgcacccctggtctaggccaggccgccattgggatcggtcaggcccagcaagtcctctgccaggctggtgagctcgttctcctcgagtgcctccaccaggcgctgcagcgtggcgcggcggccctcggcctgcacgaagcgccgcagcagctggaaggcctgctcgtacagtccctcgcgctcgtactcgtaggccagcgagtccagcgccgggtcccgcagcgcccggcagcctcgctgcagtgagcgccccaccttgcgccatttgagacccacagagcgcgcgaacgtctgttggtcct

SEQ ID NO: 212963 - DNA, 738 bp, Homo Sapiens
agccgccgcagcggcagcgcagagcgcgcagcagcagcagcagcagcagcagcagcagcagcaggcgccgcagctgagaccggcggccgacggccagccctcagggggcggtcacaagtcagcgcccaagcaagtcaagcgacagcgctcgtcttcgcccgaactgatgcgctgcaaacgccggctcaacttcagcggctttggctacagcctgccgcagcagcagccggccgccgtggcgcgccgcaacgagcgcgagcgcaaccgcgtcaagttggtcaacctgggctttgccacccttcgggagcacgtccccaacggcgcggccaacaagaagatgagtaaggtggagacactgcgctcggcggtcgagtacatccgcgcgctgcagcagctgctggacgagcatgacgcggtgagcgccgccttccaggcaggcgtcctgtcgcccaccatctcccccaactactccaacgacttgaactccatggccggctcgccggtctcatcctactcgtcggacgagggctcttacgacccgctcagccccgaggagcaggagcttctcgacttcaccaactggttctgaggggctcggcctggtcaggccctggtgcgaatggactttggaagcagggtgatcgcacaacctgcatctttagtgctttcttgtcagtggcgttgggagggggagaaaaggaaaagaaaaaaaagaagaagaaaaacctcgtgccgaat

SEQ ID NO: 212964 - DNA, 730 bp, Homo Sapiens
ccaaattgacatttatttaaaaaagggaaaaaaaagacgtagaacagaattcacacagacctttgttattccaagctcctatttatgaatggtgattaatagcaataattctgtctctcttctctctgtgaaatgctaacacttgctaaaggcactcagattctgggcttaacggagacaaggtcacatgggaccataagccagtacgttttttggtagctacccagaaaggaagtttacaaatgttcctcccattcataacgggaagaaaaagtcaaacagctatcagtagaagcgttttatgagaagctatttacacagctatttgtccattcagccagagtgacagtaactgctcacaatggtaggggttctcccctgccaagaaagcaaaaacaataacaaaacactttttatcatatatgaaactcctgtacaatgatttggctagaagaaaaaaatagttggtaaggtcaaatttgttttaaaacatctgttcaaaagcctgcattaaacttttatctgtcctgacaaaacatgtctcaatttctttctaaagcagctctattgtcctagcatatgcctcaccaagtcctttaaagggcatttccaaccttagttctgacaatgaagacacaaagtaggttaggttccaaaaccacccttcctagccctccctgtagaaaataccatgttgcacagttacatgtgtcccctgacacctcgtgcc

SEQ ID NO: 212965 - DNA, 717 bp, Homo Sapiens
  misc_feature (611)..(611): n is a, c, g, or t
atatcttttttttttttttttttttctgtgacggtcaatgtctttacttctaaagcatacattggactcactatatattaacatcaaaagtggctacctaaaatggagtcattctttttaaaaatccaaatcctcacatttttatataagatccaaaatgacatgaaattaaactctacaatgttatgaatagtataacaaactgctttcagaaagcaaaatgaaaggaaaagaattagcagttgggacggttgtaggcctgggttccatgtcttttgaggcattgtgacagagagccagcaccaaggggaaggaccagcccctccctgtggccacaggaaggaactcagtcagacagaggaggtgggcgtggctggtcagccttcttacggtgacagagaagcatggtggcatctccctgcccctcagggcccttggtgtgcccactgattagtcttctttcaagaccagggaggggtggggctggaagagggcaggggatagagcagggttcaaaatgattattttaataataaaggtccttctgggcttcctaaggagggccgtagccacccagcgatgttggtcaactccatccaccaggtcccccnacaggcttccttaacccacttgctctttctgctccctatgactgggataccctctgcttcatgagcctcatgggcagccagagacctagggggactctaggaggac

SEQ ID NO: 212966 - DNA, 691 bp, Homo Sapiens
ggcacgaggctttttttttttttttttttatctttaaaaacagatttaatgtgttaaaaaaaaatagaatcaagtggtgtgcttcgccactgagatgattgtgctgtggctccggggccacatagcaccagggctcgatagcagacaggagtttcggccctcgtccagtgcatgtgactggtgcaggggcggaggcccagccccacgggggccagagcaggaacacagccacctgttccaacaggcgctgtgccttgtatgccccgtacatgtgcctgccctgagaggagcatgggccaggcctctcttccagctgtgcccccagggtgccagtgaggcagggcgacctctcaccaacagagctcctccaagccatgctggatttggattcctggaaccccctgtacccatgcggtgggccaccccagggggaggggaggagagatgggagactgtgtgtatgtcccctccctccaagtgcagcaggagaaaggtcactgggctggcctggtcacacaccgtcataggggcctgctggggtatgcccgatgccccccagcctccgggccatgctgatgagtgagcgcaactgcaccagcctcagtggccccacctctctggggtcctggttctccagccaccgcagagctgtttctagcccccgcacgggctccccggcagtcggcactga

SEQ ID NO: 212967 - DNA, 554 bp, Homo Sapiens
tttttttttttttttttttttttttttacccctgagggcatcatataaagaattccaggctagcctcctggaggatgagagaacatgtggaacagagatgagtcatcccaggggaggcctccccagaccaaccatcctagaatggggggtaacaacctttttcttaaaggaccagcaggaaatactttaggcctgtgggcactatgatcatctccattccaaatactcagctctgctgttgtagtgcagaagcagccatagacgatatgggagtggctgtgttccaataaaaccctatttataaaaacaggtggcaggcctgtgggctatggttcgcctacctctatcccagattattcagccccagtcgagccagtccaaactagaagaactgcccagccaactcacagaatcgtgagaaatagtaaatgcttgttgttttaagccactaaatttggaagtgttgttacacagctaatgctaactgatgaaaatggtataaaacacataaagcatacaccctgtttcaaggcacttaaaatccccctgtggaa

SEQ ID NO: 212968 - DNA, 515 bp, Homo Sapiens; identical to SEQ ID NO: 60096

SEQ ID NO: 212969 - DNA, 481 bp, Homo Sapiens
aaccaacttttggaagactgagttcatacctgagcaaactccaaaaatgaccaataagctttttgggagtatcattatgaagtaatgaagtttttatctctgataaaaggctgttctgggacaccactgctgccctgctctccagtaaaatatgtctaagaccaatcctgtacatttgctgcccccaagcttagctggcccttctcaaaggaatactagttccttttggtgggaaatttgattttcaccttttcctctccagataaaattaaattcaaagttatctataacacaaagaaaaggaataaaacaaatcttagcttttgtactattctactactagaaatattctcaaattgcattaagaccttaaatgcagcaggcttatgggttaggtttgataaagaaaggctgccatacattcagctaggttaactgcatctctttttattttactatacttgatttatcacaccaacta

SEQ ID NO: 212970 - DNA, 539 bp, Homo Sapiens
ttaataaacagcagcataaaataatcagtgtttaatatcatctctggtgtgtgaaatacaaatgcatatatccttaatataaaatagcctttttgtcattacaattcaatgcttgcctatttgaaatgcccataataacaaatcaaacattaagtaatacagtgattaaatgcatgcagtgaaaataaggaaagatatggtaaggtgagatatctgaaaattgccattatatatttgaagaaaatctatatcaagttaaaaacaaaggaaacaagaaaaacagaccagatataaaaatgcaaagatatattttcacttctgtgacacaaaccataagcatagttttgtgcaaaaaaggagaaaaagatctgaaaataaagtcatcttacaaaacattgtcaacaaaggaaaagatatttttcagcttgtgaaaaaaatactattttaatacaaaagagactgtgttatatagtatcacagtgcgattataaaatacattattacaagtggttttgaaatttcatttgctcactttaatg

SEQ ID NO: 212971 - DNA, 545 bp, Homo Sapiens
acttcatacaactagatttaataagttgttattacagaaaaaaatgaagtccaaactacaaagtttaagcagttgtaagcagtagctgcattgagctccatgtttagtcacagtactgtagttccatacaagcaatattagtccaagccccaaaggcagaagctgagtaagggttactagcaaaaaacaatctaagagaacaggtaataaaagatacaatacatttaaaattagttgttagttgaaaaacaaatacagagatcctagctgtgaacactctaaaagttaagtccattattttgacagcaaaaaatacaaatacctaatactttataccccaacagaactatatccaggaaagaaaaagagcagaagttatcctgtgttagcacccaagttttctacttgttgcaattaactttgtcgtcatacaaatttaaacatcccctaatcatgtagccacttcttgacccattttggggtataaagtcaacagcattaattataaaacactctgtggtaagatggaacactattgcagctga

SEQ ID NO: 212972 - DNA, 455 bp, Homo Sapiens
aactaagtctctttaatattgtctttcagaagttcacacacactcacacacagatcagaacaaggcggggccgccgaggggagcggggagcggggacttgggaggtccatagcctggattcccttctgcccggctgcccaggggctgggatgggtggaagggagtatttacagagcgtttacaggcaggtttcttatcccagggagaagggtcctacaccaggaacttcccaaatgtccttaaaaaaagcaaaaggaaaggttctgggattagcaagaaaataggcagatacctgggtggaggagggacaaaaatgtacttgcaaaaaacaggagtgtgggggccttactaccccagggctcggtccttttgccggaagaaagggaggggtctgtccgtctgtgggcgaggcctggagccacaaacccaatcactggactgaatcaccccgcgga

SEQ ID NO: 212973 - DNA, 383 bp, Homo Sapiens
tttttttttttttccaaagataatatcctttattctgctcattttctaggcgttcacagattcccctcctattgtttgattacaaattctactagcaaatgacacctgccacagtggaactgcttagcatcctttactagtaggattatagctcacatttgtggagctctcgtatataccaggcaccatgctaagcagttcacattgataatcctatttcttctgctatgatataaatggggttccactgtgtggcctaatacgggcagcaacaactctgatgacctggaagaactcagccctctcactcttgtctttaggtggcagcttggcaggccccagtgactttctctaaggaccctgaagcaagcttttctcctaaa

SEQ ID NO: 212974 - DNA, 460 bp, Homo Sapiens
gcgaattgggtaccgggcccctccccgaccaggcgtccggattgtgccattgcactccagcctgggcaacagagcaagactctgtctcagggggtggaggttgcagtgagttgagattgtgccattgcactccagcctgggcaacagagcaagactctgtctcaggaaaaaaaaaaaaaaaaaaagaaaagcaacatagtggggtttctgtcaatctgtcctcggctgcccttctcatttgttgatgggaccttgaaagcaagcttgctaggtgccctctgtggctccagcctttaccggaagtgtggtgcatgtttttaacttcagggaagcggtatcctgtcactggggtatgggatgagcatggagaagaggcaccagccacgattccttcctaagcatctcctgttctgactgctcatgaattgaagaaactgacccttgtgttcaaaaaaaaaaa

SEQ ID NO: 212975 - DNA, 580 bp, Homo Sapiens
ctctttttcttttactatattaatttcactatttttctgtgttttcccctcattaccagcatctgattggctgaccagcaatttgtctccaagaaatggaagcctggttgagggaaggcaattttaacatttcaaagggttacccgtttcaaaataagagtacaccggaagattcccctcagccccagaatatccacttgctcccttgagaggatacactccatacctcaggtcatcttatgggagaaaataaaccagaagctgagatccaatggacactctagctaacataaccatggcagttatcttggtttatccccagatagtactgaaacccatgaccaggaaaaaaccaaagggtggctgaggacacatcaccccatagattttccaaaggagaacttcgacccaaaaacattctggtaacatctctgtgcctagacaagatgaaagcaaaagagacagagatttactacaatgcagtgtcagggtattattatttgccttcttttcatgggaaatatttacaaacagataacaaatctctttaaatgcaccatttaaccatttaatgctttgc

SEQ ID NO: 212976 - DNA, 582 bp, Homo Sapiens
tttttttacttgggattttgcaacatttaatcaaaaaagaatctggcatcttaaaagttaggtttacaaacttgacacattctcaatattagcaatttatctatttaaacattgtctaagaaaatatgatctatgaagacattaatacattaataagatacttaagagttcattataagctacaacactttgcaaataagtatccagtttaattgtaacaaaccacaatttgtgagcaaatttaagaatataaaaaacattaattagttaaatacaattctctgggaatatacattatacctacagctgtttttacagtgagagtcttcctttttttttccttttaattatcaaaatggtaaatcactgtatggtcctggatctccatgctataaaactgaaatatgtatttccagcgtagcagatggtgaccaggaaggcaaagaacgatgaggccgcccagctgttgaagttgtgactgtccctctcaggggagacggaagatgcatctacaacagcggcagagaggtacaagacgaaggcactgccgttaaagcacagggccactgttgtccagggcaa

SEQ ID NO: 212977 - DNA, 580 bp, Homo Sapiens
cgtgggagcccacggccaggtacgccccgtctggggagaagctgaccactgagatctgttcattgccgtctgtgtggatagccaccaggtcatgggtctccgtgtccagcagcagccatctgccagtcactgtacccacagccaggacagagccactggggtggaagccggctgagcgggcagggtcctcgatgatcctgctccacaggggctggtgggaatctgagctccatagatgcaccagcttatcctgcccgcaggtcacaaactgggcccgactggggtgtgtggccaggccccacagctcttccacatggccctggaccagcagtgagaagcctgtgtgcacggagccctgcaggatggaattgcgggtggtccccacgtacagtgtgtctccgtggccctctgccacggtgcgcacagggccaaagtcctcagggacctccacttcctgcagcttgctgtagtcagaaccccagaggaacacccgccgatcacgggccccctccgacaccagcgtcccgtcccgcagggcgccgagcccaacacgccgccgtcgtggggcgcccagcacggc

SEQ ID NO: 212978 - DNA, 729 bp, Homo Sapiens; identical to SEQ ID NO: 53672
  misc_feature (16)..(16): n is a, c, g, or t

SEQ ID NO: 212979 - DNA, 587 bp, Homo Sapiens
  misc_feature (7)..(7): n is a, c, g, or t
ttgaatnctttaaaaaaaaaaagactttgatttgtagtctagtttaaaaacaagtgttgcctaatctacctaaagagttaataaactctcttaggatctgctgtctgtcatgattcttgcctctgtgtgtgctttaaccttccgaaaatatgggatagaaaacatcactctgtttaaagtacagtgatgtgtttgctaggcagagtcattttgaaacttctgtttggaagctatatcaaaaactgaagaatggcatggtcatctaaaaagtgatagctaatttgtactcaagagatagatgtgattttctcaaatctaattcttttaatcagaaggaacagataataccaggtaaaatggaacttaacagtttgttttgttaccatacttttaaaagttatatatgccaaaccattcttcttgttttagtgacccagtctattttggtaaacttattttgtaattttccccataaaaacatactagttacttccacattttattaataaaaaataccatccgttgggctatattggagcaaatgaccatattggtatgctttgtactttgacaaaaaaaaaaaaaaa

SEQ ID NO: 212980 - DNA, 637 bp, Homo Sapiens; identical to SEQ ID NO: 50818

SEQ ID NO: 212981 - DNA, 796 bp, Homo Sapiens; identical to SEQ ID NO: 55951
  misc_feature (4)..(4): n is a, c, g, or t
  misc_feature (21)..(21): n is a, c, g, or t
  misc_feature (24)..(24): n is a, c, g, or t
  misc_feature (722)..(722): n is a, c, g, or t
  misc_feature (787)..(787): n is a, c, g, or t

SEQ ID NO: 212982 - DNA, 749 bp, Homo Sapiens; identical to SEQ ID NO: 47048

SEQ ID NO: 212983 - DNA, 628 bp, Homo Sapiens; identical to SEQ ID NO: 50783

SEQ ID NO: 212984 - DNA, 570 bp, Homo Sapiens; identical to SEQ ID NO: 53806

SEQ ID NO: 212985 - DNA, 742 bp, Homo Sapiens
  misc_feature (14)..(14): n is a, c, g, or t
  misc_feature (727)..(727): n is a, c, g, or t
tttttttttttttnaaaacaaagtttgagtaaaattaacaaggttggcaaatttaccactacaaaggtctttcatgggagacaggttatacctttccaatctttaaaataattctaaggttctgtagttcaatagtgaaacaagtacaatatcctggcataaaactatctttcagacaaaatccacctgctgtgtattaaaaaatgtaatacttgaaaacttcctgccttgggagagactaaacccgattcataatacaaaaaacactcaatctacaaatgctttcaacagaaagatggactaaatataaagggggaaattctgacctcctttggtgctagactgtagtcatagctaagcagaaggtgatattattatctcatatttaaaattacatttcagacttatgtgatacagtcacctaagaaaacgatggacccacctgacccacaatagtatttggcctccatgacctagactaggaaagatttagaaattacccattatggagaaagaaagagcagtcttccttgccaagatgaaaactacatactaaatgagtcttctatgtgagaattacatttctatctgtaaagaagttacactaacatgtgctcccttcatgtccttgccttccgttcagtactgagttcttttaaaatactgacagactatgcggccttcatatttctgtcccaacatctagctaattaaaattaacaaatgngataccatttttact

SEQ ID NO: 212986 - DNA, 400 bp, Homo Sapiens
  misc_feature (400)..(400): n is a, c, g, or t
tgattctcctgcctcagcctcccaagtggctgggattacaggatttttcatgggccgatctgctgaattcagcctaggagctgagaccaacatctgagtctcttcagcacacaagtttgaaagaagtcctagcaacttcaagctcagaactacgggtggcagcagctccctcttgacgtcgaagcctcccattccagagagagtcaaggcctggatcaaacaaagcccacaagcaccgatgactgagctgctgactacccccagcatctccaactcaacctcctctttctgcctctacccaaattttaaaacttttaaacatgggtttaaaaatggtaatgagtaaagttgcatccaagtgtatcaaataaaactaaatatccataaaaaaaaaaaaaan

SEQ ID NO: 212987 - DNA, 803 bp, Homo Sapiens
  misc_feature (770)..(770): n is a, c, g, or t
ctaatctcaagtacccagggacacaaacagggcgaaggccgcagggacctctgcctaggaaaaccagagacctttgttctcgtgtttatctgctgaccttctctccactattatcctatgatcctgccacatccccctctctgagaaacacccaagaatgatcaataaatactaaaaaaaaaataaaataaaataatcatacaaggaccctaagataataaattctaaaacaggatttgaatccagccattctttttaaaaaaaaaaatacatatatttttaagatgaagtctcgcaatgtttcacaagctggtctcaaactcctgagttcaagtgatctgcctcccaaagtgctgggattacagggttgtgccactgtgccccgccagaatccaagcattctgactccagagcccaaagccataatgtcactctgcctttcagcactacacatccaaaatgactatcttctctcttctgaattccccttgcattttacctgtttaatagagtaaaaaggatgtaatatgtaggtatgtataggaatgtatacatatgtatgtaacatgtatgtgtctttctagactctaagcctcttgagatcaaggtccacccacatgagattcatctttgtatctgctaggtatccagcatagtagatactggatcaaatgtttactgaatagatgaagctacatatcagtcttaagatttatttttgaaataaaagtagtttcttatagaaaaaaataaaaataaaaaaataaagntgcccaaatgatttttagaaaaaaaaaaaaaaa

SEQ ID NO: 212988 - DNA, 575 bp, Homo Sapiens; identical to SEQ ID NO: 48807

SEQ ID NO: 212989 - DNA, 701 bp, Homo Sapiens
  misc_feature (3)..(3): n is a, c, g, or t
  misc_feature (32)..(32): n is a, c, g, or t
cgnggccagaattcggcacgagcggcacgagnacgaattgtttcaaaaattttacatgatagaattcatatttagtaagcgatacgggtatattttaatgcatttgattttaaaaacggggtagggcctactaagaacaggccaagccctggccccagtgggtttggatataatcctgagggcagctgggaaccactgagagaagcaggagaatgttctctgtggctacagtgaggagaatggattggagggaggccagactggaggcccagtggctagagaccagataggcagttacagtcttccagactgcgagacaatctctctttagtgccaagattagcataaaatcatagcattatataacccaattattctttgattcctgcatccccaatctgactcagcattctaaatttacttaagatctggggacaagggtttttggcaaatccttgaaggcaaatgatgttacagtcaatcagtatatgccttgagccagacagacatgggtacgggcctcagttctgctgcttgctagctatgtgactttgcacaagtgatttaacttctctgggccttggattccttactggtaacacgagcataatcgattcctcacagaattaagtgagaaaactatgtatgtaggacttcttatggagtgggtacttagaaataaatggtagccgttatcattt

SEQ ID NO: 212990 - DNA, 503 bp, Homo Sapiens
  misc_feature (19)..(19): n is a, c, g, or t
ttttttttttttttctggnacacaatatgtttaatattagaagaatgattacacatagcttgttacagatttccaaaaaacagtaggtacagtttttaaaatttacattcacagagaattttaatgacattggaaaatgtaagaaactttgaaaaaagatggagtaaaatatgtataaaattgataatagttgatttagggtggtagaagtaaacataattttttctgtttatatttttctctatcttttaaattttgctaatgtgcatagattcttttaaaataataagaaaataataaggttaatacgttataaaaaatagggacctggctgttgaagtgcgatggagacaatttgttagaacatgtggcttgttacacagacgcttgagaagtttgttgagagagaacgattacctagaaacaagagttacagtaaatggggtaaaaagggcaaaagttcttcagattactatcctatttaccaaagtttgtgatatgta

SEQ ID NO: 212991 - DNA, 449 bp, Homo Sapiens
  misc_feature (30)..(30): n is a, c, g, or t
  misc_feature (42)..(42): n is a, c, g, or t
agcatgtaagagagggaacatttccttagnatgttacccagnatggttctgggggagacagcctgggcaacagagccagactccgtctctaaacaaacaaacaaacaaacaaacaaataaagaaagaacattggacatggagaggtggggcctggcatgggtaaccatcagaggaaaaagccatgctcagccttccagttgagtgggtaacgactgagtctccagggaattcccagtgacctcccctccacacctgctgtgatcctgccaacatttagctttggttctcttggcagctgcaccattcatgggtgcatatacgtagagtctgaacaggtgctctgctgctagaaacagcaaaccatctagattaaactcctaaagccagtgccacgaggcattcctgttccaactgggtgtttgagcagattggcaaaaaaaaaaaaaaa

SEQ ID NO: 212992 - DNA, 489 bp, Homo Sapiens; identical to SEQ ID NO: 50264

SEQ ID NO: 212993 - DNA, 502 bp, Homo Sapiens; identical to SEQ ID NO: 40492

SEQ ID NO: 212994 - DNA, 564 bp, Homo Sapiens; identical to SEQ ID NO: 50775

SEQ ID NO: 212995 - DNA, 722 bp, Homo Sapiens
tttttctacaaagaaatggtgtgcctggatggtcgtgtaggtgagttttaccaaggattatggtaacaaatgagtgagacctctatggagaaaatattgaaggacattaaagaagacctcataaatggagagagatatatcattaatggataggaagcctcaatggcataagtatgtcagtttctttcaaaactcacctatggattcaatgtgattccaaaccaaatcccaacaaggtctttcctggaattggaagccagattctgaaatgtatttggaaaagtaaagaggcagggttagctatttcattaacaaagaaggaacatcaggcagggagacttgtgttattattaaggcttattataaattattattgtgatcaagatagtgtatttttggtgtagagatagttaaattggccaatggattgagccaaatttccaaaacagacccacaaataaatgaaactctaatttacaacagagacagtactgcagatcatggggggaaaggatgaactattgagggattggcaaacttttttggtaagggctagacagccttacgtggtgttcacagtgtctgttgtagttagtcacctctgctgtggtattgtaagagcagctatagacaatactgtacgtgaacaaatgatcatggatatgttctaataaaactttatgtgcattgagatttaaatttcatataaaaaaaaaaaaaaa

SEQ ID NO: 212996 - DNA, 718 bp, Homo Sapiens
agaagaagcacctcagcagttttcagaggatggagactttgtcatcaacaacgtagaaggaaaaggcattggaaactacagctgcagctaccgcctccaggcctaccctgatatctggtcagagcctagtgatcccctggagctggtgggggcagcagggcctgttgctcaggagtgcactgtagggaacattgtccgaagtagcctaatcgtggtggttgttgtagccttgggggtagtgctagccatagagtggaagaagtggcctcgactgcgaaccagaggctcagagacagacggaagagaccagaccattgcccttgaagagtgtaaccaagaaggagaaccaggcacccctgccaattctccttcatcaacctctcagagaatctctgtggaactgcccgttccaatataataatctcctcctttacaagagctttcctctcctctctcttgctctcagagacctataaatccaaccagttaccctgcaagtcagccccatctgctgttccttggtctctaatcacctgagctgggtaaaggggattctgggagttgagagctctgccagggtgagatgtttcctgaagagaggttccccacccctgtaactcctcactgtactgatttactggcgcatgaaattctattaaaaatgcattcttctgaataaaaagagtattcactatttaacttcaaaaaaaaaaaaaaa

SEQ ID NO: 212997 - DNA, 543 bp, Homo Sapiens
  misc_feature (14)..(14): n is a, c, g, or t
tttttttttttttngatggccttatgcaatatttcagaactttaacagaataaagggtggaaaatgaaaatcaattatgagaactctgtcaaatgtttgctttccaaaaacttacaccacctcagacattgttttctcagcaaacttccaggtaaataaaattccgcaattattctacaacaatgtaccatcaaccagcctcacccaggatatgcaaggaagggcagggacaaacacattattttatccttgtgggttcacgggtgcttttttgtttttaatggtagaatttatagtcagaaatacttttaagttttacactaatttagttctctaaactttctctattttccacctggaatttgcgtaaattactatgtttcttcctctttgctaggccactaagtagactgacaacgtaactctatagggcaattatagttaacaatcatttactatatatttcaaaacaattatgacagtggaattggaatgttcccaacacaaagaaatgataaatgctttaggcaatggatactccaa

SEQ ID NO: 212998 - DNA, 480 bp, Homo Sapiens
  misc_feature (479)..(479): n is a, c, g, or t
ttttttttttttttaatttttaaaatgtatatattacttatatattaacattaagcattaatactgttcaataatagaatatgaagaaaaatacatatagtggtatttgggattataatcttacacagaatagtgacaagagacatatgaaagggcaagtgtatcaaagctagatgacaataagactgcaaataagatgaatttattcaacactatgtacaaagtttaaggccgtggtctaatccatgcatcataattggatgagtgatatccatcgatcattagcccgatactgaacattactccaaaataattagtaggaacaaagatgtctgatgttaataaaacaagactctttttctccataagtataattcacatggctatagatttttaagttttacttttccaaaacagaaagccttgaagagactccaaacccctattttaaaacaagaaaactgatgatgatgatgatnc

SEQ ID NO: 212999 - DNA, 416 bp, Homo Sapiens; identical to SEQ ID NO: 40729

SEQ ID NO: 213000 - DNA, 709 bp, Homo Sapiens
tgacggtggacagccccactctcggccctgcccgttgcacctggtcttcgccgacagcttgcaggaggtgctgccggatatcactgaccgccccgacccctctgacctccaggctgagctgcagttttacctagtggtggccttggccttgatctcagtgctcttcctcgtggccatgattctggccattgccttgcgcctgcgacgctcctccagccccgcctcctggagctgcttccagcctggtctctgtgttaaatccgaatccgtggttccccccaactacagcgaggggactttgccttattcctacaatctatgtgttgcacatacaggaaagacggagtttaatttcctaaaatgtagtgagcagttgagttcaggacaagacatactttgcggtgattcatctggggccttatttccactttgtaattccagtgaattgacttcccatcaggtgagtttcctttaagtataatttaatgctcattgcctacccatttctccatattcacaagaaaatatacatatttgcaggaaaatatataatttttagatgtcatggatcattttaggaaagttgtagtcagttaaaaagctgtcatatcattctacaaaggaggagtaaagtaggagcaattgtgtggcccaacatttgtttgttttttagccaagcttagatttataaagcaatgagggtgtggtt

SEQ ID NO: 213001 - DNA, 691 bp, Homo Sapiens; identical to SEQ ID NO: 40869

SEQ ID NO: 213002 - DNA, 620 bp, Homo Sapiens; identical to SEQ ID NO: 53051

SEQ ID NO: 213003 - DNA, 498 bp, Homo Sapiens
ttttttttttttttgcttttgtacagcagttcctcaactatcttcctcctctgccaatcatccttctcttgattatttcgatcgtctcccctggacccaaccatctccaataattttttgtgaagtacaatgttgatgaccatagaggatgcaaagctccgggctggttctgtatgatgttttatatttatgtataatgtcttacctgatgatacccaacatattactagccttatagatgaggatggatggcagcttggctggtcaatcaataagtcagtccacagatatttaatgagcattttctatgcaacttatactgttctagatagtctatgacctaaagaagattctttgtactcggggtggtaggaagacaatagacccataaataaatagataagacaggtttacatattgataaaaataatgaagaacataaaattaggcaatgagatagggaatgactacagagactgggggtaaggaaaagtgtgt

SEQ ID NO: 213004 - DNA, 372 bp, Homo Sapiens
  misc_feature (38)..(38): n is a, c, g, or t
aactttttaaataaatgtaatttcctgtctttttgatnatggggggagggcagctgtgcctaatttaggattgatttattctaacctctcttactaaataaatgcttgtattcagagtctgtttggaatttaacccaatgcttagaactccttaaatatacagaaatatattttaggggtaattgattcatggaactctcctactttggagcacaattgtattataattgtccggaaactggccagataatgtagaacgcacaagttgttgagaagcccttttgtttcctgatagttacatgtaattccagcagtatttggaaataatttgctaagatgttagaatgtaacatttgaagacttgttagaaaa

SEQ ID NO: 213005 - DNA, 721 bp, Homo Sapiens; identical to SEQ ID NO: 43872

SEQ ID NO: 213006 - DNA, 424 bp, Homo Sapiens
gcatgagccgcggagcctggcctagaaaggaaaatttaagtaagataccagcttcagaataggagctagggtctagagaaatggagcacattgtaactggctgacaacagtggcccaggaaaaccacagtaacttaatttgaaacttaatttgcttcccttgttttaatgactttttaatatttaaagatgttttctaaacctctaatcctcaaaacaaaaattggaagtaaactgattttcattcagtgaactgccatttagaagtgataggggtttacatactttgtaccattagttaacgcctaagctaaaagtataatatccagtttccctatgatctcaagtttatggaaagtagcctttcttttggcagtgtaaacaagcagttacattaaatacgtaaagataaaaaaaaaaaaaaa

SEQ ID NO: 213007 - DNA, 539 bp, Homo Sapiens
  misc_feature (26)..(26): n is a, c, g, or t
ttttttttttttttacagctgtgagnaactgcagactgagaacaataagtatttttaaaataacaaccttccgagtgaccaccgacgcatcaaatactggattgggcgtggtgttattataagaccaagagaatgtaaaacatcctgtaacatatcttagtagaagatctttgccaagggaaagaaatctgtcttctatctaagaggaatgtttggtaattgtttgggccttggataaactcaggccatacgtcttgggccaggcatttacattatggactaatcatagagccctgcagtgaatatagacattgtggagtaagagtaggttaccgagatggtcatggcagctttgacactcacagagacatgcagcctgtgtccggatggggaacattcaggccaagaccctttcttaaaaggaaaaatgtgaacgctggtatcccctgaacggaccccatctaagtggatcctgaactcccagcctgtgccatcagataagaatgtcaacatggcagagggcgaaggtaagaagggac

SEQ ID NO: 213008 - DNA, 465 bp, Homo Sapiens
aaaatataagataactgaggaaaattaattgccatttgtatattccttagtaccagattatcgttgattatgtgtaatggagagataataaatagctgaaacctaatattcttccagttttttttatgctgccggtttggatcttttttaatcagtccccttttcaaaagtattaccatgtcatgatttgaattgcatttttaaagttttcttatatacatatatttaagatcatagtaaactcccaaatacagtagagggggtaaaatccatatgctaatctgcattagaatatataaagttagatgacctttttaagaatacaaatataggctgggtgtggtggctgacactataatcatagcactttgggaggccaaggcgggcagattgcttgagtccaggagtttgagaccagtctgggcaaagatggcaaaaccctgtctctacaaaaaaaaaaaaaaa

SEQ ID NO: 213009 - DNA, 679 bp, Homo Sapiens; identical to SEQ ID NO: 49364
  misc_feature (657)..(657): n is a, c, g, or t

SEQ ID NO: 213010 - DNA, 620 bp, Homo Sapiens; identical to SEQ ID NO: 44022

SEQ ID NO: 213011 - DNA, 506 bp, Homo Sapiens
ttttttttttttttagaagataaccagcatctttatttttcatgcttccttaaatagttttgggagtaggagacttgtcctttggaagattgtcatccagaggcccaggaaagtcatctccaccaagagagccaactccctgcctcagtgtggtgttcagctggaagggggtgaacccagccaggccccaagagctgtcccagcaaagcccccgataactttagatgtcacagagagtccagctgcccctgggggagaagagagggtgagcacagggcacagggaggggtagcagctcctaacagggggttgaaggccagagaccctggtccctccagagacctgaggcccaggcagtccaaccctgttccccacctctgcttcctaaaaccctaggatttctgctctgggaggggctgctgcaggccactgcccgaagaggaggcaagaactctggtgaggaatcccagcaacagggcagaccctctgagaaatggcaggttcct

SEQ ID NO: 213012 - DNA, 632 bp, Homo Sapiens
caattgaaaagcatcctgtacatgaaaaaagttattgcaaatgactcactttttgtgtggttccttctctccctttttccctcctatcgtcactttagaagtctggccttcattttcgacacacagataataccgtccagtggttaagagcgatggagtctattggtctacccaaggtaagccttcacgcactggaatctgaactagaaaggcaaaggggtagtacacaaacatctctttatgagcaatgactttggagactgggttatgttaatgtagaaatgagaaatgtgaggactaaaaaacatggaaagacctatccaaagtaacatatggcaagaactcagaatgagggatgtgcccagattgagagcagccaggtaaaattgtgcacaaaataaaggcagaacaagctatagctggtagataggtgagctatctaaaatagccaactccctttcttgtgttgctatttgtacataaagattctaagtctcagccacttttggtggctcatgcctataatcccagcactttgggaggctaaggtgagagaatcacttgaggccaggagtttgagaccagcctgggcaacatggcaagaccctgtctctattaaaaaaaaaaaaaaa

SEQ ID NO: 213013 - DNA, 686 bp, Homo Sapiens; identical to SEQ ID NO: 41978

SEQ ID NO: 213014 - DNA, 451 bp, Homo Sapiens
  misc_feature (47)..(47): n is a, c, g, or t
  misc_feature (369)..(369): n is a, c, g, or t
  misc_feature (378)..(378): n is a, c, g, or t
  misc_feature (401)..(401): n is a, c, g, or t
  misc_feature (412)..(412): n is a, c, g, or t
  misc_feature (425)..(425): n is a, c, g, or t
  misc_feature (440)..(440): n is a, c, g, or t
ttttttttttttttaaatggaagcagtcatctttatctccaaatagnaaggtttcaggttactaatgaaatggaccgttcatcatccatgttctactaataaggccttgcagagcgtgaacttctggaaaatttcaccagacataagcctcagaaaatcatctcttgccttagccatttgttagaaatataaacattcatttccatgggttactgcagttcttgagttcctgcttaaatctctaatgttaacctagtttataggaatctatgacttggaaataaggtcagattctgataattagttgtgatccatattttgtatctgataattagcttatagccgcagtgataattgggccctacattnttgggaggnggcatattttaagaaagcaaagngctcttcatgngctctgatcttgncctctgctttattanggggttgttaa

SEQ ID NO: 213015 - DNA, 634 bp, Homo Sapiens; identical to SEQ ID NO: 45852

SEQ ID NO: 213016 - DNA, 652 bp, Homo Sapiens; identical to SEQ ID NO: 48241

SEQ ID NO: 213017 - DNA, 552 bp, Homo Sapiens; identical to SEQ ID NO: 48857

SEQ ID NO: 213018 - DNA, 730 bp, Homo Sapiens
ttttttttttttttggaaaagagaaagtaaagatattcctaattcagagccagaggtacacagcagctgttggcgggaggccacctggagatttatcaaggacgcgccaccccaccaggagcccctcttgatcaccaagtgctttatcttccaagtagtaagtcaatcaagaggtttctaaagataatccatttttgataaattagaatggaaacagtgtctctataatatacatacaaaagtgtccagttttcaactgtgagcaacacaggtgcacagaccaggtgtcagcgcaggaacccgacggcaggcatgctgatgccccccatttcccgccactcccgacagctccccgggcatggccccgattcccgccactcccgacagctccccgggcatggccccgattcccgccactcccgacagctccccgggcatagcccgtgattgcctggcctcagccctcggccccctgcgtgggcggctcctccccggcctctggtttcttgtgcctgcgcatgtgcctgtacttgtccacgtacgccttcaccaggttggccaccttcacggggttgatctctccactcttgctgtggcagatcttctgcacggccttgcgcaggatgacctcacccctccttggtttctccctcgatctgtggccctttttggatgtattcttatctaacaacacaatccggaaagactgaattgaatatttatactaatg

SEQ ID NO: 213019 - DNA, 482 bp, Homo Sapiens
  misc_feature (36)..(36): n is a, c, g, or t
  misc_feature (40)..(40): n is a, c, g, or t
  misc_feature (380)..(380): n is a, c, g, or t
ttttttttttttttaaatttagcctagtttctgaancagnatggactgcctggagatatttccttctgtaaacaaattattatttgatgattcctcacccttggctctgatcacctcttgataagttgaccatcaaaatttgaggggattgaggtttggagagcacaaaggtacacttataccagtgattcttaattggtggtgacgttgtccttcctccctcccacagacatctgacagtatctggagacaattttgatcggcataactagggggagggtatactggcagccagttggcaaaggccagggatgctgctaaacaatctacagtgcacaggtcagccccagcaaaacgaagaattatctggtcaaaaatgnctatagtgctgaggcagagaaaccctgatatacattaaatccccttatataatcttttctaccttagtactttaggagtttgcggtactctaaaactatgga

SEQ ID NO: 213020 - DNA, 548 bp, Homo Sapiens; identical to SEQ ID NO: 40740

SEQ ID NO: 213021 - DNA, 724 bp, Homo Sapiens
tcgatcctcagtacaaatggcagtggtatgctgggtagctaatgatgacagttattaccgttactactattattatcaatatcctgttttgcagaggaggaaaccaaaaccaagaaggattgttcctttccccaaatcccaagctagcaagatttcccgatcctccctccatgccctttcctaacgtctctgtgatttgggagcttctgagctggagttctgtaaattcccaaggaatgggcagttcagaaaaataccaaaaattctaacattattagactttaaagagatttattgattccttttgaatggcagcagatggaacattctggactggggaaggacagtctgtgatgtgaaacccttccccaaggtagacaacaaaagcgttttttaaatgaacacttagtagaacaatctagaagaggaaaaacctcataagtaggaagcctagctgggcggttgggagaaggagtataagtgatttattacagcttatgaagagactgtgtgtgggctgccagggtcccagctctttctcagccccaactgagaaagggtggggtggtttgcctctgcctttgctgtgggtcacaaaccttcagtggcccaaaaggtggcaagcctgacagatgacctggaaaaatcaaggatatcaatgttttaaatgcttttattcataagcagggtattggtggtgggtctgctgaaaaaaaaaaaaaaa

SEQ ID NO: 213022 - DNA, 510 bp, Homo Sapiens
ggcattgaaaagtaagcactcactgacaacttttgttagtcaccatctctgaggatttttaggaaagctccaaattgcccttggttctaatgagcaagaaaagggtcttctctgtataagctctggtatcctctattttaaaacaaccacgttgggtataccaggctacaaacacatgcttgtttaatgagatccatagtaagataacctttctgaaagaaagtcattgattctattgggtaaatatcctcaacttccacaggcagtaccctgaaatcttgggaatggagaaaccattctagatcagctcctagatactcctaagaggggtcaactggtgtttgatcctgcctgtggggaagcagcatggccaaactcatttaaacatctgcgtaactggagctaggatgatgcatagcacatatgtcactaggaatgagaaaggaaaaagctttgggaaagtagctaagcagaggatgcttcttaaaaaatgtcaaaaaaaaaaaaaaa

SEQ ID NO: 213023 - DNA, 593 bp, Homo Sapiens; identical to SEQ ID NO: 49237

SEQ ID NO: 213024 - DNA, 495 bp, Homo Sapiens
gtggctgggcagggggacgagcctctccccgaccctaacccagaggcctcatgtgtcccagttcaaaggttgcagtccccatggggattgtcttctctcccgtgtcggttgggcccatgagacacagagatacctggctcaacctcactcaccccagccagggcatcacacgcccatcctgggctggcagaggtggggagctccttgcacatgctaaattgcagggcgagcctccagatacccgtgggatcctacactcaccgcatgagtattccagtgcccagcaagcatgacattaagtagcaaattaaaatgccttgaccaattgacagaccatagaagaaaggaggaacctttgtattttgagcgcctaggatggcacttttatcttgctctttgaacaaggggctctcatttgcattttgcactgcaaatgatgtggcaggtcctggctccaggaatggggaagctgatcattgcccttatttggcatca

SEQ ID NO: 213025 - DNA, 472 bp, Homo Sapiens
tcttcttgaggtgactggagcccgtctatggtttcagccattgacttctggacatggaagtgtcgaggccatttttggcccctctcatatccgggaagggctccgtgcccagtagaggtgcagtgcagcagccagctcgcagcagtgctcccgtagagctgatggcattggcaggagtggcggctcagcacagggaagttctccagtgcccaggcccaggcttgctctcggtttaggtcccatggcacgtggggctctggacctgcctgcctccaagacagctcttccaaggttgagggttggaactccacagcctcagcctcccaaagcttgaccaggcccagccatagctagtctaggaaaagagcaaatggccgtgtttttatattttgacttttgcatttcaatattaatttttttggtaatgtaatgcattcaaaacatggtccccccccccaaaaaaaaaaaaaaa

SEQ ID NO: 213026 - DNA, 566 bp, Homo Sapiens; identical to SEQ ID NO: 47125

SEQ ID NO: 213027 - DNA, 703 bp, Homo Sapiens; identical to SEQ ID NO: 55642

SEQ ID NO: 213028 - DNA, 725 bp, Homo Sapiens; identical to SEQ ID NO: 46863
  misc_feature (674)..(674): n is a, c, g, or t

SEQ ID NO: 213029 - DNA, 497 bp, Homo Sapiens
  misc_feature (478)..(478): n is a, c, g, or t
ctcataagctgagaaagacctggggtctgaggaagaactgctgacccagagcaactccaaagtggtatctcaagcatctctggaaggtagtggggagaggcttatatgttgaagttattccattgctctcagcataagactatgtgaggggagggaaagtaccgctgtaagctctgtatgaaacaaatccctatcaggcaaacgctcccgactcgcatttctgcaaccccacgtttgcatctgtctcataagcatgtatcatatcaggatcttattgacatacgcccagaagaacatatgtggagagtgtagctctgaaaatttatcagcaaaggtgtgtttccgataggagtctcagttcctctggagtcattatatttgctgtagattcaaaaggtaaaaatgaaattcaatttttaaaaagatatgtgatacaatagtaagtcctaatgcatgtatgttgttttggacagattanaacaataaaaatcttaata

SEQ ID NO: 213030 - DNA, 470 bp, Homo Sapiens
cggagagaatggaagagctcctgtccggtgtgccagcagcccggactggcggtgagcgcgagggcggctactgagaagcccggcgacggaggaacgcaggtctgctgccagggattgaggagactgaagaatgctgaagacaggctgatgggctcagctggtaggctccactatctcgccatgactgctgaaaatcccactcctggagacctggctccggcccccctcatcacttgcaaactctgcctgtgtgagcagtctctggacaagatgaccacactccaggaatgccagtgcatcttttgcacagctatggataatgtgcttatggtgtaaccaggtttgagggaggcatatctcatgtgactgggagaagccaatcatcatgcttatgaactacaagaggatctatactggtatattttcttggatttaataaagctttaacaatattcaaaaaaaaaaaaaaa

SEQ ID NO: 213031 - DNA, 487 bp, Homo Sapiens
ttttttttttttttaacataagttatatttttattaaaaatcttttccagacaaaaaacagactttgattttgttttatgtgttgacagatctctttcatgtctggcttcacacagataagaaaatctggcctcccgcatgcgcagcaagtcctcactgctgtcagtgcgttcttgggaatcaggacttttaagtgaaacaacgtatagcaaaaccaattttaccagaggctaaaaaataaggattaagttcctaaagcatacttctggccaaggaaaaaaaaaatcactaagcttctaaaggccaaagtattctaatattaaacattgaaataaatgtgagctatacatacatttaagaaagatgaataaaaagataattattacttaattattccagttctgggtcatgtgtagctgaagcctgtttcagtagctcagggcacaaagagggaaccagccctggacaggacgccattccatcacag

SEQ ID NO: 213032 - DNA, 570 bp, Homo Sapiens
ttttaaaaagtattcttgataatgtgttcaaagactgccctggctacagcccaggactggcagtaaatacaaccagctttggggaggaatctccctctggggaatgtggaatcacagatgctgacagcccaaaggaggcactggaaacaggtgagtgaaactcctggggagaatcttagctgaggaattagctagggaaactccctaagcatgaaggtttctatggcagatcaggatcacttaccctttcaagcactcaggttttgtttgcaggcaaattgtttacacaatcagaggactcagttgccaggaaacagtcaatgtccccagctcattagtctgatggcaaataaatctaccaatatcaaggcaccgggcctggtccctgagccaagatcaagtccaattgatgctgtggataatttcctacgtggcttttttttttttttgagacagagtctcgttctgctgcccaagctggaatgcgtacaatctcggctcactgcaacccagcctgagtgacagagcaagactctgtctcaaaaacaaacaaacaaaaaaaaaaaaaaa

SEQ ID NO: 213033 - DNA, 471 bp, Homo Sapiens
ttttttttttttttgtacacagtgttcatagcagctttattcacaatagccaaaaggtgaaaccacccacatgtccatcaacaacaatggataaacaacatgtggtatatacacacaaggtaatatcaaccagccttaactaaaagaataaaaatcagccagcaacagtggctcacgcctgcaatcccagcaccctgggattataggcgtgagccaccacaattggccaggtaacagactttgtaagagccaacttgagatactatattcaccaattgaaatgtccacctgttatttcattccaatgatactgttcatttctcccattatataatatataactaatttctatgggtaacatctaaatataccagaatcctcaaaagtacttctttccaattattttatctagtgatttttaattcagtaggctatactctttaaatgagtaatatattattcgctaatagt

SEQ ID NO: 213034 - DNA, 478 bp, Homo Sapiens
gggacttcggttccgcacgtcgtcatgttgttggatggcaccagtatgtgacgttcctaggaacttagctctgaggaaaaaacaaagcaaaccggggaagtacgtagccttgaaccggagtaaccagggacagaaaggaaggaaaagggtttcataccttcacggaacgacgctcacttcgtccgcctgaggaggaaaaataagtttaaacctttctgtgaaaaagaacgtggagccctttctgccgaatggaaacccgctaaaccccgttatggagtctgctacaattaagcatctaaccaggaattgtctatggacacaactctccaggcaattcatgcagaaagtgtgttgacgatttcctgtttcttgcagagcgcttcaccgttaaggctcttagtagctggcgattgtaaagcacattttccgcttcatgaaaatacagtgctcttcttgtgtttgtaaaaaaaaaaaaaaa

SEQ ID NO: 213035 - DNA, 396 bp, Homo Sapiens; identical to SEQ ID NO: 49655

SEQ ID NO: 213036 - DNA, 681 bp, Homo Sapiens; identical to SEQ ID NO: 50371

SEQ ID NO: 213037 - DNA, 498 bp, Homo Sapiens
atttaaatggaattttaatttataaaattttaaactctccacaagtactggccgtgggcaaatacagaaaatcagattaaaaaaataaatggataagggaaaattaaaattgcatgactgtcttttagtctaagagggatcttatgaggatgctcaacagttaacagtacatgtttagagagaaccaaacaagaggctacgtcttaaagcagaatagattgtggttgggcataaggagactattgattgcttgaagacacagacagctcaaggaaaattggacatagagctgaaaagtgatgtttttgacaaagaattgttctgcacatccagctgtggaggaatccttaaggctcacagaggaacaaacaagaagcagtcttcagagatcaggggcggaatccccaatgtcaggagcaaggttgctgtggggaaattctactcttcctatctttcctgaactggaattaaaaagcacctaaatccagaaggtaaagg

SEQ ID NO: 213038 - DNA, 421 bp, Homo Sapiens
acaatcaaatacttaagtctcttgaagagctgggtggtgggcgggggtcttcccaggtggtcagggagatgtgttagtgtagcacttggaagagagtggaacgaccaggcaaggatgtgccgtggaggtgggcagtgggagcagcccagtgtcagcatctgtattggttagaagaccaccgctaatgaggaggagcgtctctaccctgcagctgtctgtactcctgtgtcttccgtaatgtgccaagctctctgaatatatgcaaaactagtctgcaaaaagccatatgtctcagcatctggctttatttctaagtgttcaggtggaatttaagccgcgatcaaatttacaatgtcactgccagctctggacacttacttttggaataaagcaaagagtgaacactaaaaaaaaaaaaaaa

SEQ ID NO: 213039 - DNA, 425 bp, Homo Sapiens; identical to SEQ ID NO: 40683

SEQ ID NO: 213040 - DNA, 682 bp, Homo Sapiens
  misc_feature (635)..(635): n is a, c, g, or t
ctggaggtgagaaaacagagcagcgtatggcaaaatagtctaagaacaagtagtaaaagcatcagcatcaaaaactccaggctataaaagactaggctcagaaagtgcagttttccacccacagctggggtgcttccaatagcatccttgagacagactccgctctagtacctccagcgaggagttcactactgcaacaagcagcccattcttggatttttattttttttaacttccattttttcttatacatcaagttctcactcctttatatttgatgacatgcacgttcagaactgctgaatatttccccttttatccatgccttcactgctcaatcacctttatacagtttctttacggcagcagtgaaagaagtgactcagaagacccgtctttgaaaaaacaaactataaaatgtatccactctgaccaaagcaaaaaaagacatattccttcccctctccacacagaaaaattcgggatattgagatctccctaaaggaggtcctaaaaagtcagtatatgttggggtaagaagagaagatgcacgccctaagtagagataaaaagagccagattttaaaactctttgttccctaactccttgtatgtaatgctcttattgaaaatgntaaccgattattttgaatgattatttttttggaaaaaaaaaaaaaaa

SEQ ID NO: 213041 - DNA, 345 bp, Homo Sapiens
ttcctatatcttgtgaataaagatcattcttgtggactagtacgtggatgcattcataggctttgggaagcagtggtgtgcgtatgtgtgtctatatcaatattttatgtttataactctgcgtattaagtttatatagaaaaaaataatgtctttctttagtgtttgggggactcaatggtaatatgaccattgcagtgtaatctgactgctcactctagagaacacttctgttatacacaatgcacatacaaacatacacccctaaagcgtagctaactgctcccactagataattgctgctaaaaacaaaacaaaacaaaacaatacaaaaaaaaaaaaaaa

SEQ ID NO: 213042 - DNA, 471 bp, Homo Sapiens; identical to SEQ ID NO: 53151

SEQ ID NO: 213043 - DNA, 665 bp, Homo Sapiens; identical to SEQ ID NO: 49425

SEQ ID NO: 213044 - DNA, 448 bp, Homo Sapiens; identical to SEQ ID NO: 48830

SEQ ID NO: 213045 - DNA, 433 bp, Homo Sapiens
  misc_feature (26)..(26): n is a, c, g, or t
  misc_feature (157)..(157): n is a, c, g, or t
  misc_feature (173)..(173): n is a, c, g, or t
  misc_feature (310)..(310): n is a, c, g, or t
  misc_feature (316)..(316): n is a, c, g, or t
ttttttttttttttaaaacctctggnggcctctgtttcctttgctggtttttatgctgccatgatctacgtttatggaaagcaagctgccataaaggtatagtcgagaagattctgccctcagctctcttttcctcttaatgttctcttccttgaanatctgattcttcttgnggataacttccaaacctacacctttctgcctcatttctttccaaagcctgggacccacatttccaactgtttggagcactttatcacagggccctcaaaattatcattcccaaagcaagctcatcttcccttatcgnacttgnatgcttctttcttcctggcttctttgacttccctcccattttcatgaccatcctctgagctgactgtgttcaaaactctaggtggcctcccctctccttcctcactgtctcacagag

SEQ ID NO: 213046 - DNA, 446 bp, Homo Sapiens
ttttttttttttttaagccctgctttacttcttcaggttagcaaaatgcttaggtaaatttgttggccatcacaaatgtgattgaggccaccggtttctatcatcaaatgaaatcacaatgacaggtttctgacaataaactcaacctaaggggagcgctaataaattcccttcccagcctcttcttgggtgtgtggtatgtgtgctgcctcctgaaatgcccaggatggccaccctcccacacgggatattctaagccgctgacaccatctaacttttctgaaagaaattaacaactcagccgatctttaccaggctaaaatcacagaactgggtcccctgaaagccaggctttcatgccacatccacagccactgctgtctagccaagtctataacatcttcttgcccttattaatacatatgttacataggtttacgtatgtt

SEQ ID NO: 213047 - DNA, 424 bp, Homo Sapiens
aacaattctaacaaacatggctgtttgatttccaactccatagcagactcaggaaggaagctgaatgaagagataaaagtgtgtccattggcagaggactaaaggagatttgagcacctgtcagatgggtactgtaccagaagaaaggagcactttgaaagcgtagcttatggggtaggaaagtattttatttaggaaaaaaaacccttcatttattccaaatgataaaatgtaaaatgggtttccataaagtgccagatacatgagatgttgttgattttataaatgatgatcatgtatttacagccttttacagttttttatatccattgacttatttgtgtctttgtctttaaaatctgccattgcaaatagctgttttaataaaccaattttgccttggcccctgaaaaaaaaaaaaaaa

SEQ ID NO: 213048 - DNA, 574 bp, Homo Sapiens; identical to SEQ ID NO: 46542

SEQ ID NO: 213049 - DNA, 506 bp, Homo Sapiens
tgataaggctatttgtctttataaaaaaaggaacttccacatagcccagagaaaggaaatgactttttcaagtttacagagtcaattaatggacgaaatataatttgaaattcaatctcctgatccccagtctattgggagttctttcagaatgtcccttgactgtccctcaaagtgccagcatgtatgaaaccttgttaaggatgtatgctcaatgaaaatacacaaattgacttaacaagaaactaaactctccagaaagatgcagttgacccaaaactctgaatatcttttatgtttaaaactttcttttttgaacaaaattgtacagttacttctctatttcaactcttaagccttttatgccacgtcaaaggttagctctcttttctctctgttaataaagtcttattcttgactttggaactgtatgccaagctaaggggtcctttattgtttatttattttttgattctctacttttgtttcacacatcttttctacaa

SEQ ID NO: 213050 - DNA, 604 bp, Homo Sapiens; identical to SEQ ID NO: 53155

SEQ ID NO: 213051 - DNA, 451 bp, Homo Sapiens; identical to SEQ ID NO: 50063

SEQ ID NO: 213052 - DNA, 212 bp, Homo Sapiens
cggctgcgagaagacgacagaagggggaaattaatattttttttgaaaaggagcaaaaagaaagaaaggtcagggatagcaagcagagagagggagcgagccggctgccacacacgccaggtaaacaaaagccaacaaaatttttttttcaatttcttcccctgtgcatcctcttccagtttaaaaaaaaaaaaaagaaaaaaaaaaaaaaa

SEQ ID NO: 213053 - DNA, 226 bp, Homo Sapiens
cggctgcgagaagacgacagaagggatacaatatttgaacagatcatggctaagttttccagaattaataaaagacatgagcactagaaacagtcacaagaagtaccaaaaaagaaaagtccaaacttagagatgttgcagtaagacttcaaaaggtccaggatacagagaaaaatcttaagcttgcagagagaaaagacagattacccacaaaaaaaaaaaaaaa

SEQ ID NO: 213054 - DNA, 472 bp, Homo Sapiens
ttttttttttttttacattaaaaatcaagcatttaatttgtaaaccttaatgaaataacagcctactccagtttcttcaaaggtttgtgagctttttataagagtggtcaggaagtgcagaaaaacaacatggaagacaggatttggaaacaaggccaaaatttaaaagacttaaccttttttttcttttaaatgagccacagaagtgctcttttataatgttgacgcaaatcaacatttatattatagaaatgcactcagaagtaacagacacacaaggttaaaacctgattcttcccactaagttctggaaatttattctaacataatggtgcctttctgtacaaagaactgtaccatatcataaatttactgctagtaaactttaagccaccagaaatctttcagctgtgacaagcacttgattgtaatgacagatttcagagtctgaatactgaaaaatatatatatc

SEQ ID NO: 213055 - DNA, 463 bp, Homo Sapiens
ttttttttttttttctatttttcccacagtctctataacctaagggaagtacatattctttgatctaagaattccactgctgcaacaaataagggattagagaaataaatgatcatacatcctcccaatagaatacgtacaagtattaaaaagaatgagagatatttacatgaaaaatctgaaagaatatatgccaggctattaatagtagctatatatcaggcaagagagcaagggatggcactgaggggaataagattatactggtcttcagattttttccatatttaaaaaaagtaacacacacataacttggtaaccagaataaatttcttttgcatagggaaagaattaggaccttccaaatgaaaacaagtagagttatagttttaaaggaaagtgcagcccaaggtaatacagaggaaaggcagtaaatgcgcatggggaatgggtgggcaggagg

SEQ ID NO: 213056 - DNA, 633 bp, Homo Sapiens
  misc_feature (632)..(632): n is a, c, g, or t
tggagaacagtcttacaaatgtaacgaatgtggtaagcctttttaaaaatcaaagggtgctgggattgcaggtgtgagccaccgctcccagcctctctgtacaaattttttgccacacaaatctgaaaataccaccttgatttatggatcctccaagtttttcactgaagtacaagggaagaaatgtaaatctataaattgggttaaatgatttctaggaaagtgtataataataataacaattatttttttgagacagagtctctgtcacccaggctggagtgaaactgtgtctcaaaataaataaataaataataaataaataaataatagaaatgaagttttgctatagttgagaaattatagaatgccatgcttattatgataacctcatacagaaatttttacagctttttgaaaaatggcttttttgttattcaatttttatagtcttataaacattaattttcacaagactagtgtaaaaatattgtagacaatttgtctaagcagtatttcggaagcactttcaacagttatgtaaagggtcctatttatgcttgaagaaaggacatgtataaggtttttagcatgaggaaattaagtctttctcaaccctagaagtcaggagnt

SEQ ID NO: 213057 - DNA, 480 bp, Homo Sapiens; identical to SEQ ID NO: 48573

SEQ ID NO: 213058 - DNA, 667 bp, Homo Sapiens; identical to SEQ ID NO: 53268

SEQ ID NO: 213059 - DNA, 686 bp, Homo Sapiens
ctgatcctcccccgactctaaccccaagccactttccctcaagtccaaacagatgggctcgggccccctcacccaaactcctacactacaacctcccccagttgatgccctccagtttatcctcctcaagctcccaaagggatttttttgttaatggctttattgagatataatttacatactataaaattcacttgtttgaaatgtacaattcagtgatttggggggtttctaaagtgtagatctgattatatactgcttaaaaccttccatgatgctttattgcccttaagattatacatagaatctcgttcttcctagaatgttttcctgtctaacccatatactgcataattccctgatttttctccacaggttatgcccctgatgaatggggactaaagctcagatgtgtggtcatttgcaacccctgagttcacttttttaagacagcttattgatatatataatgtacataccatacagtcacccacttaaaagtatacaattaaatagcttttagtatattcagagttgtgcagccatcattcgaaaaaaaatttcagaacattttcatcactgcagaaagaaactccatatcccttaggcgtcctttacccctcatcccatttgcctattctggacattttacataaatggaatcgtataataaaaaaaaaaaaaaa

SEQ ID NO: 213060 - DNA, 447 bp, Homo Sapiens
ttttttttttttttaaagaatattcatttatttataattattgctaagtaaacttctcttttaaacaggaacataaaaacacagtagggctttgcacaagtggaatctctaaacagttggtttgtatacatgtcaaaataagttagaatggaatttgtccaggagtttccaagtcacccgagaggctgtgcacctcttttgagaaggttagggaggggtacagacaggagccttgccaagaccaccccccagctcaaactgtgagttgtgctgtttcctcctcctagctttgcccaggtccaaggcacagggcagggggcgttcaagtatcgaacctcacagagggccagtgctgacggcggggctgggggagggaaaggagagccccaccctgggggccagaccttctcccttcagtttccaagaccaaggccactgcactggcag

SEQ ID NO: 213061 - DNA, 455 bp, Homo Sapiens
ttttttttttttttcacattagaacaacgtgagtttttattttttctccatttctgggactaaactaaagcccaccacaccccatggtgaagctcgagggtggtgcggggctgctctggcgtctgtgaaggcttatggtgttgggggcgccagctacgtcgggacgcagatccaggccagttgggtctccaggcctcagggcggcagcggaccccggacagcaggccgctctttctttttgtgttggagtcccagggcccgggccaccagccgccgggccacagtcgcatttgtctgtggcctctccttcaccagacgcaggagttttggcctctgcaaggctttgagctttgactgcttggttccctgtgtgaggggccggatcttgagcaccgagaactcccgggtcagggcttccgcagctgaggccaggcagggaaagatgccgagtgcgt

SEQ ID NO: 213062 - DNA, 415 bp, Homo Sapiens
aattcgcggccgcgtcgacctcaaggttgagtggaattaaattgcagggagagaaattgaaattagatgttagaatttcgtaggagctgggatacctgaaatattgatttacatttccaagtacctgagttaaaataacaactgcaacaaaactttgatatctatatcagagttagattaattagcataattcaaaatttagaatgactatacaatttttaataacagctttatcgagaaatagaattaaattcattcttaaagtgtagttgactcttgaacaatgcaagggttgtggtgctcacactatcccccccccctacccgcatgcagtcaagtagtataacttttgtagtagtataactcatgcagcctgagcaatggagtgagaccttatcttaaaaaaaaaaaaaaa

SEQ ID NO: 213063 - DNA, 423 bp, Homo Sapiens
ttttttttttttttagagagatgttcttactgtgttgtccaagcttgcctcaaactcctgggctcaaggaatcttcctgcctcagccttcccactagctgggaacacaggcacatgccaccaagccctgcaccaatgaacttttcagggaatttttatgagcctttctttcagtgcctccatgagaagaaaactttatttcctgtaaataaatcttccttaggagcaataggatgtaaaaatcaatctttaaattttttttttcttattttaacttcccacactacattcatgcatttaaacattttttttacttactttagaaattcagctattatagtgtgcctgtttgtgcatgccgattcacacatgcagatccagcatcttgttccttccattcaaagccttccctgacaccatgact

SEQ ID NO: 213064 - DNA, 465 bp, Homo Sapiens
ttttttttttttttacaattaaaaacagaactttattcctccaagtgttcaggtgtgcacttggggaacagccatgctccatgccacacagtcagtcggcaggcccgcctctgttcactgcggacctggtcagtcagcggccagcagatacctggcctctggctgcctctcttgcaggctgggggtgggctgtctctcgtcagcagggccacgggcttctgagaaagtgcttgtcctgctgctcacaccagccgcctccgcttccgggtgtgcctggcatgccgggttctgagcacgtccaggtcgtcagggtcattagaagtatccaggcaggaggaagcagagcatttaccagagtctggggctccctgaatggggcatgtggctgtcgtgcagcccggctgcccgtccctgtctgcaagttccagctcactcaggaggtcttcatcctcactctcagagccc

SEQ ID NO: 213065 - DNA, 736 bp, Homo Sapiens; identical to SEQ ID NO: 53165
  misc_feature (729)..(729): n is a, c, g, or t

SEQ ID NO: 213066 - DNA, 320 bp, Homo Sapiens
  misc_feature (37)..(37): n is a, c, g, or t
  misc_feature (42)..(42): n is a, c, g, or t
ttttttttttttttgcaggatgcacgtactttattgngatgnttaatatgtgcacagtgtaacaaaggagatgcaggtggggggagtatgattatatgataaggaacttgaactggaaaacactatataaactctctcctcctgcagaccttaaggcactaggattttgtcatgtgccaggaggaaggggagcaggaaagaccttctccctgcctgtagagatcagagatgcagcatgaacctataggagatgaggccaaagctccaacctcagcttcttcactgtgaaaagagtcaatgtcttgaggatcggagcgtgg

SEQ ID NO: 213067 - DNA, 502 bp, Homo Sapiens; identical to SEQ ID NO: 47042

SEQ ID NO: 213068 - DNA, 389 bp, Homo Sapiens
tgaatattagaattgtaatgttataaaatgccatcatcaagcagatctgtgctcagccctgtgctgggctttgaggaagatctagagctggtaccaggccagagagggaatgctctttatcaagttcttactatgctttacccacctgatatcaaggtagaggagcatattcccttttcactgctgacaacacttaatgaaattcagagtgtctgaggtcaccaagctcatgaatcactcaacacacacatttgttggccaggcacggtggctcacgcctgtaatccctacactttgggaggctgaggtgggtggatcatgaggtcaggagatcgagaccatcctggccaacatggtgaaaccccgtctctgctaaaaaaaaaaaaaaa

SEQ ID NO: 213069 - DNA, 464 bp, Homo Sapiens
atccaaccaaaaaggatgtcttcaggaaatgtagaattgtgcagtttggtgctgtgcccacaccactctaaaattaatgattaattgaatcatttgaggtcgctcaaattaaactaatttggcattgtgtgggtgacaaccagttgaaatgttttctttttatcagctatgtggccatatttttggagacagccagagtcttctgtctcttttctacctgtaatctattccaggtgctaagaactgtgaaagtccagcttgggtaatgtagtgagaccctgtctctacaaaaagtaaaaaattagccaggtgcagtggcacacgcctgaggccccagctacttgggaggctgaggttggaggatcacttgagcctgggagtttgaggctgtagtgagctgtgattgcaccactgcacttcagcctgggcactggagggagaccgtatctcaaaaaaaaaaaaaa

SEQ ID NO: 213070 - DNA, 451 bp, Homo Sapiens; identical to SEQ ID NO: 48724

SEQ ID NO: 213071 - DNA, 587 bp, Homo Sapiens; identical to SEQ ID NO: 52264
  misc_feature (525)..(525): n is a, c, g, or t

SEQ ID NO: 213072 - DNA, 549 bp, Homo Sapiens; identical to SEQ ID NO: 55383

SEQ ID NO: 213073 - DNA, 432 bp, Homo Sapiens; identical to SEQ ID NO: 376

SEQ ID NO: 213074 - DNA, 619 bp, Homo Sapiens
  misc_feature (592)..(592): n is a, c, g, or t
taaattgtaaaaatcagtggtagcaaaacaaaaataatgataggaattgcaagtttgggtgttttcagtggatttcagccttaaatatagaaacagcagaatttttgaaaagtaattattttgaaaaatgaatggcatgcagctagcctttgtataaaaataattttctagatttgaaccctaatagttaaaaattaaaaattaaacataaacatactgcttttaattgtcaggtatatatataagatagagctgaaactgtggtttaggtctttctgtggaatgccattacatctttatattagtcaagtccatgaaaataaatgtttagatcgtcttgaattgttagtctcaggcagtgttatcctgctctcaggccaacagggggagcaaaatagaaacattccagatatagctttcatttttgagaacttgagtaatcagaatttactgttctgtaaagaataaaggaaaggaaaattataaagagagaaatttctttttaaagccctcacagaatgtgctagaaatagaataaaatttaaaatacttttggcttcttttcctcagcttaagttcaaaataaaagcantcctttacagttaaaaaaaaaaaaaaa

SEQ ID NO: 213075 - DNA, 731 bp, Homo Sapiens
tttaggagactgagtttattcaacaagtatttactgagcccttactatgttcccggcactattttaggtgctgagagtatgttgcattggttaaaaatatacaaaattcctgtcttcattgtgcttacactccagagaaaggatacaagacaataaacataataagtgagtaaattacatagtaatttagaaggtgataactattaccgtacaacaaaatagagcagtcgttgagaattaatggtgacatgtcttatctggaaattttccaaaaccagaagaggaaaaagtaaacttctatcttggaagactatatatatatatatccgtacataacaaaggaaaatatttctggctctttaatgttcatgggattttcaagcaagaaattaaagggatttttaaaacatgaaagtaatactgaaaactaggaaaagtagcttttgcaaaatacgtgctcaataccaagttattgaggcagtgcgatctgtgcttactgcaggagtagaagcttccacagttctagcaaattccatgattctggtcatactgccaaccacagtggatctagagagccaagtgagctgaagaaagactgctagggacagacgagaactcaaatagctttgagatttttttatttccacttccttttttaaaatacatcaccctgctttttttgtgttaaagggtgagctcattaaaaagggaaaactaaaaaaaaaaaaaaa

SEQ ID NO: 213076 - DNA, 623 bp, Homo Sapiens; identical to SEQ ID NO: 45963
  misc_feature (11)..(11): n is a, c, g, or t

SEQ ID NO: 213077 - DNA, 666 bp, Homo Sapiens
tttttttttttttgagttgggggcaagttaattatattcaaaaaaacatagcgtctccagaaaaaatctttttttttttttcagtgaaatagtttagttccttcatatagagacatattacacaatgttaacaaccatgaaaaacaatacaaaatgccctccatttaacaagtagaaaaatataactagtatatatggcaattgtgaatctaatactgtacagaagtactttatggattttacaaataaattataccttaaatgcttttttaaaattctttttcccctcagatgtacaccagaacttacagtaggaaagtttctgagcttagcttattgcaaatcagtgccagtcaaatgttctgccaacaagctcgaagaacttcttatttggctcatgaaaatattcgtgcagtttattgagtagtttgggatcgacttgggggtgcgcccggcctttggactcatgtaagcagcggtcccggccgctgtcccgcaggcagtaaaagcccttggttttgttaaagtagaagttcgaagcattgatctgcggcgacagctttaggaacctctcgaccttttggatctcagggaaggggtccctgatgaggcggtcgccgtccacaatgtggatgtggcgcagcgggaaaaagcgcagccagttct

SEQ ID NO: 213078 - DNA, 695 bp, Homo Sapiens
  misc_feature (5)..(5): n is a, c, g, or t
  misc_feature (22)..(22): n is a, c, g, or t
atttncagcaccaaaataaatntctttattaagtagatgaaacattaactctaactgtgacaaagaagaccacaaatagttatcttttaattacagaagagtttcttaacttacttttgtaagtttttattgtgtaagtttataatgcaggggaagtactactcctcaaatgttgagggaagcttccataacattgatgactggcttcatggcagtaattctcggctgtagttgcataagcattgctcaagaggaaaatccaaaagtgcagcaggagaactcttttccctgaaaaaggaaaaatattgaactcaatgatagcacctaaacttacatttaaaagacagacattccttctacatgtaatgacacttcttgtgttaaactaaaaatttacaagagaagaaagtgaaagcaaatggggtttcacaaatagttgtaaatatagtgaagcaatttgaaataattttcaagcaaagtattgtgaaagtattctaagccaagttttaaatattatctaacagacaagagtggtatatacaagtagatcctgagaagtacctttgttacagctactataaatatacatataaattatagaatctactttaatttattttgtgaacacttttgaaaatgtacatgttcctttgtaattgacactatatatttcttaataaaataattctcaaatt

SEQ ID NO: 213079 - DNA, 737 bp, Homo Sapiens; identical to SEQ ID NO: 44828
  misc_feature (657)..(657): n is a, c, g, or t

SEQ ID NO: 213080 - DNA, 556 bp, Homo Sapiens
  misc_feature (461)..(461): n is a, c, g, or t
agcagagaccccctctgatgacggtgggcgtcctttccagcccctctcggggcatcgcttcatcccttcccccatttccttcctggccctgctctccaagtcttgtgtgtgtggtggggcctggcttccctcccggcctctcgcctgttcccgcccatccctctctggttctctcaggcctcctctgggcttgccaggaatgtaggggaattagggggagggggacacaggaaatgcctcccctcctctgacaacagctccagctgcagggggaggggggaggggagagcagagtgggtgagacgagggagggctgaaggggggagtcggcttggggggagagtgttctcctgcccacccaggcactgggcgtggcccagccccacagacagaacagttctttcttccttattttattttttattagagacagggtctcactctgtcgcccaggctggagngcagtcgtgtgattggcctcaagcgattctcccacctcggccttccaaagcgctgggattacagcagtgagccagtgtgcccagcctcttcctaa

SEQ ID NO: 213081 - DNA, 758 bp, Homo Sapiens
  misc_feature (8)..(8): n is a, c, g, or t
  misc_feature (748)..(748): n is a, c, g, or t
tcttcttnaatggcagttttacttcaaatggcagatttcacaagagttggttattttttacaatggtttaggttgttaagtctcctttgtatgtaaggtagttttttcaacatctaaaatttttgttttagccttcaaaaccaacttaccaacctcagtccagctgggaaggcagcgttgattatggtagtttgtcaagaatatatggacctggaaacactttctctctctgtccacctggtagataaattgtcctgttgagaatttttagatctggactggaactgccaggaccaccgcctccagggagtcgctgggcacctggaggtatcgtcgatgcctctcccccatctttagaaaatttggctcttctgaggtcattattattttaagaatgattaggattgataagggtcccatgaccagcattatgaaaatgcgagagtgggaaggacacagtgtgagacttccactagaaaaaagtgaaagttagggttaggacatccttttttaaaaattacaaatttagtccgttttggtttttgtaatcaggctaggcacagtggctcacacatggaatcccagcactttgggaggccgaggtgggaggatcacttgagcccaggagttcgagaccagcctaggcaacatagcaagaccctgtctgtacacaaaatttaaaaattagttcatcggggtggcacacatctgtagtcccagctactctgcaggctgaggtgggaaggantgcttgaacc

SEQ ID NO: 213082 - DNA, 718 bp, Homo Sapiens; identical to SEQ ID NO: 45469

SEQ ID NO: 213083 - DNA, 450 bp, Homo Sapiens
atccaacgttggatccggtgggcgcgtgtaaccccagctactcgggaggctgagacacgaaaataacttgaacctgggaagttttagttcaagaccacaaaccaacaaaaactcacaaaaaacctgctttgccttctttaagaaggaaaaagggccgggtgcggtagcccatgcctgtagtccctagcaatttgggaggccgaggagggcagatcacctgaggtcaggagtttgagaccagcctggccggcagggtgaaaccccgtctctactaaaaaaatgcaaaattagtcaggcgtggtgatacatgcctgtagtctcagctactcgggaagctgacgcaggagaattgcttgaatccgggaggcagagctgcagtgagccgagatagctccattgcactccagcctgggcaacaagagtgaaactccatctaaaaaaaaaaaaaaa

SEQ ID NO: 213084 - DNA, 753 bp, Homo Sapiens; identical to SEQ ID NO: 45726

SEQ ID NO: 213085 - DNA, 649 bp, Homo Sapiens; identical to SEQ ID NO: 40550
  misc_feature (575)..(575): n is a, c, g, or t
  misc_feature (645)..(645): n is a, c, g, or t

SEQ ID NO: 213086 - DNA, 522 bp, Homo Sapiens
cggactgcagccacccgcaggagctccaggagctgtgtcagagcacactgaccgaaatggaaagccagaagcagctctgccggccgctgacctgtgagaagagcaagcctgtcccactgaagcttttcacaccccggctggtctcgaattcccgacctcaggtaatccacctgccttggccccccaattataggtgtgagccacagcacccagccaaaaaagtaattttttttagagtaataatgctataatgttggtgtgattccaacctccagctccccccacccgctgcctgcggttttgtttctgttaaaacgtcacctgatgaaatagaatgaatcctgaaatgcacctctgggatcgggaatggtctgtgtgttatcagctgcgactggttcactgcgtctggacaagcctcatggggactggggattctggccagtgtaatttctgtcaaccacggacgtttgccttcatgtgtagaatttactgttgttatgcaaattatattttcaattataa

SEQ ID NO: 213087 - DNA, 821 bp, Homo Sapiens; identical to SEQ ID NO: 54804
  misc_feature (757)..(757): n is a, c, g, or t
  misc_feature (817)..(817): n is a, c, g, or t

SEQ ID NO: 213088 - DNA, 679 bp, Homo Sapiens
agacaacaatatagaagaagatgatagatgagctttatccctatatacttgaaaactttgatgaaatagccagtttactaaaaaaatacaccttagcaaaactggccaaggaagaaatagaaaacctgaaatagacctattactaggactaatatttagccaatatgtactggttcagctgaagtgctgttaaaagattgaacttcttccataccaattcgtaaataggcactgccctgagttaccctctgacaccctctgactacccaggcccctcttctagagatacctcccacaaaaccttcccatgattcagcagcaaaagtcccccttacacaatatggcgattccaggaccctgttccagcacagccatctgcatctattctgactggcaagtgttcatgcggtgcttgttatttaaatattctgaatatcacctctgccacagccattaaagaaatggaaaaaatgagttaaaaactacctacagtactaataaaagagcaggtctgtcagttttacaggtgacttctaccaaatattgcaaataagagagaacattctaattttattaaactgatcagattattgaaaaagggaattcttacatcatgtataaaattagtatgaccttgatacccgaacttaacaaagataatattaaaaaaaaaaaaaaa

SEQ ID NO: 213089 - DNA, 719 bp, Homo Sapiens
  misc_feature (703)..(703): n is a, c, g, or t
caacagtggatagccatactaaccgtgttatttctgtaaaccaatgagaattcctgacgaacaacttttgtaatcacccgtcttctgattcatccttttttctgtaaaaagttgagcctgtcctttggaatactctccaaggcaacctggaagtgtctcaggctgcagtcttcaaccttggcccaaataagctaccttgacctgctgtttgcctttttaccctaattccccccaggcatccctagatagggaaacaagccacatctctgccctcagcctgggaccctgcttcctgatgatacctgcccatccctgttttttctccataaacttgctgggaaaggtgccctggttctgtttctctagaggctgtggtgccagactggaaactaccagtttcctgggcatgtgccttggtgtcaccgaacagccagatgagacttgtcaccagaaaatgctttcctttgctcctttattaaacacactcatattgccagtactggggatatcccctgagcaaggtgtaggagagcaaaagtagacaaccagataggaagaaaactgaagtggaataaatagatgccaggcacatgaatggtgctttttttcatcaaccttgtgacgttggaattatctcccattactcaagaagctcagagaggacaagtggtcttgacttatcagacatgggccccttttttgntaaaaaaaaaaaaaaa

SEQ ID NO: 213090 - DNA, 420 bp, Homo Sapiens
caggcaggtttgcagggaacacagttttcaaagtgtaaagctcagtgcaggtgctaggtcatggtgttttttgtcacactgggatcctgcgggagaggtaagtttagctgattggagtggaagatccagcccattcttcgtggtgcctgccgcagagcctgcaagcctgcagaaagacagggagtagccacgtctttctgtagttcacacctgtgtgtctccccacctgataatccctcagcacttctgtttgccttgcatgtaaagcccgacctttgcatggcaggcacacagactgaaactctttcctcctccagcctttcttggactcatccacagaatgacaaagaagtattctgtgaatattggttgaatgaaggaaggcacggctttttaaaaaagatgaaaaaaaaaaaaaaa

SEQ ID NO: 213091 - DNA, 403 bp, Homo Sapiens
ttttttttttttttataaagaacagaaatttatttctcacagttctgggggctggaaagtccaagatgaaggtgctggcatgttcagcgtctggtcagggcctggtgtctcctcccgagatgacagcttgttacagcatcctccagaggggaggaacatggtgtcctcacacagcagagagacaaaaggggaaaagggaccaaactccctccatcaagccctttcacaaggcactgagccattcacgagggcggggcctcacgatccaagcccctctccaaagtgccccctccactgacgcactaggcaggtcagtctctaacacacgcttttgggaggtcacgggcaggggacagcagagtcccaagccagtctgattctttccttttgttgttgttgtttg

SEQ ID NO: 213092 - DNA, 706 bp, Homo Sapiens; identical to SEQ ID NO: 49174

SEQ ID NO: 213093 - DNA, 684 bp, Homo Sapiens
ttttttttttttttgcatgactaacaattcattcaatgtgtgtgtactgctatgtgtcctcatgcatgagctatgtcaacaaggacaatctactgataagagaaaatgaaaatgtacaagttgtaggagactaaacatggttttaacttagtacacatttttctgaaatgtcccccgtgattaagttgtgaacaaatgaacatgccacatgtcaacaaactgaacaaacatggattgttagtgacttagaggtggagggagggctagagagaggctagctgtgttggtctgccaatctcctgtgtcccacactggctacaaaaatacaaccactgggtaggtagggctcatctagaaccagaattaggaataaggattgagaagaaaactcagcaagggtgatgaatgagtttcagctcattgctggagttagctgaagaatgaataggacacagtggatgaaggaacaagctattccggggaccttttgaagccctcggacctcacatccctaatagctaaggaaggataaaatggatgtaggccagtgctaatcgtttgagaaattttgctaaaggaagattttgattcggtagatctgcagtgggcctgaaattctgcatttctgtaagctcccaggtaatattgatgctgctggcccatggatcacattttgagtagcaa

SEQ ID NO: 213094 - DNA, 630 bp, Homo Sapiens
ttttttttttttttgcaataaatgcccatgtttattacaagatagaaacattaaagatttcttaggcaaaagggcaacaggtatgaaagtattcacagggcgccaaatttacaacagcttgctccaggcgatttacgtgaatcctggcctgtcccagcatgaggccattgacaacctggcgcctctgccaagcctgtgtccaggtgcctggcatgaccaggcgtgatgcccaccaccacagtccctgctgcatctcagaggccggggacctcccacacaaggatctcgttgcgggcggctgtgaagagcagcctggcggacggtgtaaacctgcacaggtgcactgcgttgtcgtggccggcaaagtcttgggcagtccccatggcacagtctaccagcctcagcatgcactcagcaaagccaacagccaggaggtgggtcccgggggacaggctcagggacatggcaaaaaagggcagtggtatcttctccaccacctgcttctggcagaggttgtagatgatcacctccttgtaaacaccggggcccacgtacatcaggagcgccccatcccaagggcagaaggcagcgagggagggtggcaggtggccctgagtctcccgtgggtgg

SEQ ID NO: 213095 - DNA, 604 bp, Homo Sapiens
ttgtaagaggttggattgtcgttgaaggtaggacccgcctgaaacctaggataatctcattttgatatccttagtttaattacatgtgcaaaggcccttttatcaagtgaggtcacattcacagattccagggcttagagggtggaggtatcattttgcgtgcccccatctggacatgcagtgtcctctcccctgtggggctgacctaccttcctagccgtcttcccagaacgtaatgtgtcttaaatccgtcatgctgacctggggccctgggtgcccttgggcaggagctgatggcactagtaccttgataaagttcttactggcaccagaagagaataaagtaactctccttccccttctctgacttatggccaggtgcccattcccactggcttgccgctccccagctccctgcgctttatattgttgaggcctcctctctcagctaagaaacaggaagtacacagatgtgtattcttaaagacagcattagccacggggcccccaccctcaaagggtgggagcgataactgctgctggttgaaactgacagttactactgataataaagttaattgttacccagaaaaaaaaaaaaaaa

SEQ ID NO: 213096 - DNA, 487 bp, Homo Sapiens
  misc_feature (419)..(419): n is a, c, g, or t
ttttttttttttttgtatagaaaaatactttttattttgtcattgaaaaaccattttaaaataatatatcgtgtagaataaaaaattccatgaatatatacatgtaaattatacatatatgtgaatttaattttgttaaaaggtaattggcatctgcaatttcatgcagtctaagtgaaacccataaagaaatgtgtatgaaataggaaagcaacaaaagctcataacattttaaaattagaaatcagattcaaaacccatcatgatctattttaaatttatctctataacatttcaattgagacataaaacacactttatacaacatgcctcactattttattaacagcatgacttccctttccccaatccccaaaccatgttcccatctacaccccaccccacccaactctcacctnttccattagcattattacaaacatattttacaaatcttataccaagcttttccactgtctcttttcaa

SEQ ID NO: 213097 - DNA, 438 bp, Homo Sapiens
  misc_feature (27)..(27): n is a, c, g, or t
ttttttttttttttggtttttaatggngtttttatttaaagcagcagaattggtagctaacagaatagtccctatgagtaacatgaagggcaaacgtcacatcaccatgttaacagactcgggaagtgtatctgaagaagtccaacctccattcatgaataacaattttcagcagacttctctgggggccttcctccacctgtgggagtcgtacatccagaagccgagtgagctggaaggaccccagtggggatgggctatggttggagaccctggtatgaaccccagtttagcttgacatagacacagatggttccatgcagaatatttatagacatgtatgtgcatggattagcattcacacacattcccttgctctgtcagctgagaataaaaatgaggatcattattactattacattctcatctaggccttta

SEQ ID NO: 213098 - DNA, 659 bp, Homo Sapiens
ataaaggcctcaacttggtagtttactgaaagttcttggacaaatagtccataaaagctgttgacctctaaatgcactatggctggttaaatacagtgaccatccttcttccagctgtaaaggatgaagcgtattaagcattagccaggcagtaataaagctaaatagccatacagcagctctgacaatgttgtgctggatattgcagtttgctttcaaggtgcagatgtaaggatttaaaaaaataataatttggcaccaaataaatatgagtagcatccattggcctattaaatcgagtcaggatttgaagggaattgagtttgagaaatgaataaataaaggcaccttggtgcctgaccccctcaatcatgcgtgtgactttgagcactcacaggtgtgtgcagctactcagcccagggcaggtgggttagcctggggttataccttggccctgggaatagacaccattgggcctttggttttgttgggcttccttttgtctttacactccacacaggtggtagaaatctgagttctaaagcacttttgtgaaatacaagctaagtgagaattctaaagaaaatgctttggtttctgctgtctcaaataagtggcatttaaaaacaattattaataaatatttttaatggttttaa

SEQ ID NO: 213099 - DNA, 612 bp, Homo Sapiens
  misc_feature (5)..(5): n is a, c, g, or t
  misc_feature (20)..(20): n is a, c, g, or t
  misc_feature (553)..(553): n is a, c, g, or t
  misc_feature (581)..(582): n is a, c, g, or t
  misc_feature (586)..(586): n is a, c, g, or t
  misc_feature (604)..(604): n is a, c, g, or t
  misc_feature (612)..(612): n is a, c, g, or t
aattnagtaattaaaatttnagttgtaaaaatgttacccttttcacattggaagcccttctaagtaccattttcattgggggcagggagaaggtttatatttaaattttatattaccagacataaaagtacagtgcagtactgatgattttgtttaaagtttttgaaatgttttgtttactaagttcttgtaatcattattttagacaagcttgaaaacttgaaattgttgaaacttataatttaaattaaattggaaattactttcagaatttggtagtatacaagatgtgcccctttgtctaaataaatgttggcttaatttgcagaatagataaaacaattgatgtttttgtgtgttcaagaatgcattaaattcttttaatagtaaaaagtcaaattacgaccataatgagtattttaatcttgttcttgttcagtattttgcgtagatttttattgtaattgtcctgagttctacagtatgtgaacaatatcgtgtgaagtgtgtttttgcatttgtgcatttaaattatttatgtaactagggctgngagtaacactttttttttttttttttgnntaangaaaagctatatttaaanattcaaan

SEQ ID NO: 213100 - DNA, 615 bp, Homo Sapiens
ttttttttttttttactgtataaatacacaatttttttaaacagcaccatttccaagttatacacaatatgattatgacttggcacaacttttaaaggtggaaaaggctagttgctagttcagtaataaaatacctggtacatagaacgataaggagctgtattctacctgctacacattgtgcattttacacctccagctaggacagaaacaagccacaagcggggaatacccgcccaaattaatactggaaagtttacaaaaccttcacttctcataagggtgatgctaccagcggcttgcttcacctggaattagagtaactgatttttaaagacaactgagaatattaactcgcttcaaacaataaaatagtcattttgccgacatttcataaaatcgccagttttaagctcagttcagaggcttttaaaaaaatattctagacctagtaaagtgcctccattcataaaatgaaacatccaagattgagacaatttcatactgatgcgcatctaaaataggtcgacgtatacagtaaataaacagcgcctctaagttgccatatttcagttagtggaatacacacccagccttcgccgttctggatgtgca

SEQ ID NO: 213101 - DNA, 497 bp, Homo Sapiens
ttttttttttttttaaggtgaagtttcactttgtcacccaggctggagtgcaatggtgcgaaaatggctcactgcaaccttggcctcccggactcaagcgatcctcccacctcagcccccaagtagctgagactacataagcatgccaccatgtccagctaatttttgtattttttggtaaagatggggttccgccatgttgcacaggcctgtacttctaattctaaataaggattttttgctttactataaaacactaaagacattaagcatttgcacttaattgggtacttcgggaaagaagtgtgtaggttggcattaaaggtacttcttacactgcatgttctgtaaggacagcaaaatacatctatataggttcactgttaaattctcgaggactaatggatccgcatgtgaaaagtaaaaagttcctcttcaaagtttccctttttgttaaagaataaataacaagtgttagaaataacagtttcttttta

SEQ ID NO: 213102 - DNA, 696 bp, Homo Sapiens
  misc_feature (669)..(669): n is a, c, g, or t
ttttttttttttttgacatgagacccttcaaaaccaaatggacttctagaaattagcatttcatctcccagtttaaaattactgtataattcttcctttttttctttccttctttttagagatggagtctacttctgttgcccaggcgggaatgcagtgatgtgatcgcagctcactgcagccttgaattactaggctcaggggatccttctatgtaaccaggattcaggcacaagccactacacctagattgcatatttcttttataacttataaaaatttcagctatattaaaaaacagaatagtacaagtattccatcagtcagcttcaaatttaccaaaatcagagccagtcttgtttcatttgaacccccatccactcaatatgaattattctgaagcaaattccaggcattttatcatttaatccataaatcatagtatctttaacagataggtttcaaaaacaaccacggtaccattattcatgcctaaatgaataattccgcactgtcatacaatatccagcgtacacatttcctgaagtttctaaaaagatttttaaaattaacttgtttgaatcaggattcaaataaagccttttgccataattagttgaaaagtctcttaaatattttaatctattggtttccccaccagctttgtgnttgcaatttatctgttgaaggtcattt

SEQ ID NO: 213103 - DNA, 575 bp, Homo Sapiens
cgcgcggcaggcggcgagctcgggggccgcagaaaatgaaactgaagccgtggtcacgtgacaggacatgtagtatatagcaggctgccagcgactcctgctcttgcttctggatctgcagggcagtcccagcaggacccatggagtgtccttcgtgccagcatgtctccaaggaggaaacccccaagttctgcagccagtgcggagagaggctgcctcctgcagcccccatagcagattctgagaacaataactccacaatggcgtcggcctcggagggtgaaatggagtgtgggcaggagctgaaggaggaagggggcccgtgcttgttcccgggctcagacagttggcaagaaaaccccgaggagccctgttccaaagcctcctggaccgtccaagaaggagctacatcagaggttttggtagatgctgctgtagacctcatatccgatgaatgggaagctgctaatgccatacccagcaagagaaggaagcaggatgcagccccgcttgaggccgccagcgtgccttctgcagactgtgagcagagcaaaaagaagaaaaaaaaaaaaaaa

SEQ ID NO: 213104 - DNA, 535 bp, Homo Sapiens
  misc_feature (524)..(524): n is a, c, g, or t
ttttttttttttttcctgttaatttttatttaaagactcagaaacacaggcatcatggtttgtcatcactgacaagtcttccaaaatcacacgctgacatttgtgtctaacaaaaacacttgggatagggtgtgtgtgtttgtgtgtgtgaactgtgcaaagtacaaaggatctcccagtcggctgagcctgttttgaagtgcccggcctggcatcaccccatgaggatgccaggagagcacccgtggccgccatcctctctgcctccctctgggcagaggcccctggtggcctgcagtcctgtcccctcggtgtccactgacttcagccatggctgtggactctaccatgctcctcaaaggaaatctctgtggccccccaaggccactacatggctaagatgtgtacatcatggggccaggatgaaacataagggttagtttcatcttaaccgccaaacatgtgtaccctttgaggcaagatggcctgaagaaagggctaattctgctcctgctcttctctgngagctacatca

SEQ ID NO: 213105 - DNA, 470 bp, Homo Sapiens; identical to SEQ ID NO: 50808

SEQ ID NO: 213106 - DNA, 769 bp, Homo Sapiens
  misc_feature (11)..(11): n is a, c, g, or t
ttggccctcgnggcccagttttcggcacgagagtaatgaagcacatgtgaataaccccttccttccattcacagcatcgcactcccagtccttaaggcaaagggaggcagtgctgaagcattggtggtgcagtgtaaagagacaagacctgatcatctgatcacacttgtgccaacttgattcatattgggcattactaacaacccctggtcaaggtaaataggttgaacaatcaataacattatccctgcctgcatacatgtgaacaaaagctatagaggacatgcaaattctacagtcattcctcatatgctttagacagagtgcagctactggaatcttccagatttcagtgttttaaaatcagagctctgaatacacaaaaggaaagagaaatggagcagctgacatattttaagctcacagtgatactcagtgacaggagcacagagctctaatgtccacaggatgttgtagggtagggtctctcagtaaatcaagtcccttacctatgttctgacactgaggctcttggagctatgggttagaaatccaggaggcaatatgtctttattctaatgaagtcctcatcttgcactcagaggcccactagtttgcccttctatatattaagtaaaaccaagagaaattaagaggatgatggcttctttctgtcacatgggtgctaaaccttttacaaacacttgatacttctatagagggaccaaggacctcaagtcctgggcagtctccttactgtgctactcac

SEQ ID NO: 213107 - DNA, 597 bp, Homo Sapiens; identical to SEQ ID NO: 55821

SEQ ID NO: 213108 - DNA, 799 bp, Homo Sapiens
ttttttttttttttagtgaacccaaattactcagatgttttatatttcagtgtgatcctcgcccagatcaaatacttgactccttagaagaataattcctaaagtcaaagtaatcactagtcttctcattgaaaaaaagaaaaaatgttttttagcagctttaatacacaacatagaaaaatcaatgccaccaagatgtatatatgtatttatacatataccttaagtcataagggtttaatggtagataggagacacacaagtccaaggaactggacagttttgtttttttttttaaaaaaagcaaaaaacattcttctaagatgtttccatatcaactcttccacaatctacaattattcttgataagataggagacacacaagtccaaggaaccggacagagtttaaaaaaaaagcaaaatacattcctctgtttccatatcagctcttccacaatccacaactattcttgataaagcccaacactgtaaaaactagacatcaaaaaaaatttgaatatattttagtgaaagtgctaacagcttagactgaatgacacactatcaattgtatataatactgtccacacaaagaaaggtctcattgtcaaatcacattaacatttaataagatgcacatctcattcacaaatctgttggtgtctcagtttggacaatgtatgaaacccacatgtaaggcacaatccaacctccttttaaaaccctgtggccctataactccaaagataataagaaagcaacttctaaaaagtctgcctttgtaatcaagcaaatatt

SEQ ID NO: 213109 - DNA, 775 bp, Homo Sapiens
  misc_feature (20)..(20): n is a, c, g, or t
ttttttttttttttcttatnatctcctttattaactggacacatccaatcacctggagactgaagaatagctaccacttcactatggcccctttctcgagctttatctaatggagttttcccatcttcatctctcagatctggatttgcaccatgccgtaacagagtctttgctacttgaggtcttccaaaacatgcagcataatgtaatgatgatgacctttgacctctattaacatctgcacctctctcacaaagaaattctaccatttcctgagttccaaaagcagaggcccagtttaatagagtctgacctacatcatccataaaatttacttcaaaggctcctgtgtcaattgcatctataagtgcatcggtatctttacttcgaatacaatctataagctgccgatgtgagcgctccccagaactatctaatctccggagtcctgggattctgcctgtagatccagcactagactttggcaaagcttttcgtccttcaaataatagcaccaagagaaggtcaaccaaacgcatagtatcaagcacacatctttcatcaccctgcaatgcactttcaattgaatctggaagctccgacctcagaagatcatgtgttactaccggagagcctctgcaaagtgttgagagcagacttacaattgttgacacctgattactcaatttggaatctgcagtggtggatggagctcctgtggtgctgcgacctggtttgcatgctgatgatggtcctgaaacagtaccaccagcag

SEQ ID NO: 213110 - DNA, 673 bp, Homo Sapiens; identical to SEQ ID NO: 44765
  misc_feature (632)..(632): n is a, c, g, or t

SEQ ID NO: 213111 - DNA, 532 bp, Homo Sapiens
ccagtgaagcccttcagctaaaggaagaggagctgggagctgacatcggccccctgcagtggtgactcccgtggcagcaagtccgaatggggcctccagtgctgcccctcctcccttcggcctctccagggcgtttggggcacccctctgcctccccccaccctccctgtcccctgttggccaacctgcctgcaaacatggagggcatttggccacagataggcaggaggagctcagttgtcggacagctatgcagtccctgtccggtggtgctggaggctccactctccttaggttcatagtctctccccttctttcccttccacttctagagcagggaggcttggggaggggaaaatttagctctgggtagctcttaaatcttagcctcagttgtggggtttggtttcatgtgttagataaggccaagacttagagaatcagtgggaaaaaaccttgagatctccaacacgctgggcccctccctggggcggggactctaccttccagattcagtccctagtcttgcgat

SEQ ID NO: 213112 - DNA, 777 bp, Homo Sapiens; identical to SEQ ID NO: 55770

SEQ ID NO: 213113 - DNA, 698 bp, Homo Sapiens
  misc_feature (41)..(41): n is a, c, g, or t
  misc_feature (658)..(658): n is a, c, g, or t
ttttttttttttttctgttaaaccaaataggactcctcagnggtgatttctactgcatgctcttttctgctctatagatcatatgttcctgattctttgcatgtctggcaattaaaagttcaacatgggatatattgcaaatatggttctgttaatttcttctgaggagcagtgatttttattctagtacatataagtcagttaatagttgactccttgaacttgtataggtttggatttaacctttggtatgctgatctgctgaaagctcaggatatttcccaggcttctctatctcggtgagactcattgtccaaatttggtctaccctgtaagaattaattggggccttcttttactagtcttagcctgggtctagagtaggccttatattagagcatggtccttgttcctcaaacctatcttttgtgttatctcagctagataactgaagttaacaaggatttctccatgttgactgggttggaactccagattccccacggctctatctctaatattacaattccactctcattctgtagcatctaatctctggtaagccttgggcagtctcattcagtgaacacgtagcctagtcctcagccaggaatcatgatacctggcttccaacttctcctcagtatactgggcttgnatatgaattacttccctgatttacacaggacatttacaac

SEQ ID NO: 213114 - DNA, 429 bp, Homo Sapiens
ttttttttttttttgttcttgtttgttttctttcttttttttctctttctttagttcacagatctagtaagttaccctcagtttgttttaaaaagtgaacaaagtccatgtaaacatgttcccagggccaggcacggtgtctcgtgcctgtaatcccagccatttgtgaggccgagacaggcaggtcacttgaggtcagcagttcgagaccagccgggccaacatggtggaacccccatctcgcaagggtccgtggcttcattcttgaagtcagtgagaccaagaaccccccaattccggatacagtgccactgcactccagcccaggcaacagagcgagattctgtctggacgtagccccatttctcttcccggacaggtcctctgatagtcgggtaggttctcaatcaagcctctcattagttattt

SEQ ID NO: 213115 - DNA, 653 bp, Homo Sapiens; identical to SEQ ID NO: 52283

SEQ ID NO: 213116 - DNA, 787 bp, Homo Sapiens; identical to SEQ ID NO: 47955
  misc_feature (734)..(734): n is a, c, g, or t

SEQ ID NO: 213117 - DNA, 451 bp, Homo Sapiens
ttttttttttttttgaacatgttaaattttattaaaaatatttaacatcgtacaaatattccaatacagttatggtacatgaacactgtaccaaaagcatgatttttattaaactgatgattaaatggaaaaggtcttgcaaatgtccctattttggtatttcttatgttactatatccatatcagcaatttatgtttgcaggagccttcagtccaattatagaaatagtcttagaacatagtacctaacattataatgggattcactaagtacaagtctacctacattatcgaagaggctagagaagtcccttttgcccaaccctcatatgtgagaaatcaagaaaagcaatgttcatgggatcctgacaaatctactatataaagtgagagcccttatttaaatttgagcaatttaagtttttccccagaatgtctcctttgttggttc

SEQ ID NO: 213118 - DNA, 460 bp, Homo Sapiens
ttttttttttttttgagatggagtcttgctctgttgcccaggctggagtgcagtggtgcaatcttggctcaacgcaacctccgcctcccaagttcaactgatgatcccgcctcagcctcccgagtagctgggattacaggtgcccgccactacacactgctaatttttgtatggatgaggtttcaccatgttggccaggctggtcttgaactcctgatcaagtgatctgcctgtcttggcctcccaaagtgctggaattataggcgtgagccaccacacctggccattatcaacattctaaacattaactttgtatcaaaattcattcatttatatgggacttaagggatctgcagattctacttcacacttaacgtttattcaattaacatatgcaaacttatgtttaactaaaatgatttttaagagagttaagaacctgacttactgtcttctttta

SEQ ID NO: 213119 - DNA, 466 bp, Homo Sapiens
ttttttttttttttgcacaacacctttgaagcagaaaactcacttcaaaataagagagaaaattaagtctgagcttcactcatcattaaaactgaattacaaccattacatataaactacagtgtcaagagacacttatgctatccgcaccacaacctcgctgtgtgacagatcttaggaactgacatcttagtataacctgttactactggtatcagcagataattacccgaatatgtctcaaagtgtctgagctttgtgggagtaatccaaaaggaagctatttcacctgcaagtcctctgacgctctgaacacaaaattcacaacccccatcggttgaacgagacggcttcaaacactcaagttacgctctcccttgctaaatcctcagtgaacaacgtctcccaacagagatactttgtctttgtccaacatacattctttgcaaagtggattcagttctcc

SEQ ID NO: 213120 - DNA, 508 bp, Homo Sapiens
  misc_feature (9)..(9): n is a, c, g, or t
  misc_feature (22)..(22): n is a, c, g, or t
  misc_feature (27)..(27): n is a, c, g, or t
  misc_feature (49)..(49): n is a, c, g, or t
ttttttttncttttatacagtncgagnaagcaaactacaactaacaagnaaaaagcttaggaattggcaatttaaaaaaattttaaatgcattcaaatgagaatgtttaatttgtttttttttttacaagaacttccagatgctcactgcatgcttctctctttatctctgatatcagatgctcactccaaattgttccatcacaacagattttagtaacagctactcaaaataacatgctgttataactccttaattaaaagcgctttagttcaaaagccacatttgataagcttatttgttaactaaaaataaaatcggtctgcaaatcagaaatttgatgtgaatatctacgtgccataaaagtacatggttcatgtccagttgaaaagtacagctgcagacaaaaggctttctcatgttcaactcagtgttttataagcaatgtagcaaagacttcaaaagaggtggccatttacacaacagtgtaattacttctaaaattgca

SEQ ID NO: 213121 - DNA, 681 bp, Homo Sapiens
caggagggtggattgttggtctcagtcagtggtgggacagaccagagctccgaacacttcagttttaaaactagttgtgagtttccaattctgttaatgtcttttttggtccttgtttctgctaaatgaatacatcccctccccttggaacttaatatcaataaataacaagcacagaaatatgcaaaaggaccaggtctacttgaagaatttgtgaggattaaatggtttatgagtagaggagggtcagtcagtaagtattggctacctcatgtgtgtcccattactaacttggttagacttatctattttttgtgtagtcttcctgtcataaaaattctgtgtaaggaccccatgctagtatcagtgaagattgtgaatccaggtgtgtctgactctacaatagttcttcacaagcattatatttcactgtgtagtgatacttcattttgaaagttgggaaaagcgtctttttcactttagtacagatgggtataaaagttacttaggacactagaaaacagttcattaaaagtaaaacaaagcctggtgcttgggcccaggaattcaaactgttttccagtgtaaatctgaatagcttggtctctgctcattgccaggactgggaggagtttgggggtcccaggtcccatttctacatcccaattcagtgatactggg

SEQ ID NO: 213122 - DNA, 689 bp, Homo Sapiens; identical to SEQ ID NO: 40541

SEQ ID NO: 213123 - DNA, 732 bp, Homo Sapiens
tgtgaaatgtgctcccctggggagacttccctcctagtaaatgcaaactcggttcttcagttccgaggccgaaaactggggaatcctcctcgattcctgtttctcttgtacccaccatctaatccatgagcaaatcctccaggcttatcctgacagtgccttgccccttcctctactgcgattatctcttgtctggatattgcaataggctcctaattatccctgctcccaccctcttctccctgtagcctgttctccactcaatagccagagatttttcagagctgagcagatcgtgttggattgctgatccaaactgtgcagagtgtcccacctacctaggtgtgtaagctgaagccttacctgtgaggggcccacatggtctgatctcccaggagctgctggatcttaattcctcttacgcttcccctcctcactggcctctcaacattcctcaaacaccactcagcctcagggcctttgcacggacctttggtcctgtccatcctgctgctgccctcaggcccgtgtggcttgctccatcattcaggtcttggctgaaatgtcacctcaggaggccttcccttctccaacccctcttttttttttttcttactcatatttcccactccttggcattaattattcatttgtctctcccacaagaatgcaagctccaagaaaagaggaaatgtttttccctgttgtatccttggcacccaaaatactgct

SEQ ID NO: 213124 - DNA, 649 bp, Homo Sapiens
cccatggtatgcttgaatctgctccctgaacttcctgccgtgcctccccgtaccccaaaacaatgtcaccatggttaccacctacccagaagactgttccctcctcccaagacccttgtctgcagtggtgctcctgcaggctgcccgttaagatggtggcggcacacgctccctcccgcagcaccacgccagctggtgcggcccccactctctgtcttccttcaacttcagacaaaggatttctcaacctttggtcagttaacttgaaaactcttgattttcagtgcaaatgacttttaaaagacactatattggagtctctttctcagacttcctcagcgcaggatgtaaatagcactaacgatcgactggaacaaagtgaccgctgtgtaaaactactgccttgccactcactgttgtatacatttcttatttacgattttcatttgttatatatatatataaatatactgtatatatatgcaacattttatatttttcatggatatgtttttatcatttcaaaaaatgtgtatttcacatttcttggactttttttagctgttattcagtgatgcattttgtatactcacgtggtatttagtaataaaaatctatctatgtattacgtcacaaaaaaaaaaaaaaa

SEQ ID NO: 213125 - DNA, 746 bp, Homo Sapiens
  misc_feature (270)..(270): n is a, c, g, or t
tctcctgcctcagctttttgggaagctgagggaggagaatcgcttgaacccaggaggtggaggttgcagtgagccaagatggtgccactgcactgcagcctggtgacagagcaagactccgtctcaaaaatataaataataaataaataaaaacaaaacaaaaaacacaggtggctcccactgcttcctgatggtgagtagcccgaggctgcaagatgagtaactccagaggcctcccgacggggcacctgcctgaagcacttgcctggnctagtctgtctcatccccagagccacacagctgtccactaccttacacagcttctcctgcatcccctacccacacaccgcagcctctctccttgttttactttacttgatgcatgttagaataataagtgtctttggtacagcccatatctatccaaaagtgagcttcaggaagggtttgtaggatatccgaagaatgtcagtccttccgggcagcagagttctcatcttcattgtatatgagcccctgggaagtgtgtgaaggatgcccttgtccaggctccacctagagacggacgcagtggatctagggacttttgagagctccaccggcagctttagggtcatgtgaattcctgcctggccgcatgttccatcttctctcctggcccagcctgccagtcatggaagattgagaggctagttactcatctttcttcattataaaatcttttgcttagcaaaaaaaaaaaaaaa

SEQ ID NO: 213126 - DNA, 462 bp, Homo Sapiens
accaacatttacccaaacaactgccccgttcccctggtccttagtgagtcccttgagaaactgcattattgggataagatggaattaagataaaaactgagcagtaccaataaaaaatatgactttaaaagggcatgaaagcaaccgttatttagtatctgttattgctgagtacaatgtaatatagaacttgaacttgaattcaaacttacactcctccaaaacctgtattattttctccaggccctgccactagccagtgagggaaatagatgaaatagatctgactctaccttgaaggtctgcagcaggggtcagcaaacttctagccctcaggtcaatagcctgccgcctgtttttgtatggcccatgagctaagaatgatttgtacgtttttcaatgttttaaaaaattgaaaggagtataatgtttcataacacatggaaattatgtgcagctcaa

SEQ ID NO: 213127 - DNA, 349 bp, Homo Sapiens
  misc_feature (340)..(340): n is a, c, g, or t
ttttttttttttttaatgtcaatcagtaatctttatttttcttcattagtggttgtgtcatattgcttaaaaaaatttttaaggatgaaaaaagttcagtcatatgctgtaacaattgatatacacattcaaaaacaatttaaatgaaggttttacatattattgtgatatcagtatgtggggcaggtgacatatatggcatgttccagtgagcagatactattagtatacttccaatagggagaatggcccaacagaacttgggagatgttttctccagactacatattacattataagaaaaaaaaaggtagaggaagggaggaagggaaggggaggnaaggaagtg

SEQ ID NO: 213128 - DNA, 720 bp, Homo Sapiens
ttttttttttttttccttaagaagcactttattttcctttaaacaacttggtcacaggacgttattttacataaatggaagtaatttgtaaaatttccatgtaaaaggccttgtgtctgagtctgaggtgataagaggatatgaatacaagtatataaaaacagtgcaaaatgtgcagcccacagcctccggagttggcttcagaaatcccccttaatgttgctagaccagttacattaaatattaaatgtaacaccaggtaaatattcctgggtttcctttagtctaacatccaacccagatatgcaataaaatgaaaaactcaaaatccctaacaactcaaaccatccaatcacccagaccattaggatcacaatgagttgagactgcaggctctatactgtgacatctcgtcagtggctccatcttaagaaatacagaattttagttgcatcagtaactagaatagactagctctgcttttaaagctttgccttttaaatgtagatttctagaagttcactttcaaggtgccatcaagaaggctaggccactaagaagtcacaagcccaacctagacatcgcagcctcttaagacatttgtcttcactaaccgttcagtctttaacctgctgctgatcctacaatgaaaacacttagtgccagctgaagcgtggatgcttgtctatcagcaacataattaagtgtagctgattctgc

SEQ ID NO: 213129 - DNA, 542 bp, Homo Sapiens
ttttttttttttttgcttgtggctcttttatatatatttaaaacacacagtaagaacataagaacatctcaaatcatttagaaggtaaaagggggttatcaaccaaaatctttggaaatttcataaaatttaaatatctgcaaacagtccaaccaaaaacgaaaaaaaaaaaaaatcccaacatttggctatggagggcacttcacatgtgaaccaaatggcgttataacattttccttcaactagtcactaaacccaattagaaagaatacaagagcaatattggagacatccccaaataccacgtacttgattagaacattctgttatgaagcgctcagctaccgcgggctttcctttacattgcatacattactttacatttctacagtgcaatgttgaaatagcctccaaatcttgcaaagtagattgatgtccattctacaaaaatattaacttacagtacataacactgaataattttaatctgtacatttttttccttccatgatagttgacacacgtcagtttgtacaagttag

SEQ ID NO: 213130 - DNA, 452 bp, Homo Sapiens
ttttttttttttttacaattttcaaaaactttattcagacaatcatgattaattctcaaacaataccactaagaggcaagaaagcagctaacccctagggtacaagaaacctagccaacaggacagcatatccttgtcttcaaaaatccacccagtgggatctaaacagagatcagtaaatactgtccgcatggttttattcttaatactcaatggttatagaaccaaacgtacaaatgtgccttatcctgaaacagatgagtaaacagactggcatttcctctctaattgtcaaagttttccttttaagacatatcagcatgcaagagtttctgtgctttaaaaataaatgacctcagaaaaactcccacccccaaactcccagaggggtgcaatttaaaataaatgctctttttattttttagatgtattaggtgccaggacagggttct

SEQ ID NO: 213131 - DNA, 702 bp, Homo Sapiens
  misc_feature (661)..(661): n is a, c, g, or t
atgcacccatcttccgggccctccacatgcaggtcccaatctaccaattgcctttttaaagaaactatgacgtacagttccctgttgtaaccacgggcaggtatttgctgacttgcctacaacctggagggttatgagctggcgtcgccccatttcacagagggagagccgaggtgcagagagacgaagctgctgactggaggagacatagacccaagcagcgagcccgcgcggcaatttagggaaccaactgtgtgtgctgcgggggtcccttgccacccaaactgggatataggctgctgttcgtacacttgcagaagtttctccctgcagctaccgccaccaataatattcacacagccttcccacatgctatgtaaagactccaaccttccccacctcccaagatgcatcctgttactatagccattttacagatgaggaaaccgaggttccaagaggggcagtctctgctctctaaacttcaccttccaaaggattctaagctgctgaatgaaggctgcaggcagggtggtctgtacaggggagggagggtgggaaggcacggggtctggaagtctaggaggagtgtctgaagtcaactgcaacttttaaatatctgtgaattttagatttcaccctgtatgtgtccctagcgtgntttaataaaataaattgcttcacgttaaaaaaaaaaaaaaa

SEQ ID NO: 213132 - DNA, 662 bp, Homo Sapiens; identical to SEQ ID NO: 55872

SEQ ID NO: 213133 - DNA, 557 bp, Homo Sapiens; identical to SEQ ID NO: 50851

SEQ ID NO: 213134 - DNA, 696 bp, Homo Sapiens
taaaaataaaaacatcttcacagatatcagagaaaagtgaaaactcatatctgaaagattataaatatactttatatcaattttccagagaacttaaacttctaataatattggtaatattctcatggttactattttatattctttcctgctttttgtagctactggtgtactatgacagttataataaagattatatgggggtatacttaaatgccatacttttaaaatcctgaatcattgtttataaagttttattcaatatttttctttgcacatgccctttttcagtccaattgaacacttagagatttttctttgctttcacttgcattaaatggaatatacagatgtactaagatagaaagaaaaaggtgaaagagaactatacaggcagaaatgcatgtgtgtgtacctgtcttcaaatggaaaagaaaatgatggatcacaacaggaaactggagaactgttgatttattacagttctcaaattagaaacctcccaaattcttaaagctaaattagcttttcattgcacactgaatttttctctgataaatctaatgtcttctgggttcagactttatcccgtacaaatccttttttcttgcctgttattcatgtgagaagaattatataattttcttatttcaaagcttataaactattacttataagttcaaaaaaaaaaaaaaa

SEQ ID NO: 213135 - DNA, 485 bp, Homo Sapiens
  misc_feature (17)..(17): n is a, c, g, or t
  misc_feature (48)..(48): n is a, c, g, or t
ttttttttttttttgcnagagaaaataaatgtttatttttttaaaccnttgaattttggagtaatttgttatgcagcaataaataattaatacattttctaattcaaatgtctgtagatgttatattcagtgctccaattcttcaatttgctttgcctgtgtaagagaaagaaaaaaaattgtaaaattcaaggtgtaccacaactgaaaaattaacctatagaggaaaattattaatttgtggtaaaccagtttattttaaaaaaacattttgtctccttggtttgccattgtagcttgagcaccttgtgtaatgcttggtacataataagacattaaataaatattgttaaatgaatgaatcaataaatttgcttcctcaggttttaagcttctgggggacaaaaactatgccttattcatctttgtatctccctcatatggcacaattcttaacactgaacatgcgccattcactgttgagt

SEQ ID NO: 213136 - DNA, 598 bp, Homo Sapiens
tcagacactcaagataaagaccacaagaccttcaatccagagttacacaaaaaggagatatgtacactagagacatcaaaccaggggacatgaaatgtatagggcaaacctcaggggacctgcaatcagaagacgtgaaggcagattttcattcttcttctggccaaagctcagtacaagacacatgtttagcctatttgtccaatctagattcagaacaagatgtgcaaccagacacttcagcttcctcaaattcatataaagaagatgtgaatttaacttctacttcatgtgatccaaaagatcaacagcaatctgaagactctgactaacatgcagaatctacccaataccacactgcccccattaatggaattaaattgggaaaaacaatattgcctcctccaatctgtgttctcaactgtggttgccacctcattaacttacaaaaaaatgaagggcatgctgagcactcaaacaatttgttcttacttaaaataaaatgacaacaaaccaaatgttaacactgtatcatcactttatgtatgtgaagaaataattcacatgtatattccttgtcatcaaaaaaaaaaaaaaa

SEQ ID NO: 213137 - DNA, 521 bp, Homo Sapiens; identical to SEQ ID NO: 40814
  misc_feature (7)..(7): n is a, c, g, or t

SEQ ID NO: 213138 - DNA, 601 bp, Homo Sapiens
ttttttttttttttgagacagggtcttgttctgtagcccaggctggagtgtagtggcactctcacggctcactgcagcatcaacctcccgagctcaagccatcctcctgcctcctgaatagctgggactacagatatgtgccactgtgcccagctaattattactgttattatgtttagtagagacaaggtctcactatgttgcccagggtggtctggaagtcctgagctcaaatgatcctcccaccgcagcctcccaaagtgctgggattacaggcatgagccattacacgtggccaaccatcctttattatgctcttatatgttattattaactcacagttactgtgatcaagaagagctaaaatttacaatgggcttcctgtgggccaggtcctattcagagtggcccagagagaggcagtacctgcctggggccgcatggcgaataagcagaacagggatgggagagcaggtgggtggcggaatcctggattccatgccttacccagttattagaacagctcatgtcctgggcacttacttggtgccaggcgccgtgccaacctattacagacacgatctcctttaattaagcggcc

SEQ ID NO: 213139 - DNA, 447 bp, Homo Sapiens
ttttttttttttttggcagatatggggtttcaccatgttgcccagtttggtcttaaactcctaggctcacacaatcctccagcattggcttcctaaagtgctggaattacaggcgtgagagccactttgcctagcccctagtgtcttttgatttcaaaaaagcgcagatccacggagaagaaacgcaattagaaaatgttgttcccaacaaggtctttgagctccacataatctgtatctaagataataccttaacacatctcatctgccttttacatgttcaattagggcttctgcgcattggctggccaaacatcttgagctacttcatgtggttttttagaagcatgaccacgtttgtaggatggaaatatttaggctttgttaccaaatctaagatgccacagatttttggtaagtgatcctaagacaccagtgaatacagga

SEQ ID NO: 213140 - DNA, 678 bp, Homo Sapiens
cccagtggatggctttgcctccagcggtggaccagtgtgtacctgacatgtatcagacttctgagctcttcaagctgcctcaaagaatgaatctttttagtctagaaaatgtgtttatttgataaatatactattgtgtatgagtgtgaaacaatgcagactttggagtatctcattagaaggactgtatgaatttatagaaaattgaatctaatttcagaagagcgcactgtcttctcagtcaacaaggttgcccagccacagagggtcagagaaaatgtcctttcccctccccactccttttcatagaatcctctctcaggcctaactgagctgtcatatccaattcagactgacacagagtgaggggcgctgagagtctctatgtatataaagatataggaagaaaataaggatcatcacaggaatctgttgggcttctccccatgactgtgatcttacccatgtttgaatcacaaactttaaatttataataattatgattcttgcagttttcaagtaatttgttaaatgcctattcaacacagacagatttttattttcagctgtggcttgtaaatgcctacaaactgattcatgttggtggtcgttatgacactttctgtgaattggtgaataaatatgattttagaatttcacagtaaaaaaaaaaaaaaa

SEQ ID NO: 213141 - DNA, 700 bp, Homo Sapiens
ttgacacagtctatacatgcattaagagatccactaagaagaatttaaaaagtagtttagaaaagaggagctgtcctgctttccttcttatagatagcattttggagaattttttaagctttaccatggtaactaaattgatcagtataccctgagatgtgagtctcctccattactggcctatgaatttcatccttccaagttcttaattccttgttataccagggacaatggaggaaaagtgtgaaaccagatcaaagacatcaaatcaagaacaagaacaactttgagtgtaaatatgtaactctactgcagcatcacctgtgttttccagatcagtcacctatcaaagataaaaacttatcaggcaaaagaaggtaatggaggcaaaagtgatggtacaattagtgccaacactggatgaaaagaaagatcttaaattagttgagtattaagaaaacagttccaacgaagcattagcccaggccagatactcgaaaattacatacctgtgtggctagtagtctgtgggacactcaaataagctaaagtttttggccaggcacagtggcacatgcctgtaatcccagcattttgggaggccgagccaggtggatcacttgaggtcaggagtttcgagaccagcctggacaacgtggtgaaacctcatctctactaaaaatacaaaaaaaaaaaaaaa

SEQ ID NO: 213142 - DNA, 686 bp, Homo Sapiens; identical to SEQ ID NO: 45001

SEQ ID NO: 213143 - DNA, 462 bp, Homo Sapiens
  misc_feature (25)..(25): n is a, c, g, or t
  misc_feature (423)..(423): n is a, c, g, or t
ttttttttttttttaaactgaaatnacgtttattccttgtttctggctatcacaatgagacaaattttaaaacaccaagttttaaagactgaacagtgtgatttaacatgatgtaaccatgagaatcccgtattattacaatcccacaatctaaaaactctacttcacataatttgcactctaggccttttattcttcttgctcaagcagcctggtgcctttaggtaacttgaaagatagtggaaattgatataagaggcatgtttctgaaagccccctacgtccaacaacagatttaacttttctggtagactgaaattaaaatttcctttgaacagttcgctaggttctttgaaggattatttgttttccagtttgttattcaaaatgttaatcttatacttgctaggcacgatgagtagngacttatacaaagtgtttagaaaatgaaggaccctccat

SEQ ID NO: 213144 - DNA, 760 bp, Homo Sapiens
  misc_feature (717)..(717): n is a, c, g, or t
tcttggtagtgtgcaagactctgggacggcatgagaaaggcagaaagggagcaaaggagctggtggggtgtcacagggcctatgtatgaggcagatgtgagttctgcatccagttttgcaatttatccatttacctgcctgagacttggaaacacctactttatagtcctgattcaagtgttggcggatggaagggaggagactcctgaccctcagaatgagatcaatggcttttcaaaagcagcacaccaaactgtcaaagtggtgatccctcttcatttgacatgctcacaaagaggagaataagacaagaaagcaagctaacccagaaacagtgaggtgacagtgcgcctcaaacacaggaaaataaaatgcataactatactgattggatgctgctcaaaatcagcctacatgccatctttggtacgtgtgaacaaagttaccaattcctattctaactatgatatactcaaaactgtacaatcagtaatgggatgctctaaagacaaaagaactgcaaaccctttttaaaaaattattttcagtaacagtgttactttttggtattaagattgtaagaataccttgtggataatgtggaacaaaccaaatgaatacttatgtgaatgtgatattctcaaattatcatccctggtattccagagtaacaagattcttggtggtgacagaaggcaatacaaataagatagaagntaaataaaaaccttgtagtcttcaatttaaaaaaaaaaaaaaa

SEQ ID NO: 213145 - DNA, 747 bp, Homo Sapiens
  misc_feature (672)..(672): n is a, c, g, or t
ataatccatagtccttggggtcccagcaaagtcagttttcctacaagttgtgtttgttttgtggaagcccaaagaagtggattgagagagaagagatttttatctaaggtggaaggtttttcaactagcccctaaaggtctttggtagttaattaacattcaacagacccacagcaactctggtgtcagaagctataaatggtctggccaaacaagactcagagtattttctgaaatcctgagctgcaaggttctgcctcacctgtctctccactctgacatcacgaaatcagcaaaaccagatatttattctcctcactcccagcagatacgaggacaccaacaatgcagttgatccctctgggcctgagtctcccatctgaaacatggggaattggggtaggtcaagctttttgaaactgcaaaacctctacctgtttttaaaaatgagatcttttgaccaggcacagtggctcacacctaaaatcccagcactttgggaggctgaagcaggtggatcatctgaggtcaggagtttgagatcagcctggtcaacatggtgaaaccccgtctctactaaaaatacaaacattagctgggcatggtggtgggtgcctgtaatcccaactactcgagaggctgaggcaggagaatcgcttaaacttgggaggntgcagtgagctgagaccacaccactgccctctagcctgggtgacggagtgagactatctcaaaaaaaaaaaaaaa

SEQ ID NO: 213146 - DNA, 681 bp, Homo Sapiens; identical to SEQ ID NO: 49011
  misc_feature (21)..(21): n is a, c, g, or t
  misc_feature (638)..(638): n is a, c, g, or t

SEQ ID NO: 213147 - DNA, 386 bp, Homo Sapiens
  misc_feature (48)..(48): n is a, c, g, or t
  misc_feature (53)..(53): n is a, c, g, or t
  misc_feature (80)..(80): n is a, c, g, or t
  misc_feature (173)..(173): n is a, c, g, or t
  misc_feature (225)..(225): n is a, c, g, or t
  misc_feature (252)..(252): n is a, c, g, or t
  misc_feature (255)..(255): n is a, c, g, or t
  misc_feature (280)..(280): n is a, c, g, or t
  misc_feature (326)..(326): n is a, c, g, or t
  misc_feature (336)..(336): n is a, c, g, or t
ttttttttttttttgaggcggagtctcactttgtcaccaggctggagngcagnggcatgatcttggctcactgccacctntgactcctgggttcaagcgattctcagcctcctgagtagctgggactacaggcgcgcgccatcacgtccagctaatttttgtatctttagtanagaacaaggtttcaccatgtaggccaggatggtctcaatctcttgaacttgngatccacccgcctcggcatcccaaagnggngggattacaaggcgtgagccaccgngtctggcctatatcatatttttattgaaccttttctatacctttanatacatttanatacacaaatacttaccattgcctacagtaaacagtatggtaatatgcta

SEQ ID NO: 213148 - DNA, 456 bp, Homo Sapiens
ttttttttttttttaaagttcacaaaccccttgaactttatccatgagattttctgatgacccaatgacttaatcctgctactgacttaatcaaaacccagtccctacagaagagacctgctcccccgtcacagcgcccccccggccccccatgccgcttattttaaaagcgcagctcccacaggctgcctttccttcagtttctgtccatgcccccagccccaggctgccctctcttggcggcaccgtcccaccccgcctgctgcactgagcccgctgggcctgggggactcttgctcagtagaacccgaggccagcaaaagctcttagcccaggatggctgcagcagcgacagtcctgaaggctacagagacacctggaaagggaacaaggagagcacgacagtccctgtgctgaggatccagggtggtggcggcaggggttagggtacagtct

SEQ ID NO: 213149 - DNA, 598 bp, Homo Sapiens; identical to SEQ ID NO: 53035
  misc_feature (481)..(481): n is a, c, g, or t

SEQ ID NO: 213150 - DNA, 504 bp, Homo Sapiens
  misc_feature (14)..(14): n is a, c, g, or t
  misc_feature (19)..(19): n is a, c, g, or t
  misc_feature (34)..(34): n is a, c, g, or t
tttttttttttttngcatnaaacacatttatttncttatattgagtatacaagaacagagagcacacgcatacagcacggagcactgaggtgggggagcatggggacgagaaaggagagaagggtgtgagtaaaaaggaacaggacagcatcgcaattggttgttaaggtgcttttgaaaaaaaaaattatttcgagtgatgttgctcatgcagtttcaggccagtcttggaatgtgcttgcaggattcaaaaactgaaacaggtcctggtacttcctgtaccctcagatggaaaagatccagagaaaacaaaataagagaaaatgaagacccatgagatagcaaagtagaaaaagaccctggagagcatctggttctttctgcttattttgcaagtcgggaaactgaggcccaagagggggaatggggatagcctgatgtcacatggtgagttaggagctgagccaggatggtcacccagaactcctaaccgccctcagggac

SEQ ID NO: 213151 - DNA, 486 bp, Homo Sapiens
agcttaagaattatccgcctcactctcttttttagaaataggagggaaaggtagagtggaaattgatttcttgcagagactgaggcgctgaatgatagagggaataaacatttgccctggataaaaatgttcttggctgttgtccagctctaatgatgtcctagagcagaagtgtttcttctgatgtctcattttaacaagaggatgatgtctgtgtatgtctctgtgttttagagaggctggcaaatgctgctaagaggatctgaggttcacataaagaggatgaaaattctgaattactttcattgcaaataaaccttaacaattgtgagagttagagagcatacttttcacataagactttggtatgctgcctaaagctacttacataatttgctattcagagaaatgcatttgtttattgaggacccacccggacttaaattggaaaaatgtaacattcagatttttattttatatgtgaaa

SEQ ID NO: 213152 - DNA, 606 bp, Homo Sapiens; identical to SEQ ID NO: 44351

SEQ ID NO: 213153 - DNA, 462 bp, Homo Sapiens
ttttttttttttttgtttgagatgaggtttctccatgttgcctaggctggtctgggaaccctggcctcaagtgatccgtccacctcagcctcccaaagtgctgggataacaggcgtgagccaccgtgcccggccctccagtctaaggtattttgttacaggagcagcaatggaccaggactctgcgaaactgcacggtctcctcttttcctccccagcctctggaaaggctgcccacgggcttatctccataaatcaaagaagcctgacctgtgtgatgtgagtggtgcagacaccacagctcaaacgcaccatcgccgggcggctcactcagggtcccagcagacgccccacacttggcccaccaggaaacctcagccactctctcccttggctcttgacttgcaagcacacatgcttcttcggcaaaacgatttcagaggcgacacaatgggggctcgca

SEQ ID NO: 213154 - DNA, 577 bp, Homo Sapiens
tgatgatccagctcaccgcagcctcaactacctgcactcaagcaatcctcccatgctcagcctcccaagtagctgggaccacagacacgtgccaccacacctggccaattttttttttattgtttatagagacagagtcttgctatgttgcccgggctgtggccctattttttaaagtacagtatttaaaaagaattttattcctttagtttttggtccacgatgtgcatgggggactgtgctgtgtgccacaaaggtgatgagggtggaaaagatgcggctcccactattcgtgtggttggagatgcaccagctaatttggaggctttcttgattccatacaaatatgacattgaaattagagttaagctcactcaggagagaggagattgccactgtttctaggactttaaagttgctgattcaacggagcttcaggtttaaagtcttcaggtttgatagactatatcagttctatcaaactagtttttgtgatattccagtatgttcttgcatgttaatattttagaatcctaaaaaaaatttaagtagatataaaactatgtcaatctctgaa

SEQ ID NO: 213155 - DNA, 606 bp, Homo Sapiens; identical to SEQ ID NO: 45801

SEQ ID NO: 213156 - DNA, 606 bp, Homo Sapiens; identical to SEQ ID NO: 41234
  misc_feature (12)..(12): n is a, c, g, or t

SEQ ID NO: 213157 - DNA, 671 bp, Homo Sapiens; identical to SEQ ID NO: 51928

SEQ ID NO: 213158 - DNA, 725 bp, Homo Sapiens
agttagtatatattagtgatacgaaaggaacatcttaaaggaacatcttttggaaatactatgatgctgtaatggatgctaattttcatattgggtagaaaatgtgagctgatagtctaataaaaatcgcaagaggtctctattaattttagcttgttcttatctccctgagaaatgtacagatgcgaggatgggcatgaagaactctatgcatttgcttgggtttggatattctatagctagcatttagtgatctggtgatgataaacttaactatatgtttactttttttcctttttatttcctctaccctcattttaaacttttgaagtgattttagcctaaatgagtaaaaattcaattggggaatgaaatgactccttctaaaacagagctcaccttctgcaactacaaaggcaaaaaaaaacaacaacaacaacaaacttacatcaggctgatttgcaaatcacaagttttactttgttttatgctgctttcttacattgaacttggttattttatttacatccacaatggatagtttcagtggtttgatgaaaatcatttttatgtacaaaaattggaagacttaacatgaaaggttattattgataaactcatagtaattttaaaagtacattccttaaagttgtaccctatttgttggtacaatacatttttcttttggtggtttgacttcagtcctttgtaaaaaaaaaaaaaaa

SEQ ID NO: 213159 - DNA, 486 bp, Homo Sapiens
  misc_feature (7)..(7): n is a, c, g, or t
cctaatnggctgaggtgtcttaagccttttgctcacaaaacctggcacaatggctaattcccagagtgtgaaacttcctaagtataaatggttgtctgtttttgtaacttaaaaaaaaaaaaaaaagtttggccgggtgcggtggctcacgcctgtaatcccagcactttgggaggccaaggtggggggatcacaaggtcactagatggcgagcatcctggccaacatggtgaaaccccgtctctactaaaaacacaaaagttagctgagcgtggtggcgggcgcctgtagtcccagccactcgggaggctgagacaggagaatcgcttaaacctgggaggcggagagtacagtgagccaagatcgcgccactgcactccggcctgatgacagagcgagattccgtcttaaaaaaaaaaaaaaaaaaagtttgtttttaaaaaaatctaaataaaataactttgccccctgaaaaaaaaaaaaaaa

SEQ ID NO: 213160 - DNA, 770 bp, Homo Sapiens; identical to SEQ ID NO: 49035
  misc_feature (717)..(717): n is a, c, g, or t

SEQ ID NO: 213161 - DNA, 639 bp, Homo Sapiens
  misc_feature (12)..(12): n is a, c, g, or t
  misc_feature (15)..(15): n is a, c, g, or t
  misc_feature (20)..(20): n is a, c, g, or t
attggccctcgnggnccagnaattcggaacgaggttcctgctctttaaaaaacaaccttcaacctctgattatttattccaacaacagctcttcagtagggtaaaagtcttaacagttcttcaaacgaacaatattcttttgtatttttcttcagagatagcaaatgttataaatggcctactctgatttaaaaacctaagttccgatgatgatgaaacattaactcttaaatatacattttgatttatagcaataataacaattgtaacaacagcaattaagaacagcatctggtgaattcttggcaatgtttcctggtctcaaaacagtaagaacaatttgaagtctgttctttagaatgccctactcagctgcataatgtttagaaaattaaagagtctgtattttaaatatttttaggtaattattgcgggacattgtcttatggtgtcctgatgtacgtggggtgtgcatgtgtgtgtgtgtgtgtgtgcatgtgtctttgtgtgtgtgagaaggacagagagaaatgtatgtttcactgaaacatttgaaacgaccaatttcactttattgtgcctgtaaaatgttagttttaaaataaataaaaataatatgaaaataaaaaaaaaaaaaaa

SEQ ID NO: 213162 - DNA, 677 bp, Homo Sapiens
ttttttttttttttaagataatatcagtaagcaatttattaaagagtctgccatccatcataggaatctggaacagtaatgatgcactgaaaataagtattcaccccaggtttcttttcctcctcccaaattccttcaatatcaatatctctttggtaaattgttaatagtattttgctctttgtccttttggaaacaagcccaggaatgagaagacaccaacagcagctgtcacaaactcaacggtacttatcgctcggttggcctgctctgaaactccttctccatagcgaagcaatgtcacaaaatgttcacagttgttgacaagtaagttataggccacctcctgtccaattacaaactctgaccgctttatgatttcttccacagggagaggggggtacgtttcatcgtatttattgtttattctgtatgtgtcatttcccacaacatccttcaagagctgcattttcaccagggccttactgctgaatacagacttggcgcttgtaaaggacgcaggaatgccatctacaggtgctatgttgataacgtaaccatcacccaagtacagggcccagtgctgatagccaggacggaacacttcgatcaagtcccctgggcaggggttgccagggtagttcaaactgaagcaatcattaaacgccatctcactc

SEQ ID NO: 213163 - DNA, 535 bp, Homo Sapiens
ttttttttttttttgttgtagaggcatatttattgacatgcaaagatgtttacagtatacagtggggggaagcaagttacaaacatttacagtatgatcttgttttagtttaactggcagaaaatctcaaagcatataactccatattttcacacatagaaactttcatatcagcttagaccagggattataattcccaccctgagtcttagagaactcagccatagcctaaatgtcctgggaatgctttctggtccataccaacttccaagaatcactatcttgtaggttgacacagcaacctcttctagctttcctgttttgtgttgttgaagctgcaattctgggtctaaatttctctaattaagtctattttgtagtgttagctggcacaaatgcagaaatgcccaggcttgcctactagtaaaagataaagccccttggcctttcatatgacacataggagaataaatcataaatggtaaaaaaaaaaaaaaaaaattaaggtatgatttcgcaaggaggaaaaaagcaa

SEQ ID NO: 213164 - DNA, 613 bp, Homo Sapiens
  misc_feature (9)..(9): n is a, c, g, or t
cctggactnagcagtccccagcctcagccttccgagtgctgggattacaggcatgagactgcaactggccacgccttttttttgtttaatgaaaccaatgacaatgtaaaagtctgtgctttagcatttcttcttaaagaacgatgaaactctttgatgaattaagatggaagattagctgagctgaacttactattgatagcgtgtaaactggttgcatctatttggagttcttactgtgacgagaggtctctgaaaggaatgtatttgttgaaaagtctttggtacaaaacaagaaaggtaacctttatcaaaaagaccaaagaaattctcattgtcctaggtcatgaaataatactcagggcatcctcctcacaacttggaaaatatagaacttgtgcattacctcatcccactggcttccagattatatgtgcaagagatatttgtgtgagggaatgagcacttctaagtcagtgaaagctaccaacctgtatataccctctgacttttttttggagacaaaattttgctcttgttgcccaggctgagattgtgccactgcacttcagcctgggctacagaatgagacctatccaaaaaaaaaaaaaaa

SEQ ID NO: 213165 - DNA, 697 bp, Homo Sapiens; identical to SEQ ID NO: 50535
  misc_feature (6)..(6): n is a, c, g, or t

SEQ ID NO: 213166 - DNA, 589 bp, Homo Sapiens; identical to SEQ ID NO: 51581

SEQ ID NO: 213167 - DNA, 504 bp, Homo Sapiens
ttttttttttttttgctgaattggtattgactttttctattaaaatgggtttattcaatggatcagtaaacaggcagcttctttcacatctgggtgataaaaccatttttatcatcaccagaagtcaccccgccctcgccttcctcctcctaaggtctgtgggttgatgtgtgcgttttgtcactgctattgatacaacctcattctacaaggcctgctcgggtgcgcgcttgtgaaaaatgaccgactgtctctgctggtactgctgcttgcgcctcttttttttgtcacactggcacagcagcagcatcttgaaagtggttctgaatgttttgttgcacagagcatagcacacggggttcacggtgctgttgatgtagcacagccagtagcccagattccaaaaggttttgggtatgcagctgtcacaaaaggtgttcaccagaaccatgatgttgtatggggtccaagtgatgatgaaggcaagcaagatcgcactgaggg

SEQ ID NO: 213168 - DNA, 720 bp, Homo Sapiens
ggacggccgggggcattcgtattgcgccgctagaggtgaaattcttggaccggcgcaagacggaccagagcgaaagcatttgccaagaatgttttcattaatcaagaaaccgtatcagtgtaatgagtgtgggaaggcatttatccagaagacaaccctcactgttcatcagagaactcacacaggagagaaaccctatatttgcaatgaatgtgggaagtccttctgccaaaagacaaccctcactctccaccagagaattcacacgggggaaaaaccctatatttgtaatgaatgtgggaagtccttccgccagaaggcaatcctcactgttcatcacagaatacatacaggagaaaaatccaatgggtgtcctcagtgtgggaaagccttcagtaggaaatcaaacctcattcgccatcagaaaactcacacaggcgagaaaccatatgaatgtaaacagtgtgggaagttcttcagttgtaagtcaaacctcattgtccatcagaaaactcacaaggtagaaaccatgggaattcagtaagtaatgtggctttttttgtaaaaaaatgttaagtcatagtaaaccctgtagatgatgttgcttgcaagcgtaatatccaacagtttaaggtactataccacatggtaacctactgtttgccagcctgtaaaacacacacacacacacacacacacacacacaaatattattagaca

SEQ ID NO: 213169 - DNA, 422 bp, Homo Sapiens; identical to SEQ ID NO: 49056

SEQ ID NO: 213170 - DNA, 463 bp, Homo Sapiens
ttttttttttttttacttgatatgttttatttcttgacttggacagttacatagttgttacaattactcattaacatgttcatttatgtttatgtacctttctatatacagattttaaaatagaagtttttttaatattgaaaacaatccagatttgatggaagacacaaatctgcagattcataatgaacctaaatccatgataaatctatagctagacatataataaaaactgcgtatctccaaagtaaaagatattatcttagaacagctcaagagatgtcagttctaaatctacagctctaaggacataatttcagaaggtataaagaattctacctagaaggaacatctgacacacaagaaaaaaggtaagcccccaccatgtcccatcaaaaaaataaacattgactatataaaatactaataatatccaatttggagatttaataaagaacttgtg

SEQ ID NO: 213171 - DNA, 470 bp, Homo Sapiens
ccgtgggcgtcgtggacttcccccgcaccgaggccgggcacctggcaggcactgtgcatcctcagctgcaggaccgagacttccagccactgcagcctggtgctcccatcttccagatgttcagtggggaggacctgctctatgagggagagtccacggtgtaccccgtgttcattaacgaggctgcctactatgagaagggcgttgcctttgtccagactgagaagttcacattcaccgtgcctgccatgcccgcgctgacccctgccccgagcccagcttcctaacccaagacacacctccccaacctcagtcttcccatctgaacgatgggtcctgaggcacagctctgagcacagaggtcccttctgccacctaccatgcaccatgttccttgccaggcctccccaacccctggcctcaatttccctttctataaaatggaagatgtccagaaaaaaaaaaaaaaa

SEQ ID NO: 213172 - DNA, 682 bp, Homo Sapiens; identical to SEQ ID NO: 40423
  misc_feature (615)..(615): n is a, c, g, or t

SEQ ID NO: 213173 - DNA, 585 bp, Homo Sapiens; identical to SEQ ID NO: 45145
  misc_feature (12)..(12): n is a, c, g, or t

SEQ ID NO: 213174 - DNA, 595 bp, Homo Sapiens; identical to SEQ ID NO: 40479

SEQ ID NO: 213175 - DNA, 614 bp, Homo Sapiens; identical to SEQ ID NO: 51890

SEQ ID NO: 213176 - DNA, 538 bp, Homo Sapiens
ttttttttttttttactatttttgtctattgatggatctccagtgtctagaacagccctttcccagagcaggtgcttaataaatctctgttgaattaataaatttttttagaattaaagtcaacagtcctgtgaacacccaagttgagtctcttaagtaggcccaaggccccacgagtaatcactggtcctctggctcttgcacagaagttcgagtggggtaaggggtaattcaggccccaaaagctatttttagagcaaaaacttcagaatgattttccacaaagaaccagagaatttagttcacttcattggcatagcactggctgagctcagtgagaaacaccccagattttaattgatatttccatttgttaactgttaaatgtgaaaccatgtcattctaacattgtttcttaaaccatttcagtcaagagtttaatggaccatttgaaaatatttaatattttactgtcacaacaatttgaattgtcctatgtttttcttatagtctaataccttgttaataataacccata

SEQ ID NO: 213177 - DNA, 480 bp, Homo Sapiens
ccactaattatgttaccactaggagttactcagtaagtcacattttgtttatacttatatacacacactctctcatacacacagtggtcaaatatcaataactgtaacaactttatcaactttaagctgaagcttcataacagaaaaagttctcatcataaaaagggatgtttattatgctctgtttaagaaaccaagggcctaaagaacacaacaaattaaagatacagactttgaatttttggaaaatacggttatgtggagcatttcattgccacagtggtgcctggaatgtgaattgttaactctgcatgtgtctttcacattgatatttgcacaggagcacacacacgtccatgctcccaaacagctatgggaagatggcgatctctaccaccaactggggaagtctggaaacctaggaggacaggccttcgtggggcagcaacatggaatccagagtctaagatcactagttgg

SEQ ID NO: 213178 - DNA, 561 bp, Homo Sapiens
  misc_feature (27)..(27): n is a, c, g, or t
tttttttttttttactttatagacatnctttttaatgttttactttaaaacaaataatcccagtaaaagagagcaaaggaaattacactttaatgatagcttgaaatggatatggtgttcccgatttatttgttttcaggaaacagacaattgcattgtcatacatgacttagaactgcttacttaaatgcacattattagattagattaagtttctcttacaaaaacacaaccatgtcatttaaggcgaaaaatctcagcttctagggagacaagttaatatttatgatatttcctctatctgatttagtgaaatgatccattaatttagttagccaggtttcatcatccttacagttttgctttgcaaatggcatgagaattggtcaatttgtgcctgatttcctcctctctagtagacttattttacttgcaaattaagaacttcagaatcactgaatcaatgggaggtgagaaaggcaccttagaacagatcaggacttaaaaactcaataaagttattttaaacaaaacttgcaatctacaaatattaatttagtt

SEQ ID NO: 213179 - DNA, 418 bp, Homo Sapiens; identical to SEQ ID NO: 40489

SEQ ID NO: 213180 - DNA, 510 bp, Homo Sapiens
ttttttttttttttgagacggagtcccgctctgtcgtccaggctggagtgcagcgggtttaggctttttaagggaccccctcccaatcagggcaacagagggatgcccaaggtgaccgccaacaccttcctggggggctgactccagggctcaggaggaagggaccagccttcttcgccaagagggggagccctagcatgcacttctgggctggctttacccaaatagtgaggcaccccaggtgtggagacctccctctccccactccaaacaccactgggtcagggggctgccagccagccacctccagcagcccaggcaggaagccggaaatgatgcagcccaaattcctcttggtggggtttcctgtaagtggggagccgcccagggcaggatcataaatgggctgatctgaggtctgtggtcctaccggagaagccaggcatggaaggctgactatatatccacggccaatggctccagagccctaagccatgggcagaccagatg

SEQ ID NO: 213181 - DNA, 743 bp, Homo Sapiens; identical to SEQ ID NO: 47310

SEQ ID NO: 213182 - DNA, 574 bp, Homo Sapiens
atgattagtcccaaatgtcaaaagcactgcatttcggaaaaccgtcctagtggtagagaaagaagatgggagaaggactttttgcaggaaaattctcttactgtaatgtttcttactccaacacaaaacacatacacacacatatatacatgcacacccacacagataaaacagacaaatcagtgcattgctttgtgggcctcacatcagcctctgaggagacttgcatctctcagtggtgggggacacattcagggtttctagacgtgtcccaaaccactcactttccctgaattttcagcatttaggagaaatttccatggagaagaagaatcgctgtctggtcatccatgcaatttcctgctcagttttaatagcagctgggcttctccctgtctaaggttgaaaccaaaaggctgtattttcctgtgggggcgagagagagagagagagagagcgagagagagcaagagtgagagagcgcttacaaacgcctccctggacatttagaatttctaaatagaattttggctcaagtcttgaaaagcacagagtgatgtcagctgaggcggcc

SEQ ID NO: 213183 - DNA, 524 bp, Homo Sapiens
ttttttttttttttggtggtttaaatatctttattgatactaacctcacccaccatcctgtggccagcagttctggggagcccagtatccagaggcctttagactggcttttttccagtctaaaaaactgtttcctcctagaggccaaggggagggagggcctgtacagtgtcctttaaacgctccccgagcgccttttcggggccgtctggcgccctgggccttcgtgggtgggcgttcctctcaagcccctcgcctcaccatttccagagccctgggagttgggctttggcagggagaggctgggctcgagcggcgagaggcgcccggtgccggtgccctgaggtcccacaggtgcgagccaccgctgcgcgaagtcagtctagcggccgggcggcgggtcacaggcagaggctgagctccttgcgcacacggcagcggtggcactgtactacgcagcaccagtggaagcggcacaggcagttctcttcgagctgcacgctctcctggcggtgcccgcggcc

SEQ ID NO: 213184 - DNA, 745 bp, Homo Sapiens
ttttttttttttttagaataatatattttacttcttataatgtaaaaaatataatcgtttgagtggttttcagcatgatctgttaattttgaatacagagaatgaacaaagcaggtaaatatatgtatatgctgaataatgtaattccatatacaattcacagttagatgcacttaattgtggaaaataaaggaagacaataacatcaagatctttttccaaaacacggtaaaaataacgttcacatgcattaaacatttcaagccatctcagtatatgtctttcttgagtaagtagtgaaccaatggaccagtggttattgttggagaaaacaattaggcaactcatcaatgcgctatttatacaatcttagtgactatttaccacttcacctaagtagactttcccactcatttgaagctattgctatctataaataaatggcaacaggaaatgtttcacaagggcctttgatttccaaaactctcaaattccacagcaaagactcaatttaaggcaattatttatgcactgaatatttgaatgaagatgtattattttccttaagtgaaaaaagctgatactattttgtaatgataaaatttgtataccatagtagaaaatgatttgcaattatgtgttaggacttttcatattccatattgaaacatagtgattctgtagctggcatcagctgtaccctgacttcacatgaatggcctggaggggatcatatttttaaaca

SEQ ID NO: 213185 - DNA, 496 bp, Homo Sapiens
ttttttttttttttaacaaaacactagaatttttagctctgatttggtgcatagacagcatttctcctcacaaaggccaacacagaaaaagatacaaatacattcatccagctaatatttagttttatgacacagagtttttcaaacaagtttaagtgtcacctgaagagcatgttaaaaagtttaagttatcacttggagagcagatttcttggcctcgccccttgtgattctgtttgaggggtgtgcagatgttacttttagaaacacttctgtgtcaggcactgaagatacacaagaacgtaatctctccaccaaagagatgacaatctagttggagatcaatctaactatgtaataattacagcctaataaggttgcagggtgctatgagagcatggaaggggggaacctactccaacatggaaagggagctgggaaaggataaagggagctttagcaagcacaggccagctggatgaaaggtcgggggtat

SEQ ID NO: 213186 - DNA, 275 bp, Homo Sapiens; identical to SEQ ID NO: 48972

SEQ ID NO: 213187 - DNA, 635 bp, Homo Sapiens; identical to SEQ ID NO: 47037

SEQ ID NO: 213188 - DNA, 709 bp, Homo Sapiens; identical to SEQ ID NO: 40526
  misc_feature (507)..(507): n is a, c, g, or t
  misc_feature (667)..(667): n is a, c, g, or t

SEQ ID NO: 213189 - DNA, 696 bp, Homo Sapiens; identical to SEQ ID NO: 52829
  misc_feature (684)..(684): n is a, c, g, or t

SEQ ID NO: 213190 - DNA, 481 bp, Homo Sapiens
gaccagtgcacctaaataataaatatcctcctcaatcccttggtctctctgattccttatatatcccgatacatttctgggggctcatcaggattggagatgacagatttactgtcccctttgcctgcgatactaggtccccggggccaggagagacccggcatccaaggtgtgccacagctgagcttcacccggatatatagaccagctctccccacgtcccagcaccctgcctggcagcgcaatggaaccgaggatggggctgcaggacgataccagcacttcaggaactgtgacagaatcttgctccgctgccaaggctggagtgcactggttcaatctcggctcactgcaaactctgcctcccaagttcaagtgattctcctgtgtcagtttctttaggaatacagcactccatattgctaccataataatgaaacggattcccatggctacagcgatgaagcagcagaaaaaaaat

SEQ ID NO: 213191 - DNA, 545 bp, Homo Sapiens
ttttttttttttttctagaaacattttatttaaaatttaaaaccatattacttcatacagcaaactgtgcactttgatatatcacagtgtcttaaaaaggaaaataatcagatttgtttggaaatttatttacatcagcctagaatgattggcaagtaacacagttactatgaaacccaaattgttacaaaatgtttacaaaaaactatattcatagaaattctgcatgtccacaaagggcatcccctgaatggcccagagaccagtgtgtgggaaccatgttgagtgggagtggggggcgtccaggcactctggtctgggtggtgggacaggtctagggtctcagaggcccatggtgctccctgggggctcagcccagagcctgggaactgaggcccctaccatgggaggcccaaccaggaagtcggcccaggcagaggtgggctgggggcttggcgcacagtggtaagaggacccatgatccctacggaaccaagacaggatgctcctcatggggctggagtcaggcgtgcttggtcagggcc

SEQ ID NO: 213192 - DNA, 487 bp, Homo Sapiens
aaaatatttcccctagaagtagaaaaggctcatgtgctgatggataattttgagtcttctccattctctgtgaatgacccccttccccaggcatccccacctcctaccttgttcttagagcaaactaaagccaactgagggtgcacacacagccatgagcccacctgcccaggactactcccatctgcttcttcccgtccccgtggaagtggcccctgatatggattgtatctgtatccccacccaaatctcaggtagaattggatctgtgtccccacccaagtctcaggtagacttgtaatccccagtgttggaggaggggcccagtgggaggtgattggatcatgggggtggatttctcccttactgttctcatgatagtgagtgagttctcatgagatctggttttttgagtgtgtggcccctccccctctccttttgctctcttcctctttctccggccatgtaagatatgcctccttctcct

SEQ ID NO: 213193 - DNA, 541 bp, Homo Sapiens
  misc_feature (18)..(18): n is a, c, g, or t
  misc_feature (25)..(25): n is a, c, g, or t
  misc_feature (27)..(27): n is a, c, g, or t
ttttttttttttttaatnccccagnanagtggattggaggcactgtgagcatgcctctaccacttggaaagacaaaatagtgtggagagattcacactgtgaatttttttttcaggaaaaaacccagaaacttactacgaggcagatggaaaactctaagtccctagagtgtgagaggaggataaactacctctaggatatgcactcctactggggaacctggcaatccaggccacaagggaagccctcaaccctacccagcactaaagctgattcagtgagccgtggggagtatatgagaaggagtagcactggacatgctttcagtgcactcccagtctccagcaaggacagagggaagccactgctgatcctacctcacaggggaccttgtggaagtcagccagctaactcagacagcaatcacaggttgagagaagctcaactgagattcacgatatgagtgggaacaagctcccttggccagaactgaggggcaagtgggaagtgtgctgcagccataagagagcacaggggtgcc

SEQ ID NO: 213194 - DNA, 470 bp, Homo Sapiens
  misc_feature (456)..(456): n is a, c, g, or t
ttttttttttttttaaagagtcataaaagtttattatatgaaagaaataacatggcttctgtacatctatttacagaacagagacttatttacagtgagatggaggccttggtgttggtgagggacagacagagagtgaggaggcgtgagcagcctgcctcccatggctcgaaaacagggaaccccagcaggaaggggagcagcaaaagctggtgggggaaccggcgttcctgttcttcctcaatggagacctggtgagcatgtagcaggtgggatggaacccagagtccacgcaggaccctggaggtgcaagggagatgcttgagttgaacccagaacattctcgggttgatcacagtgtccttggggtgctctggggaaagttgtgtgcccctctgcccctgacgctgtccgcagctgcagaggggaaatgtccctggggtcacagctcgctgnagcggacagcaggt

SEQ ID NO: 213195 - DNA, 508 bp, Homo Sapiens
cacctggtcacttatacacgcatttctttaaaatatctgattaggtatttatagtttgaaagagatgatgtttccttgactgagcatcttgagaaatcaagatttagttgacaattagacatgaggagaatagagagctagaagaccttgcataaactgattgaccaagagaatagatacactaatcatgtctacaggaacagaaaataaaagagacagagaagagataataaatctgatggtaaaaaaaaaaaaaggcaggaagattacgaatggcttctactctctgggtgtggtggcgcatgcctgtaatctcagcacttgagctggggaggtcaaggctgcagtgagcctaggtagtgccactgcactccagcctggacacaagagtgagagagaccctgtctccaaaaaaaatgatttgatcatagcctcatatatgatttgactgcccccttgtggtaatttacatttgtcaatggtttagggagacttgcctgtataccgg

SEQ ID NO: 213196 - DNA, 545 bp, Homo Sapiens
ttttttttttttttggtgctactgtaaacaatgctatggtgatcatctttgtaactgagtctttgaggtcagtaacaaactatcctctggagtgatttatgctgactaagcagtgactgagcaagaatacaggtttccccattttggttggcattacctttacccctgttctaagcacattagaaaagccctgaggcctcagctgtgggttttgggctcttccaaggagacaaaggagctatcataatgctgggaatgatggatccaggctgtggggatgctattgtggacacagggcagcatcagagcttggaaaagcctgcatggctggccaggctcagcgtttccaagaaaggatctaaagatggatgaagcatctcctatcctcaacaggcagcctcagggatggctatttcagctaggtgctttttacctccaagtaattaagcatcctgactcaaccagcgtaggtggcaaggaaaatttactatcttaatgccaaggcaatttgccaaagaggaaccagaatgtgcaatacacaagtg

SEQ ID NO: 213197 - DNA, 499 bp, Homo Sapiens
ttttttttttttttatatagagtttatatttaatggtgttgaatagtgttcagacgacagtcatgaaatggtagtgggaagacaagaattcaattgcccacaaccaggttcatcagcacaatctatcagaattctagtcattttctttaacgctgtaataaaaccactttgcaagtggtaattttttacacttatttacaccacatttttaaaaaatatgaaatcacatatcctagctacatgtagatttaaaacatttcccagtgaagccatgattttctgaatttggcctcttcattcttctgagtatttgagagggagaagttacaaacgagatggagctaccatgatggtttttttaataaagaaaatctaaaatctgaagatagacagatatgtgagatattattagatgaagcaatataattacattcttgcacgttgaaactatgcctttccaaatttccacaaatatagaaattgccaaaggagccactta

SEQ ID NO: 213198 - DNA, 468 bp, Homo Sapiens
  misc_feature (20)..(20): n is a, c, g, or t
ttttttttttttttattttntatatgtatatatttattatgtcacaaatagctacatactggataagccagaaagatgaggaaacatgtttgcatctcacactagtgcagagattctgaaaaagaccccacttggaataccaaaccacacattagattgttctgttcccaattgtgtgccaaagtgcactctgaactgttttggtaaagccgaccgtggagtcatatgaggctgaataacttgggagaatgtaagtctgcaaaataaacctaggactggattgatcctcaggccacttggcaggtgaatgtctcgggagtgaatatgagacaagcttcctgaaaaggcttatatgacttaaagaactttttgtttaagtgtttggtcccaaataaactattaagatatataaagtaattcactgctcaaaaattaccgtcagataaatattaagggaagaaccacttt

SEQ ID NO: 213199 - DNA, 499 bp, Homo Sapiens
ttttttttttttttgttttgcttgttctcctggtttggggacatccattcggcaccttgcttgctcctctgagctgctttgaaccttgatgcatggcgacagcgcaccagaacggtgacgaagatcacaacaatgaccaccatggcaccggcgatgatggcaatcatgatggttagatagtcctcattttgatagggttggctactatcccctatgttcctgtccaacggggtctccatagtcctgcggatcaagtcatagatataggaggcatttccagcagtgtcgttaacataaaggaatacaagcacaagcgtgtgcaaagacttagggtaccccaggtcacttatgttgaccaccaaacgatgcaatcccacatcagtaggtgctggtttttcttccagagtaatgttacctgttactggatcaatccggaataagcctttattgtttccactcactatagtatactttagttcagcgttcattccagtgtcaa

SEQ ID NO: 213200 - DNA, 450 bp, Homo Sapiens
aattcgcggccgcgtcgacaattactacatccctaaaagaaaaagtagctttcttttacttacaaaattggaaaagctagcatcttgactgctctacagacttgcatctgcgacccttctagtcataaatgtagtgtaagaagcccctgctgtgttctgacagtgaatttgtaaattagatttttggaactcaaagcagtttcctgtgttacctaaatgttgatatcatcctagaccatgccacagaagcctgtttatgtttaattgataatactgatgagtttgacactgatagtattactattgcattttgttatattactagccctggacattaaacaaaatacaaataataatataatgcacagatgttaaggcataatatacctgcttatagtttagaagaaaaaaaaaaaaaagtcgacgcggccgcgaatttagtagtagtag

SEQ ID NO: 213201 - DNA, 791 bp, Homo Sapiens
  misc_feature (10)..(10): n is a, c, g, or t
  misc_feature (755)..(755): n is a, c, g, or t
cgggcccagnaattcggcacgagcggcacgagtagtgtggaaggtcctttcagtcttcctgtgcctatcagtgatcctcattgccatgttcccttctggtgctcaaccggaggctccctgacagatgagtcctctgccagaggaaggctaagatgtagaggacaaatcgtgtcaaggaaaagaagcttgaaggagctaagaatgcttagcttagagaagacaagaggaaacaggacatggctttgggaagttcaaggatggtccagtgaaatacatactatacttttgcaccccagctaagctgacccatgatcagtaagtaggaaataaaaggccaatttctggctactcttgcccccaaccccatttcagtgaactatgaacctctattagatatgcaaggccggtgctaaatgctggagggctttggccctttccctcaaggagctagtctagtagggggtcagaaatacagatgggcctgaacataatgatggtttgacttccagtttttcaactttaggattgtgcaaaagctatacacattcggtagaaacagtacttcaagtatccatacaatcagtacagtattcaataaattacatgagacattcaacactttattataaaataggctttgtgttagatgagtttgcccaactgtaagctaatgtaagtgatctgagtaggtttaaggtagcctaggtgtattaaatgcatttttcacttaacggtattttcaacttttgttgggnttattgggatgtagccccattataagctgaaaagca

SEQ ID NO: 213202 - DNA, 494 bp, Homo Sapiens
  misc_feature (489)..(489): n is a, c, g, or t
ttttttttttttttgatttctcaaagctattatttattctgtacaaggttccactgtacattagacattcttctactcttgcttacacagtaaacaagtgtacacttgcccttgggctcaggttcacaggtcttctctggagaagggtgtcaggccagtaaaactcagggtgtctttctctgatgcctcctcctaggagcctggaatgtgccaggctccacggggcacaagccgggcccagctgtgtgggtgaacagctttactctccaggacagcacagagttttatccaactatgtagggcaaaattgagcccacaggaaagaaccatacaactgaggcaagatgtccccaaatacccaggctccagctcccagggcaggactggagaccagcgctaagaagagctgaggggtggcctgggcatccctgagaaactcggtccaaagggcctattgtctaggaggctctgagaagggggcgggggcanggaag

SEQ ID NO: 213203 - DNA, 491 bp, Homo Sapiens
tagagatgggatctcgccatcttgcctagactggtcttgaacacctgggctaagcgatcctccacttcagcctccccaagttcttggattacaggtgtcagccaccatgcccagctcctagtgtcctttttagggtcttaagcaccacaaagggaatcttgattaactagtgacaatcacaacaagtccacagccttgctcctagcctgcctccatacagacagcaattaaataccacctgtgtaaactgcaggagagtagttcagatttggctgagtaactttttcctggcatgaaagaaccggctctaatgactagttcattccagatttcactggacattagatctagtgctttgttttgtttgcaacatttcctatttgcccacacataaatggactttggggtctaaggccccactgctcttcaaatggacatgttctaggaagtagttatgaaaatcatctgtacctcaaacacagtatttaccc

SEQ ID NO: 213204 - DNA, 737 bp, Homo Sapiens; identical to SEQ ID NO: 49415
  misc_feature (10)..(10): n is a, c, g, or t

SEQ ID NO: 213205 - DNA, 533 bp, Homo Sapiens
ttttttttttttttagtacctgacagttttattatactttaggggaagagatggctagtgacaaggagaattcaagattgttcaaatctttacagaagatttttgatactagcaaatgtttctcaaagataaactagacaagttcagtatggacaaagaaacaaagaaaagcattataatcagatgtcctacgaaagctacagtgattcaacatgtgctttaatttatactgcttagatcctttgagttcagatgtcttgagtttttgaggacagtaaaacaagtaaaactgggatgaaattaaagctatgtggcaaattagtttcagttaaatcaggaatatctaatacaaagcttacaaactccaaaatagttcagccaatagagtaacttcccaaatgctggatttaagctttcatcacaaatttaaaaaggtaataattcttctagatctcaactctaggctgttaacaagtagcaactccttcatattaactttctgctcccaactatttctgaatcagatcttgctg

SEQ ID NO: 213206 - DNA, 777 bp, Homo Sapiens; identical to SEQ ID NO: 46756
  misc_feature (5)..(5): n is a, c, g, or t

SEQ ID NO: 213207 - DNA, 544 bp, Homo Sapiens; identical to SEQ ID NO: 46438

SEQ ID NO: 213208 - DNA, 533 bp, Homo Sapiens
ttttttttttttttgagttgtattttctaagtttatttttagttatttgtttttacagtcctctgcagcagggtttgctaaagtggatcaacagcaaagcccccaagtcagttcagcttctgacagtgaagacaagagactcaacaagtaacagaggaaactctggccccaggagccaggcaactgaccgcatctgcaggtgggaaccaaggccccaaactgcacagagcctcgggggcatgtttttcagagcaggcgaaattttggacacatgcggaacatcttatggtgtaaacagaggcactgctaaacaagccaagatgagcgctgccaggttcacacagtgtgctgctccaccagcctccattcacaatggcttacccatggaagaaaaacaccatcgccactggcagagggtctaaagttggcttgttatcctctccaaattcataatacaaaaagttagaagtggctaaaatgcaggcaacaataccaaaatatttttataaaaacaatggaaatgagaaagaagc

SEQ ID NO: 213209 - DNA, 528 bp, Homo Sapiens
ttttttttttttttctgttctcttatttattgacagtttcttttaattacaacacaatgaattgatggtaaatacagaagatgcaatagtataaaaagccatttaacccttccctaggttaagacacttacagcagacaaaaactgccccacccctaatcccctccttgaatggaaacaaaataaatataaattaataaatacaaaacaaatcactgcacagcccttaactctttgattgccatggcaagaaccatgctgatgattctagcttgtgacatttgtgtggttaaaggttgccgcagcagtcaaagggttatagcattgtaaacataagtactttgtggaaaagttcagtcatgttaatggtctatagcaatgagattaatagcatgaccccttgacctttaatgacgcaacattataaggagttaaaagagatagtagcttggtgagctgttacatagactagtcaaccactttatttaacaatgtgctatgaggccttgatttactaataaaagacaac

SEQ ID NO: 213210 - DNA, 555 bp, Homo Sapiens
ttttttttttttttgctagagatgggattttgctatattgcccagggtgatctcaaaggatcctcccaaagctctggcattacaggggtgagctatcacatttggcccacatttattgggcacttaacaatgtgcctggcaaagtgctaaccacttgatatgcattatctcacagaatcttcagaccaaacctatgatgtaagtactgttcacagtatagataagaaaattaaagaaacttgcccaaggccacaaagccactaaggggtgaaccatgattcaaacttaggtttgtctgtcttcagaagttaacttcctaaccactgaatcatatttcatctgttccactaaatacatttttctggggcttagcaatgccagtttatttacctaagattatcaacaaacgagtggtaataccaggactcaaactcaagccatcaacactaagtcagtgagatcttcatcaccttacactgccccacaataaccccaacagtaaccctgtatacagtcagctgtattcacaggccagacacaagaggaaaaaggaga

SEQ ID NO: 213211 - DNA, 483 bp, Homo Sapiens
ttttttttttttttgtaaataaatatatttatagtttttattttaataccatgttttgcacccagcatttacgattcataatacatgttacataatgattgaaataatttaattaattttataacatatttataaaggttaccaccattaaccatgattacttccttgtctgtttgcccaacaggtagaactctcagtaaaacctgctttcttcttcttggctctatggcatttctattgccctgaaccctgaccacaacattgagccattcttttgggctgtctatctctgtcacctatccttgcagtaaactgcaacattcatgagtgccttgtagccaccgggtcacttgataattaaagtgacctgttatgcaaaggcaacagacagagacacacagaaatcaggaagcaattcaagtccaggccacagatatccttttaggatacattcaggagactccctttaatatgaggttaatt

SEQ ID NO: 213212 - DNA, 522 bp, Homo Sapiens; identical to SEQ ID NO: 49789
  misc_feature (1)..(1): n is a, c, g, or t
  misc_feature (14)..(14): n is a, c, g, or t
  misc_feature (21)..(21): n is a, c, g, or t
  misc_feature (49)..(49): n is a, c, g, or t

SEQ ID NO: 213213 - DNA, 705 bp, Homo Sapiens
atctttttgcccaggaggcggaggttgcagtgagccaagatcgtgccaatgcactccatcctgggcaaaaagagcaaaactccatcttaaaggaaaaaaaaaaaaatgcaatgactgtggcaaactcctcatgagttcaagtattaatagacatccaagagtccataataatgagaaatcacataaatgtactgtgtgtgacagaggctttattcaggcctcacagctttgcaggcattaaaatctacgtatttgatggaaccacacaaatgtaatgtgtaagagcatcctgaagctcttactctaagactgtaactgtaggtgaggattcatacaaagagtgactcagtctctagttctttgattcacttttaaaatgataaactgcacaataattacacgttccaatatggtaaaacttaagacattatatatttcaaaggtcaaaggacatttggaaatggctacttaccttcaggttataaaatcttttattccattgtttgaggtttctcaaaaaggctactgtttgtgactttcaacctgaactatggatctgtggctattttgcatccttaagcacctttcgtggtgcctatctgggaaagaaccacagtatggaaaggcttacttcattacatgaggatcatttttatccatgtttattgaagaaggaggactctgccttgtaaaattaaatattct

SEQ ID NO: 213214 - DNA, 529 bp, Homo Sapiens
ttttttttttttttattgaaaaaggaaagaagaaagaactataagagatctattactgtgcttgttattgaaattctataaaagctatagctatctaacttttcgtcataatctctaaagatgcttccacattctagaaatgccttttttcagcttctcttatgggtaattgcttttaaaaaaacactgagaaaaatggtattatggaaaattatttgttagttatatctttatcaaccttttaatactgtttttaaataaacttttactaccagaaggctataaactcaaattactgtacattatctatattaaaccaaaaggtataaaataacaaggaatgactgatctaccttaatgtatagaaaaggaatgaacttccattctaccagttcatcatacacttaatcagtagttaaaaccattgttccctagcccactccttccagggaacccctgcaatcagacttacctatgtgctgcagaagggcaagaaagcaaacaatactattagtggagacctacatga

SEQ ID NO: 213215 - DNA, 684 bp, Homo Sapiens; identical to SEQ ID NO: 46323

SEQ ID NO: 213216 - DNA, 607 bp, Homo Sapiens
atgaaccgatggttgagggattgtcacgggaggaacatgacacccgaagggactctaggtgcccttggagtgccacacatgcccagaccttctcacacccacacaaataggctctgccgtgcactcctacacacacacacacacacacacacacgcttgttcacactcagaacccaggacagccacagccaccgcttaggggaagccactgcagatgcccctggaatgggcacagcacagccagggcgctcttccaggcaggcgaggataacttgagagtttcctagggcaccagggacagagctcagaggcccccgaggtgtgtgtaggaggcggaggcccgcagagcacagagcaggagaagggcttgggccctggaggagaaagccattctggacaccaggggacctggacggagggtccccacagcccgtgccccacgccgcctggaggccagaggggtcagtggccctgctgtcccggctccatcttggttctagccgccacctgtatgaacacagtggcccggcttaacgcactaacccagcctctccctgtgtcccacagggagtagcaagacccaccccacactggcttcaccatctac

SEQ ID NO: 213217 - DNA, 430 bp, Homo Sapiens
ttttttttttttttgcaacatcagcttcataagggtaggaatttgtctatactgtattctcagcaccttgaacagtacctgtgctcaagtaagtgtaattactgacttaacagacgtatactatctatgccatgtatgttaagtcacaccagtcctgaaaaccaaaatccagagaaattctttcaaattttgtcaggaaaacccaaccttgactgacatgctgtttatttaacataaatatccccaaatttcaccacagaaatattgctatttgaggtcctcactggtgagtatgttgtctactatatggacaaaagttcttaaaaggtaaagctccaaaatccctaacacctgctccctagtattctgagtaaggtctctaacttctaattctcacaactcttaactattgttatccatatcctacaga

SEQ ID NO: 213218 - DNA, 640 bp, Homo Sapiens; identical to SEQ ID NO: 50326

SEQ ID NO: 213219 - DNA, 431 bp, Homo Sapiens
cctttggaaatccagggctttttaccctttggatcccagcttcagagagctgggctattttccatcaacttctctttgcttcaactctttagtagcaatctcttgtcttagagcccggtgttggctgacaccagagggggccccagcccagacgcacctggggttcaggctcctgactcgggacatctctcctccctcctcccaccccagccatgccaagactcacactcaccgtgcacctgtctggcttcaaaatctctctgatcctcccagcctcgttgagtcctctcaggtgaaagtcatgagccgatctgtctcttgtcagcatcacagtgtagccagccagaaaaagaaataggactttggggtcattttcccactttttgtagaaagtaaacagctcagagaactgaaagctatgggagaggtag

SEQ ID NO: 213220 - DNA, 366 bp, Homo Sapiens; identical to SEQ ID NO: 50711

SEQ ID NO: 213221 - DNA, 744 bp, Homo Sapiens; identical to SEQ ID NO: 46950

SEQ ID NO: 213222 - DNA, 580 bp, Homo Sapiens; identical to SEQ ID NO: 53709
  misc_feature (551)..(552): n is a, c, g, or t
  misc_feature (565)..(565): n is a, c, g, or t

SEQ ID NO: 213223 - DNA, 498 bp, Homo Sapiens; identical to SEQ ID NO: 53285

SEQ ID NO: 213224 - DNA, 688 bp, Homo Sapiens; identical to SEQ ID NO: 52023

SEQ ID NO: 213225 - DNA, 633 bp, Homo Sapiens; identical to SEQ ID NO: 51033

SEQ ID NO: 213226 - DNA, 554 bp, Homo Sapiens
ttttttttttttttaggagcgaataccaacctttatttgcacttgggttccagttcaaagccaccttagacagtgtggcaaagtgggaaaaagcacagatcctgggaccaaggttcagattccatctcaagcgagcatatgaactgtgtgacaacaggcagacagtacctctgtgtctatgagaaagcggggagagcaacaccccagcttctagcagctctacagctgcctggacctgcaggccctcctaggcccacttcctccccagcacagtgtgtgttcccgggcgtgtgtggctctgggtccagctctgttcagggtgggactccaggtgaattactgaacctctgaggtgtacccccaaccccaaactttcaccaaaagcaataaagaggaactctagaactggagccaggactaagtgagaaaaactgcttataagtgcttaataaatactagttatttacaacttttgctcaagccgagggcagaggcctttgtacgcagctgccgaactctgactctagttctgcggaagaaaaggatgcagtatt

SEQ ID NO: 213227 - DNA, 548 bp, Homo Sapiens; identical to SEQ ID NO: 48969
  misc_feature (3)..(3): n is a, c, g, or t

SEQ ID NO: 213228 - DNA, 718 bp, Homo Sapiens
  misc_feature (624)..(624): n is a, c, g, or t
cagagtctctctctgtcgtccaggctggagtgcagtggcacaatctcggctcgctgcaacctctgcctcctgggttcaggcaattctcctgcctcagcctactgagtagctgagattacaggtgcacaccaccacgtccggctgacttttgtatttttagtggggacggggtttcaccatgttggtcagggtagtcttgaactcctgacctcatgctctgcccagcttggcttcccaaagtgctgtgattacaggcttaagccacagcgcccgacccaaagtgttcttttttccttgaaaagaagtacagattttttaaaaagctaatattgctgtgattcaactctcaagttacttgatgctatttcttcatttctattgtattcacatgtgaaagcatgtgatcagttgtcacggcatcaaagataggagagtttctttttttttaggtgggcattatttatgaccttttctttggaagagtaaggacattaaaatgtaacatgcatgatgaaaatctaagtggagatgatatttgtggttaattatgatattgagtggtgcatgaggtaggtgtttagagtaatattcttttgcattatagtaagaacatttaagttttgntaaaattaaaaaattagtagtacgttattttactatttgtacttttatgtaataaaatgcagtacatttttaaattttcaaaaaaaaaaaaaaa

SEQ ID NO: 213229 - DNA, 371 bp, Homo Sapiens; identical to SEQ ID NO: 12456

SEQ ID NO: 213230 - DNA, 670 bp, Homo Sapiens
cgagtagctgggactacaggtgcgcaccaccatgcccggctaatttttgtattttttagtggagatggggtttcgccatgttggccaggctggtctcgaactcctgacttcgtgatccgcccgccttgacctcccaaggtgctgggattgcaggcatgagccactgcacctggccttatccttttttttgaacagtgcaaatgtcaccttctctataaagccttcccttacatctcctcccaggtttgtttatagcatatctcactgtagtgttattttacttcttatgtgtctgtctcccttgctaatttcaaactcctcagaggaagactgtaatttattcatctctgtttcctcaggacctagcagtgtttttgtatatgttaggcagcttaatacatgatcttcgcatgaactggtttaccccctgtacatgatgagagactagagttgccaccaagttacctatccgggggccagcctgtgggatcagatgggcaggattgggtgggcccccttaccatggtgtgccctggaaaactgctcatcttgctagattgaggatatagagctggcttccaacagaactttggaaccatcctgccagcaaggtcagactgtcaataaatgggaatttattgcatgcctgtggcataaaaaaaaaaaaaaa

SEQ ID NO: 213231 - DNA, 678 bp, Homo Sapiens; identical to SEQ ID NO: 49557

SEQ ID NO: 213232 - DNA, 451 bp, Homo Sapiens
  misc_feature (437)..(437): n is a, c, g, or t
ttttttttttttttgatttactgtatggcagtcattctgctctatgctggggaaaagaggcaagagacggaagttacagatataaacaaatcatagtccctatccacaagtagcattatagtctagtgcaggagcttaacaacccactatgattaaaacagaatgtatgatcttttggaatttcaaagcaatttgctttggaagccccccaaaaataatagttcattctttggggggagttgagaagactaccttaagaaagtggcatggggggtgcatcttgaaggcaaatccagatctcagagagtaaaggatgggaagtggggtcattgggactgatgcagcagtgttagctaggtatggaggtgagaaaatgtatgggctatccagggaacatcatcttcccggaggtgatgactgggatatcctgaccaggngctctgggaggaga

SEQ ID NO: 213233 - DNA, 427 bp, Homo Sapiens
agtcccctcatatacaatgaaatgatagatttgtcaacatagataaatctcaaaaacacaataagtgaagaaagtaagttgcagatggaaataatatgtgatggtcaaacaatctagatgtttctgtgaaggtgtttttggatgagactaacattgacattggtggactttgagtaaagcaggttgcctgcgtgccataacgtgggtattctcatccaatcagttgcgggatttaacagagcaaagactgaggtcccctgagaaaataggattccaccagcagacagccttcagccttgaactgcagcgtcacctcttccctgggcctcccaacctgctgacactttgatcttggacttctagcctccataactgtgtgagccaattccctaaaataaatctctctctgtacaaaaaaaaaaaaaaa

SEQ ID NO: 213234 - DNA, 436 bp, Homo Sapiens; identical to SEQ ID NO: 45786

SEQ ID NO: 213235 - DNA, 852 bp, Homo Sapiens; identical to SEQ ID NO: 48998
  misc_feature (797)..(797): n is a, c, g, or t
  misc_feature (822)..(822): n is a, c, g, or t

SEQ ID NO: 213236 - DNA, 607 bp, Homo Sapiens; identical to SEQ ID NO: 40387

SEQ ID NO: 213237 - DNA, 486 bp, Homo Sapiens
ttttttttttttttaagtatataacaaagtgaaagatgggtttaatttttcccacaaaaagttaaaagaaataacagcagttttagaggaagaggaaaaaataataagaaaattacatgcagttgcaaaatgtgtgactatttacaaactctaacatataactacaaaacggaccagaagaatcattatcataggaagcaaagggtcatttcaaaaatcagaggagggatgattcatatttaatttaattctgtggaaaacatttaagtaacctttgaggacaaaaataggtgatatgttgaaatgcgggaaaccacagtggaaggaaaaagaattcaagaaagctcagtttcagtaaccagtatctagtaaaatcttcaggacctagaggctacaatctgcattaatagtgtctgaagacctagaaatgtcattaaataccattttggataattcttgtagacttgagatgatgtctatttaaag

SEQ ID NO: 213238 - DNA, 510 bp, Homo Sapiens; identical to SEQ ID NO: 49213

SEQ ID NO: 213239 - DNA, 703 bp, Homo Sapiens; identical to SEQ ID NO: 49393

SEQ ID NO: 213240 - DNA, 474 bp, Homo Sapiens; identical to SEQ ID NO: 48521

SEQ ID NO: 213241 - DNA, 497 bp, Homo Sapiens
ttttttttttttttgtacaggttaggtctcactctgttgaccaggctggtctgacctcaatcgattctcttgtcttggcctcccaaggcagtgggattacaggcgttatcccgtgcctgaccctctttctacatctcaatcattgtatcattagcctgagctgcccatattccttattctgcccatccctgatcaatctcctcctttaacagaacttccatctcgatatcatggggcctgctgggcactgcaaacagcctaaggaaagtggaaattttacttcacctgaaattctattacaaattccacattgaacttaatttatatttgaactataaaaattttctgtaagttgaaacatgacctataaaggtctctacaccctgaagcaacgttttagaaagaaatcaattggtccttttctgcagaaaccattaaccataggagagataaaggaaaaacttcaatgcactgattgaacttccatgcccatagct

SEQ ID NO: 213242 - DNA, 438 bp, Homo Sapiens
ttttttttttttttggtttaaaagcagcgatccatcagcaacaccaaacttgaaattgatttatgtggaaaaacttggcttgtctgccatctaacaagccctgttgagtaaaataagcaagcttaaatttgattagttgtgtgtctgcctgaaaccatttagtagagcactttaattctgcatggtttttacaaaactcattaaaagctggacaacaaaagaattctattctgtagctagtaattacagctctttatgtgggagtggtaggctgccttttctcctggtatttgtacacaaaagctggggagagcttttccactgccttccacattcattctctgtccatctcagagaagctgaaaaacagaatcaagtcagcaagcagtctgcaagcctaaggaagaaaaagagctgacccatccggctctggatgga

SEQ ID NO: 213243 - DNA, 615 bp, Homo Sapiens; identical to SEQ ID NO: 50288

SEQ ID NO: 213244 - DNA, 753 bp, Homo Sapiens; identical to SEQ ID NO: 50299
  misc_feature (630)..(630): n is a, c, g, or t

SEQ ID NO: 213245 - DNA, 775 bp, Homo Sapiens; identical to SEQ ID NO: 44236
  misc_feature (702)..(702): n is a, c, g, or t
  misc_feature (712)..(712): n is a, c, g, or t
  misc_feature (742)..(742): n is a, c, g, or t

SEQ ID NO: 213246 - DNA, 452 bp, Homo Sapiens
  misc_feature (393)..(393): n is a, c, g, or t
  misc_feature (397)..(397): n is a, c, g, or t
  misc_feature (432)..(432): n is a, c, g, or t
  misc_feature (438)..(438): n is a, c, g, or t
ttttttttttttttgaatgaaaagtttgatatattcatgtgaaatgtataaacaccacatacgaagaaaaacatatctaaagactagccaggtagagtaggaaaaaggaaagaagcacgtgtacatcttctaagatctggtgggttagttccaaagaaaaggtgtatgggccggctttatgtggaaaggaaaggtgaggatgacttcaggtcatcctggcaggatgccatgtgttcggtttcggtctaactaaagtcagctttagttagaaactgctgagactgctgaggcagacactgcgcatctccagcaaactgagccactaagctgcgggcctgggcgaggaggtgacgcgcttctccccaagtgacctgaaggccccggcaccctggnctgntcttaccatcgcactttgttgcacatctgggttgncctganaggggagccggcaa

SEQ ID NO: 213247 - DNA, 681 bp, Homo Sapiens; identical to SEQ ID NO: 53926
  misc_feature (621)..(621): n is a, c, g, or t

SEQ ID NO: 213248 - DNA, 375 bp, Homo Sapiens; identical to SEQ ID NO: 50849

SEQ ID NO: 213249 - DNA, 699 bp, Homo Sapiens
  misc_feature (691)..(691): n is a, c, g, or t
tttctctatgttggccggctagtctcaaactcctgacctcaggcgatccacccaccttggcctcccaaagtgctgggattacaggcctgagccaccacacctggcctcacctgtattttaaattgagttttactgggtaacagccatggtcattcatttacatattgtcaaaggctgctttcaagctacaacagcagaatttaacagtctcaagaccatatggcctgcaaagcctaaaatatttactggccctttacagataaagtttgctgacccctagagaggaagtcatggcccatggctggcagatggaagcctcaggacctgaagatttctcaaagaaagggacctgctgctgacagcaattaatatatgttcacagcttgcagctgaagcctgatgatggctgtaggagaaaggacatcacccagatgacattttgcctccaaagctctggggaccaattgtggaagaactgcagggatattatgttagaatgttcttgtgtctggataggatgagaactgtcttataacaaagtgcagcccccatgtctgagggcatgtttcctgtgtttaggcacttccgaagcagggagcaccttcaaggggcactggccttcccagaaacagtgtttgacctgtgatgatggtcctgggggaggggacctaggaaaagaccttagcctttncataaggc

SEQ ID NO: 213250 - DNA, 471 bp, Homo Sapiens
  misc_feature (456)..(456): n is a, c, g, or t
aaattttatattcctcaaataaaagagaggcagcgacaagatacctcattatcagatgcttggtttatacattttgggactaaaatacttggtgatgaaatgacatacacctttaaacttgttatggagatagtttaatgtaaaaccaactacggaaaaccctcaacttaaggatacagcttggaaattggaactgcaattgccttttattaaaaccatatggtgtgatgtttgtttttaaaattatataagactttatgctgtcacttctcttgctgtactgtaattcatgttttaaatgaatttgataatgaaattatactattatcattcttgatgaatacttttcttatttttatgatttttctaatgaaactttaaacttttgagatttgagagtctgttttctataagtagaattactgttgttacaaaatgaaaaaggactgacctaanaaaaaaaaaaaaaaa

SEQ ID NO: 213251 - DNA, 432 bp, Homo Sapiens; identical to SEQ ID NO: 50367
  misc_feature (421)..(421): n is a, c, g, or t
  misc_feature (431)..(431): n is a, c, g, or t

SEQ ID NO: 213252 - DNA, 540 bp, Homo Sapiens; identical to SEQ ID NO: 50516

SEQ ID NO: 213253 - DNA, 532 bp, Homo Sapiens
tttcgttccttcccaatcctcattcctccctttcattcctctgatgtctctttttactccttctgttgactatcacaacatggatggcaatgatggtgtgacttcctcctcagatatctggctcttctctccaatatgttgcatcctggctgtttggcatcccagctgcctaatttctactctgcatcttgggcattaagagcacatacacacacaaaaaacaaaccctcacatttttacatacctttacagtttacaagatgcttccatatatttgaccttacctaatcatccctattacactaagatgaagacattagtatttcatttttcagatgagcagaatgaagttcagaaaattaaaaccaaggtaaagcccagcaaaaaaacaaaaataaaaataaaactaacaaacaaaaaactagtccaggtcacacagcaagtagcagcagttcttaaatccaagcgagcagtttctcaccttttttcccagccatttgctttattaaaaaatttgaaaaaaaaaaaaaaa

SEQ ID NO: 213254 - DNA, 574 bp, Homo Sapiens; identical to SEQ ID NO: 55865
  misc_feature (10)..(10): n is a, c, g, or t

SEQ ID NO: 213255 - DNA, 308 bp, Homo Sapiens; identical to SEQ ID NO: 50689

SEQ ID NO: 213256 - DNA, 696 bp, Homo Sapiens; identical to SEQ ID NO: 45710
  misc_feature (11)..(11): n is a, c, g, or t

SEQ ID NO: 213257 - DNA, 527 bp, Homo Sapiens
ttttttttttttttaaaattttgagatagtttttatttgaaaacataacattacaaagtttgaaaaataaaaaaattaatgattttaactatttttttcttttgttctcttgtttttaacttactattttgaatgacaaaaaaatggctcatatgtttgtccaaaacccttgataatatctttaattttttaaatacctgaaacagttaaattattatgtactaaaaacatttactgtactctcagacagactcatataaaataacctcatttgtcaggagaaagaaaggtacatacaaagtagtaaattatgagttttgacaaaagtaataggcatttttagttatttaaataaattaaggaaacatcccaaaagacatttatacagtaaaaaaaaaaagtaaataatttcaggaaaaataaactgtattattacatttaaataaacatgaaaaagatacttggatgatggttttaatttctccaatagtcttcatgaaggttttgtagctgatggcaatggagct

SEQ ID NO: 213258 - DNA, 591 bp, Homo Sapiens
caagatctcaaaacactgaagcagaccgtaccaaattgactttattgttttaaaaccagccccttctgtctgccaccacccgccaccccttcccgaaggggaagaaaaaaatcataatagatgtctctccagcgtgcacctctgttctcctctctctaatggcagcttgggaccctgaggcagtgacgcttagtaatgtatcctaatagtcagtgtttgtctgacaaatacctagtgaccacaatcctaatcagggccgccatgaattaatggtcagtgtagtgatgggtgctgaatgatcataaaaatagcttgggaccctgaggcagtgacgcttagtaatgtatcctaatagtcagtgtttgtctgacaaatacctagtgaccacaagcctaatcagggccgccatgaattaatggtcagtgtagtgatgggtgctgaatgatcataaaaatagctaatactgggccgggcttggtggctgatacctgtaactttgggaaacggaggcaggaggactccttgagactagaagttcgagaccagcctgagcaacatggcaaaaccccgtctctgaaaaaaaaaaaaaaa

SEQ ID NO: 213259 - DNA, 599 bp, Homo Sapiens; identical to SEQ ID NO: 47981

SEQ ID NO: 213260 - DNA, 676 bp, Homo Sapiens
  misc_feature (20)..(20): n is a, c, g, or t
aactgggagcatcataaagnctagagaaggcttacaaagcaagatggctgccactgagatcagcacactggggtttttaacagaaacctattacttgatttactgggagtggtagaaccctaaagaaccggtgaacatccaacactgaaatttgagctggctcttcctcagaaaggtttcagcggcttaatctcatgcaatcttgcaacattcctgaattcaaacccatgaagtagagagtcagcccgagaccctcttcagaatccaccgagtctgctgggcaggaagagctagcttgttgagttgtcctgctgcaaatgaaatagtaactttctcagaagcataggatattgaaagattcctttaagaggccaagtcctcaaaggcatgtatgcaacgtgaagtcatgggggcaggccttcctggttccaatgcatgttttcacagggttgtgtctctatgcttgaaggggagctcttgggcctatctgagggatcatttaccacttgctgtaggaaagtccagtggaaatcacttctagtggtgagtcttggccaaatatactcctatgtagaaggcctgtgtaggaggttatgcttggaacagttgagtagatgttctggcaacctgtgatggccttactaagtcatgacagtcagccaaaaaaaaaaaaaaa

SEQ ID NO: 213261 - DNA, 284 bp, Homo Sapiens
  misc_feature (21)..(21): n is a, c, g, or t
ttttttttttttttctaagtnaaatgccttttattttaacattattaacagtgcaacacttgaaaagtttaaaaattggaaacaagtattagcaaacatctttaattttgcatatttgtaaccaaaaaaacaaggtatacaaaatcccctgaatttgtacatgatggtgtttttttgacttataatcaacaattgccttactaagagtgatgttcctgaattgtttcctcagtaaaggtgtaccataggctgggtgcgatggctcatgcctgtaatcccagact

SEQ ID NO: 213262 - DNA, 697 bp, Homo Sapiens; identical to SEQ ID NO: 55844

SEQ ID NO: 213263 - DNA, 634 bp, Homo Sapiens; identical to SEQ ID NO: 55892
  misc_feature (12)..(12): n is a, c, g, or t

SEQ ID NO: 213264 - DNA, 685 bp, Homo Sapiens; identical to SEQ ID NO: 50252
  misc_feature (637)..(637): n is a, c, g, or t

SEQ ID NO: 213265 - DNA, 717 bp, Homo Sapiens
  misc_feature (15)..(15): n is a, c, g, or t
ttaatgtgtgggtcntgagataacgaatataacaaatatttggaaaagtactatgttgaaatattttaaaataaaatttaaatccctcttcatttagaaaggatttgaggcagctaaatgcagaggtgtaagatggttttttggttaggattgtttctgagctgtgactctgtagtcactttcttactcagccctgccactcagctgtattcctctgtagctctgggcagacgactctgaacacggcttcatattggccttccatgagtgggtgaagggcatagtcatctggcagttttacctgctgttctatgcatgtctctccagcgcttgcttattttccccttctgcaaacattccattcatgccatgggcattcagtacagtcctgtaagcaagggtaggggcggcacaccaggtggatttaagcgcaaagacaggacgactgctttgccacaggcgcctttacagccagcagtgaacagttagacatattcaccttcctctaggtggaaaacagtcctcttctcagtagccctctcatgttcttgagacccatttgatataaataacaatgttgcaggaaatttcctgaaggaactgaaatgaaccatagaaacgagatcgttcttttcctaccacacagctgggattagactgcttagtttgtacttgcagcacttttgcagtatgggccgtattaaaaaaaaaaaaaaa

SEQ ID NO: 213266 - DNA, 836 bp, Homo Sapiens
aaaatttctaaaacttgtagtgagacagccttgaatttaaaatcagaagatgcacattctgtttttacctctgtcactgactctgtgggtctagccatgtcatttaaccacacttgaatttcaggtattttgtctgtaaaatgaggataataacgcctgtctactacattaaaccacaagatggtttaaaggttagcataataaattattagagtatgacctaggagttacctaatctgacctctttattttacagatagaagtacagaaaggtaaattgaattgctcaaggtcacccagtgtgtggcaaaatcagaactggaaacttaggtcttctgccagtcccattcaagggctttttccattgtacagttaaattatatgttgtgtgtaagcatagtataaactgtaaaccatcatgcaaatgtcagatgattgttttccctcagtttttccagcgctgtttgttacccttattactatgcagtgtttaaatggatgagagtggtaagaaatgaaaaatacatcactaaccagtggtcatagtaattacattttcagagaaggccatggccattagaaagttcaagctccagggcagtagtcaccttcagctttctccaaagctttagtcccttccctgctggcttccatcccctatgagcctaacctaattctcattattgctgtgtcctgcccatgtggaatgggcagcaggtggtcatcagtctgaatcaattactgtaagacctcagataattagagcattactcaaccaaagcaaagtatattccacttttatggggaaagtaatcaatctcaaaataataataatg

SEQ ID NO: 213267 - DNA, 483 bp, Homo Sapiens
tgaacctcaggttgccttggggttgatgacaaagcaaagatttcagaaaggagcaagttttaagaataaatgtgatgtgatagaagcagaggcaaggttggcagctaactggtttggtgtgatttcatggtttgcaaccaggactgagtgtctgattctttgattttctagagacattcctaatttcatccctaactctccccagataaattctcatctcttatcaaaaacaaggtccctggaatggaaagtcagggaactccctgaggaaatgagtgtttagctgtattctcagtcatgtaggttttgttgatcatagatatttttgaattgatgctttcttgtccccatctctccttcccttaattcaagtcatacttatcactcctttcagcctctggttattccccctttctgattcatctgtcgtatggacctcaaatttaaaaaaaaaaagatttgcggccgcaagcttattccctt

SEQ ID NO: 213268 - DNA, 668 bp, Homo Sapiens; identical to SEQ ID NO: 48773
  misc_feature (8)..(8): n is a, c, g, or t

SEQ ID NO: 213269 - DNA, 724 bp, Homo Sapiens; identical to SEQ ID NO: 47093
  misc_feature (624)..(624): n is a, c, g, or t
  misc_feature (639)..(639): n is a, c, g, or t

SEQ ID NO: 213270 - DNA, 500 bp, Homo Sapiens
  misc_feature (20)..(20): n is a, c, g, or t
  misc_feature (24)..(24): n is a, c, g, or t
ttttttttttttttaactgntagnatatttgtgcaataaataaaaaggagggaaaaccatatcagagcaataggcaaggaggtggcaaactagataagtctccttggagaacaaaaaatatatttaaaatacaatagccctactacaactgatttatggctcaggtgactaaacacaatttgaagcagtaacaacactcataagctgaaaataaaatacttttagcccttttattcttcttgcctctttcccaaagaatatgccaatgaagctgttcttgatgtcacaatattcatatatcgcagaatttctgcatttaaactaccttgcctactgaaaataagataatcatttcatctctaggaaccagtaaccaaaaaaaaaatgtccttagagaatacatttttatttgtttgtttatttagagacggagtctcattctgtctcccaggccggagtgcagtggcttgatctcggctcactgaactctaacctgggtg

SEQ ID NO: 213271 - DNA, 482 bp, Homo Sapiens
ttttttttttttttctggacaagttttaaataaaccagtctttttctcaaaggaaaactaaaaagcccaccagcccatcagtcccctccctccaacccacccgtctttatcactttttgaaaaaaataagccccaaacaacaacaaaaacccacacaaaccaacccagaaactgctaacctgaacgccagagattttttggctgcgggagtgaatagactgcagggaaagaagggaagagatgctaggaggtctcaaactccccagatttgcaaacaagtgctcaaaggcgaatgcttcccctagacatgaagggaggcaggatcagtactcctggtggggtgtatgttggtgggggctgtttcaaaacacacttcaaaaagcatttttgggccactggaagcacttggtgcagcgaattgaaaagaagagaagccagacaggagaaagatcttccagcctgcaggggaatgggccaggggg

SEQ ID NO: 213272 - DNA, 403 bp, Homo Sapiens; identical to SEQ ID NO: 49206

SEQ ID NO: 213273 - DNA, 656 bp, Homo Sapiens
  misc_feature (11)..(11): n is a, c, g, or t
  misc_feature (270)..(270): n is a, c, g, or t
  misc_feature (278)..(278): n is a, c, g, or t
  misc_feature (280)..(280): n is a, c, g, or t
  misc_feature (357)..(357): n is a, c, g, or t
  misc_feature (407)..(407): n is a, c, g, or t
  misc_feature (568)..(568): n is a, c, g, or t
ccttcatttgntttgaaacacactgtaatattggtcttttgttctatcccaaatacggattctttcttctttctttggcaggaaggcactttgctatgcctagcccccaccaggtagtggtattctccatggaatgtgtgggcttttccaaagctctttcagccatcagttctcatagccctcccagtcttgcaggcaagatatgagctttagaaataggcttttatcattcagcttgctttgtgttgttttgaggggttggggtacagngggacagntntattttgtttggcatttatagaaaattgagaagtttcctttgatcaagccatatttttgatttaaaacaatgattancagtttagaaaactatctctgctattttattctgcttttaaattctttgntttttatatttctgtcccttagactttaacattttaaagtgtgtaaaaataaaacactgtcagtgctaatcatagaaaatcagactatggcttgaaatgactagaaaaacatttcaaattaggctgctttatgatttgcatattatgattccggccattgnagtttttggatttctaagtgttcataataccatgaaaagtaaatattttaaacaattgtatccccgtttaaaaactttctaatggtaa

SEQ ID NO: 213274 - DNA, 522 bp, Homo Sapiens; identical to SEQ ID NO: 55784

SEQ ID NO: 213275 - DNA, 383 bp, Homo Sapiens
acccttatattgacgggaatcctcactgcaacctgtaaggtatcagaactcgcattctaccactgaggaaactgaggttgagagaagtgaggtgacttactcaaactcactcaacaggaagtggcagagctggtgagtcttatttgcattctctgtcctggaacgtgggtctgcacaaagatcccagcccataggcagagccttctggagccttggctgcccccatatcccagccccttgaaaggcccatgagctgcacagttagtaggatctggctgcgggggggtggttagtagggcatgctcgggcctggttagtgggttagttggttggcagaaggccaggcacctcgtcacacgccacagcgtcccggctgagccctg

SEQ ID NO: 213276 - DNA, 692 bp, Homo Sapiens; identical to SEQ ID NO: 49824
  misc_feature (569)..(569): n is a, c, g, or t

SEQ ID NO: 213277 - DNA, 431 bp, Homo Sapiens
tgagaattggaagaagtcggcagaaaggcgagagcccgcggtccccggctgctgcccaggcgacgcgtccggggcgggcccgcacccgttgctcggtccgaggtccgtctgtctgcccgcggcttctcaagggaggggagggcgcttcgggcagggtctccgcagccgctgtcgcctcagagctttatcctcagatcaaaaaagaaaaaacaggaagaaaaaaatcccaaccccaacactctcatcacagccaccttcagccatcttgcgcgtattattatttcaggaataatctgtttaataaaaatacctgcgtatccagcccctcccccgcgtcctggggtccccgcccccttttaataataatctcgataataaaaacgatcggcgggccgggcagtccgtggcggccctttaaaaaaaaaaaaaaa

SEQ ID NO: 213278 - DNA, 689 bp, Homo Sapiens
aaagaagacatgtctccctctcagagagaggatgatattctctggaaaaggaagttggccacacctgtcactggagcccattggcgaactggcccctgtacccattgtaggggcagaaaccattgatctattaaacacaggagagaagctctttatattcagaaatccaaaggagccagagatctcactgcacgttcctcccaggaaaaagaagaactttttgaatgccaaaaaggccatgagggccttgggcatggactagcccaagggaaagacctgcgggagcatctgaagagagaagggatgattttctcctgcccgccggtgtttgtgtgtttataatgcacaactcgcaaatataaattgcacatgcagaaggcacagaccccgtagcgcatgccaacttgcagggactcggtttaatcttgtctcatgaatttccagatggcccactctcttccatatcacaaggacataaacactccttctttcagccccacctccccagggccctggaggagacccccaccctgcaatccacaccccatcctctgctgcagaagctatggtctgtgtggtgacagccagattctctactcttatgttttgtatttgttacatattctatttttataaagggaatttaaaaaaataaatgtgttttgcacaaaaataaaaaaaaaaaaaaa

SEQ ID NO: 213279 - DNA, 557 bp, Homo Sapiens
  misc_feature (19)..(19): n is a, c, g, or t
ttttttttttttttgctgncacaatacagatgtttattaatgattaaatgccagagaagttttaacaatcacaaatctttgagctcagcagttgttacccattaaatgatcaatttctatccctcaatacaatacagtcttcattttatggaccttagcagttgtcatccataatatcagctgtaattctggatcatatgcaacccatatctgtgtgttaccagagcatgtcccacaattttgtactgtcctgtataaaggaattacagagacgatagttaagaacatttgtaatcaagtgactttacctacttggaactatatgtccttacctaactagctgttttgctgacaagagggtgtaaacaccaattgtctttaaagcagatccaggcaataaaatctaaattttcctctaactttggatcccagaaacactaattagacctacacttgaggtttccctgttggcgtgacctgagcaaaactgtacagaattttgggagaggccatttggcaagccattggtctgaataatttggagggggaaatcccta

SEQ ID NO: 213280 - DNA, 477 bp, Homo Sapiens
gagccccgagccacctagggatcccaaggacccgaccagcaccataccccctccccaacatccgggctgatagggatcaaggaggcctgcctctcccagctgggctggggctcctgtcccccactgtggtgtgcctggggcctggccaggactcccagtgatgccagaagccctggggggaagccctgctaccctggaccttacaccgggtgtgggaatcagcctctgccccgccccctccagccccatctctgtctcaaggagagcagggtaggtgaaagtctagagaaagaggctacctgcccagggtcacagcaaggctgggaccatggcaagcttggaaccaggacttctatctcccaaccccagcagccagaatactgtgccctcttgctttgggggtaactcccgaaaaccctgccttacctctcccttccccctaacattaaactatttggcatgaaaaaaaaaaaaaaa

SEQ ID NO: 213281 - DNA, 384 bp, Homo Sapiens; identical to SEQ ID NO: 48790

SEQ ID NO: 213282 - DNA, 525 bp, Homo Sapiens
ttttttttttttttgtatattcagagttgtgcagcgatcaccacaatcaattttagaccatttcatcaccctgaaaataaatgtcatatctttagctctcactcccagtgtatccattttccccagccgtaggcagctttctgtttctgtagatttgcctgtcctggacatttgatataaatggagttgctgtatcatgttcgacttctctcacctagcatgatgttttcaagacacatccatgctgtagcatgcgtcagtgcttcattccttttaatggccaaatattccattgcatgggtatgccatgatttgtttattcagcaatttattcaacatttgggtgtttttttggctactatgaacaatactactgtgaacaatctgtgtacaagtttgcatgtgaacactttcagttctcttgggtgtatatggtagaagtgagatttctgagtcaaatggtaactttaacttttttaaaaactgccagactgtttactaaagtggctgagccagtttatattc

SEQ ID NO: 213283 - DNA, 458 bp, Homo Sapiens
ttttttttttttttaaaagacaaacaaaagagggtttaatctgtgcttctgtccaggtgtgtggagctgggggtggggttgcacctgcccgggagcattcccaaggcaaatatttgagaggaattagatttctaatacccaggttggctctcactttcaggaagatgtgagacctgaatcctaacctggacgcattgttcccctaattcccagcagcagatctatgaattagcggtctgggtggcagcccattcttctttcagaggcccagaacaccgtgaaactatgctttcctgactcaagagaccctacctagacgtgggcccctttgacgagcacctgcccctcaggagggtctcaggcgaccttcttggaaggtgtgaccacttgaaaaggacgaggaggccaggcgctgtggctctcgcctgtaattccagcacttagggagccgaggcgga

SEQ ID NO: 213284 - DNA, 526 bp, Homo Sapiens
ttttttttttttttagaaatccaaaattaaatatttaattagaactctgatttgctttaaagattggtggcattgcacaggctatattacaccctctttataatttttttgacaaaaaaaagatactgttcattttaacaggccactttaatattaatacatgtgtaataggattggaactgaaaatcagctagagatggtacattttacattattgggaaaattacagttctgtattgtaaaaacatttattttttaacaatgtacctacattaatcaaaaaattacagcatatttaataattttacaaattcttcataaaaaatatatctctgtacaaaaaggtctttcgcacctacgtcgtgacagcagcgtgtggtgggacgggagggagggtcggcgatgacaatgggttttcctgatcataatgccagcgttcttttttttaccccctttttataatagctttttgttgttgtttacaaaatattttacagaagaaaaaaattattgcagctagcctgaa

SEQ ID NO: 213285 - DNA, 642 bp, Homo Sapiens
ctccagataagtcccactttggactaatagttggtgattcacagcactcatttcccttttcaggtgatgagacaaaccatgcttctgccacatcaacacaggactttctggatcaagtgacttctcagaagaaagctgaggcccagcctgtccaccaagcttaccaaatgagctcctttgaacagcccttccgtgctccctatcatggatcaagagctggaatagctactcaatttagcactgccaatggacaggtgaaccttcggggaccagggacaagtgctgaattttcagaatttcccttggtgaatgtaaatgataatagagctgggatgacatcttcacctgatgccacaactggccagacttttggctaaaaaaaaaaaaaaagtgtaaataatactggcactttagaacagattaatcaagagtggggttactctgtgtaaatggagtgctgtacagatttaagagcaatgcgtaataacaagttaagctgatatgaatagcaagataatccaataactgcatttcgtttggttagtcagcattctttgaactgccttacatgttgtcacctttatagaagcaatgcattacttgttttagatcagaaacttgctattccacccacaccaagtt

SEQ ID NO: 213286 - DNA, 476 bp, Homo Sapiens
ttttttttttttttctagagctgttttgctttatttgcagacactgttgcttttatctttcccatgtacaaagctgaacaattaataaaaaggcacctggagacagcaaagacgcattcatttcatgtgacatagtttaaaaaaagataaaaagattttaaaaatactctggttaacaatgcacgcttcctacgtaacaagcaattctggagacgccgtcccgtgtcctcgtgtcccgcggagttgaccgtgtgctgtgttcggggaaggagagggccagcgtggtggcttccagccctaagaggcttccctctccctcgctgtcaggtgagaaggaagggggaaagacaggcagaaaagcctgaggaccgcaccactgcagtgacacagacagtgacggctgagccacaccttagcatccctgcctggccgtcaggaacctgaaagccgactccttgactagacactgccaagtg

SEQ ID NO: 213287 - DNA, 626 bp, Homo Sapiens; identical to SEQ ID NO: 51944

SEQ ID NO: 213288 - DNA, 695 bp, Homo Sapiens; identical to SEQ ID NO: 49712

SEQ ID NO: 213289 - DNA, 605 bp, Homo Sapiens
ttttttttttttttgaagagacagggtctcactcagtcaccaggcaggagtgcagcagtgccatcacagctcactgcagctttgaattcctggctcaagcgatcctccaacctcagccataggcatgcaccaccatgctaggccttttagtagagacaggatcttaccatgttgctcaggctggtctccaacccctgggctcaagtgatcctcctgccttggcctcccaaagtgggaggattacaagtgttatccaccatgctggacaggaatatttttaaataatgaaaccaagttcctttcgctttgtaagttaatgcatgtattgatggtgagtagagaacaatgacacaatctctagagagacataggtgttcggcctggctcaatcactagccttatagtctcacaggaaaatatgaacttcatcaaaatagctaattattaccacatcatggatctttatggtcattttcaaatagacaaaattacaaagttcaatatataaatgccattggcctaatatcccattttataggattaactatttttcaaggagtcatgaacacaatttcaaattctccattcagattaattaagcggcc

SEQ ID NO: 213290 - DNA, 668 bp, Homo Sapiens
ttttttttttttttgcacataaaaacatcatttattgttagaaatcatgacatgatacaaagtcaaaatccacttgtgtcttgctaaagactacagaaagccatgctcagcagcttcttctccaatgctggccagcagcgtacctttccaagtcacaaagcagttcatcccgccctcaaggagccgacagggcagcccagagcctcccactgacaagtgtggtcacccactcaagatactgggaaagatccctgttctagcatcacattttaatcagatttgtcaaaatcaggttgcttggggcaaaggctctttcaccgaggatgctagtcctggaagacttctccttcggcgagccgccagctcaatcttctgaaccaggctcacatcccagggatgggtcacaaaactgatgacggtgcctggcacctcgctccccacacggcccactctccctgctctgtggatgtaatcttgcagcgttggggggaaatcataattgacaaccagctccacaccagtgctgtccaggccccgagaggctatgtctgtgcagagaagtatgtctcgggagctcttctggaaggactggaagattcctaccctcatcaaggctggcatttgcccctgcaaccttaggtgttggattttgtggtcatccagaatat

SEQ ID NO: 213291 - DNA, 547 bp, Homo Sapiens; identical to SEQ ID NO: 54400

SEQ ID NO: 213292 - DNA, 615 bp, Homo Sapiens
aggaaacccaccatgcaggactgtccatgtgatggctcttcccgtggctccatttctaagcgcctccgaggacctcatcgtggcccaggaccgcaagccaaggccaccccagtgtccttaccatcctgggaatgggaggagtcaggcccagccttgtcctgtctgcccccctggaagccttccctgagcactggcctcttatttacccgtctttgtctctggcttgttggtatctgtcccttgtctgattagggaacgcctgaggtcaggatctttgcctccccaatcagattgtcaggcaggagtgggggtagtgcagatgctgggtcatttctacatgtgagaccaaatagtggtcctgtttaagttgatccccttgaaagaaaattctggaaaagctcctcagatgcacagatacacagaatcagaccttgggcaaagtgtgtagttgtgcttttgaagctgtgcaaccttggacaaactacttgacttctctgtgcctcagtttccttatttgtgaaatgaggggtagtcatgataccttccccatgaggttgatgggaggattgagttaatatttataaagcatttcagacagtgaaaaaaaaaaaaaaa

SEQ ID NO: 213293 - DNA, 541 bp, Homo Sapiens
  misc_feature (14)..(14): n is a, c, g, or t
tttttttttttttnacttaatttactttttattaaaaccaacctgctgaaaagaatacaaattttgactaggaggagaaagggggagtggatttatgattttatggcaattataacaggagtgtttcaatggagactttaggcaactagaactcagcatgaaaccagaaggtagaagctgataaaggcaggggtaaaaaggagaaaatgagttcaaaacaactaactttcggccaggcgtggtggctcacacctgtaatcccagcaatttgtgaggccgaggtgggcggatcacaaggtcaggagatggagaccatcctggctaacgtggtgaaaccccatctctactaaatacaaaaaattagccgggtgtgacagcatgtgcctgtagtcccagctactcaggatgctgaggcaggagaatggtgtgaacccgggaagcagagcttgcagtgagcagagatcgtgcccctgcactccagcctgggcgaacagagcgagactatgtctcaaaacaaaacaaaaacactagagggcaattt

SEQ ID NO: 213294 - DNA, 477 bp, Homo Sapiens
  misc_feature (23)..(23): n is a, c, g, or t
ttttttttttttttctctgtatntgcaaattttaattattcccataagttaatcatcaaaaactaataatatttatggaaaactagattatgccaagccctgcactagatactttactggcaaagactcattgaattcttccatcacaggatgaagagattcagagttcaagtaatgcccccacccacacaaaagaaaacagccaggtatttcactaggctggaaggattacaatatcaaaaggctggtacttacaaacaaattaaagaaacaaagcacatatttactcccaactagcataaagataagaacctggctgagcccaaggtaagtattcaaatactttatagcagtgactgggggccgagaagaggggggccaatcaatactcctcagggatgaggagtaagagacacgggacagtatgaaaaagtgtatttaccattacagggataactttcatatttacaaaatgaa

SEQ ID NO: 213295 - DNA, 547 bp, Homo Sapiens
tttttttttttaaggcatttcagaaacattgccctttcaagcaagttaaaacaatatccctcaacattaaataccatctttttagccatcagtaccactgggcatgtgtcataaaagagaaatgggggcagatatagctccctttcatatgctataccagaacaaaaatttgtaaaatgcataagtgcattaactgaatatgtttgaatttaaattctgggtttttaccttcaaagcacaggcagctgtagatacaaaaagtcctctaatggagtactggaatgtttcattgtcttcacaacttggagtgtcagagttttctctgccttctatattgtaaaactgagtgactattcttggtcgtttttattagatttattgatgtccaagcaatacaagaattaactgttcatatactgtatgtttccttaacatgcttatttggtttctttgatggagattgtcaaggccaaagaaactttttcatttgtcatccaaccaataaatggacagaagctgctagaagctctttaaaaaaaaaaaaaaa

SEQ ID NO: 213296 - DNA, 351 bp, Homo Sapiens
ttttttttttttttacaaaatttatttttattgtggtaaaacatacacaacataaaagttatccctttatccagtttgcggtgtacgtttgttaaccttacagcaagtaacacatgagttttaaattagaatttggacaacggcaaatgagatgaaaggcgaacaatccgaaagccggatcactgaggagctctgggaacgcgccgcgagctgaagccacacggggaactccattttgtcgggacagggtcggtcctggccgcctccagggagtcgggtagtttccgcggcgtggcccgggcctcccctgaagtccgtccgcctctctccgcctggcccagcggcgcggcc

SEQ ID NO: 213297 - DNA, 325 bp, Homo Sapiens
gccgtgggagagacgctcacgctgccgggtctggtatccgcggataacggcacctacacttgcgaggcgtccaataagcacggccatgcgagggcgctctacgtacttgtggtctacggtgagagcaggctgcggccgactgagggcgggggcggggcgccaggtggcgggggcggggcttgagcaaagaggccacataactcaggggctcaaattcgggttggctgcattctattgcaggtaaccgaacctgtctgcgcctcagtttacccatcagtaaagtggaaataaacaatagcacctatataacaaaaaaaaaaaaaaa

SEQ ID NO: 213298 - DNA, 660 bp, Homo Sapiens
  misc_feature (14)..(14): n is a, c, g, or t
tttttttttttttncatttagcaaagctattttatggcaacattgttacaacacaaaatagacattgcagtttacaattaacaattacacagtgatttcataacaatactacttactccaattaacaaaatatttctttataaaaaatatgttcaaaaggaggtttacattcacttcttcgtttaatatcaaggttgttaacaatggtcttaggagatgcaaagacgaaaaactacttaccttaaaaatctgtattcttgaagatatatactccacttgaataagatactgctcaaggtttaggcttcctggagaactcagaggattttgtagttgtacttaatatactcaatagccaaatttcctaaactttcataattttgctaaccaagggcccttaacaaagttaaaagacaccacagggttcaaaagtgaacaaatatgttgtttttgttttaagacggagtctcattcttgtcacctaggctggagtgcagtggcgcaatctctgctcactgcaacctccatctcccgggtttaagtgattctcacacctcagccttccgagtagctgggatcacaggcgcgcgccaccaagcccagccaatttttacatttttagcagaaatggggtttcaccatgccggccacgctggtctc

SEQ ID NO: 213299 - DNA, 356 bp, Homo Sapiens
cctcatacaacctgaccttcatcaaaacctttcggatgggcatggatcacacattgtatttctgtctcagctctttggaaagaggggaagacataatcttcctgctaatgttggatattgcattgaaacgccttttgcgtttcttgcctcggttggaagtcacaaagggattgaacttcattttggctgctcctgcttcggtgatggccgcaaaagggaagagaagggtttgtatttttaaggaaggtctccttctttccccacgtatgttttagttgtctgaaatccatctggctctgccagtttccatggaactaaacgtgacaagataaagagtagagaaaaaaaaaaaaaaa

SEQ ID NO: 213300 - DNA, 580 bp, Homo Sapiens; identical to SEQ ID NO: 49829

SEQ ID NO: 213301 - DNA, 445 bp, Homo Sapiens
  misc_feature (24)..(24): n is a, c, g, or t
ttttttttttttttatattacagngttttatttagataaatttcaaactccattaattaatattagaagttagaatattgaatattttggaaggtgatcgttaggaaacttaaaaattaaccaggataagatacaggaagcattgcattcaaggagagaaactgtaattatttttcatgaataagagaattaaatatttttaaaaaatattttaacatgtaaaataaggagtttgacatagatgaatttgatgttatgcctaatttttcaaatgcatatatatataaataatttaatttatggtaagttaacatcatcatgaagacataaaactttttttattattatactttaagttctggggtacacgtgcagaatgttcaggttttttacttaggtatacacgtgccatggtggtttgctgcacccatcaacccatcatcta

SEQ ID NO: 213302 - DNA, 431 bp, Homo Sapiens
ttttttttttttttatgtttgctttgttttattaactccttggagggacagaacactaccaattacacccacaaacgttatcgacatcaacagaactgtaaatgacaacacggcaatattctgcactttccctatgcctaggagctaattccactttacatatattatcttattatttcacacattaaccctggaggcatgtttggagttgcctaatttttatgtacactttttgataaggaactaacaaaaataacttgctgaaggaagaaaagggagactaagtccagaactgaatgaaaagcacatggtttcttcatcctccatcaccaggctgtctaacgaggctgaagaagtaccatccatgagtaagtgcgtcaagggcaaacaaacatcatcgcatatggacagtggtgtgaaattcgagaaat

SEQ ID NO: 213303 - DNA, 201 bp, Homo Sapiens
cggctgcgagaagacgacagaagggaaaagctgctccctaaaccctgaagccatttgctgtttgtaaacaagaggcaggaaaaggttagtgaggagggatcagtaaatgatgactgatgccccaagccttagtgtgttctaaactttttttttttcacccagaccttttcccagcaataaactattaaaaaaaaaaaaaaa

SEQ ID NO: 213304 - DNA, 580 bp, Homo Sapiens; identical to SEQ ID NO: 40980

SEQ ID NO: 213305 - DNA, 476 bp, Homo Sapiens
ttttttttttttttaggaaagaaaacacggtatctttattcaggatatggacggcactaagaaacaaagactatttgagaacttatcaagtgggtaaaatgctgtcttcaggtcatttgtacataataaacaaaatacatagatgcccaactctgagaaggaacttgagttgttatttaaaacaaaaatacagatgcaacatatcctaagtcgaatctgtgataatatagccaagattaaaagactacttgttctagctttcctggatacaaatgaatgccactcttgtgtagaataggtgcaactgtaggaacaagaaggtaatccatgagagaaggagcagcagactacagaatctgcccacataaatcagtattggcaacaaaacttctgaaattgtcagggattgactgtgccctggtgaatgtcaacatttgcctactgcatttgtctcaaaaaagatgcacttatttact

SEQ ID NO: 213306 - DNA, 445 bp, Homo Sapiens
ccagaacgcctacttctgccctggttaatttagccctaactctcatctgctggagagtcagctcccaaactgttctttcttgtaggcagaggatatgtgtgtgtgtattacatgggactgtctagaggttccatttcccaatagggtgggttgcctttccttgtcttaattaggcctaactgttccagagcagaggccatgatttagtggaccatgaatgattgagattttgcctgtgtactatcaatgccacttgaacccaagcattcactttaatacttactgagcatctcccatgtgcaaggtcctggaactacagggataagacagggtccatgccgtctcaaggcatttacggtttaaaaagacctttgtaattactaacgaaaatgcaaagcagaaagcagtctgtaataaagattaaaataataaaaaaaaaaaaaaa

SEQ ID NO: 213307 - DNA, 361 bp, Homo Sapiens; identical to SEQ ID NO: 48825

SEQ ID NO: 213308 - DNA, 527 bp, Homo Sapiens
ttttttttttttttggctaagccctatatggagctgggagatgtaaagacatataatgtcccagggatgcaatcgcacctgccccaagaaggcatgcacctcaaccaactttctcaactttgcctatcatgcttcgatctaaatcaaattgtgtttgtttcacagggtggaaatagaggacttgtgtgaggaggtgccactgtgattgagtcaacaatggagcaaatgaagcgctaaaagggtaatagcattttcctcaaattatacgatcatcattggaaacccagcattttgacaaagtgttcaaacatcagagaatggagttagtatcacgtagttgagagccatggtattgggccttacagtctgatttctgaaagccttataatgagggtggagtgaatatacattccattctttggctgtatttttgttccacaaagcctgcaattttcagtcacttgaaaatgtaattatagataatgtttgcatcagtagcaagaatacaataagcacacagggcatga

SEQ ID NO: 213309 - DNA, 709 bp, Homo Sapiens; identical to SEQ ID NO: 55256
  misc_feature (691)..(691): n is a, c, g, or t
  misc_feature (700)..(700): n is a, c, g, or t

SEQ ID NO: 213310 - DNA, 690 bp, Homo Sapiens; identical to SEQ ID NO: 49312
  misc_feature (664)..(664): n is a, c, g, or t

SEQ ID NO: 213311 - DNA, 560 bp, Homo Sapiens
ttttttttttttttgagacagagtctcactctgtcacccaggctggagtgcagtggcacaatctcggctcaccacaacctctgcttcccatttcaagcaattctggtgccttagcctcccaaataactgggattataggcgtgcaccaccacacctggctaagttttgtatttttagtagagacaggatttcaacatattagcaagtctagtcttgaactcctgacttcaggtgatctgtccacctcagcctccaaaagtgctgggattacaggcgtgagccaccatgcctggccaggcataagtacattctatgatgttcacacaatgacaaaattgcctaacgacatttcttaaagtgtatccctgttgttaagcgacacagggctacactatcttctcagccactaaagatatataaaagtacgctaatcctaataatctttaatctgagggtactgcttaacaaatctcaaagtttccataaactagccatctcactgctttaaagtaaacaaaatctccatattctgtttcaagtgtctcattaattaagcggcc

SEQ ID NO: 213312 - DNA, 573 bp, Homo Sapiens
tggtcaggcagcggtgagcctgatcacaccactgcacttcaacctgggggacagagcaagaccctgtctcaaaaagcaataacaacaaaagtccatccatattgtagcttgtgtccgtttacgttaagtattccttacccaaaatgcttgagaccagaagtgttttggatttcagatgttttcaaattttggaatatttgcatttacataatgagatgtcttccagatgggacccagagtctaaccacaaaattcacttgtttcatatacatcttatacacatagcctgaaggtaattttatacaatatttttaacaattttgtgcatgagacaaagtttgtattaagtatttgtatgttgaatttttcacttgtggcatcattatactcaaaaagtttggattttgtagtattttggatttggggattaggaatgctcaacctatatttcatttttttccatggccaaatattccccgtttatccatgtgtccattgacggccatctatgttgcttcttcggctattataaatctgctgatacaaacattagtgtacaaaaaaaaaaaaaaa

SEQ ID NO: 213313 - DNA, 639 bp, Homo Sapiens; identical to SEQ ID NO: 53332

SEQ ID NO: 213314 - DNA, 468 bp, Homo Sapiens
ttttttttttttttgtactttaaaacatttatcctacagatcacatatgtacataaaaatacatacatacatattcataaagatacatagggatttttcattacagcaatgtccttattagcaaaagactataaataaactaaatggtcatccatatgggtctgaacaaactatggtgcatcccaaaatggaatattatgataaaaacataatccccaagatagtcaaaaagcaaatcaaaaagcaatgtggacagctctctcattagtgtttgtatgcagagaagatttctggaaggagacacaagaaatgagtaacagcagttgccctgaggagcaagactgagagttgaaatcaaatggagatttgcttttcactgaacatcctgtaaacatgaaattttttccatgtacattactttttcaattgaacaaaaactggttaacttttaaaaatgagtgcagtcat

SEQ ID NO: 213315 - DNA, 445 bp, Homo Sapiens
ttttttttttttttcagttttatgttttttattgattcattttgaaacaacctttgaataattttcaaactaaaacaatattattttttattttaacaaaaacccatcttttctgtctcatagtttttttgtttattcatttttgtttttttagaaagagtcttgctttgtcgcccaggctggagtgcagtggtgctatcttggctcactgcaacctccacctcctgggctcaagcgattctcccacctcagcctccggagtaactggggttacaggcacctgccaccatgactggctaatttttgtatttttagtagagacatggtttcaacatgttggccaggctggtctcgaactcctgagctcaggtgatccaccgcctcagcttcccaaagtgctgggattacaagcatgagccaccgtgcctggccagtatatttcata

SEQ ID NO: 213316 - DNA, 502 bp, Homo Sapiens
ttttttttttttttataacttttgggcttgaaagcaccgaaatcttttctgaatgataacaacacaagatctaatataaatatatttccgtaattctttatgcattctataccatgattgtatgataatagcagaattttcttctttagcttgttttcttaaatgccattctctaaaagctctttgcaatattactgtagcttttacttgtgattgcattttacgttgcttccattttctgaacatagattggattataagagttgatgattttagcatttcatatctttgttgatcttgttttcttcttaaataagcacgccaatgcctctgaattgtaactgtagcccaaagatatcgtttataagatgtaacagcaattatcattcttatcctagattgcaggatgattgaataatatttcaatttcagaaatctttgtctagtggaatatcttctccaatatccctgaataagtgatgctgctttattttgaactttt

SEQ ID NO: 213317 - DNA, 478 bp, Homo Sapiens
ttttttttttttttgtggctgtgaaatactttatttgtcttcagattggtctggcttatacatggattgaacctcagttagggcagcaccatcttctgtgaaattcactgtgacagtatcacgtcttaagtaaccatatccccaagatatttcatttctcttgagccctgcatatcctgaggatctagtcactatccaccagtctttttatacaggttcttgagcaaatgtttatgtaatcatgcatttgtattgagaattattggaaagccatgaaagtgaaagtagaaagaccatttcgaagataattgtgacaattcagaggagagatagcaaaagcctccctgtcttagtttgtgctgctgtaagaatatgcttgatactgggtaattcctgaaagacagaaatttttttctgacaattccagaggctgagaagtttaagatcaaggtgccaacaggttcagtatctggttagg

SEQ ID NO: 213318 - DNA, 665 bp, Homo Sapiens
ctgaggcctgcagaccctccctaggatgatttttaaagtaatattcactcagtgtattcattagttcctccaaaagcccttttgcataaacagctcgtgcattcctgagaattcagtgcaaacagagggagtattatcaacccagttttacaggtgagcaagctgaagaggcagtgaatgttccatgagctgcaagcagtggctgcctggtctctgctccggggttctaaccctttcttgtcttttaagctaagggagctgtgagactgagtttagacaggctgggggtcaatatgctgggtatttatataagcacatactcttaagtttagatctgtgctacaaaccacgacctagaagtacacaacactgtcctgtggaggcagcctggaggggtggaaataataataataataacaacagctacaataattggatgcctcctccatgccccatactattctaagcatttttcagatcttaactcatttaatcttcactataaccctgtaagatggatgctattattacccccattttacagctgaggaaactaaagcacagagaggttgaataacatgccaagaacacacagccagtgaacagccgagcttggacagtgactccaagcttctgacccagtttacagctgaggaaacatctaa

SEQ ID NO: 213319 - DNA, 566 bp, Homo Sapiens; identical to SEQ ID NO: 49175

SEQ ID NO: 213320 - DNA, 518 bp, Homo Sapiens
ttttttttttttttaaagcagatctctctccaaatcatcacttctatcaagcctattgcttgagcagtgttatagcactcagccctcagggcaaagataagtcttcaccattgtcacacgtagcacacacatattcagccatatcatgctgaatgggaatacaggactttgtagaaacagaactgattcctgcagaatatcctgagatacttatcaagctgttaaaggagacatcagtcttttgtctgtattgcccttgacacctcctcaaggaaagtatctagaaattctttgtcttctgaagaaccctcagacctcttaggtctaatgtaggttaagtgccctgcagatctccctagaatagaaaagcaccttgaaaactgtagtctgacttaatagacacaaatataatgaaagcactaattcataagatcctgttattggaaggaaaaagcagcaaaaggcacaagcttcagatattggtcttgcacagggaaaagctggaattctaccctaaa

SEQ ID NO: 213321 - DNA, 618 bp, Homo Sapiens; identical to SEQ ID NO: 50327

SEQ ID NO: 213322 - DNA, 662 bp, Homo Sapiens
tgaatccctgacatcggggaggagcaagagaacagcacgctgacactgggtcagaggctaagaccgacatttctgggaaccactcccggaagggcacagaggagacgctttcagcctctcatcagccagcctggcctgtagctgctgcacgttatgagtgtgttcctggcatgactgcttctaacaaagaaatgctgaggcagtgtcacgctggtgtctgtcctccttacagaatgcctgaacagttccattgactcaaagtgaagatcaaaagaaccaaatgacagcaatagccaagtgtaatcatcagtaaccctgtgttctatccacaggtaaaaaacaatcatcctcttcattatgggtttcaattttaaatgtaatacatttttagaaatgcctatttccttttataatctctttatataatctaggttattctggctcttaggtcttcatttagctactgaaaagatttgatctcaaatcaatgatctaaccacccatgaccatctcccacctctctccccgtacaccccccagcatgaattctgggaactcaggtaaaatgctttctggaaacctgcctgtattagtctgttgtcaagctgctaataaacacatacccgaaactgggtagtttataaaggaaaaaaaaaaaaaaa

SEQ ID NO: 213323 - DNA, 436 bp, Homo Sapiens
  misc_feature (43)..(43): n is a, c, g, or t
ttatgttgattttattcctttgagaactgattacccctcaggnagtgatcaagatgggcttgtgtggggtggggccaaagggagaatggcaggcaaccattcagagaaagtggttttaccatctcgaggtgagtaatgtttaaagttttagctgctgtgaagtgggatgctataaaattcgggggagttttccttctacccggtttcattccccgctcccctagccccatgcaactgcatttcccctcttctgtgctgagggaaagaaaagctgcctctcctttcttggttttgtagcatggcttccagtacctgttagtcatctccttgctccttttttattttttttgagacagagtcttgctctgttgccaggctgcattccagactgggtgacaaagggagaccctgtctgaaaaggaaaaaaaaaaaaaaa

SEQ ID NO: 213324 - DNA, 558 bp, Homo Sapiens; identical to SEQ ID NO: 61457

SEQ ID NO: 213325 - DNA, 763 bp, Homo Sapiens; identical to SEQ ID NO: 41309

SEQ ID NO: 213326 - DNA, 533 bp, Homo Sapiens; identical to SEQ ID NO: 49579

SEQ ID NO: 213327 - DNA, 456 bp, Homo Sapiens
ttttttttttttttaacatgagataaataagaatatttattatgcatgttttatacagtaacaccaaaataacgctcagtaagttacacagctgttttctagaaacatggcaaaagaaaaaaaacagtaggaataatatgtattactcaaaattgaaaatatggtcatcttttaaacagatttgaattcatgatttctacgtaaacaaaaacatcataaatatctagaaataatcttttttaacaatgcactagatactatctaaaggctcaattttattgcacatatttggtttaggcttatttgatcaatacatgcagaaaaataaattacaaacgtgaatttttaaaaggaatcaggatgtcattttgtactacaaaaattagatgagggttgatacatttcacagcttaatcttcagaaaattttcttcagctattgcataaaatcactgat

SEQ ID NO: 213328 - DNA, 885 bp, Homo Sapiens
aatcttggctcactacaacctccacctcctgggtttaagcgatctcccaccttggcctccctagtagctaggattataggcgcccgcgaccacacccagctaatttttgtatttttgtagagacagggtttcaccatgttggccaggctggtcttgaactctgacttcaggtgatccgcctgccccagcctcccaaagtgctggaattacaggggtgagccaccatgctcggccaaaagtaatattttaagaaatctttcacggaaaaaaaactctgcattacaaaatgtggtggcttgagtaacagttacttctctttcatgaatttctttcagtgggcattaactgtccatttagcttcattaacagttttaccacgagaccagcctgttttgtatgtactataaagctcattttattttccatgctatggatctgaaaacaagtatcagtatctcccaattgccacataaaacaaccatacttaagactgatgagtaaagccttagtttccatgttgaggagatgaagtccttttatattcactcctacatacacagggatgactttatgattgctggggcttgcctttgtaaatatctgtactgtgaaaaatgctgctccataagtaggaatttcccagcaattctgtaagaacatgcgctgaaggtgatgcattttcttactgacaccttcaactgtactgagagtcttgtattcatgaagtatgcgatttgttcagtgaggtggcttaactttcagttctggtaacggtacgatgggatttagattttcctcatttgggaagcttggctggtggtttttacctcccatattgcattagacaatttgcaaaagcagcctgccaatgtttacaggcttgcc

SEQ ID NO: 213329 - DNA, 448 bp, Homo Sapiens
ttttttttttttttaatgttcttaaacattatgttttattctttgattctttgttgtactattaacatgactttctaccaaaagaaaaaataaaaaaaaaatattctttgctaacaatttctttacaatgccaacttagatcacttttctttttgaaagacaaaatacaggtgaaaacagttttaaaaagcatgtcaacagtgattttttctcttttcggaaatatctgctcaaaataaagtgtactgaatagaagcaattgtcagttcaatttacaagaatgccaattctcaatattaaaataaacattaataaaatgcagtattttgtaattatgtctgtatactgcacacaggcattataaatacacctataggtacacattatgtatatctttacccctactgtgttaacttctgtttgatagccacagtatgagttataaaat

SEQ ID NO: 213330 - DNA, 545 bp, Homo Sapiens
ccaggctggaatgcaatcagtgacatgatcttggttcactgcaatcgcgccactgcactgcagcctaggggacagagagcaagactccatctcaaaaaacaaaaacaaaaacaaaaacaaaccagaattggctttgttattttcttaaccctagacagaataggtggtcaaaggaaaagggaggagagataccagataggtttgcaaatatggtaaagttcattattacccaactgctcctttgaaatctaaaagcgttcttttttctccaggctgacactggccacatccacatgaagaatgtaagcacatcaatcagtacagatgccagctgagccctgtttctcctttttaaaccaaatataaaatttgaagtcctcccacaaccatctgaatggacctccccttcggccagggcactctaaaatttaacctgaaaggctggtgctggccatgatgagcagtgggggtcagacattcctcactctaccctccagcatgaacatgaacacacactttaagtctggtaagaaacgtttagtctc

SEQ ID NO: 213331 - DNA, 475 bp, Homo Sapiens; identical to SEQ ID NO: 53100

SEQ ID NO: 213332 - DNA, 463 bp, Homo Sapiens
attatgcttctccaagctcagtatctttctgattttatatcaaagtaccgcaacaatgcatcattgtagttaatttatttcaagaataaattcctcatatgtcctcaatagtacaattctaattttcttctattcataagatgaaagaaatggtttggagcatagaatagaaagtgcacaaattgagtacataaaatgggaagcaactgatttctcagctaagaaaggctcatttatcacagaacacaattgcttttctccccccactacgcttcccataattgaaaaagtgagtccctatttttcacactcatataaatctatgcgatttggatgctagtcttattgtattattttgtaaaactttctctttggctcataatccttcctaattgtaaattgataaactttgcggatgacatctgctcgtagaataaacacttcttccaaaaaaaaaaaaaaa

SEQ ID NO: 213333 - DNA, 765 bp, Homo Sapiens; identical to SEQ ID NO: 50333

SEQ ID NO: 213334 - DNA, 482 bp, Homo Sapiens
ttttttttttttttataattcttatagatgtttattagtttttagatttaaaaaaaaacagggcttataattaaagcaattgactaatgatctcacagcctcaaggttgtatgcaaacctagattagaaatactttgtctctaaaaataacaaaatgaccataacattttttttcttacaagtttgaagtggtcaattatgggtaacacatacattcctaaggaaatctgaaatggtcttgaagaataagtttctttgaaatggtaagtaacacaaaaagtgtacttctttttttggaaaatgattcacaaataacccctttaaaccaacaattggtgatttatattctggtcaggattttggagtctgggcaatgccattacttagctgttttgactatgagaacttttacaaatttattctgacttctatgatctttaatctcttttctacacctgaaaaataataaagattgtaaacta

SEQ ID NO: 213335 - DNA, 665 bp, Homo Sapiens
  misc_feature (652)..(652): n is a, c, g, or t
ttttttttttttttgagacagagtctcgctctgtcgctcaggctggaatgcagtggcgcgatctcggctcactgccaacagctctgcctctaccgtggggtatattttaaaattatacacatgcacacatatatatcctaaacgaaatacgtggcatgtagtaagtgatcaataaatgcaggtcttcagccccaatgaagtggtctgccatgctaccccaaatcaatgtccttcttgactgctaagctggctgtcaaataataccctagtaatatctgctcaggtctccgggtgcaggtaggcagctgctatgccagcaaggtattcgggctgcttgtccccacatctctcttcttccctactacccgggtttactgcatctaatcattacctggatatcaccacaaaaagcattactaccaggttttaccagatactggcattttattttaattggaattgttccccatggataattctggttaactttattattttactttagtatacagtttcgagcatacagaaaaacattctttctgtaacacatacgatataatctcaaacaattttgtggaaaaggaaatggatcagggcctgagatgatgctaaaggttgttcttagaaattcctgccacaaatattccccagnttactgctggtgt

SEQ ID NO: 213336 - DNA, 477 bp, Homo Sapiens
ttttttttttttttgggttctatcctgactcatgttttatggggggctgggtgggagggttctgtgctggctgaggagctctgctctgctctgctccttgggagacggcctagtggctgccggtccttggatgctggggcttggctggaggcacagcccccactttccaggggtcccctgcacctgccagcttcctcagcctcaggatttcgtgcttgtacctgcccaggtgctggtccacgtactcctgtagctcagaaagttgctcttcagccatcgtggcccggaccagcagctgtgcccgctcccgttccagctctgcctgggtgctgcgggagaagtcccggagcttctggtggatctgggcccaggatgcagcgtccaggccctgtggctctgatgttcccccctgggaggctccaccgggtctcttttttggggatgagagcagtgccccaggcccgccgtgctggtcct

SEQ ID NO: 213337 - DNA, 779 bp, Homo Sapiens
cacatacactttattgaatatcatatttggtgtttaatttttgctaggattataggctggactccagatccaaacttgacatgtagcagacccattaaaaacatacattaagcccctagcactgttttaatctccatggcctggctgagcttctgccatctgtcttcctaggcaccatgaggtctggacatctcatttggcataactcagctgtggccattggtggatctcatccttagtactagtccctgctggcaggggtgacccaggcccacataagccattgctggcctccttggaggacttagagaatcctgagattgcccatgaggatggacatgcctttcagtctagcacccacctttagtgatgcctgtggagattgagaagctcacaggggccttggatgtctttcttatacctccattgtctgcagcgtgactcccatactcttgagccaaggtagagaatttttaggaggcttgtgtggaggtttatggtggcccccatggttctgtgagactggaagaaagcacagaccccttagacttctccccaaggagaatacgtgagactagtggaggaaaggagagtaatgaaatatgcatttcgtgtcccaggctatcagagcacagctctaaggaaaaatacagggcatcgtatagcaactggcacagctctgtgagactgggagatattgcacaaccttgaaaaatcaagatgtgaccctactgaatgaacaaaataaatctccaataattgaccataaagaaatacag

SEQ ID NO: 213338 - DNA, 480 bp, Homo Sapiens
ttttttttttttttccagacaccacaatgacttagagaatcatttcatctccaagagctgatttcaaattatgtaacagtaaatgaaagcactctgtaactggtaaagcattacaaatgtcgtaatattcacgatttaaatcatatatggatgatgtcataaataattctaaaaagttggtattttcaacataatcacattttttaacaactagatttttgttaagcttttcagcactattccagaaatacttatagaggaaggacaactagtagacaaactgttaccttatttcccaaattcacggttgggaagaagagctacttccactgaatgtaaatgaaacattccacaaaatcacataaatctttcaggacattcccaggtcaatggtcaaagcagattagaattactttccaataaccccaggtttcagccttacttctttgctgagatgacagtttggacaggctggataga

SEQ ID NO: 213339 - DNA, 545 bp, Homo Sapiens
ttttttttttttttaaaagaaaagcttaaggacatttaataatgtagaagtgttccgatatagataaacatctttccagaatctcaggtaaagaacatcttggctgaactgacaacgaatctttttgagacacaacgtttctgttcccaaaatgattacatcgacaacaggtgcaggagggtagaacaaagaaagaaccgcggagattacattacaaagatatatgtttaaatgagatttgtaaacttaatttgtttgcaactccgggtgcaaagaagagaataattatttttctctatactgtagttaattgaacttaagtacaactgtggaaagtatatttaaaagttagacagattttacaattttaagtttgatcaagtgttttccagtttgactaatcataactgggttaacacacatagcaagtttccttaagggcaaatggaaaatgctggcatctgagcggggtggtcagaacgcaccccacagccagaggcgccttcccggtaacacagcacgccttcctgttagtgtgtcgccag

SEQ ID NO: 213340 - DNA, 470 bp, Homo Sapiens
ttttttttttttttacctttgtacttacaaactgtggtcatgttaagatacagaacatcagccaagaaccagaaccaactccttaacataacatagagtgggccctgcccaccccccaatacaatacatttaagataagcttcttttaactgttgaattaccccagggagggagaagtttgcatgattggttagggtggcaatagggggatggagtcagggttcactcccagaaggtaatgcctaactccttactttccatgatcaggccacctgaagaccatgagcaggaaggaaggggccctggcagggatcagaccagctggggatgcaaggagatgtagatcccatggcccagtgaaatgcacatggtccaggaacccagtcagccaaggcaggaggagccagagtgggcactgcttcaggtctaagcctctcccacaggggttcctggtccccctcttcattctg

SEQ ID NO: 213341 - DNA, 528 bp, Homo Sapiens
  misc_feature (16)..(16): n is a, c, g, or t
ttttttttttttttanatttaggaagaagctgtttattctgtactgtctttggcctccacctaaggtctggcatcgacccacccttcaggctcatagttcagcgaggttagagcacttagggagaagcaggtaacacatccagggtttgagagaagaccagcacacaactctcagtgatctggatagaggaagactaaattactgtggttcaggcagccttgccaggtgatgtcttcccaaaacttctcagatgtatattcctccctgattgtgccacctaggcctccttcccttcagtttgggacttaaaacttccaccaataacgtgagtatgtgcacccatgcagcagcctgtccgaggactcacaactggagacacctccctgcttggcgctgcccagaaaactatgtagatggccaagaaaccgacttccattataaaatgtttttctgtgtgtaccaggaaaaagatgctcaaaatccaaatcaccactttattatgtggcagtcaccatggtgccagcctc

SEQ ID NO: 213342 - DNA, 638 bp, Homo Sapiens; identical to SEQ ID NO: 55457

SEQ ID NO: 213343 - DNA, 572 bp, Homo Sapiens; identical to SEQ ID NO: 49188

SEQ ID NO: 213344 - DNA, 643 bp, Homo Sapiens
ttttttttttttttgaggcagtgtctggctctcttgcccaggctagagtgcaatgatgcggtcttgcctcactgcaggctcaacctccctggtagctgggactacaggcacgcgccactgtgcccagctaaattgctttgattgtgctttgtcttcgggattgtactggtaaagccatgtttcagttcctattgcagttcttcgaataagtgcttcaggatcttgatcgtacttgtctagactttctatccaaagctctgctcttgtctacagctgatctgggtgcaaagggttttaacagccattgagtggaaagcttgctcaactttaatttttcagtcagaattttgtaagctgaaccagttgaaatgaccacagtgttggctattgtttctgctcttgtcagtcctcttgaatcggcagaaacaagatgaatttttttccccgtaaattgatgtggagggcatgatgttcaacatcatctcaacccttcctgaaacaatttatccagctggtcatcatggttcatgcctgtgatcctaccactttgggaggctgaggctggcagatgactggagcctaggagtttaggaccagcctgggcgatatggcggaaccccatatctacaaaaaaaaaaaaaaa

SEQ ID NO: 213345 - DNA, 658 bp, Homo Sapiens
  misc_feature (19)..(19): n is a, c, g, or t
ttttttttttttttgagtnatataacatttattctgtattaataatcagtacataaattaattcaacttgaaaccttttttctacagagtactatttaatattatcatctgatccatagtaatttagtactaattttaatgagaaaaaatgaaacttttactttcataatagctcatccacttaacatttttacaaagaactactataaatatgtaacactatgcaggcttttttctacacctagtcacaaatcaaaataagcatactgtttatttaaaaacggaacactttcaaactgctgctgtattcagatcaccaccttccccacaccaaattaattgctctctctgtgtactcccctctgtgccactcatgttgcagcattatccatggctctttgccttaacccaacccggtttctgttgtcactgctccctaggttgagttcttggatggcagggagcctgtctcccttatcaaatagtgttaggtatgagttatgcctaatacgtgtgttgaatcaaattgaatttaattaggacacctgaattttatgtagcttccttctaatttttgtaactaaggagcattacaaattttcttttcaaaatgtaccataaaatataccatggattgaaattttgaattatgtataag

SEQ ID NO: 213346 - DNA, 612 bp, Homo Sapiens; identical to SEQ ID NO: 50120

SEQ ID NO: 213347 - DNA, 714 bp, Homo Sapiens
  misc_feature (700)..(700): n is a, c, g, or t
gcaaacatgagatgagaaaccagccagcaagtcaatcagaactctttcttcatctcgtctacaatattttgtatttataactgtaaattagtgtatagtgtttcactccagagacttcaataatacagtgttatcaaaggacttgtacagatttcagagaaagacacatttagaagatggagagttctccgttatgttctatctgagagtcagtatgaaatgtcaaatctaaaagtacataattcagaggtctatttcaaattaataatcatttgagcataatttctccactgtcagagacgactgttattttattttcaatcaaattaaaagttgtttttatgcatatcttatttttagttttatgttacttgtacatacgtagcagtacaagtgcatataaatcctgtaagagtataaatcctatagaaatatattaagctgataattatgtctgttctgtttgatcacagagttgcaacaaataggcctcatttcctaagttgaggaaatgattttctcattttatatgagacttgtggtgtggaatttcaaggtagaaccaaaatgtgtggaatgaatatttcaatgaagatgcgttctgctgctaatagcaggaaatcccatctagtggctttatttttctttaacccgttatctcacatagccgatagatccaagggctgggcatctccagagntgctcaactcagca

SEQ ID NO: 213348 - DNA, 496 bp, Homo Sapiens; identical to SEQ ID NO: 53788

SEQ ID NO: 213349 - DNA, 454 bp, Homo Sapiens
ttttttttttttttggagaccggctttctctatgttgcccaggctggtctccaactcttggactcaggcgatcatcctgtctcggcctcccaaaatgtgtcatacctttttaattgtgcaatagacaagtaaaaagggttaagaagaactgatactcttggaaaaaagaaatatacctttcagtgctaattgggcatttacaaaagttagttatatattaatagaggaaggaactccaaaacgttgaaatactataggctaaattctctaaaatagaataaaactagaaattaatataaacatggaaacaacaaagtctcttaactatctaaaaatttacatatgctaaaaaatcctggattaaagagaaatcaaactttaagacagggttgtccagtcttttggtttccctggaccacactggaagaagaatagttgtcttagaccacacata

SEQ ID NO: 213350 - DNA, 462 bp, Homo Sapiens
ttttttttttttttcaaatgttgccaaagtcatgggaactctagttaggaagatttcccctacttagagcatgtcactctggcgtggaccttcattcatctctttccccggcctggggttgatccattctcccttcttcccccttctcctgccctgcccccaccttctcagtcacaatctttgtcttcccagtttggcaggacatcccaggggcccctgggctttccttcctgaggttagaagatggtgctttgaaagaacaattgctcctacaaccatcaaatcaaacttttagaagctgataaagaccttaaaaatcattcaatctcctcttctttctccttctgtagatgaggaatctgagggtctaagaggagacatgagctgctgagattgactgagctaggcagggccagacatagactccacgggcaggcccgcagtctttccaccaggtcaggc

SEQ ID NO: 213351 - DNA, 546 bp, Homo Sapiens
ttttttttttttttagtttgttttggttcccaatatataatctccactagatgctgggaggaaaatgtaattttattagggagaaacaagcaaaacaatcactaccttagagagcaaagtaaagaaattggggctgtaacttacaagccccagagaattaaaagcaagacaccccgacaagctaagaaaggtacagataccatttggcatactatctgccagaaggatcctaaaaatggggtgaatctagggacctacaactaacccatccagaatactgcaacctcctcccaccctccggggcagggggcgacacagagcagttcaacaggacccctgagccccttcatcagatgctgagaacaaaacccagagacaaaaggcagaatgacgctgaaagtaggatttggaatcagagatgcgaggttgagtttccagctgtgtaatatgagggaccagctgtgttctctagaaccctgggttccttgaaggtgccctggagctacggggtgggaggagtggcagaagagcaggcaggaactggcc

SEQ ID NO: 213352 - DNA, 684 bp, Homo Sapiens; identical to SEQ ID NO: 48928
  misc_feature (2)..(2): n is a, c, g, or t

SEQ ID NO: 213353 - DNA, 469 bp, Homo Sapiens
ttttttttttttttaagtttttaaagtcatgtttattgaagtatgattttacattcagcaaaattcatcctgttaaggtttgacaaacgcacagtcataccataatcaagatgcagaactgtagaatcacactaacaattccttcctgcccttgtaatcaacccctttttgatcccaaggaactcactgacctgtttttctgtcaaaagtatcaaatttcatcactaaaatgatctacagtactatggaaaaatgtgtaagcacataaaatacacaaacctatttttttaaaagtgagatacttaaaatttctttagcataccaacaaaaaatgaaggtagcattgcattttactacagatgtgcggacattcaaagtccaccattgtcgtatatatggctcaacagtaatatttaagaatatactgctgggtatagtggctgacgcctgtaatcccagccctttggga

SEQ ID NO: 213354 - DNA, 437 bp, Homo Sapiens
  misc_feature (432)..(432): n is a, c, g, or t
ttttttttttttttatctaacaactttaataaatcgattataaatgaaaacacaaagaatgaagtgttcttttccatgcacaaggcccctaacttggatgtggttcccccgctaggcggtcaccaagtgatgccctccctgagggcaggcgttgatcgagtctgttttcttctcatgatttctcctgttgggaacatggtccctggcacatggcctcattgatgtttgccaaatgaatgaatgaggtgctgggtggtggctgcaggcccatgccactcccaccctggtcagcaagccccttgcatggcacgcggaggcaagcagggaagcacgtttgtggttctagcatggaggagacccccggccaggcagcaccagaggccaagcccaagggtctgtcttccttgctgggcaggcgaggggcattgcagngctca

SEQ ID NO: 213355 - DNA, 480 bp, Homo Sapiens
ttaccattaatactcaatagtcctatttttcctattgtaaaatccaccatgctaattgcagaaggtatattagaagtcaactggagccattcattattaacaatcacttaagaggcagtttcattcaagcaagcttttataaatcccaactgtattctcccccagaaaggcagcagtcaacatccttaaacatactaacttaataatcaagtgatctaagtcttcacacaagtcaatgaagaaaacatttaacaaaatagaatcaaagaaagcattttacctcaccactaaagagcacctttgaaactagtggctatgctttcagagaagggctgttaaaatagctaggcttacaattatataaaacacatttctctagctctttaacaaggtgtcacaagcgattattacatgcctttgtgaaattaagagctggtatgtatggctaaggaaccctgttgatccctctgtaaatgtcat

SEQ ID NO: 213356 - DNA, 445 bp, Homo Sapiens
ttttttttttttttaattgcaatattgcatttcttttatttaaaaaaaagcttgaagcaaatataaaaatgttaacacttacatttttgtatatatagacactttttgtattttctacatttttcatatgtaaaccctccccactctccacacatcattattcattatgatcatgaggggtttatcccaggatattcattgatagaaaattaaaagagtaatttataaaatcactacatgaacaagtaaaaacacacacagcaaaatttacatcaaaattattacgtggtacagaatccaaaagtcataaaaagcaaaagctatctttttttcactctggcacccatctgttcttccctggagtcaaacactattaccaatttttaggtatacttccaaagatacttactgcatttacaagcacagacttatattgattctaaaa

SEQ ID NO: 213357 - DNA, 612 bp, Homo Sapiens; identical to SEQ ID NO: 49582

SEQ ID NO: 213358 - DNA, 621 bp, Homo Sapiens; identical to SEQ ID NO: 49108

SEQ ID NO: 213359 - DNA, 541 bp, Homo Sapiens
  misc_feature (25)..(25): n is a, c, g, or t
ttttttttttttttaacattacatncctgcattttattcaattccatatgacaaaaatagtaacctagactaagacatccatttcagtcagcagatgtgtcaagccacaagatttaataataaaaaatattgggtctaggtaacaatccccagctgctcagagaggtcccagccccgcatggcattacagtataaaaatagtgtctctcttcaccatgcagagggatggcctagccctgcacacaggagggtcagtctcactgtaccttcatgagccatcttatttacaacactttacatttctctttagttatatacacatccttttgggagaagagagaacactatatggtaccaaatactaaccaaaaacaaacaaacaaaaaaaccacacacacacacacaccaaaaaggacacagataaataatgaaaacattcaactgctgaaacacagtgaccttaagccacctcagttttctctgcctaatgcttgagacaccccgagccctcatcccgtgagaagaggtggcatggtggggc

SEQ ID NO: 213360 - DNA, 428 bp, Homo Sapiens
ttttttttttttttggtaggcaatcgaataacataataatacaggcatctctgaatgagaaaggctgggcatctaatataatttctgaaagccaggacagttacatgatccagtgaaatgacataagacaaggaataaatgtagctaaagaatcacaccagaaaccagtataccttcctatatcaactttccactattctctactcatcagatcctaacccaacacccagatttgaaccagtgttcaaaagactgatatgagctaatgtagacaatcagagcaaacacaatgattttcaaaggtaacaggaacttccttggcctagtgcacagagaacatttaatctaccagagaactctgcggagatatggaactaatgcaatctctacttttttttttttctttttttttttttgagatagagtct

SEQ ID NO: 213361 - DNA, 519 bp, Homo Sapiens
ttttttttttttttgagatggagtctcactctgttgcccaggctggagtacagtggtgagatcttggctcactgcaacctccacctccctcctgaccaagcgattctcctgcctcagcctcctgaatagctaggattacagacgtgtgccaccatgtctggctaatttttttgtatttttagtagacacggggtttcaccatgttggctaggctggtctcaaactcctgacctcaggtgattcgcctgccttggcctcccaaaatgctgggattacaagcgtgagcaaccgcgcccggctataacaggttatttcaaaaacctatcaacaaaattaaagttaccagtacttactcttaaacagtatgctacacagtttattacaaagtagtattttagcttattgcctaattatattttctatgtgtagtataaatacatatgccatgtgagaggttttatcttttatacaaactgcaggaagacagaagcaactgtggggtaacttaattaagcggcc

SEQ ID NO: 213362 - DNA, 505 bp, Homo Sapiens
ttttttttttttttaacaatagtccttacactgaattcatttatcctgaaatggcagacatcattcatttttcttgaaatggcagaatagcagctgcagacattaatctatggtacataccaagcaattcaactttttcttgtaatgtcagacttttctcttcttcttgggagcacttccagtatcactagtgctagtggcatcactttatacgagtcttatggtattattcaaagtttacagtattgcattaaacacgatgaaaaatacatgagaaccacaagagattaccttttactgtggtaggcaatttactacagagacaaactgctgaaacagaggtgatcagtgccgattaaaatgtgtggcattttaagtggatacttgcagcacctgaactcactgcaatagcaataggatgtggctatgaaaattattagagaagtatagtatataccacagtaactttttgccactctcacttaatactgcatctttacatttg

SEQ ID NO: 213363 - DNA, 721 bp, Homo Sapiens
cttaaacctcactagagggaagtcttctcaagtttcaagcaagaccatttacttaatgtgaagttttggaaagttataaaggtgtatgttttagccatatgattttaattttaattttgcttcttttaggttcgttcttatttaaagcaatatgattgtgtgactccttgtagttacacttgtgtttcaatcagatcagattgttgtatttattccactattttgcatttaaatgataacataaaagatataaaaaatttaaaactgctatttttcttatagaagagaaaatgggtgttggtgattgtattttaattatttaagcgtctctgtttacctgcctaggaaaacattttatggcagtcttatgtgcaaagatcgtaaaaggacaaaaaatttaaactgcttataataatccaggagttgcattatagccagtagtaaaaataataataataataataaaaccatgtctatagctgtagatgggcttcacatctgtaaagcaatcaattgtatatttttgtgatgtgtaccatactgtgtgctccagcaaatgtccatttgtgtaaatgtatttattttatattgtatatattgttaaatgcaaaaaggagatatgattctgtaactccaatcagttcagatgtgtaactcaaattattatgcctttcaggatgatggtagagcaatattaaacaagcttccacttttgactgct

SEQ ID NO: 213364 - DNA, 349 bp, Homo Sapiens
  misc_feature (21)..(21): n is a, c, g, or t
ttttttttttttttgccaagncaaacatccaatgttagaaaatgtaagcacaaactgaaaattcatagggttttaaattctaaaattcggaatactaagaagtaatcaattaagaccagttaggtttggactttcaaggaatgaactcaaatatgatcaaatattcacatctctggtatcacctaggattggctaacattatgcttaaatatattaacttgtaactgcttctgcatcccagagacatatatgcctgcttgtctggcaaggttggacatcctgttacaatctatattcaggtctctccactttgaaaaggaactagaatcaatcaaggagactgtgacta

SEQ ID NO: 213365 - DNA, 454 bp, Homo Sapiens
ttttttttttttttaagggagggaggttggacaggaggaggctataaagcttcctgaaggtcaaagagcaggtcatgggcacagaatgaggccagagacaagtctcctaccaccagtgttaatcttgagttagtcacatttaaccagcctcaactgcaaattcttcgtctataaaggggtgtgtcactcaccttcctcagagtagtgttttgagaattgactaatatctaaagcatgaaattctttagataaaagacatcatgaacatactaaatatttttatggaaagagtcatgccctctgtgaagtgccaagtagatattatacacgattgttgccctcatgtacacattgaaatcgcctcactcatctttctagttcctcaaaattatacaaacaatataattacttaattcattaaacaacctattgaatgagcatttactatgctatt

SEQ ID NO: 213366 - DNA, 463 bp, Homo Sapiens
ttttttttttttttatggtagccaaatggaaattttactgactctttgattagtatcattacacttcacatatgagttttagtcttcagttaattcctgggaaatgccaaaaataaaaatactgccacagagaaattagtttttctctgctacatattggctcaaaagtaagcacctgaatattaattgtctacattttgtatttttaagatcttatttcaaaacaatttacattgagagtattatttatgctcttaaacaggatcagggatatctttatttctagactctgggaagataatttacctgagcaaaatgcaaagataaataattatacaaaaatttaagtcagttgtcaaagctaacaatgcatcacctggcttcaaaatttaacaaacaaagagtctacataaatatctttcttgtctacacatctttcttgttatggtaaacattttgtttt

SEQ ID NO: 213367 - DNA, 766 bp, Homo Sapiens
attagcaattagagtacatttctgttttcctgtagccccaccaaaactggcattgtcatattaattttccttattttacaagttatttccatattttaaaggaagttgtgcttttttttcctgcatgggaatttgttgtattatatttagctaggttacattgcagtaacaagcaaaccccaagtctcagagacttaaactaacacaaatgtctttctcgcttgatctgtgtgtcccttgtaggatggctgggggtgcggttccacagagtccctcaggccaggctgattaaggagacagcactctctgagagctgccactcgaggcctgctcagtggacaacacagtagacaggagaggctgggggctttgtgtggacttttcactactgatgtggccaggactaccaacacagtctggcttagcaggtagaacttagtgagcattcctgtctctgcccagccatctcctcttctgtttgttcctctccagcaacttctttgtccagtggaattggatcctctgtcttcatatcagctcttaatgtattttaggtaataagatttttatcaattgtgtctttttctttctttgctttccatattgtattgtgcaaaagtttaacgtaagttttggacacattcatgttttcctctgataccttattatcacaaatttcttttctcaaagccagagaataagctgcttttctttgagttgcttaaaatggattttatttggctccttatgacacttgaaattcatc

SEQ ID NO: 213368 - DNA, 561 bp, Homo Sapiens
ttttttttttttttgcagtttagtctgctttagcaaaatgttctcctaaagaacatttaaaataaagtactcttatagtgaaataaagtttttttgtttcattttacagaccatagccactaatgctttgcttttgttcatttcttttttcttgatttcatgcacatatctgttttaatatatacaatatatacaaacagtacatccacatttttctcgctcattcagacaaaactatacaaataattttatcttgccatgttattgacctttgtgaataaaatatttagcaattaatataatccctttcaaatattttctcacttttcatttctaccttctatatatacacagaaactgctcagtttggatgagatatagccaaaaacatggaatttactggccagaacgcagcaccacactgatcgtttaggtggcaaatgtccaggcaaggttcatgattccttagaattactacagcttccaaggttactaaaaaaggctacatgcgttaccaattcttaagtaattctcattgcacatgaaagtaaggcaaaaaaa

SEQ ID NO: 213369 - DNA, 577 bp, Homo Sapiens
  misc_feature (379)..(379): n is a, c, g, or t
  misc_feature (532)..(532): n is a, c, g, or t
ttttttttttttttgagggttgcagacacatatatttttgaggctgggtgacgagaaaatctagagacatgagggacataaatgggcctggcagcctcggctctttgcggctgctggcaggactgagctgtccgggttctccccacacttccagcacagctgtgctctgtgtcctgcctcggcgctctcgcaaatgaagctgcaggccaagaagccccttgtgagtctgtttttcacactgggcctggggaagggttggggcgaactctcggctctgcctggaagggtcgtggagcaggtctcaggtggccacggatatgtgcgtgaaggacagctgaccagttggcacggagcccttcacactgaccaccagccttgngtgacgtccctggcctcagagtgacctcaggggaacctttccccggcctgggagccccgtggggactggagacctatgcggttcttgactcacctgccctttgcatcccctctgtgggtggaggctctggaccatccacccagtggtgccagnggcacccttttcactccccagctgtgattaccaaaaatgcgtctg

SEQ ID NO: 213370 - DNA, 439 bp, Homo Sapiens
  misc_feature (40)..(40): n is a, c, g, or t
ttttttttttttttggggctactgatattccttggtttgnggctgcatcactccagtcctcaccttcatgatcacactgccttctcctcttctgtctgcaatctccctgcctctgattaaagacacttgtgattgcatttaggacctacctagataatccaagaaaatctccccatctcaagatctccaatttaatcacatctgcaaacacctcatttccacgtaaggtaacatagggttcatggattaggacctgatgtcttgggggccattattcagcctactacaacatatatttatatacttgtgcctggatgagttctcagtactttaagtgtcttaacttcctctcaaacaatatatgacataggtgctattatttccatttttcagatggtaaagctgaggcagagaaaggctataaaaatttgcccaggct

SEQ ID NO: 213371 - DNA, 652 bp, Homo Sapiens; identical to SEQ ID NO: 45824

SEQ ID NO: 213372 - DNA, 469 bp, Homo Sapiens; identical to SEQ ID NO: 50255

SEQ ID NO: 213373 - DNA, 791 bp, Homo Sapiens
  misc_feature (10)..(10): n is a, c, g, or t
  misc_feature (33)..(33): n is a, c, g, or t
  misc_feature (36)..(36): n is a, c, g, or t
  misc_feature (727)..(727): n is a, c, g, or t
  misc_feature (787)..(787): n is a, c, g, or t
cgaggccagnaattcggcacgagcggcacgagnagnacacagtaaaaatagaattcatgaaacatttctaaataatgggtgtatagagattctctttatgtgtggtatcagtgctctgctatgtaattatttgttatattttaaatttcaatttatgtgttctctcttgcccccttcagccccgtgccacataatttttgtttttggtggaaccattcagccttaaatacttttagtatatatcgtctgagaatagggacataactccaaaactactatcacacccaagaaatttgactttgattcagtgccatctaatatataacccatattcaaattttctcagttgtcccccaaataactggattttctaattttctttgatccagcatctaataaaagttcatatgttacatttagttgttctgtttcttcatctttctttaatctaaaacagttcccatgccctccctttaaaaataaaaataatctatcttgacatttctggagtctagaccagttattttgaaatgttcctcattcttgatttgtctgattattttcttactgttaattttaggttaaatctttctggttaccatatagagtctgattattttttaagaagtgtagtattcagttatagagaatcttgacttgttctgcctgcttgcacctgcttttcttagagtcctaacctctcaactcaggtgcaaggaagcagagnttgactacttttgtgggtactgaagacctagcttattgtaacaacaaaaaaaaatgtggnttta

SEQ ID NO: 213374 - DNA, 679 bp, Homo Sapiens
  misc_feature (34)..(34): n is a, c, g, or t
  misc_feature (646)..(646): n is a, c, g, or t
ttttttttttttttgttagttaaatagtttaatncagagcggttttacagttctaaaattaacaagcagacttgtaataaaagagctccaatgtttgcaaaatgaccttgtttccattctgaatctgactttttaattgtaaaggttagcattacatttaaaaggactcaaaatggaaaaaatggagtgatgtatattatcatccgtgttttgtgacgcaactgatgaaatccctgaatggatattgcttcagctttgatattaaaaaatggcctgacaagaagtccttaatcaacaaaactgatcacaggtggctgaaagaatgagcaaaacccaaaactactgtcaagttcatattgtatcacattgttggtggatgacactggctccagatatacaattaagcccacgacactttattactatgaataattatcatgaaatttctctcacgttgatcaacttgtttctgaaggttttctttgttcatttaaacttgcataataaacatgcaatgaatggtttcttttgaaagtgtattttttgcagtctttttgttttcatacaaatatttcataaagttgcaatgttgcatcagagcattaccaaaataatagcaggagcatatgggggcgggggcggcggnggggggcaaatgtgaatttagctgaatgagaag

SEQ ID NO: 213375 - DNA, 651 bp, Homo Sapiens; identical to SEQ ID NO: 45687

SEQ ID NO: 213376 - DNA, 415 bp, Homo Sapiens
tccgtcctcctccccattttttttttaaaagaaagctgttttcccctcatcatatccctcttgagttttgcctggactttccctctcaagtgtgtcaatcaggtaaactgaggaatgcatggaagctgaggatggagcttgatgggctccctgtcctgggtgtttgctctctgaagtggaggcctgaggaaggtagtacttccacaaaagggagggacccgggccccagcctcaagctagtgggggaggcagatagcctgaatccaggggattttctgggcttcttaaaatgtccattgtgagttccccgtgtttgggattccactcattttggcattcacagtgcctggaatgtcttagattttcagcaatgcgtgttgaataaatgaatgacataggcaaaaaaaaaaaaaaa

SEQ ID NO: 213377 - DNA, 465 bp, Homo Sapiens; identical to SEQ ID NO: 40576

SEQ ID NO: 213378 - DNA, 539 bp, Homo Sapiens
  misc_feature (13)..(13): n is a, c, g, or t
ttttttttttttntcgtcaagaaatttaatatggcaccaggagatttgcataattgacctatttggctttctgcatcaagtttggtgtcctgttgcagaagctgagcattgacgggacagaggcataaactgcagcgcttgataaaatagagcccagtattctgaggttagtgaagaaaacacaaagacttgacagatgcactcccagatcgcatctcacagtcattcaaggtttagggcaaggcatttccatgtggagtctcaccttttcttgtcccagtcatgcatcttggagttccttggctaagtctgcagggaggagaagcagcaggcttgatttgcatcaataaaagcagcgatctgtgctggccatgctaaccctgttggctattagggggtgggggcactctgtcaaggggagtcactgggacggtgtaggatcagccttcagagcctgctgcctgaccgtagaggaggaacctgcacacaccctgctgttttagttcacgagcagctatcaaagcctgttagccatcctg

SEQ ID NO: 213379 - DNA, 787 bp, Homo Sapiens; identical to SEQ ID NO: 54915
  misc_feature (646)..(646): n is a, c, g, or t
  misc_feature (726)..(726): n is a, c, g, or t
  misc_feature (743)..(743): n is a, c, g, or t
  misc_feature (776)..(776): n is a, c, g, or t

SEQ ID NO: 213380 - DNA, 483 bp, Homo Sapiens
ttttttttttttttgctgtgaaatcttttatttttgttttatgacacagcatcaatttcatgaatactttgaaagggccattagaaaaaataagagccaatttgggtcatttgagaaacattttcagcacaattacagtgggggcacgggccgttcggctccagctgggttttcccagatgcaacaatcgcggttctggcttctccactggtggggatggggatcgcgccttcggagctctcagggcgcctgtctgtcgggggctgggtgcgtccacagccccgggggatggcgcgtggcgtagcccaggaacggcatgtgggtgggtctctgacctgcttgtgcagggacttgagggacctcatcccgatggccgaggcaggggctccccacgggataaaaggatccggcctggccttggggtccaagaggagggccaagggagtggacctggcccctgtcccctctcctcctcgaaacact

SEQ ID NO: 213381 - DNA, 424 bp, Homo Sapiens
ttttttttttttttggtttaccaatgctttaatataaattttgcaaaggaggaagggctcaacaaaatatacgccctgcataagtcagtgaaggtccaaattttcaacccaattaactcagggtctgttttagttttgaaaagatcaaaaccttaaaaaaaaaatctaagctggctgaatttttacaaggcaggaatgaaatactgaagagagacatattcttgaaccaaaacaagctgaagaagagtattgtcccaaatattgcacagggccgtcgtaggatgtatttgctgtccctccaaaaactgcagaagcttccgattgtccacccgcacttgcaccatgctctccaggtctctgttttcaggcacacccacagccgactggggagggtttccaagatttttaaaataactttgaatgg

SEQ ID NO: 213382 - DNA, 542 bp, Homo Sapiens
ttttttttttttttgagggtattagctgtttactgacaaaagagacatttcaggacctcagaaggccagacactcccataggttggatggccctttggggagtctgagcccatttccacaaaatgcattcgttagacccacacacagtgcttgagccccctagacacagaatagtcttgtcctgttcttcaagtgactgggctatcatctgaggaatagtcagcttccccccaatactgggggtgacgggagacttttaagggtcatccccaggtttgtatggcattcttggggcaaacagcagaagggatgactgccctgatgcctcctcatctctggcagcattgcctagtgcaacagctctggccagaacccagcctggtctacagccataccatcctgaacatgccagatcttgtctgacctctgaagctaagcagggtcaagcctggttagtacttgggagaagctggtgtggctagaccgtgacctgaggaccccagttatttcacccatcctttgtggatgacagcacctggcct

SEQ ID NO: 213383 - DNA, 773 bp, Homo Sapiens; identical to SEQ ID NO: 46956
  misc_feature (3)..(3): n is a, c, g, or t
  misc_feature (10)..(10): n is a, c, g, or t

SEQ ID NO: 213384 - DNA, 489 bp, Homo Sapiens
tttttttttttggttaagatgtgagttggaaatgtattatttgaaacatttaaactaatttttgtatttaacagcagtctcagacatttgtcttttcaactcagttgagttgtagatatcaaatagaaatgtccagttttgcctcttttaagtactgtccagttgaaacctcctgactcatgtactactacacaaactagaaaatgcccatttatttttatgttgattcaacactccagatacagattgatacatatatactaatcattttatttcatgtaaaagttttacatctagggtgcctatttatttttatagatgctttcatccagttataagcttattataactttgtaaatatttcagccaacagttgtaatgtttaaaatacttaccttcagaatgttatattttcatgtgaaatcaatttcttctaattcaaaaaaattttaagataaactgatttttaagtttaaaaaaaaaaaaaaa

SEQ ID NO: 213385 - DNA, 592 bp, Homo Sapiens
  misc_feature (7)..(7): n is a, c, g, or t
agaaatngaaaaaagaggactgccttatgttgagaactgaccagagattgtgctgggccagtgtcactaggagggagaaacagatgatgcaggtcgggatgaggcccctcccaggggcttggacactgtccactccctgctgccttagctgccgttgcatagtgtcccctcctgtgcctgggagcttctagcccaggtgtggtgttctcacccacccctgcagacttacagaacttgtaaatagacagcaccttgagatttcatcactttatgcagatttccacttgggtcgttggggacagggtcttggcctaacagccgtcctctgacatccacaggctcccaccacaccacgattgcagtcatcggggaacttcttttggtgtcaggaatgattggcttaaattaacatttgtttgcaagatcaattattttttagcatatagtttctctccaaagaagcaactaggtctttaaagatgtcccagtgcttctgttagatttttgactcttacctgcataatattccaaagcactcagatcaaaataagacttttcccagcaagtagactcaaagaaaaaaaaaaaaaaa

SEQ ID NO: 213386 - DNA, 471 bp, Homo Sapiens
  misc_feature (37)..(37): n is a, c, g, or t
ttttttttttttttggttgattggtctcttaccaagnaatatgggaacatactatattcagagcctactgaaagacaatgccatttttacagtagaagtcactggggaaaaacaatttgcttaataaacattcactttactgcaaactttaagggaatgcatccattacacaactgggaacaagagccacatgttcacatacacatatctatcctatgttactcgtgtgtgtgacggaggcaaaaaaaaaaagcagtgtttttactgaaaaaaaaatgtacctgttttgttgcagagccttgaaaaagaaaagcttaatccactctgcattttcacaagcaacaaattttgtgtcactgtgtatcctctgataatctattttaaaggaacatttcaagcaccagaaaaataaaagaaaaatatcccttagatgaatctgacttgtaaataaggaaagctattaagtgctta

SEQ ID NO: 213387 - DNA, 604 bp, Homo Sapiens; identical to SEQ ID NO: 46384
  misc_feature (26)..(26): n is a, c, g, or t

SEQ ID NO: 213388 - DNA, 622 bp, Homo Sapiens; identical to SEQ ID NO: 48085

SEQ ID NO: 213389 - DNA, 686 bp, Homo Sapiens
atgcctgtgagtctattcattatggaaaataaaaaagaaacaaccatttaaggctgaggcattttggttttctgctggcttttagattattaactgcattaagcccctcactacaacttcaccagtatcctagaaacaatttgggtttccttttaggcagggacaggaagtattcaaaggacagacatatggacagagttaggcccttcagggttgaagtctgtggtttcttgtgtctcaagactcaatgtcttgagaagttggtggaccctgtcctccatccaagaagtgctgccaaggaaaccaggggacctagcaaagagtcaggagaaaatggccaaaggaattctgacattccatacctgaatgaactgttttcgtgagtgctttgatcaccctatcccctatcaaggcgctgaacaggtggcccgcaggaaatctgctgtcgcaagaggagggctttgacttacttcccctaattgttgagtaaaaagtgattctcttaatttctgtattctgtttttcatatcaccagtagaagggtcctgtggatctaaatagagcacattttaaggctacagagtagtagaaattgatgtttagacaaggcagcttgttcaaaatctgaaaggcacacccagaagctttctctaaacattttggctcccattaaaaaaaaaaaaaaa

SEQ ID NO: 213390 - DNA, 666 bp, Homo Sapiens; identical to SEQ ID NO: 53735
  misc_feature (29)..(29): n is a, c, g, or t

SEQ ID NO: 213391 - DNA, 677 bp, Homo Sapiens; identical to SEQ ID NO: 41050

SEQ ID NO: 213392 - DNA, 514 bp, Homo Sapiens
ttttttttttttttaaaacttgagaaagtactttaattctgtaggcaaaggttcagcaaatcagctagcactaatcttgaccaaatgggtgagtcagcctcatcacagagattttttttttaatttagatgaaatttcacatttaaaaacatggtaactccaagcattcttccaaaaacaaagaataaacattggaatagtcacttacaaggacttaacgacttgtattaaacatattttacactaaagtactagatggtctctagttcattttagctcaaaccttccttaattctttgagtaatttcaccagactattctttaagtcttagtaattacaaatagaacctgaatgagaaagaaaattcagaattaaagttgttatcagtaagcctaattaaacagtgcagacagaaagatggcagtagaataaagcattctacattaggagaagggagaatataatcagtagttcacagccccatgaatgaagcacagcatacaacaaagtctg

SEQ ID NO: 213393 - DNA, 614 bp, Homo Sapiens; identical to SEQ ID NO: 48309

SEQ ID NO: 213394 - DNA, 545 bp, Homo Sapiens
ttttttttttttttacattgctttgtataatttttatttttcctttgattaataacttgatttttttcttatttgtacctatccctaattcattcccaactgaattttaaacattttaaagttcagcttacacattgatttttaaaattgtgtttacacgttgattttaaaatgtaagcattagggataggtaaaaagtgaataagcaaagtgaataagcacattctgtgaataagcactgaactaatggagttaaaacatgaatcaaaatatatacagataaattagatgtaggaaaaacaatcagaaccttcagtgacattttacaatcttatcaaaaagatatgttagcatttagactatttcaggtaatatagtaaacagttgattccccgtaagcaatgtatcaaagaaataactatcaaaataactgcatttatgtatagtgtgtactaaaatctctagtgttaacttatgtaacctcattttgttcatctccatcataaacattgtatccttctaatttaattagttcaatgtttttt

SEQ ID NO: 213395 - DNA, 536 bp, Homo Sapiens
ttttttttttttttacttgttgaacaagttcagatttattgaaagtaaacatttacattcgctacaatgttggaactattacaaagctggataaaagaggctttagtagcaatagaaagcaagagcaataaaaagtgaatagagaaaatatttggccttactgatctcttggcagtatttacattatgtacatattgttaaatatttataataattctaaggcaccaaaggctaaatagcaggttgcaatactatcctgtgcacaaaaatcaagaaatttattgtaaagaggctgtatagttaaagaaacataggcatatcttaatgtttacataatggagcggctgcatttttaaaaatctcaaatgatacattaaatattgggcagatcgaagatattatttttagaacattaaattatattgactatgtaaataagcactattttttactgacttgctggtaaatgtgaaatgtaatctattcgtcaacacagcttttttcacactcatggatatgttttgtctaaaaactac

SEQ ID NO: 213396 - DNA, 737 bp, Homo Sapiens
  misc_feature (43)..(43): n is a, c, g, or t
  misc_feature (696)..(696): n is a, c, g, or t
gggattttgcttcattgcccagggtgatcttgaactcaacagnatttgcccacctcggcctcccagagtgctgggattacagattacaggtgtgagccactatgcccagcctctactcttaaatttaaggaaaaaatagttttgcataccccaatcctctcaagcctctgcttcctagcccacactggtaatgaaaggccagaattacacttttgcctcatatgcagctttgtggttcttcatcctctgagcaattagttctaaagatcttaatccttcaaaggctgtaatgttacctggccaggacctgctttcagtcgcttcagatcaaaatgggtttaactgagtaactcaaaggccaagacaggggtaagggaaggacagcccaacactcaaagcaaatacaatcatcagcaaatacccttgcccaagccatcacacttagaacttaaaagcaggccgagaaagagtccaacagagaggctcaatccctgcatcattggaatgtgaggtacaaaaactccctggtcagattctcaccagtattaccctcagccatagattgaaaaccattgatctgcatacagagagaggaggaagctaagtaaaaagtgatgcttgccagctctgtgtatcctccaccaccggtgtgctagaagaaatccttaccctcgagtgaacatttggaaatttagntatattattcttctttaaggctaaacagaaaaaaaaaaaaa

SEQ ID NO: 213397 - DNA, 553 bp, Homo Sapiens
  misc_feature (24)..(24): n is a, c, g, or t
ttttttttttttttaaggcaaagnaggtttttatttaagtgacaacatttgagagctaaaaaccagctcacatcaaaatcaagacccagttgtaaaaatcttttaactccataatgctgtttttgtcttgttagaaatctgatatcttacattagcgtttctaacggattttgtacaaggcagccataaggaatataataaacctttttcaccacagaaccatctgtcacagataatactgaaagttacacacttaggaacagtcagaccacagacaaggtcagactggctgccaccaccaagtaaacaactagaaaaggacagcggggtccaagggtgggggtccctgtgcacgagtcgccctcctctggcctgccccccctcgggtcacctgcttctcctttgccccaaagagggtggagtcaaatgcagattttcctcccaactgcctgttagtgtctcaacaaggagagcagagcccaggtcaggcctcactgcttggacttaaccctaactatgatttttacgaaggttcccccaagcccggaaggaa

SEQ ID NO: 213398 - DNA, 676 bp, Homo Sapiens
ttttttttttttttaacccacccctggtcttagttccttttgccctgggagaggttttccctctcccagaccgaaagaagcatcctttgctttttcaagaacttttcgaactttttcaagaagtcttcaactctccaaaaacatcttctctcccaactagacggtcttgctcctaaatcttggctccaggctgagggccattttgaagccgagttaattgtcctccagcgagatgacttgggatgagatcagagcaagagctgtgtcggttaagtgtgagaaagaggccagaccggctaccgattgaggcttacaccgggtttctaaggcctcttgggccaaagcagcccttacaggattagaggcttcaaccaaggcccatgctgcagcccccatctgggctctttccagacctggcaattcacaccaccaattccatctggctgggcatcttttgcctctctagggtccccaccctgagcctcaacactgaactttcagggcttttgggcttcaacctctatccgcacacccccccaccctcatcatacaactttcttgcctctgagtctgtgcacacccatgtctctggtcccagcaaacttatttattctataagacccagctcaacctccattttggagcctcccctgtcatgctcccataactgcacaga

SEQ ID NO: 213399 - DNA, 738 bp, Homo Sapiens
tttttttttttatattccagtaaaactttatttagataaataaggagctagacagattttgcccatggaccatagtttgatcatggccaacctatgatctaaaccaaagtccctaggcaagttgcaatagaaaagttgtgtgagacagtgagattttgcctttgttattcaatggcaagctagcccatgctgacacagaaattggtcccttgttttttaaaatgctaaaatactgaacactggcttaatggttagctggcaggcattcaggaaattgctatcagaagatggaagaaataacttacacaagggtaatttatattatggaaaggtgaaactgccccttgagataacctgaaaggcagatcatctaccctttactaaagaaaaagacagaaaaacaaaatattttgtagttgctgttcactgcacttgacaaaacgtacagaagagatgaactcagaaaagactggtcagtttgcaggcaaaaatgaaaaggaagagaattcaaattcaagtacttactgggtaggatgaggcaacattttaatatcaaaaagaaagataaaaatgggaaatccttttaaaaataaataaaaagagaaatcctttagccaaaaggttgattaaaagccagttttgccgccgggtgcagaggctcacacgtataacaccaacattttgggagcccgaggcgggcggactgcttgagtccaggagttcgagactagcctgggg

SEQ ID NO: 213400 - DNA, 472 bp, Homo Sapiens
ttttttttttttttctgagcaggcacagtttattgggggtagcttcctggggtcattgcaacagtggacagaaggtctggccagtcctccccactgcacagctggatggagccctgggagggagggaggcaggagtacgtcatttaccgggatttacagacaccgctcgctggacggtctgtgaggggctcgctgcctcatggactgcacggcagatgaactcatctttctgctcccattcggccctggtcacctccaggcggctgaagacgaagaagccggagcccttggtcttgcggggctgcgtcgtgctgtgccgggcgtccgggagctgcacctcgttgtgtagccactgcaccgagatgtcctcaggcatgaagttctggatcaggcaggcgagggtgcgcttgtcccgactccccggccactccggcgtcgcaaacgcatagacttccggggcagcacgcgggcc

SEQ ID NO: 213401 - DNA, 459 bp, Homo Sapiens
  misc_feature (364)..(364): n is a, c, g, or t
  misc_feature (385)..(385): n is a, c, g, or t
ttttttttttttttctgactcacatagaattttattcaaaggcctaatatctagaaagaagctcaactttacatataataagcaagaaatacagattaaacatagggatattttacagagaaagggctagataccgccaatgtatactatgatgaatataaaagccaaaccatgtaaatgtctctttgataagttttttttccaacttaatgagattgagttgttagccattaaaaatataacagggacctctgattttttaattcagtaatagaaagaataaattattaaatatttttacataatacctttgccttttgtctacaaacacaaacacatttacacatactgaatgtcttacaanggcttctctttttatttttanataaggctggttaaagatttctcatatcacttacaataggaatattttattttatttaaggagataccaataca

SEQ ID NO: 213402 - DNA, 786 bp, Homo Sapiens; identical to SEQ ID NO: 49599

SEQ ID NO: 213403 - DNA, 758 bp, Homo Sapiens
  misc_feature (730)..(730): n is a, c, g, or t
agacaagagtggcaagacagtgtattttctctggaacatagtccatcctcccctcctcacggtctctgcctgagctcagagccccatctgctttcccccagaccctcttgactcggggttgtctgagagcctgcaacattggcatcacctggggcttgttggacatgctgactcttggattccacccaggcctgctgtagcatatcttctactgtaacggaatcgccaggtgatgaatatacacatccaagtgttggtgtgctgccctagaaggtcaggattaacagttggtattttcccgttgtcccaagcacctattctcctttaatccattctgaacatcaactgggttctagtttgaaaacaaaattcagctgtgtctgttctttgcctaaaatccttgcttggcttcacattgcttttttcctatatatcaacaataaacaagtggaatttgaaatttaaagcacaaaaccatttataatagcatgcaagaaattaaatacttaggtaaatctaacaaaatatgcatgagatttatatgaggaaaacgacaaaactgattaaagaagtcaaagaagtcaatggagaaatattccaagttcatggataggaagacttaatatagtcaagatgccggttcttcccaaattcataaatggattcaatgcactcctcataaaaatcccagtgagttgttttttggatacggaaaaactgattctaaagnttatatggaaagggagactgcctggagt

SEQ ID NO: 213404 - DNA, 476 bp, Homo Sapiens
ttttttttttttttacagttaattctgagcatattcatttctcttctaagttgtgaagtctctgaaggcataaattagttttaatttttcctggtatcctacagtgtgcactagcatggtgccttgaacacagaagacatttaaggatttgtgggatgattcagtcctacctcaaatagatttgtgaatccctctaagccaatattgacaagcaaacagagcaagattttatgaatgcattcactgaccagtaactcaccaagatagtctactaggtgtttctttctttttgcaggacaactcttcaattacttggaaaaagtttatggctactatggtttcctcttcttcaaggaagatatgccctgtttcttcaactgtacctcaaatattttggtcctaagctcttcccacaccctggtcatggtgtaagcacaagtgtaattgtgggacatattccctttcttttgcattta

SEQ ID NO: 213405 - DNA, 456 bp, Homo Sapiens
ttttttttttttttaaatgtttaattatggaactatttgaaaaacagaaaaaggtagaaaataatatagtagacattggggaactcattgcccagatttaccaggggttcatattttgtcatgtttatgtcaagtatttttatagtaaaatacaaatacagatatggctaaaaaccccatcaccccatcccattcccttccacctatcaccacaggccaccactatccttgaagctggtgtgtctctgtctcttcctgagcatttagcattattttgggtttttacagtttccaagtacaggtatctcactgtagctatcctttcacaatgtacatttcacttagttattatgtttttaggacttcgtctatattggtacatgcggatggagttcactttaattgctgtatctacaggcagtttttaattccttgctatttcagagaatgcagcaa

SEQ ID NO: 213406 - DNA, 656 bp, Homo Sapiens
  misc_feature (622)..(622): n is a, c, g, or t
tggattttgcctggggcagtcagaggagagccagggctgctgaacggccccaatccagggagaaaccaatctcctttctggctcccccatctgctgagagctacttccactcaataaaaccttgcactcattctccacgtccacgtgtgacctgattcttctggaatgccaaggcaagaaccctaggatacagaaagccctctgtccttgtgataaggaatgtgtctaattgagctagttaccacaagttgcctataaatggcaaaactaaaagaccacacgaccactggggcttcaggaactgtaaacatccacccctacacactgccagtatgagaaaaatttgctgatatgttttctgctgacctgatgacaatgttcctatggtcacactaaccactgctgggtaattttcatcatgactctcgttttcatctgctgaaaccagcctccccaagaaagacaactattttcaaactgaggaaataaagtgttactaaaccacagtgttctctcatggctgttcctggagttcttcaaaacacttgatattataaaatagaattattacagatcacctgtatgttatggatttagtcaaaatgataatttaaaatatggnttaaaataaaaaaactttattttttccaaagaag

SEQ ID NO: 213407 - DNA, 767 bp, Homo Sapiens
  misc_feature (727)..(727): n is a, c, g, or t
ctctaaatctatatcaagttactgtcagtgctatttccataagatgataacttctttcatctgtactgccactaccctctttacctcttacctggaacatgatgatggccgcctcatttctgctggtgtctgcctctattccacttcacccagagcggccaagagtcgtatgtgtctgcttaaaatcttttaatggttttccatagcacttagattccaaactcccccacatggttcacaagggccagaataatctggcttctgcctgcctctctgaccctcctgctgcttttgttcacggccctccagtcacattcacttttttttaggccccagaaggtagcaagctctttcccacctctggaacttttttcgagatggagtcttgctctgtcacccaggctggagtgcagtgactcaatctttgctcactgcaacctccgcctcccaggttcaagtgattctcctgcctcagcctcccgactagctgggattacaggcgcccgccaccaggcccagctaatttttgtatttttagtagagacaggttccaccatgttggccagtctggtcttgaactcctgacctcgtgatctgcccacctcggcctcccaaagtgctgggattacaggtgtgagccaccatctggaacttttttatatactgtttcctgtatccatagcactctggcaagcctagcctttttctcatccttcaggatatttgntgaatgaataagaggcagcaaaggggatggggcaaggagg

SEQ ID NO: 213408 - DNA, 564 bp, Homo Sapiens
gccctttatggaattacttcagctcagttatgtctatttcttttttttaatcctcctctctctgcccgtcagcttccattcattccccacctcccatctccagggaaggggtgaaaggatggagacagactgacgggttgcctggctgaggcttgttttagggtgtggagcaacccccagcccaactgaactgtctgggcttcggggagggaggaagaacccagtcagtcctagagcccacagaagtgagtggtggggttcagacaggcctggactgtccggcgatcacagacctcagagctgaggggttcctataagatcatgtggtccaatctcctcttcccaagagccaaggcgatgctgccttgccaagaccgtaagcctcagagggccaggctccaggaggggacctcgatcagggcccaggggaccccgggccgctcacttgcagacgctgacccactcggtgatgcggcactcttcgcagaccacgaaacagcaccagtggaagcggcagtggcagcgctcgctgcgcgtctggcgcaggatgttgtggccgcggcc

SEQ ID NO: 213409 - DNA, 742 bp, Homo Sapiens; identical to SEQ ID NO: 45300

SEQ ID NO: 213410 - DNA, 465 bp, Homo Sapiens
ttttttttttttttgatttgtcactagaatttatttataaagggaagacggtgaaaaattcatgattgaaaaaagtttaataaaattaaaaggtacaggtgatactgcattttttggctctgtttcactaggcaatgtgtaagttgagggttacatgtagaaaagttgtatatgaagtagaaaagatgcagctatcctcactttttaaaaataggccaaagactttaaaactggtcaatatcacaagtgatgaaggaaaattacattggctggacatccttttacatttctgaagtgcaacatttaaaattaaagttttagtgaacactgaatatgcagcatgaagatgcaatcacatatttgggctcaacatttcaaaatcagaagtatatttcagtaatacggttgaactttaattgaatagtaattggtaacttgtaggttttatggtacagattatgtttt

SEQ ID NO: 213411 - DNA, 643 bp, Homo Sapiens
  misc_feature (12)..(12): n is a, c, g, or t
  misc_feature (15)..(15): n is a, c, g, or t
  misc_feature (20)..(20): n is a, c, g, or t
attggccctcgnggnccagnaattcggcactagggaagtcccctaaggggctgcatttatccccatctccctaggggtgatcagcattgtgacagctgggcagagcagtggtgaactgcacccatgtccctgctcacatctcctaagatctcagaattgcctgaggttctagcgtgggctccttctctccagatgatgccatccccacccccctcatttccacacagcatctgaggcatcctgcactaaaagatatatgtacagcaaaacaaaaatagaaaaccagcacagcagagtggaggtggggtataaatatacccagatccccgctgatttggttactcggggtgagcatcagatggaaatagaagtttccgggggccaagagagaaagagggatgtaacgacaattcttttcaaaacgtgtcccatggtatgcctcgtggaaaaaatggttcattggtcaaatgaatttgggaaaatgctgtcaatatcaccgactcatggagcttcgcaaggcatcttagcttaataaaggttatgaaaagtcttgcagcaaagatgctgtttacccctgcttaatccagcactgcccaaactcattccaaataccagagcctctgtttgcaaaaaaaaaaaaaaa

SEQ ID NO: 213412 - DNA, 591 bp, Homo Sapiens
gaaaagtctgttttttttgaaatacctttttttttctatttattcctttaattattatacattagaaagaaatgacaaggattgcatcctagttttaaaatgctgaacttttaaaaaggcaattttatttttaagactttaaataactcttattagtaattggatttgtggcagattccaagagggtggttttggaaagcacagtggcttccggtggcttcagaccttggtttggaattgcaggcctaccgcacaccgactctggagagtgacttggagcctccaaattccaagcttcctgtgtgcgagtgaggctagcaaaccacattgagtaggacagcctgagggttaagttacaccatggatgaaaagctgatgcatggttctaacttgcccgggcttgatattcaaaagatgtctattccttttccattttctctcttttccaaaaatcctcttgctctgtttctgttaagacccttttgcaacactctgttttaacatggtgcttaatatattgtcagaaaccacattttccagtgcatatggtgcagtttttaatttctaatttagctttttaattaagcggcc

SEQ ID NO: 213413 - DNA, 655 bp, Homo Sapiens; identical to SEQ ID NO: 40468

SEQ ID NO: 213414 - DNA, 723 bp, Homo Sapiens; identical to SEQ ID NO: 49362

SEQ ID NO: 213415 - DNA, 469 bp, Homo Sapiens
atgaagtgcatttattaggataatcaacagttaccaggtccagttctaaacggaatgaaaactaccagctctcctgaaactaactgtaccctcgttaagtctcttagtgtgtggaactgtttcttcatctgaaaattggaaacaacaagacatgcaaggtacagcatgaggtaacgtgctcagggtgctttcaacagctagacttgtatactagttccagctgcgcagctctctagctaggtgactttgaacaagcagtccaaccttctgagctcccattttctttcctgtaatagttggataaaatcacctcgtagtggcaagaatcaagagacttctcaaaagttaaacatagaggccaggcgcagtggctcacagctgtaattctaagcactttgggaggccgaggcaggtggatcacttgaggtctggagtttgaaacctgcctggccaacatggtgaaactctg

SEQ ID NO: 213416 - DNA, 544 bp, Homo Sapiens; identical to SEQ ID NO: 49652

SEQ ID NO: 213417 - DNA, 587 bp, Homo Sapiens; identical to SEQ ID NO: 55839

SEQ ID NO: 213418 - DNA, 737 bp, Homo Sapiens
  misc_feature (675)..(675): n is a, c, g, or t
cggggaccttagtttgacagggacagggatggacgaattacggtggcggagctgcgggaggcggtaccggctctgctcggggagccgctggcgggtcctgagctggacgagatgctccgagaagtggacctcaatggggatggcaccgtagactttgacggtgagtctccttcccggaaaaccctcccgtgcttccagggcctaggctgagcccagcacctcctgggatccctgacgtggactgacccaagccctgcccttctctcccgcagagtttgtgatgatgctctcccgccactgaggctccaggagggaatatctgttgcccctgcggccccagacaccagccagacccaggctgcaggcctcccccaggagcctccaggatggagatggagacccagcagcccccagactacttctatccctgaaaacacctggcctcaatgttggcttgttatgttacctgcccaccctcatccttacctcctcctactcaagctgcctggagaagacctgctctcagctgcccaccgttcctcagtgtgagcaagatttgggtctctccagacctctgggaggtagggagttccctggcactggcagcattcagtggggaccccccagtggcatgatgaatggagaggatggctggaccccttccactacttatgnttataattttttttttttttaatgaacttgagccgggtgcagtggctcacacctgtaagccc

SEQ ID NO: 213419 - DNA, 681 bp, Homo Sapiens; identical to SEQ ID NO: 53656

SEQ ID NO: 213420 - DNA, 624 bp, Homo Sapiens
aaaacctacatcctgtttaggtggaaagtatctgagacttgagcacagccatagtctcatccaggtatgacatgtgccactgtgtctgaaattcctgagcaccgagggccgcttcaggcaccaggcactttgccaacctgagagctgtatggggctggactgtctagtctaactaggcagtgaaccctgtcctgaacagagcttgtttgttcataaagcactctaaagcagtgacttttaaatcttgatctgtgcataatctcactcctcccaaagagtcatcaagggagagcaaacacccaagggtaacgttggctcacgttcattttgttgttgttgttgaatttttgcttcctcctatgactaagcagaaagagagaaaagcagtgtttgggggcctcttctcaggctgtgtttaaacccaggtcacttccctcaacaggaaaatggattttgacaggccatcttgcttagagatttccctaatcacaccataattaatgccaaatggtttctttgctaaccttagtagcacttgaataattaacttttactcttttctttttttaaaagatacctgcgaatccactgaaaagtacattaaacaaaacagtatagttttgg

SEQ ID NO: 213421 - DNA, 473 bp, Homo Sapiens; identical to SEQ ID NO: 49247

SEQ ID NO: 213422 - DNA, 490 bp, Homo Sapiens
ttttttttttttttgtggaaaaaaaacttatttattgcctatgtgagctagtaaccagaatataaacagaactctcaaaacttgcaagaaaacaaatacaattagaaaacatgcagacatgaataaacatttcatcagagataataggcagatgtcatatgagaacattaaataaagttcaacattattatcctttagaaaaatgtacattaaaacaatgtgatatcaatacatatcagtcagtatggctaagaggatttgaaaaaacagaaattcattgatgatgggaatgtaaaatgatagtcactctggataacagagtgctagtttctattaaaattaaacttgtaactaccctatgagccaggaattgtatgctggaaatattttccagagtaatgaaaacatgtattcatatgaaacctagtacatgaatgtacatagcacttttattcataatagccacacactgactgaaaacaacaaatat

SEQ ID NO: 213423 - DNA, 492 bp, Homo Sapiens; identical to SEQ ID NO: 47085

SEQ ID NO: 213424 - DNA, 475 bp, Homo Sapiens
ttttttttttttttaaagacaggatctttaccatgcctagccttagtttccccattatatcaccagagagacactaacaaaggtcctcccctctcccttttcccatttcccatgtccctcacaagatgacagttgtagcgtagataagatcaacgtctagataaaaggttgctctgacatttttaattaataatgattttcggccaagcatggtgtctcatgcctgtaatcccaactctttgggtgggctgaagcaggaggatcacttgagcctaggggttcgagaccagcctgggcaatatggtgagacctcctgtctctaaaaaaaataaaaaattagccaggcatggtggtgtgcacctatggtaccagctgctacttggaaggctgaggcgggaggatcactttagcatggtagggtgaggctgcagtgagctgtgatcatgtcactgcattccagccagggtgacagagt

SEQ ID NO: 213425 - DNA, 587 bp, Homo Sapiens; identical to SEQ ID NO: 48158

SEQ ID NO: 213426 - DNA, 747 bp, Homo Sapiens
atttgcttttcttcatgaagtgaaatgactagtgatttgggcccaaaccagaatctttttagctcttgctctttctctgccattttgtgtgtgcagttgtgtaactctgctgcaagccatagccaggtgtctgtgatcactgcctcatccccctaccccactgaaaggaacagcagctgatgagaaggcggcaagcctgtggggctcaggaacagcgcaccagcagaaacggaaactgtagcaagctgctccttgaactgcgtcataaagagatttgtctttatcagtcattcgtggctattcatatattcagatactgaattatccatgccgttgagggggtcaggaatggaaaagatattcaaaatccacaggcaatccaaagctttatttgcaccaacagctttagcttctaacttgttctcttccagtttcccggaacttctattaagaatagaagtgaatggatgggtttgatcagggtaaagagtcaaatgtccaaatgatgggaaggaacaaaggaaggacagtaaatgattggtaacaccaacaggctgattcattcctgaaagatccagaggtaaccatgtcattattttttaaaggcaaagagaaatattgttatacactgggacttgaaactagtatttttggccagacatggtaattcatgcctgtatttccagtactttggaaggccaaggtgggagaatcacttgaggccaggagtttgagaccagcctggac

SEQ ID NO: 213427 - DNA, 760 bp, Homo Sapiens; identical to SEQ ID NO: 55904

SEQ ID NO: 213428 - DNA, 470 bp, Homo Sapiens
  misc_feature (465)..(465): n is a, c, g, or t
ttttttttttttttggagctttgcccttgtcactgaggctggagtacaatggcgcagcctcagctaactgtaaattctgcctcccggattcaagtgattctcctgcctcagcctcccaagtagctgggattacagatgcgtgccaccatgtctggctaattgttgtatttttagtagagatggagattcaccatgttggccaggctggtctccaactcctgacctaaggtgatccacctgccttggcctcccaaagtgctgacattataggcatgagccactgcacccggcccacacacatttcttaacatggaccagttaggtaaaattgttgatgcaaataggttggtgcaaaaggaactgcagtttttgcactgttcatatttgcaacaatgatgtgggaatgcattcttcaataaatatgggtatgttacacatcattttaatgcacatttctcactttgngtttt

SEQ ID NO: 213429 - DNA, 523 bp, Homo Sapiens
  misc_feature (111)..(111): n is a, c, g, or t
  misc_feature (204)..(204): n is a, c, g, or t
  misc_feature (361)..(361): n is a, c, g, or t
ttttttttttttttctgagatggttctcgctacgttgcctaggctgtagcgcagaagctatacacaggcatgatggcagcacactacagtctccaattcctgggctcaagnggtccttctgcttcacctcctgagtagctgggactacagggacgtgccaccccacctggcatgatacctatttcacagaatctgttactatanaaaaacagctctcctactcacttttttcttgtaaaattgtataacattattagcaaaactggagaatacaaattttaaaaaggaaggaagagagaaagaagaaaaaaacaaaattatagttttgtctcactaatgaacattcatttttgttttttanaaaaaaatgcctattatgagaaaaaatggaaaccaggagaaattgcagagaccatgttatttaaataaatagctgattatatagggtttattctaagaatagaaggaagtttagtattctaaatctgccagtttaagaaattaataaaggaaggcccagagc

SEQ ID NO: 213430 - DNA, 438 bp, Homo Sapiens
ttttttttttttttggtaaagaaaagtgctgttttttatttgttcttgaatgtataggttcttttaaaatcagctatacttccctttaaaatatcctccctcatgccccaaccgcttagaatccaatagccactcctaacaagggcctaggaggaactcatcctacatagccaagaaaggggtacagcttgaggaatgggcatatggctcaggaagcagcaccagctgataagaactttccccaaagcagctctgtttggcttgtgagtctcctttccctgccctggtctggactcccccagctgtgtcccacccctggaattcccctgttccttatgtggcctgatcttgagagttaaaatcataattaacatctttacagctggagagctgagagatcactgttctcagccattctcccaccacaactttatagat

SEQ ID NO: 213431 - DNA, 585 bp, Homo Sapiens; identical to SEQ ID NO: 50452

SEQ ID NO: 213432 - DNA, 773 bp, Homo Sapiens; identical to SEQ ID NO: 53025

SEQ ID NO: 213433 - DNA, 650 bp, Homo Sapiens; identical to SEQ ID NO: 49565

SEQ ID NO: 213434 - DNA, 596 bp, Homo Sapiens; identical to SEQ ID NO: 45956

SEQ ID NO: 213435 - DNA, 639 bp, Homo Sapiens; identical to SEQ ID NO: 44573

SEQ ID NO: 213436 - DNA, 496 bp, Homo Sapiens
ctattagaacaaatggctacatgtaggattattaaatcaaaagaatatctatatatgtgtagtttatatttagtcctgtgagaactgctggctcatgttcttcagcctgcattctactgaggtgttggggtctttttcttcatctgtaagggctctttaaatagtaagaatgttgaccccttgtcaataaaattacaaatgtattttcccagtttactgattgccttcaattttatttacaagtctctgctatatgttttgtttctatttagtcaaacggatcactttattttctgcttctgatatcatgtctttgctaacccaccctgacactgtaaaaatgccagcctattttccttttgtctccatgtttaatttttaatttagattttaattaaaaaagaacattttatttcacactgacaaactgccattacaaaaaaggaaaaaagaacatacttaagtatggggtagcaattaatccatcctttcccca

SEQ ID NO: 213437 - DNA, 722 bp, Homo Sapiens
cagaggaaatggccagtgatgaactgagggagttgaggaatgccatgacccaggaggccatccgtgagcaccagatggccaagactggcggcaccaccactgacctcttccagtgcagcaaatgcaagaagaagaactgcacctataaccaggtgcagacacgcagtgctgatgagcccatgactacctttgtcttatgcaatgaatgtggcaatcgctggaagatggaatcggcttcctgagatccacagaggagaggaaaaacattctgcacttggaccacgcctctttggaaagtgcttccacagatggtatttcctttgaacctggccacagccaaggatgggaaacaggaaggctgagccctgtcagaaaggagttgaacctaaatgccaccaggccatccttccctcctaaggaagctctgaaagtcttacccaagtctgtaactcagactgccccagctcctgcaaaggcagaagttttgttttcacgcatgggagccaaacaaagactcctcccagagtgctccttcctgccaagtgtcctgaaggaacagagtgtggtcacgtgcctattgtcagtttccaactgctctctgacttgcacgtgcaccatgtgatgtctgggccaccaggcaggctgcaggtgctccaaaagttctaaggtacttagcaagaagtacaagataagtcaggatccctggtttcaggtcccattct

SEQ ID NO: 213438 - DNA, 668 bp, Homo Sapiens
ccttggagttaaggctgacggccatctggttctaacccggcctcctgtcttcctgtcccactgacttcccgttcttcagctgctctaggcttccctgtctgtctccagaccctagcccacctctgttcccttcccaggctcagctcatccatcaccaactgccatggacccctcttcagcaccctgccccctcctgcagtccctccgcccagccagtacctggtttctgtctcagcggggagctgactcctctctgtgcccccagcgcagggctggactctgaggaggaggactcagtagataggtattgagtgatgagatgagggaatcggctttctgtggccgggaacactcctgctgcagggggtccacctgatgggtgagtcagagaaagactcaggcctgttgaaagtggatcaacaggcaggcagggagatggccagtagccagccgtccgtcctgttcacagcctgcggagtggtgaggctgcctctgtgttttcatggatctgagattcagaacatagctggtttacagccatggcccagttgtgtgctctggagtttcactgcctgaattttaacttgaaaatgtaggacttgggagtctctctgagccattctggcttgggagattgcctgattatatatttcaaaaaaaaaaaaaaa

SEQ ID NO: 213439 - DNA, 601 bp, Homo Sapiens; identical to SEQ ID NO: 55885

SEQ ID NO: 213440 - DNA, 592 bp, Homo Sapiens
ctgagctttgaacctcaaagaccaaaatgccctgcccattttcctgcttatcagctgaggaatctttacccacattgacacattggcttgttctgacccaagtgcatgcaggcttccagagcagattcagaggcctaacttagtcctttagctttcctcccagcacagaactcccaaggttatctgcaagtaggccttgcctagagagactgagttttcaagttgtcagttttcccaaattgtcctcaagcatcttcctctggaatcaccttactgtttagtaaacattcagaggacttgctacacatctgggcagtctgcattgtaattcatatgtgtttacacatttgtgtcttcatctgctaaagcacctttgaaccatattgtaattcataatatctgaagcaattattatgaattgtagtaattcataatattgaagcgattcataatatctgaagcaatccccagatacgggttaggcatggccctgctctgagcaggatggcaaaagtggcagtccgtgacgcagcccttgttaccccaggctattactaaatggtggtggtggttttatcttaattaagcggcc

SEQ ID NO: 213441 - DNA, 498 bp, Homo Sapiens
  misc_feature (42)..(42): n is a, c, g, or t
ttttttttttttttagaggttaaatgaccccatttgtggggnggtttattgttaaaatgattaaacatgctaaaatcacatggagtggctattccacttttgccctgactccatagtggggcaaatgggaactacaggagtcacttggtttgtgtggcctctggggatggttagacttggagggttagcggtgagcaggttagcaaagccccaagcatccttcatgtagtacacttttcccagcagtaaaaaaattcagagatttcccccttcttcacttttctttcctccctatatgtgccctacttctcattctcctatggccctggaacctcttatgcttctgcccgttatggtcttagactagatgatgagggaggcttttccttgacaccagcattccagtctcccttccttggaactaatctactcagcatgcactattgtggtaagctgcttgatttaggtctgcctagggggaaaacgaggctccagtcc

SEQ ID NO: 213442 - DNA, 467 bp, Homo Sapiens
ttttttttttttttaaggtaaatggtgattttaaaaagcaagatcaccaagaaatagaatcaaaagacagatatgaatgactacacacaagatcaactaatagaaatactgcaacacatttaaaaacatagtagtagctacttaagagaagcaacttcacaaatttctttttgaaactctaaacattttgaaaaagaccaaacaatcagggtaaagttatggagtgcttggccttgtcacacaggtacagacacagtgtagatggtattgtgagcagggtagctaaagaaaactgtattttctgcaaacagcttaatcttccttagataagaaactaaaaataataaataaaacattccccaaataataaattaaaacatttcctaaagtaatactagcccaatcaagtctagcttgaagaatctaattctaacaattagaaagacagggaaggttcaagattcaac

SEQ ID NO: 213443 - DNA, 669 bp, Homo Sapiens
ttttttttttttttaacacattctcacctctttgccctcctgttaaaggcttgaatacaaatgaggcagcatgggagtcttggcttggaaatcaggtctgcgttcttggtcccttcagtcactgacctaatatatgaacttagacaattcacttgcctctctggacctttaaatgaaagagttaaactgtaatggataatgtccctgggctctttcacataatccatacttgagaaatcaatgaatcaatttgaagaaactctaattctaagacataggtatcctggcacctgtttgaaacagctgaaaggaggtaaaggtcaggttcctgtttattatacatttagctataggaaaagaagcacatatatctatggagacacagaacctggcagcccctatacttgactaataaaagcaaattcctggaagaagcagagaaataggccacaagtgagactggcagtgtcaaaaaaggtctataagttaagtgatcaaagtagtaaaaaacaatggccataaccagacaagatctctaagcatagactatagtctagagaggtctgaatgggaaggagcccctggagcttctattagatggaaggacttggtccacagcaagtcactacggcatttggttcaaacccagttttctcaatctgtcaaccc

SEQ ID NO: 213444 - DNA, 661 bp, Homo Sapiens; identical to SEQ ID NO: 47879

SEQ ID NO: 213445 - DNA, 470 bp, Homo Sapiens
ttttttttttttttaacagagccttaatgaggcatggtttagttacataactaaagctagccaaccaagttctatgccaacctcctaagtctcacacacaaaataattaaataaccgcaagctaagacgaaatgactttcccagaaacaagtcagaaaaaatgcaagcaagtgatgaaatggaatactaaggaaggtgttgatacctgtagcttgatggtaacttttaacaaaacccaatagcaataaaaagaagccaaagcaaatatatagtaatcaaatttatatagcatctagagcatattaatgaaaatattgaacaaaaatatttaaaaggctccaaagtaatgagaactgcatttgaccatgctgatttcacttccattacagctctaagcttctgaaaccgcttgctcttctcgcagctgtgtacactgagcctgattatcaggtcatttctgtacttcttta

SEQ ID NO: 213446 - DNA, 635 bp, Homo Sapiens; identical to SEQ ID NO: 50586

SEQ ID NO: 213447 - DNA, 725 bp, Homo Sapiens
  misc_feature (21)..(21): n is a, c, g, or t
ttttttttttttttgggatcntataaatagaagaacatttttcatcaagaaataaaaacagtttacagcctaaacagaacaatgtcttcataagcttgtggaaaaccctactgaaatctgaagacttccaatcccatccagtgcatctatagatgaacaacaggcttcaaacttcaatatccacaataagaaatagttttatatagcacacaacacatatttattattgaaaaagacatttcacaaaacaatatttatctttattacatgtgatgtaccattttctctattccattttttcaaatgttcatacctagtaaatttttgtgttctgtgaatcaatttaaacaaaaaggggaaggggggaaaacagacaaggcatactattaggttaagtgagaagcacccaacatgcatagaagaaaatcctacccaaggcaggaaacacaagccttagtcccagctttgcctgagactttgcaagcctggacatatgctcaggtttgtactcttaggaagcacaccacatcaggaaaacagaatgtaaggcaacatctgcacacctccactcctaacacctagtgttgcctgacacaaggggaaattcctgctcaggaaacaggatagtaaggcagacgctgactctgaagtaatctgcctaggttaaaatccaagcatgaccactttactaactatacgaccttgggcaggttaattaagcggcc

SEQ ID NO: 213448 - DNA, 684 bp, Homo Sapiens; identical to SEQ ID NO: 52242

SEQ ID NO: 213449 - DNA, 791 bp, Homo Sapiens; identical to SEQ ID NO: 50771

SEQ ID NO: 213450 - DNA, 757 bp, Homo Sapiens; identical to SEQ ID NO: 50283
  misc_feature (734)..(734): n is a, c, g, or t
  misc_feature (742)..(742): n is a, c, g, or t

SEQ ID NO: 213451 - DNA, 515 bp, Homo Sapiens
ttttttttttttttacttaatagaaaattttaatttgctagagggacagtatacatccattaggtaaaagtcatatgtcatattaaaggtggagtaagtcctaagtagaaatcagtggaaagacatttccgcttttaagtacagtaaggaccagttggtggtaattataacaaatttattggaagaactatgatagcaagagatgaccaaaaatggaactggatatttagtttcaagtcattgaaaataagcagaaactagatgtttatgtaccagattaacgggtttctctgtcagcttattaggtgattttcaatggaagaatatgtttgagttcttaaatagaaacctaagaaaatacttattctagaaattagaatgtggctaagaataaaaggggaaaccaaaaatagcagggacggaagaagctaagtagactgcagcataaggaacgcagaaattccaactgtgttaggaactttgaatgtcaattattcaagcaagacaataaccac

SEQ ID NO: 213452 - DNA, 443 bp, Homo Sapiens
ttttttttttttttatgatttcatcacatattttaattattgcctttttagaaatacatcaattacataaagctgaatttaagccattcttttgagaatgtcataaagtagaggtcagcaaactttttctgtaaagggccatacaatacatatttcagtctctgcagaccatttggtctttgctgaaactactcaactctgctaacataacacaaaagctgccacagacaatatgtaaacaaatgagggtgactgtaataaaatgttatttatgaacactgaaatttgaacttcaaatcattttcatgcttcccaaaacattctacttttgactatttttcaaccatttaaaaaagtaaaaaccattcttaggtgacaggctgtagaaaaactagtcataggcttaatctggcccacaagccatagttcgccaatgcctgtca

SEQ ID NO: 213453 - DNA, 509 bp, Homo Sapiens
  misc_feature (486)..(486): n is a, c, g, or t
ttttttttttttttggtatgagtttggtaagaaatctctaccttttaaacatttttaaatgttggctccctggtgtgtgcctgtggtagttctcaaggaagcagggtgggcagcctaaggatgcgggcagcgagttgtgtgcctctcctatatcatccaggaagtgctaccacgggtgcacgggtgaccctgccccatctggcaccaactcaagtcatcaccctccaagcagctcctgccacatggaccctattgcagctagacctggcccccaacttccccactcctgtgctatcccaaataccagcgtacttttggtccaaagaggcacagagacttgcttgcacatagcaggcaccaagtaaacgttagctattcacctgctagtctcttatgctgagaactctggatgcctaatcctaaatacagcatggcggcccagtgcagtggctcatgcccatagtcccaacactttgggaggctaangcaggaggatcgcttgaggccag

SEQ ID NO: 213454 - DNA, 813 bp, Homo Sapiens; identical to SEQ ID NO: 55891
  misc_feature (690)..(690): n is a, c, g, or t
  misc_feature (746)..(746): n is a, c, g, or t
  misc_feature (756)..(756): n is a, c, g, or t
  misc_feature (767)..(767): n is a, c, g, or t
  misc_feature (789)..(789): n is a, c, g, or t

SEQ ID NO: 213455 - DNA, 766 bp, Homo Sapiens; identical to SEQ ID NO: 40612

SEQ ID NO: 213456 - DNA, 640 bp, Homo Sapiens; identical to SEQ ID NO: 53229

SEQ ID NO: 213457 - DNA, 744 bp, Homo Sapiens; identical to SEQ ID NO: 53479

SEQ ID NO: 213458 - DNA, 577 bp, Homo Sapiens; identical to SEQ ID NO: 48914

SEQ ID NO: 213459 - DNA, 399 bp, Homo Sapiens
  misc_feature (23)..(23): n is a, c, g, or t
  misc_feature (29)..(29): n is a, c, g, or t
  misc_feature (362)..(362): n is a, c, g, or t
  misc_feature (380)..(380): n is a, c, g, or t
ttttttttttttttaaaatcttncacatnctttattgcaatgctcagaatacaggtggctcaggagttagcttcttaaataagtttacacatgaggattatcaggttaacagatgggggatttgaggattaggcttgctactgagtctttaatatgatttctgttacaaagcctggaagttggaagttctacctatattcatttaaaagacttcatgttctgaatgtgaagcatgttcaatgtactcgttgtatttaaaaaaactatgaatcaaattttttataaaaaaagattttttttttttttttaggccaggtgcggtggctcatgcctataatcccaacactttgggaggccgaggngggcagattgcttgaggnggggagttcccagaccagc

SEQ ID NO: 213460 - DNA, 518 bp, Homo Sapiens
ttttttttttttttatgtaaatatttaaattttattcttaaatactatttattaatacagagaaatactcctgctataattttaagtgacacaatagtacaacaattgttaagaacaatccacctgtgtcaaagagacacatacacaaacacacatccatatacacatacaagcttggagaaaattctgaaaggatctcattgtcctagatggtggcattatgggcaattattttgcaaatgtcacccagtgaagaagcaatggtgcctttggaaagtatgtagctcttagttaagcttttatctggaaggtgctggagaaggtctgggcacagagctggttggctccatggttttgtgacctgtgccatcacataggaccccatgttcagaaggaccccactcttggtttaatgctctgctgccgtgtcttgaaattcttaataatttttttgaacaagggatgctgcattttcactgtgttctgggcctaatgattatgtagtcaatcttgtctgg

SEQ ID NO: 213461 - DNA, 695 bp, Homo Sapiens; identical to SEQ ID NO: 47078

SEQ ID NO: 213462 - DNA, 702 bp, Homo Sapiens; identical to SEQ ID NO: 55862

SEQ ID NO: 213463 - DNA, 391 bp, Homo Sapiens
caaaacattgttttattatgagaaattatacgggctcttactttttaatatttttatgacagtagaggaagcctgctgcttctcagtaaggatcccaaacaataaaagctggacttgcctgttgccactagtccattatcccaaaccgtgggtaggccgcttgtcatctgcctctctatgacagaaagggggatgtatgtgccacttcagctttttaatcaaatgaaggaaaccatataagcaaagggttgaggaaacagtgtaggtacttatgatactattatttaacatctagtattatttaacatctattattcagtgagccatgactgtgccactgcaattctgcctgggtgacagagcaagatgctatctcaaaaaaaaaaaaaaa

SEQ ID NO: 213464 - DNA, 614 bp, Homo Sapiens; identical to SEQ ID NO: 40656
  misc_feature (17)..(17): n is a, c, g, or t

SEQ ID NO: 213465 - DNA, 706 bp, Homo Sapiens; identical to SEQ ID NO: 50826

SEQ ID NO: 213466 - DNA, 611 bp, Homo Sapiens; identical to SEQ ID NO: 50610

SEQ ID NO: 213467 - DNA, 540 bp, Homo Sapiens
  misc_feature (18)..(18): n is a, c, g, or t
ttttttttttttttgttntagcagttttattctaatacaaaaaactgaaaacattcaagtatctgtcaatacaagaatggatcaataaactgtgatacactcattccatggaatggctaaaggaacaaactggtgacacacagaacaacaaggatgaatctcaaaaacatttggagtgcgatagaagccatacccaaaaaagtgcgagaaaaaaagataaataataatggttccaagaaatgcccagcagacagcccagaggcaaagacccacaggacggcgggccggtcccaggctgtcgatcctaattaagaaacttctgctggattttgcccagctccatttccaaactattttgggtcagtgacttctttatcccttccatgttgcctcattttgaactagaatcactgtaagtgttattctatgtctgtcacatcattccacagtaggggcagataagctgtttagaatggctaaaattcaaaaaggtgaacacaccaaatgctgtcaaagatgaggagcaagcagaactttcca

SEQ ID NO: 213468 - DNA, 648 bp, Homo Sapiens; identical to SEQ ID NO: 46531
  misc_feature (610)..(610): n is a, c, g, or t

SEQ ID NO: 213469 - DNA, 790 bp, Homo Sapiens
  misc_feature (9)..(9): n is a, c, g, or t
  misc_feature (692)..(692): n is a, c, g, or t
  misc_feature (790)..(790): n is a, c, g, or t
aaattattnctccgtatactgaaacagaaataaacgaggaagaacttacaaagccaagactcttgtgggctctttattttaatatgagagattcctcgggaatcagcagaagctcgtataatggcttgccttccaatgtttatgtctgctctgggcctgactgtggcctgggaaatgagcatgctgtcaagcaagctgaaacacttttccaggagatctttccaactgaagaattctgccctccacctccaaatccagaagacattatctttgatggtgatgataagcagccagaggctcctggaaccaataatgtagtaatggccaaactagaatcctctgaggaaagcaaaaacctagaaagcccagagaagcaccttcaaaattagaaaagagcaatctcgaaatgctgttttggacctccttcatggcatcagaattttctcatttaaaggacagtttcccatatgagtaattagaagtggttatatatgatgaatgctatgcagatgttgtctttaactctcagacattcattgaatatctttgttaacctatcaatgagtgatttattgattattgaacattttgtttagaatgggctatatgacccagaatcttaaaacagagttagctttattttagtattgggtatatatgtaagggttccatattagcaactcagcttaaangtaatgtatttgctaatgatcttcagattttatctttgtctacagaacaattagtaatacccaagtaatattttaattacttttgcagctggtacagn

SEQ ID NO: 213470 - DNA, 474 bp, Homo Sapiens; identical to SEQ ID NO: 48293

SEQ ID NO: 213471 - DNA, 351 bp, Homo Sapiens
  misc_feature (41)..(41): n is a, c, g, or t
ttttttttttttttagcaaaataaatgtcactatatcaagnataaagaataacattaggtgtgaactagcataggtgattcatgggaaacgaaatggcaaattcgaaaggaattctgggaaccatcgtactaggttacattgcctttttgcctgtagagaacccatgaggagaggggttctcagccttcccagtggaacccttctcttagttgcactggcattgggggatctcattgctgggcctaggtccaggcagggcagctcctggggcccaagggcgggctcactcaccagctgtcttccagtgtctgtgtgctgctcctgccctcctgcctcttctccagctccac

SEQ ID NO: 213472 - DNA, 476 bp, Homo Sapiens; identical to SEQ ID NO: 50612

SEQ ID NO: 213473 - DNA, 678 bp, Homo Sapiens; identical to SEQ ID NO: 49137
  misc_feature (3)..(3): n is a, c, g, or t
  misc_feature (33)..(33): n is a, c, g, or t
  misc_feature (39)..(39): n is a, c, g, or t

SEQ ID NO: 213474 - DNA, 714 bp, Homo Sapiens; identical to SEQ ID NO: 45176

SEQ ID NO: 213475 - DNA, 654 bp, Homo Sapiens; identical to SEQ ID NO: 50176

SEQ ID NO: 213476 - DNA, 477 bp, Homo Sapiens; identical to SEQ ID NO: 40467

SEQ ID NO: 213477 - DNA, 488 bp, Homo Sapiens; identical to SEQ ID NO: 40460

SEQ ID NO: 213478 - DNA, 664 bp, Homo Sapiens; identical to SEQ ID NO: 45394

SEQ ID NO: 213479 - DNA, 427 bp, Homo Sapiens
gtcagagcccaggcccccatggtccatgtgtggccccaacaccacctgtaagggtcatggcttgtgagccacctgccctggtggagctggtggctgctgtgagggatgtgggtggtcagctgcagagactgacccaggtcgtggaacaggagcggcaggagcgccaagccctgctgctggggctgacgcagctggtagaagctgcccggggtctggggcagctgggtgaggctgtgaagagactggcagagatggcctggaccaccagcatgcctgcaccaaccaccactaccccagaggaagaagaaagacccctgaggggagacgtgtgaccctctccaggatttgaggggcttaagacacccccaaccaaaaaaaacaaaaacaaaaaaaaaccccaaagtatctaattaaaaaaaaaaaaaaa

SEQ ID NO: 213480 - DNA, 708 bp, Homo Sapiens; identical to SEQ ID NO: 55344

SEQ ID NO: 213481 - DNA, 494 bp, Homo Sapiens
tagaaaataaggaataaatcgattttactttggtataggagcaaggttcacctttagatttttgtattctcttttaattatgctccttggcaggtatgaaattgccctggttacattccattattgcttattagtatttcactccataacccttttttctgctaaaactactctttttatatttgtaaaataattggcagagtgagaagaaacataaaatcagataaggcaaatgtgtacctgtaaggaatttgtactttttcataatgcccagtgattagtgagtatttcccttttgccagttgacaagatttttccaccctcgagcagcgtgagagatgcctctttaacacttgaaattcatttctatctggatacagaggcagatttttcttcattgcttagttgagcagtttgttttgctgccaacctgtctccacccctgtatttcaagatcattgataagccctaaattcaaattcttaagatatgga

SEQ ID NO: 213482 - DNA, 663 bp, Homo Sapiens
tttcctgattgcctgcgactagaggccaaatcagaaagaggagcccagaaaggtggccttgacagaaatattaaatgctgagactttcccaaagggtgtctgtaacagactgggccccctgcaaacccccagtggcaacaccatcctagccaagggcgtggagagagatgaggccttgggctgcagataatggcaatactgtgatgataataatggctcccgctgattgagtcctcgctctatgccagactcgggacccttacaacttgggatccttactatttctgtgaagtagaaggcagtgaaacagagtggcttacagagcacaggtgttggattcagacaaacgggctcagattctgcttctgcctcttaccacctgtgtgatttgggcaagatatttaacctctcagagccttagcttccttatctgtaaaactaggataattctgtctacctaacaggattgttgtgaagaataaactaaatgggaaaattcttaagtgcttaacactgtaggatggtacttagcaggcaccaatcaatgttagctttcttaatactgtcatgtgacttatgaggaaacggtttgaacttgtctcggaggcatggtaaaaaaaaaataaaaataaaaataaattaataaagaaaaaaaaaaaaaaa

SEQ ID NO: 213483 - DNA, 613 bp, Homo Sapiens; identical to SEQ ID NO: 53000

SEQ ID NO: 213484 - DNA, 570 bp, Homo Sapiens; identical to SEQ ID NO: 48540

SEQ ID NO: 213485 - DNA, 628 bp, Homo Sapiens
tggaaatgacacattatcttcagtgtataaaatattcatttatgtgaagtttcttggaaaggctacactactattactggtttccgtctgatgtttgagatctgttgattttatgcttttcttacaggcctttcattatgatctttgggaaggaatcaataaaatgatagggcctacttcattaggtgtggttcattcctattcatgctccctggaagaacaagaatgctgaattttgaaatttaatattgtatgaattagcatcagggagaggtggagaaaaatacaaaactaaaagtcatgcttattgtgttcagtgtgcccttctccagagggccactggcttataggaaaggattgctgctctaccagttgaccaggagatggcacgccaggacattaagacactggagttttgtttcgtttttttttttttttttgagatggagtctcgcaccactgctcgccagcctgggcaacagagtgagactctgcctcaaaaaaaaaccaaaccaaaccaaagaaccagaatagcatgtgcacgtatacacagacgtttcacaactggcattatgttttgctactgttttatttacaatgtatcacaagttttatgctttaataaaat

SEQ ID NO: 213486 - DNA, 744 bp, Homo Sapiens; identical to SEQ ID NO: 52511

SEQ ID NO: 213487 - DNA, 769 bp, Homo Sapiens
aaaaaacactgacctcactgtcatcccctatagcttgttagtatagctgtttgtagtcttttttctaaacaatgtattttcaaagaaaaaacagccaaaacaaaacaagccagacccaaacagagcaaaaacatggctttcatcccagcatgtacggctagaagaggtatctccagaccctctcaacctcatgtggtttgaaggcagagctacctctgcctttcccatgagtatgcccctgagtagttttctcaggttctcaggacgggctcttaactggcagaggaagactctaagacgcagcccatagcagctcctgtgagcccaccttccacctcgggctgcctaccaggcccttgagagcactctgttagcatagagaggcaacctcaaagcctttattcaggaacctggctcaggttcccagccactgggtattgagagagctttaaaaccacaaagtggagaatttgggaaatcaagttaaaggtgtgtgcacgtgcacactcgaatgcgtgtgctgaaagtcacctggcctgccctcctgaggcttaactcttgacaggttggtgcagaggccaaaagacatggcctgccgagccgctgctgccttagtggagcccctggaactctgaacagcccttcacagcacccatgggacaagtgcatgcgctttttcctttttctccctttccccctgaggttaaagatattttttttaccataaaagaaaaatgtacagagtgcataaaacaaaaaaaaaaaaaaa

SEQ ID NO: 213488 - DNA, 573 bp, Homo Sapiens; identical to SEQ ID NO: 46851

SEQ ID NO: 213489 - DNA, 630 bp, Homo Sapiens; identical to SEQ ID NO: 49536

SEQ ID NO: 213490 - DNA, 470 bp, Homo Sapiens
ccaactgcctttcacctagaagcgctccacgcgtgcgcccgcctgtgtccctgcgcctggtgtgtctgtgcgcccagccagccccatgagctgggcccctgagctccgccccaacagccaacaggagacccaggagagtcgctgccagggccatcacggctgccgccgcccccgcccccgccgctacctcagaactgaacagtgttggctgcgggcgaaagacagaaggtcatgggaacatacagagacctacagggaagacggccatgggacaagggaggcagagtctggagttacgctgcctacagtcacggaatgccaaggacagctggaaaccaccagaagctaagaaggagattttacctgaaagcctctcaaagaaatcaatcatactcacacctcctttttgaatttctggcctcgtgaatggtgaaaaaataaatttctgtcgtcttaaaaaaaaaaaaaaa

SEQ ID NO: 213491 - DNA, 485 bp, Homo Sapiens
gaagaaaacaagaactgaggcaggcagcactaagtaagtgtcatatagcctccccacccacccttccaaccctactcctaaaagagccataatttagtcccaagtatacttttctgatcttttcctgtgacatattatggtatcttcaaatggtactgggtttcctgaggcttgtgctgctgactgccaaccccatcctagagagcactgagcgacagatactgtaaacatcctacactctcagctgtggaaagtaagaaagctgggagaaggctgtttactctttctgccttggaagtcaactaaagagaaatggattttgaatatttctatgtcttagaattgatcctatcccgtgtttgtttctgaggtcaactgtaaaaggaaaaaaggtgaattgactacagtcatccaaagaaatgtaagataatctataatatcagttatatttgaactgtttcacttagtttaaaaaaaaaaaaaaa

SEQ ID NO: 213492 - DNA, 696 bp, Homo Sapiens
ataaattctagtccccttttgacttcgatcaaaatctgatgccctaactcagctagaatgagttttcccattgcccatgtgtctatttttgttaaacggtggaccctaatcaaccgaggaggtgtttgttatagaaaaccaatgactaggaatcaccttctcagatacagaatatgaggccccaaggggtgaggggaggtgtccatggttactagacctgggggtctcctgacttctaggctgcgagggaaaatatcacagagtatgctctgattcctagagggccagaggggctcctttgtgatcccaagttctggttcaccttctatatggagttgtgttctggtcttaagggacttacccttccattccatcactttctgccatcaaaactttcctttctgttttctaagacaatatcaatggctgtggatattgaacaattgtctgataaaagtgatttttgacattaaggatctaagtgctcatatttgagagtctgatctagtgaccctcatgaataacaatcacaccttacttagtactgggattttccctttacagttgatgtttacttacatgattgacctgcgtaacagtttaaaacaggtaggaccacgaggtcaggagattgagaccatcctgacaaacatggtgaaaccctgtctctactaaaaatacaaaaaaaaaaaaaaa

SEQ ID NO: 213493 - DNA, 762 bp, Homo Sapiens; identical to SEQ ID NO: 48409

SEQ ID NO: 213494 - DNA, 529 bp, Homo Sapiens
atccaccaaattgctgtctcagactgaatctacttgaatctaggaaggcacatctcatccctattgtggtttttagggacacttttctctttcccagagatgagaggaccaattcaggacagaagagccctcgtgaataccaacgtgctagctcaggttcccttctttcctccatcagagctattggtagggttttaaggtcgtgtgtgcatcatgcttccaatgtcaagagatttcctcaaacagcctgtttactagatgaattttccagctggtgaaatacatgagctttgttgttttcctggtcttccaatagcctgtcattattgttagatattatggcacctgttgttgaatgtaggttcccttacagccctggtctagatgatcctagatggggtgagacatatgcaagccattggtatgtgcataagcagttgcaatgaaccttaggctgacttggtagtaggcatttgtctttctgttcatgcattgaataaacatttttaagaaccaaaaaaaaaaaaaa

SEQ ID NO: 213495 - DNA, 530 bp, Homo Sapiens; identical to SEQ ID NO: 52566

SEQ ID NO: 213496 - DNA, 368 bp, Homo Sapiens; identical to SEQ ID NO: 48632

SEQ ID NO: 213497 - DNA, 697 bp, Homo Sapiens; identical to SEQ ID NO: 49521

SEQ ID NO: 213498 - DNA, 574 bp, Homo Sapiens; identical to SEQ ID NO: 45908

SEQ ID NO: 213499 - DNA, 600 bp, Homo Sapiens; identical to SEQ ID NO: 55536

SEQ ID NO: 213500 - DNA, 707 bp, Homo Sapiens
  misc_feature (634)..(634): n is a, c, g, or t
agctgctgcagaggttactgaagagcaatagcccttgagtgaggagtgcggggagcttctcctgcaaagaggaaccacgaaggtggccacaggtctggttctgaacagagaccagaggctcgcctgggcagagaacagcattgacttcatcagcagggagctgtgtgcgcattccatcaggaagctgcaggcccatgtcctgttgatcaaagcagtccacggatattttgattcaagacagaattactctgagaaggagtccctgtcgttcatgatagacacgatgaaatccaccctcaaagagcagttccagtttgtggaagtcccaggcaatcactgtgtccacatgagcgaaccccagcacgtggccagtatcatcagctccttcttacagcgcacacacatgctcccagcccagctgtagctctgggcctggaactatgaagacctagtgctcccagactcaacactgggactctgagttcctgagccccacaacaaggccagggatggtggggacaggcctcactagtcttgaggcccagcctaggatggtagtcaggggaaggagcgagattccaacttcaacatctgtgacctcaagagggagacagagtctgggttcgagggctgntttctcctggctaataataaatatccagccagctggaggaaggaagggcaggctgggcccaccctagcccttt

SEQ ID NO: 213501 - DNA, 632 bp, Homo Sapiens
gtgatctataaagcacaatatacaactaactcactaataattaattaatggtagccctcactattattaggtgtagtgcacctatcatggtattacttgtttaaaaaaaaaaaacaggcatttgttgttttctctgtaatttcatcataattccaccaaccagagtaatggtctaatttcaccattaacctgtgttaatggttaataacttttttcaggatcttagccggaaatagatgattcactaaagtggggtgactgaacagcatttaatgaagggaatatttaccaaaaaagtaggattaaagaaagccaataggtacggtaaaccaccttgggaagctgcaacacacccaaagggttagaggaggtagtagtcaccgaacgtgacaagttgacctgtagctgaacatttttccatgtctgtataatactactataaagcatgattttaaatagataaccattatataaatacactgtaatttaaccaatctatattattggacatttagatgttttcagtttttcacaatgtacagtcgtgattttgatatggtttccatcctagttttaggatgtcttttaaaaatctgaattaaagcaaaaatactgataaaaaaaaaaaaaaa

SEQ ID NO: 213502 - DNA, 566 bp, Homo Sapiens; identical to SEQ ID NO: 47173
  misc_feature (566)..(566): n is a, c, g, or t

SEQ ID NO: 213503 - DNA, 687 bp, Homo Sapiens; identical to SEQ ID NO: 48785

SEQ ID NO: 213504 - DNA, 439 bp, Homo Sapiens
aaattaagctgcccaggctggtctcgaattcctgacctcaggctatccgcccacctcggcctcccaaagtactgggattacaggtgtgagccacctccccgggcctagagaatgttaattgtcccactttcctatttgggtggagcatcaggccgtccatggaggagaatggtaggaaataagactgagagggtggggcctccaatatcaggccaagtatttggaatggggtcggaacatcagctctgactattgagatgagaagcaggaagaccccagaggacctcctcagattcagccaggcctgaggcagtggggcctgaggcagggtagagcagtaggaatggaaggaagagatgcataggacagggaagaatttggcagctttgtagtaactgtccctatttataaaataaaaatttttaaaaaaaaaaaaaaa

SEQ ID NO: 213505 - DNA, 529 bp, Homo Sapiens
tatatacacacatgtacacacaccctacaacccagtgatttcaaaaaattaaacatttgtttagctcatgaatctgtgggttgggtgaacatttctattggtcttggctgggctcacctgtacccagtcagctgcagggtctagctcttcttatcttggctgggatctcacacatgtctaggatcagctgctttactagtctaggattgtcttggctgagacaggtggactactcagttctcctccactgccttatccttcagctggccagcccagaaatgttgccatgtttacagcataagagcaagcaagaaagaataatatgcaaccacttttccaagcctaaggtgaaagggcgggcagaacctgtggtgttaggaggcaactcataccagcccatgggtctactgtttaattttcagaaatttggcaagctgattgttaacacagctgttgtttaatttatgtacttgtaattaaataatttacattaaaacaaagataataggtactcaaaaaaaaaaaaaaa

SEQ ID NO: 213506 - DNA, 529 bp, Homo Sapiens; identical to SEQ ID NO: 49256
  misc_feature (48)..(48): n is a, c, g, or t

SEQ ID NO: 213507 - DNA, 418 bp, Homo Sapiens; identical to SEQ ID NO: 40633

SEQ ID NO: 213508 - DNA, 647 bp, Homo Sapiens; identical to SEQ ID NO: 53641

SEQ ID NO: 213509 - DNA, 581 bp, Homo Sapiens; identical to SEQ ID NO: 55911

SEQ ID NO: 213510 - DNA, 494 bp, Homo Sapiens; identical to SEQ ID NO: 47012

SEQ ID NO: 213511 - DNA, 553 bp, Homo Sapiens
ctgaagtgatttttctatttttagtagagatggggtttcaccaagttggccaggctaatcttgaactcttgacctcaggtgatctgcctgcctcggcctcccaaagtgttgggattacaggcatgagccgccacaccctgccaaaagacccatctttcaatactgccacatttgggattaagtttcaacatgaagtttggagaggacaaacatcatcatagtgggagatctaaatacacctttctaaggaactgatgaatgaaggaaacatagaagtctataaagacatagaaaatttaccaacaagcttacttaatgaccatatataatataattgtgaaatacagattcttttcaactgcacacatggaatatttatgagagtcttaaagcaagccaacaaattttagattagtaacgtagaaataatcttctttaaccgtaaagcaattaattcaggaatcaatagcgagagataaccagaaaaaccctatactttcaggaattttagaatatactgctagatacattatgagtcaaaaaaaaaaaaaaa

SEQ ID NO: 213512 - DNA, 577 bp, Homo Sapiens; identical to SEQ ID NO: 49676

SEQ ID NO: 213513 - DNA, 707 bp, Homo Sapiens; identical to SEQ ID NO: 43528

SEQ ID NO: 213514 - DNA, 717 bp, Homo Sapiens
  misc_feature (637)..(637): n is a, c, g, or t
  misc_feature (692)..(692): n is a, c, g, or t
taggctaccctttaatgtgtctcatttggagatagaacagtgagcaggttgaccagctgctcttcatgtacttcttgcagtaaatccttcaaagaatgaagagtgaagacaattcattttccctcctggaatttttccttcttattattttgcttttttaaaggttgttatattcaggtataggcataagacattataaaagataaggggtatcatgtgagggaggaaatccgacaatccaaaaaatcttccatagaaattaaaaatcagaacttgggggcaaggtaggaggcaacacattctttctacagagctgtgacacatagcccaactgtcctcaaaagcaggaataaaaaaaataaacaacaacaacaacaaaaaacagacctcagctgcataatgaagctggggtcttggcctgatagcttttaatgtccttaaaacggggctgggcatcaagcatcttttccggaataggccaaggaagacaagtccagtttggtttttaaggctttagtgagctctgcggccagcagctcatggagggacacgccgtcgtgggagtacacccagtttttcccagtccagtcataacgcttaggtccactggatggagaagatagccagatttgcttgnttggcgtctgcttgttgatcacataggttcctagatctccacccagtttgacagntaagacaccactcccaaaggagaca

SEQ ID NO: 213515 - DNA, 655 bp, Homo Sapiens; identical to SEQ ID NO: 50844

SEQ ID NO: 213516 - DNA, 445 bp, Homo Sapiens
  misc_feature (420)..(420): n is a, c, g, or t
gctccacgtgcagagcaaggtttcagaatgagaggagaagagcaggcactgcagagggtgagggaaagggcagcagtggactgggaagccctcaggtggaggtcagcattgcttccctcagatcatgggtgaatttgaggaactcagttaatatctttgtatgttcctccctccataaggtgagaacaagcacatgctctgcccatgtcagaaattgtctagactagtgtttttcaaagtgcaaaagcctcaacccattactgagttgagaagccaacttaatggtttaacaggattgaccagcattttttccgaaaaaatcaaaaacatctgagtgtactgcatatagaaataggtggttttgcctcatgaatattctgtttctgtgtgttcctatattttactttgtattgtgttggntttttaagagacagtcctgctctgt

SEQ ID NO: 213517 - DNA, 473 bp, Homo Sapiens
cggttggccagtttttttacagtggctctgaaatgagagaaattgcagaaattctccctgctcaggaaaaggtagaggcaaggattgacttaaagatgggtaagaagcgtgttactgatcataagctaaatgtggacaaagtaattaaaaatattaacacaatttcttcggagttgaagaagataaaagagctctcccagttattgctttgtgaccttatcctacattttaatcatcccatcaagactgagaacttagcagaagcagaaagaaacaaccccctctttgaagagtctaaaatatcagatgtatcccttgtttctaacagtttttctatctgatttcttatttgttatgagtttctgttttattgttgaactaacaaatatttgggagagttgagtttactaatttgtatatatataatttaaaacaaaataaaaataatgtaaacaagcaaaaaaaaaaaaaaa

SEQ ID NO: 213518 - DNA, 582 bp, Homo Sapiens; identical to SEQ ID NO: 54459

SEQ ID NO: 213519 - DNA, 642 bp, Homo Sapiens; identical to SEQ ID NO: 44218
  misc_feature (21)..(21): n is a, c, g, or t

SEQ ID NO: 213520 - DNA, 477 bp, Homo Sapiens; identical to SEQ ID NO: 55860

SEQ ID NO: 213521 - DNA, 609 bp, Homo Sapiens
aaattttataagctgcatagaataggctttaaaatatcagaattaggaaaataaaatatagatggtaaaaattcaaatatttatcaagacttttttcttcactaatgatggggtaaagaatttttaaatggataatataaaacagacagttcaaaaattatttttggaaaatatatgcatcgggaaacataccccacacggtgccatggtttaattattccccagctctacttttgggagcctggaacttgtcagggttgtgaaatagatctcagactattaaggacattcagaaactggctaagccattcaaggaaaatcaggaatttacgtaatatattggactacagtctcaaaggacagagagaaaatcagtcaaatgggttttgatatttttttttcctagaaatgtgtagcaaatgtgattttacaaagcagctaaaaatacaactatctctctggaattgaaaatgtgtaaaataagaccacacactttcaatatgcacaaaatatattttaaatgtttaagttgtattggtaatttactatgttctcctgtagaaaatcataattaaagttggtgctcgtgttgctaaaaaaaaaaaaaaa

SEQ ID NO: 213522 - DNA, 493 bp, Homo Sapiens
ccaaagtgctgggattacaggcgtgagccaccacgcccggccaggaattcttaataactgtttcatcactcttatgtctgagacagttgagcaattacaaggtatttgcaaagaagacacctctatggcaagatgatgatatccattcccagcacaaaggagaatgcaggagtgcagcagttgagcagcttttcctttcttcctgaactataccttacagtgtggttttagtattttgtttttcattacaaattcaatagggaaggtcaaatcaagtaaaaaggattattgagcatcatgccatttcatcatccccaagttcattggtagaagttatcaagagttgtctgtattttaaaaaagcatacaaccatcatgaaattttacctctgcaatcttttctgatagaggaacattttgaatatccatctctgatgcatttactatggcttttgtttttaagagatagctagataggaaaaaaaaaaaaaaa

SEQ ID NO: 213523 - DNA, 495 bp, Homo Sapiens
accgggaccagaacaagtacaaagaagccacagaccttctccatgatgccctgcagatccgggagcagacgctgggccctgagcaccccgcggtggccgccacgctcaacaacttggctgtcctctatgggaagcgtgggcgttaccgggaggcagagcccctgtgccagcgcgctttggagatccgagagaaggtcctgggtgctgaccacccagatgtggccaagcagctcaacaacctggccctgctgtgccagaaccagggcaagtttgaggacgtggagcggcactatgcccgggccctgagcatctatgaggcactgggcgggccccatgaccccaacgtggccaagaccaagaacaacctggcctcagcctacctgaaacagaacaagtatcaacaagcggaagagctgtacaaagaaatcctccacaaggaggacctacccgcccctctcggtgcccccaacacaggcacagctggtgacgcagaac

SEQ ID NO: 213524 - DNA, 696 bp, Homo Sapiens; identical to SEQ ID NO: 49742
  misc_feature (672)..(672): n is a, c, g, or t

SEQ ID NO: 213525 - DNA, 565 bp, Homo Sapiens
  misc_feature (476)..(476): n is a, c, g, or t
  misc_feature (481)..(481): n is a, c, g, or t
ctttatgctacagaagaaaacttgcaagacagtgtaaggtttccctggaacttgttagaaatgtcatctagacgttgagccaggaacacaatcaagcaacctttcaggatatagccaggccccaagcctcttcagaactgggaataatgttttgaattgaaacagaggtgtaaagcagagaggtcagagcagatcaatactggttatgggtgatgagatccagacagaacagtccccagaaaaataactgtcttacaacgagggggtgtgatggatgtgttattttgttttttttgagtctagtagtattactgtctgaaactggtcagtttttaggggcaacttcaaaatgttatttgtgtctttcttgtaaatacctgccaagattaatacccaatcaaatgccatgacttggaaataaacaaatattcatttcttatctataattaccttttggtgtaatcctttcaacttgngtaantaggatataacagaataacaccaatagttgttttaagatagactgaaaaacccaaaatgcccatatttaattataactctgaca

SEQ ID NO: 213526 - DNA, 717 bp, Homo Sapiens; identical to SEQ ID NO: 55331

SEQ ID NO: 213527 - DNA, 578 bp, Homo Sapiens
  misc_feature (564)..(564): n is a, c, g, or t
gactttaaaaaataaaccaaaaaacccacaatttcttcacatctttcatgcatttaatgttttgcacaacttgcttgttttgcaaatatgcgcacatttctatgacaagatttattgctaaatattctttaaaactgcagcagttcagataagatactgtcgaaaggacgtttggcccagcagcaggacctccaccaatgaacggactccaattcttgatttgagccttgggaaccaatcaactttgtttccaagagtttatgtgaacttccctcctttaccagtaaaatcttccccctattcttcccttctccagacccgtggcttgccatagctgtacatcttggattataattctttttgttcactcccaaagaaactcagtatctttggagaattctttctttgttgtcttttagcttcccagagccaaacaagaaatattttaggttttgtgggtcatgctggcttggtcacagctattcaacttgtatcttaaaattagccatagacagtatgaatgggtgggtctctgttccaataaaaccttatcctaaacactgnaaaaaaaaaaaaaa

SEQ ID NO: 213528 - DNA, 719 bp, Homo Sapiens
  misc_feature (6)..(6): n is a, c, g, or t
catggnatgtccccaaacctggaaggaacctcccagcttgcctcttcagtgactgtcaaccctggctgacatcagaaccgcctgggacatggagaaacctgtatgagttggtgtctcaggcctggcggctcagcacactgcctgggtgagagctcctcaggtgattcgactgtgtccccagggcagagagccactacatcatccagcatggagacgtgaggacatccaggctcccagagctcagcctacagtcggagcacactgtgtgctcagggcaggtgtttttctggcgcactctctgcctttcccacttgtggtcagttcaagcccccaccagccacacatgggctaatggtgctaagtggcatccccactcctctttccagaaagctgcttgtttgggcaagaagagagatgccccgtgatgccgaagagcaagttatggtggaggcctgagcatgagagctctggtcacaccacgccgaggaccggacggtgcccttgcttcctgtgagtggtctcttcgctttctggctggaacgataaccccaggggttgtgaggacagaacctccacctgccatccccatgggcaccgctggtctccagagcacgtcaaggtccttcccctcccagcttctgatcttggagagcgaggcctctcatgctcacatgcatgtgtttaggtgtatatgctgccatgccatgctttaaaaataa

SEQ ID NO: 213529 - DNA, 603 bp, Homo Sapiens
  misc_feature (7)..(7): n is a, c, g, or t
ccaaggnatacgtctatgggcaatgcctcttccgggatggtgaggaagggccccatccgagcgcccgagcatctacgtgccaccgtgcgctgggattaccagcccgacatctgtaaggactacaaagagactggcttctgcggcttcggagacagctgcaaattcctccatgaccgttcagattacaagcatgggtggcagatcgaacgtgagcttgatgagggtcgctatggtgtctatgaggatgaaaactatgaagtgggaagcgatgatgaggaaataccattcaagtgtttcatctgtcgccagagcttccaaaacccagttgtcaccaagtgcaggcattatttctgcgagagctgtgcactgcagcatttccgcaccaccccgcgctgctatgtctgtgaccagcagaccaatggcgtcttcaatccagcgaaagaattgattgctaaactagagaagcatcgagctacaggagagggtggtgcttccgacttgccagaagaccccgatgaggatgcaattcccattacttaggtttcccataattcttaaatttaaaaaataaacgttttgttcttttggaaaaaaaaaaaaaaa

SEQ ID NO: 213530 - DNA, 755 bp, Homo Sapiens; identical to SEQ ID NO: 45936
  misc_feature (696)..(696): n is a, c, g, or t
  misc_feature (708)..(708): n is a, c, g, or t

SEQ ID NO: 213531 - DNA, 485 bp, Homo Sapiens; identical to SEQ ID NO: 52260
  misc_feature (475)..(475): n is a, c, g, or t

SEQ ID NO: 213532 - DNA, 462 bp, Homo Sapiens
ccaagattttacttagaggaaatttttgtcctccctgctagtgtccctcatgtgctgtaatttctagtttcatactcccctggttgcaaggtaatattcagtgccgaccacagtatttcagatgttatccgacagtgcagatgagcaggggccatgtgttgtcttgatttttctcactgccatttctattgatgcagtgtagactttgaatcatactttgacctttcttgagccttattgcgagctacttcctgctttatgaattctgctgtagcgatacctcaatcattatgcttttggaacatgttagatttaaggtaggatttaattttttaaaaataaacggcgtcttgtttactcaggctatcatgtttgactgtgtgattaacccccaatcttcttgaaataatttccttaacttgctgaatatagattttttttttcatttgcaaagaaattccc

SEQ ID NO: 213533 - DNA, 647 bp, Homo Sapiens; identical to SEQ ID NO: 48275
  misc_feature (1)..(1): n is a, c, g, or t
  misc_feature (4)..(4): n is a, c, g, or t
  misc_feature (13)..(13): n is a, c, g, or t
  misc_feature (16)..(16): n is a, c, g, or t
  misc_feature (21)..(21): n is a, c, g, or t
  misc_feature (50)..(50): n is a, c, g, or t
  misc_feature (632)..(632): n is a, c, g, or t

SEQ ID NO: 213534 - DNA, 445 bp, Homo Sapiens
ttaatggctgtttcttcatgcgtaaggttttagctcagatggccttacttggtcatcctatccataataattcctttttctgataggaacattttcacctgcaagtaaatagaaaacttgaccaacaaggccttaaacagattggggtttgtttttccttgcacgacatggttcgtttgcacagtggttccagcaagggccaggctctgtgtgtttctgctctgccattctaagcagcaagtggttctcacggttactgaatggctgtcaaggcttgaagtcattgtgtccattgcatttgagtcaggaagaagaaaagatactgttgtgttcctattgttgtttatctagaaagcaaaagtattcctagaggatgcctagcctgtctccctgtatatcttattactgacaactggatcatacttctggcaaaaaaaaaaaaaaa

SEQ ID NO: 213535 - DNA, 556 bp, Homo Sapiens; identical to SEQ ID NO: 52903

SEQ ID NO: 213536 - DNA, 750 bp, Homo Sapiens; identical to SEQ ID NO: 45497
  misc_feature (728)..(728): n is a, c, g, or t

SEQ ID NO: 213537 - DNA, 625 bp, Homo Sapiens; identical to SEQ ID NO: 48030
  misc_feature (8)..(8): n is a, c, g, or t
  misc_feature (569)..(569): n is a, c, g, or t
  misc_feature (613)..(613): n is a, c, g, or t
  misc_feature (625)..(625): n is a, c, g, or t

SEQ ID NO: 213538 - DNA, 681 bp, Homo Sapiens; identical to SEQ ID NO: 55247

SEQ ID NO: 213539 - DNA, 612 bp, Homo Sapiens; identical to SEQ ID NO: 52112
  misc_feature (592)..(592): n is a, c, g, or t

SEQ ID NO: 213540 - DNA, 731 bp, Homo Sapiens
agaaaatacccactttctcaggatgatatcaatggaatccagtccatctatggaggtctgcctaaggaacctgctaagccaaaggaacccactataccccatgcctgtgaccctgacttgacttttgacgctatcacaactttccgcagagaagtaatgttctttaaaggcaggcacctatggaggatctattatgatatcacggatgttgagtttgaattaattgcttcattctggccatctctgccagctgatctgcaagctgcatacgagaaccccagagataagattctggtttttaaagatgaaaacttctggatgatcagaggatatgctgtcttgccagattatcccaaatccatccatacattaggttttccaggacgtgtgaagaaaatagatgcagccgtctgtgataagaccacaagaaaaacctacttctttgtgggcatttggtgctggaggtttgatgaaatgacccaaaccatggacaaagggttcccgcagagagtggtaaaacactttcctggaatcagtatccgtgttgatgctgctttccagtacaaaggattcttctttttcagccgtggatcaaagcaatttgaatacgacattaagacaaagaatattacccgaatcatgagaactaatacttggtttcaatgcaaagaaccaaagaactcctcatttggttttgatatcaacaaggaaaaagcacattcaggaggcat

SEQ ID NO: 213541 - DNA, 567 bp, Homo Sapiens
aaaaataaacaactgtggtgctattaaccaacatttatatagagcaccaaaggggggaatgaagtggaaaattaaaataggataatagcataagtaataatagtaaaattatagtaacagaaataatagctcatagaatgaattgctgtaccaaccaaggctaaaaagaatttaagtagcccccctgaagttagagttaaagaaggatattaactgccagtcccaagaaacattaaccatatctgcccttcaggtattttgtaggctctgtaagctcgtgttttcttccctccttgtacagctgcaaggtcacaagacagataagcataagctgcatactaagttttcccagagatgtaagacatgttgcaaaagtgtcacaagataattaatggactttgttcttgcttctgtaagcctgcttcctgcttcacgtaattcctgcctcaaaatgcttaaaagacattcgttttctttgatctatgcttagattttctggatgcaattccactgagccgatgtacacctaaaaataaaaactttcctgcatccaaaaaaaaaaaaaaa

SEQ ID NO: 213542 - DNA, 618 bp, Homo Sapiens
  misc_feature (134)..(134): n is a, c, g, or t
tttaagctttcaaattctctttattaaaaatcttttcttttctcttttgtaaaaacaaacactttgcagtcagttatacagatcaggaaaagtagtgacaatttataggacactcaacaaatttcaatactttncaagttcaaacttaacttagtgttttggtttttctcataaattcaaaaaacaaactctggtccagttcaagtataatctaattatctaacaggtcacagcctcggactgtccaagaatgggaaaccctgatactaacggctgctgctcacaccatcagattttccaaattctttggggatactgtctagatagatgctattttgggtgttaacaatgaaaagacaattatacaggccttttgttgtattaacccagggtaaatatgaatctgttgcttaagggagcaattgctcttcagcatccttttttgggagacactttgaaatggttgacaaaacactgaagaaaagctttaaaaaataaatcaatatttacctggttgccattaatactgcattgtgtgtggcacacatagaaataaaaagtgcaaatcatagggtcggtgaaggaccatgccaatggaattgtaaaaaaaaaaaaaaa

SEQ ID NO: 213543 - DNA, 517 bp, Homo Sapiens; identical to SEQ ID NO: 50822

SEQ ID NO: 213544 - DNA, 649 bp, Homo Sapiens; identical to SEQ ID NO: 45243
  misc_feature (6)..(6): n is a, c, g, or t

SEQ ID NO: 213545 - DNA, 608 bp, Homo Sapiens; identical to SEQ ID NO: 45860

SEQ ID NO: 213546 - DNA, 579 bp, Homo Sapiens; identical to SEQ ID NO: 52142

SEQ ID NO: 213547 - DNA, 599 bp, Homo Sapiens; identical to SEQ ID NO: 50717

SEQ ID NO: 213548 - DNA, 474 bp, Homo Sapiens
ctgggaaagtggccagaaatgcctcattttcctcgaggcttggtgcagtaaggatgaaaacctggagctgctgacagctgtctgactggtggtcacatgcaggggcctatctgagggcagtggcagcacagagggaggcttggaagagagaagaaagtagggagagagtcaggaccttgtggcactctttaaccagtgaatgctagttgaaggcaatacaaccctctaggaggagtttggaaagttgtcaaggttttcaattgtctggaggatgtggttccgactggaactctttggaaaacagttggcattttctgttaaagccaaacacatacacctacccaatgtccagcaattccattccattcttaggtatatatccaacagagatgctatgaatagatgtgttcacaaaagagttgcaaaagaatgttcatagcagcctttttctctaataacaaaaaaaaaaaaaaa

SEQ ID NO: 213549 - DNA, 637 bp, Homo Sapiens
  misc_feature (588)..(588): n is a, c, g, or t
  misc_feature (599)..(599): n is a, c, g, or t
  misc_feature (606)..(606): n is a, c, g, or t
  misc_feature (608)..(608): n is a, c, g, or t
  misc_feature (613)..(613): n is a, c, g, or t
  misc_feature (630)..(630): n is a, c, g, or t
  misc_feature (634)..(634): n is a, c, g, or t
ctttaatttactggcagaggaagataagcatatggccggctttgacccaggttgccatccagtatctaagttgccccatgtgtagttggcaatctgaatgtatctttactaaaaatagccactttcatccaaaacagatcatgagcctggactttgacaatatagaacaactgatgtttctgaaaatgaacttgaaaaatgttaactacgattattctacgttggttctgagctgggatcctgagcagaatgaagttgttcaaagcagtgaaaaagaaatactgccttaatttctttttctccatttaaaatgggcaactttttgctgtgttactgtatcttaatagctgtagttgttaaatataatcattatctttataaacacatctggggaaacctgaaatcacacaagggctgaaaattcctcagaggcaatataattttgataaaatgaagattaaagatttcatagctataactgtggcgctagcacttgaaaattttgcttataccaatgagagagaagatatttttaattaaaaaaaatatagtgcagcattgaaaggccttaggctttcttcctggtanattgaactagnaattggntntaagnaaaaccttcccccaccntggnaaa

SEQ ID NO: 213550 - DNA, 596 bp, Homo Sapiens
tggcctggcccttgaaatagtagtgtttaggtagatgcttgtgtaggattcctgataagagcaactgaaaagaaggagaggggaagtagtaaagggacaagaaacaatttttttttttgaggaaccataagcaaattatagtttgacaagacaagattgggggacatatatggttaccagggaattacctcttatgtgttatatctttatattatttatctctggaaaagagtaccctgcaaaattccctacagctgcaagcagatgtcacttgatggacagagggggaattctgcccctccggtatcgggaaatacatactaaagacattgcgaaacgctgaacctcttcccataaataaaaggtttgtttgtaaaatgggaaatccacccataataaatgaacaataggcactgccagtttaggcctgttcatgaatggatctgcaagacagcatcttcgtttaacaacattatctgtgatttgatacatttatccttattacaatattgtttagttggtagaaattctatgttttctacaaggaaattgatgtttattaaataaaactgaaaataattaaaaaaaaaaaaaaa

SEQ ID NO: 213551 - DNA, 480 bp, Homo Sapiens
aaatacttaaaatggaatactgtataaatattatttatattttctcagatgaaaatatatactaaaacatttggtatttctgttttctgtttcattaatgtatatctgatggagtaccatttaggaatataacattattggggcagaggtcccagccattgccaaagttgaatcttttacatttccctgaatcttgaggatgactgaaaaggaagtctttgaaactgcagtttctgaaggatcacagtacaggaatgcctttataaaagctgcagagataaatacatgtacttatatggcatggatatttaaaaccactcactcagaagcatatgaaagaaattcaaccatcattcaacatagaagaagttaattttagtgcaaaagtttttaagtattaaatttcacaataaaggatcaattggcttacttgctgataaattaaaacagaaaacatttaaaatcaaaaaaaaaaaaaaa

SEQ ID NO: 213552 - DNA, 435 bp, Homo Sapiens
  misc_feature (234)..(234): n is a, c, g, or t
ctttagctgcctccatcccccttcaggaatctgaagaatgtgtcctttaacctcagagccccaggccttggccagtccccccaaaacacttggggtcacatgacccctgtccctcaggaacttcctgggagaaggggagggcacctcccagcacctctagcccccactgaaaaaccagcctgggtggccctgagagggcagaccgaaagccttggcacctcctccccaaccatncctctgaaggagagctgggggaggggacggctcctcggctttggcctccaggacctggcactggataggtgccaaatgtttgctggctacatgaggcacttgttcctgcagaagggaaactgcacctgacaatgactgcttcctccacctaagtggggccttcttccctctctcattcattcattcaacaaatacacacta

SEQ ID NO: 213553 - DNA, 460 bp, Homo Sapiens; identical to SEQ ID NO: 48840

SEQ ID NO: 213554 - DNA, 467 bp, Homo Sapiens; identical to SEQ ID NO: 40450

SEQ ID NO: 213555 - DNA, 743 bp, Homo Sapiens; identical to SEQ ID NO: 52543
  misc_feature (666)..(666): n is a, c, g, or t

SEQ ID NO: 213556 - DNA, 472 bp, Homo Sapiens
tggaaggcaagtgagtgttgtcgcgatgtgagtgcccagcttaggatttgccctccaaagcccagtgtcttttctgtagatcaaagaaacaaatcctttaagtcctcctgttcacctgctttactggcagatgaagcctagtcatggttcaccagggggaataccaaactcgccctgcagatcggtagtaattgtgcggagatgataggaaacaggagaggcctctaccgctgaaaagcacgggtctgaaagggcaggtgcctgtcctggaaaccaccttctcttggggcatcccctggctgcccttctgcctgttgccaccaggtggggctctctcccagctcaccgttcttcctgcttaggacagcgccccacgtgacgttagtgaggcaatgcatgggaaactgcagccccaaacagactcctccctgggagaaacccccagcccttgcccctgcagaccctgcacccc

SEQ ID NO: 213557 - DNA, 549 bp, Homo Sapiens; identical to SEQ ID NO: 50260

SEQ ID NO: 213558 - DNA, 562 bp, Homo Sapiens; identical to SEQ ID NO: 40496

SEQ ID NO: 213559 - DNA, 688 bp, Homo Sapiens; identical to SEQ ID NO: 44973

SEQ ID NO: 213560 - DNA, 600 bp, Homo Sapiens; identical to SEQ ID NO: 46082

SEQ ID NO: 213561 - DNA, 536 bp, Homo Sapiens
  misc_feature (5)..(5): n is a, c, g, or t
  misc_feature (10)..(10): n is a, c, g, or t
cgggnccagnaattcggcacgaggcggcacgaggcgcagaagaattgcttaaacccgagaggcgcggagcttgcagtgagcagagatcgcgccactgcacaccagcctgggtgacagagcgagactccatctaacaaaaaataatagtaacagcctcccgaagaaatacacattttgcccaatgccttctgtttggggctttgaaaagtgagccctgactgggtgtggtggttgacacctgttatcacagcactttgggaggccaaggtgggaggactgcttgagcccaggagttggaggctgcagtgagccatgatcttgcccctgcgctctcgcctgggtgacagagcaagactctatctcaaaaatgtttttaaaaaatacttcctagggaaacacacattttgccctatttggaactttgaaaagtgagccctcctctgcccatgggccgtgctgctcagcctgccatactcgcttgctttgctgtttgggatttgcctccagaataaaggtcctttttgttgttgaaaaaa

SEQ ID NO: 213562 - DNA, 740 bp, Homo Sapiens
  misc_feature (568)..(568): n is a, c, g, or t
attgggtaggaagagacaggccttatagcccttaaatcagagtccacataggagccccagctcccaaaaggcatgagtgacagacactgccttagaagggaatgagaaccgctctgggcaaagacaccgtgctgcccaaggtcagacttacagagggagaccaacgggctccagggacacaggaactgcaggactctgctgaggactaagggtccaccacccctgacctcattttgcagtttaggaaagtgggcttgtgagtgaggggatttgtccaaggtcacataattggtggcagagcctaaaccaaagctgactttcaatgcagtgccctggaagtggcatggggtaattttaaaagcttgagctgttggaattctagctgtgacattaatgctctgtaaccacaggcaagtctctttacctataaaacagagatgctaaaccctgtttcatagggtggtggggagaattccatggaaagacacgagagggcccaccccctcctattggagtcccgatccccctcccacagcactaattacaagatgcaaatgccaaatctcanggccgctgttgcacaacacactctcctcaccccaaaccacagcccagcagcctccggagctctagcctgaattatgagtgatgaagtgggatttggggaaccattcggacactaacccacatggaaaaacaactatgagctgatcaggtttcaactacttcatcccctctgc

SEQ ID NO: 213563 - DNA, 474 bp, Homo Sapiens; identical to SEQ ID NO: 55876

SEQ ID NO: 213564 - DNA, 465 bp, Homo Sapiens
tccgggccctgcacccgccagcgtcgtgtgcaggcgtccccgggctgtggataactagacacgttcttccctcattgcccaaggctcgttagaattcgccctagagctgtatcatgtattttctttcaaattaactttgcttgcaattaagcttagggaaccagcaacaaaagcaaacttggcccgaggtcgttcaccgcgaaaatggattagagaaacttcttccccgatttaaggggaaagattcctgcggccagcgctttggggaaagtgccccgaccgcagaggcgacgacaggggagcaggaagctgctcacggtagtcggcgttggcggcagcggtggccttcctcatctgggcgatgtgggctccgagaagagtaaggataacatcctggaaatgacttctgtacggtttgagcccaactgcacactcatgacttggagctgccctgtggagttacag

SEQ ID NO: 213565 - DNA, 605 bp, Homo Sapiens; identical to SEQ ID NO: 55080

SEQ ID NO: 213566 - DNA, 636 bp, Homo Sapiens; identical to SEQ ID NO: 40838
  misc_feature (12)..(12): n is a, c, g, or t
  misc_feature (550)..(550): n is a, c, g, or t
  misc_feature (591)..(591): n is a, c, g, or t
  misc_feature (624)..(624): n is a, c, g, or t

SEQ ID NO: 213567 - DNA, 678 bp, Homo Sapiens; identical to SEQ ID NO: 49190
  misc_feature (556)..(556): n is a, c, g, or t
  misc_feature (626)..(626): n is a, c, g, or t

SEQ ID NO: 213568 - DNA, 529 bp, Homo Sapiens; identical to SEQ ID NO: 52137

SEQ ID NO: 213569 - DNA, 625 bp, Homo Sapiens; identical to SEQ ID NO: 53027

SEQ ID NO: 213570 - DNA, 708 bp, Homo Sapiens
ttttttttttttttggtggtataaaaacgagacctttactctggcaataggaattcacatttcaaaagctgatgattgtcaaggcgatttaaaaaacatttttatgagtgtaaaaaatagtgttttaaagttggccattttctaatacaaaatgtttctttttaaatagcctttaataagcagaatgtgtgattgttctttaattggttctctttaaaatgtgctggaagacaaagttcgaggagcactgtttcaagcaagagaaaaaggggacataatttaaatgaaaatgaaaatatgcagtaatgcaatgaaaaaaccgtttcctagatttagttgtaccgaaatacatgacatcgcctgcattttgtgactttgtcagtagtcacgaaggtaagtactactttggggtcagagagagcctgttgagataaaatctcaaagctgttagaaacattttaagatgtggaaagataatcaacaaaatcatttacataaaattagtatttagcagatgtacacatctgcaaaaataaagtgagtttggaagcaaaatttgaacatttagcaataaaattaagacgaaattgctagccagtaagagcttaggaaactggatatccttagtgagatagaataaacaagatcaccacaatgatgttttaaaacattaggactcctgggttaactggtctattatgatgatgg

SEQ ID NO: 213571 - DNA, 561 bp, Homo Sapiens; identical to SEQ ID NO: 55942

SEQ ID NO: 213572 - DNA, 462 bp, Homo Sapiens; identical to SEQ ID NO: 48935

SEQ ID NO: 213573 - DNA, 627 bp, Homo Sapiens; identical to SEQ ID NO: 45401
  misc_feature (20)..(20): n is a, c, g, or t
  misc_feature (620)..(620): n is a, c, g, or t

SEQ ID NO: 213574 - DNA, 494 bp, Homo Sapiens; identical to SEQ ID NO: 45916
  misc_feature (30)..(30): n is a, c, g, or t

SEQ ID NO: 213575 - DNA, 370 bp, Homo Sapiens; identical to SEQ ID NO: 53685

SEQ ID NO: 213576 - DNA, 701 bp, Homo Sapiens; identical to SEQ ID NO: 54134

SEQ ID NO: 213577 - DNA, 567 bp, Homo Sapiens; identical to SEQ ID NO: 46830

SEQ ID NO: 213578 - DNA, 399 bp, Homo Sapiens; identical to SEQ ID NO: 40695

SEQ ID NO: 213579 - DNA, 653 bp, Homo Sapiens; identical to SEQ ID NO: 51866

SEQ ID NO: 213580 - DNA, 720 bp, Homo Sapiens
  misc_feature (659)..(659): n is a, c, g, or t
ggaaatcaggggtctcacagccttcagagctgagagccccgaacagagatttacccacttatttattaacagcaaaccagtcattagcattgtttctatagatattcaattaactaaaagtatcccttatgggaaatgaagggatggcctgaaataaaggggtgggtctggctagttatctgcagcaggaacatgcccttaaggcacagatcgctcatgctactgtttgtggtttaagaatgcctttaagtggttttctgccctgggcaggccaggtgttccttgccttcattccggtaaacccaaaaccttccagcgtgggcgttatggccatcatgagcatgtcacagtgctgcagagattttatggccagttttgtggccagtttatggccagattttggggggccttctcccaatatgtcccccttctttgatttgcaaatcgataaaagcaaacgcagcttcgtcacggtgagctacttctctcaggagtcaggatccacatctgcagactatacaaagacaaacaacacagaagggtcatgggtgcctatgcctgggggcccgcagctgagccccgggggaggcgttggacagatgccctctccgctgcggcgccagtttcccgaacctcctggcaggcaggtggtgcctganggctgggcctgctgtccctcgcggctccatgcgcagggcagctgcatggtgcaggggcgca

SEQ ID NO: 213581 - DNA, 737 bp, Homo Sapiens
aatttgcctagcattgataaagtatcagctgaggctgaaaaccaccaattttaacaaaaatcagcatatttcttcagtattgtgtggtgcttatctccttgggagcagaaagcagagactggattaatccaaaatcagggataaactgaccaggaggagcagaggaataatgggccaagagtactgaggatgcaagtaaaagtgctcaaattactgtattgaccttgtaatcccaagctgatcggggaaggaaaaaaaaaaaacaggagagggctggaaaattgtcacaggtaatgacagaggatcagatgtgctatagaaatgtgctgttgaaaatggtagactaagcccctctccaattatactgtggaatgagccgtataacatgttgtgattattggtttctcccttctggacctggagtgtcagttcttctaaagcagagacttccctttaatctctgtttaaacttggtgcctaggacaatgtaatggcatccataaaatatctaatggaatggagtttaacatgttttttagggtggaactggtggtgtgatttaaattctccaaaagagaaatgagaaaagttggaagctgttgtggcctgactttatacccccaaaattcatattttgaataccccaaaaagaagtataatgtaagtccagaatcattactggtgatgacattcaaaagtcagaattgagatataccccaaagaacacaccttgctat

SEQ ID NO: 213582 - DNA, 541 bp, Homo Sapiens
  misc_feature (500)..(500): n is a, c, g, or t
  misc_feature (526)..(526): n is a, c, g, or t
  misc_feature (541)..(541): n is a, c, g, or t
caagaccttcccaagggctctgaaagggagacaaatatcaaagatcaaaaagttggtgaagagaaaagaaaaagggaagatagcattacaccagagagaaggaaatcagagggtgttctagggacttctgaagaagatgaactaaaatcctgtttttggaagcgactaggttggtccgaatcatccaggataatcgtgctggatcagagtgacttgtcagactgattggaattggatcatagacggactcctggcctgagtttgagtgtcctggttgtaagctcctttcttctctttctgcttcagttgctgtcagggcagcagttccagttctgtaagtctcactttgttcagctgccacaatagacatcatcgtttggccctctctgttagcagcacattcaaccatttgttttcagtcagatttctgaaaagtgagaggtagttttgatagtaaaaatttttggttgtgcctagaatggctttggttttgttgatgntaattttcaaaaactttaactcttgntatataataaaatgn

SEQ ID NO: 213583 - DNA, 565 bp, Homo Sapiens; identical to SEQ ID NO: 46388
  misc_feature (554)..(554): n is a, c, g, or t

SEQ ID NO: 213584 - DNA, 658 bp, Homo Sapiens
aaatgggattccttcgctaggaagagcactcggaataacctgctggaaatgagattccttcgctaggaagagcactcggaataacctgctggaaatgggattccttcgctaggaagagcactcggaataacctgctggaaatgggattccttccctaggaagagcactcggaataacctgctggaaatgagattccttccctaggaagagcactcggaataacctgctggaaatgggattccttcgctaggaagagcactcagaacaacctgcctgcttgagggtgacagcaagtgtctcacacttctcgtctactccaagtcagattcctaaaaataaaatagagctccaatgggcaatttaagcaaaagccttagaaacatggacacctgaaatgctggcctacatgaagggtacgatgacattttatatattaaataaaaattcccagtcctgttttagtattcatcagaatagcctcttggaccctcgaagttctacacctttgggagatataaatttccttaaaataaagggattgcttctttgtgtaaatagctttcattttctccatctggaagtgatttctgcctgcatgttggagcacaaaatactgcagttaattaaagcattactggatgtcaaaaaaaaaaaaaaa

SEQ ID NO: 213585 - DNA, 617 bp, Homo Sapiens; identical to SEQ ID NO: 53046

SEQ ID NO: 213586 - DNA, 673 bp, Homo Sapiens
gctctggggtctacatcacacgcggccagctgatgaactgccacctgtgtgcaggggtgaagcataaggtcttgctgcggaggctcctggccaccttctttgacaggaacacactggccaacagctgcgggactggcatccgctcgtccaccagcgaccccagccggaagccgctggacagccgggtcctgaacgctgtgaaattgtactgtcagaacttcgcccccagcttcaaggagagcgagatgaacgtgatcgccgcggacatgtgcaccaacgcccgccgcgttcgcaagcgctggctgcccaagatcaagtccatgctgccggagggcgtggagatgtaccgcacggtcatgggctccgccgccgccagcgtgcccctcgaccccgagttcccgcccgccgcggcacaggtgttcgagcaacgcatctacgccgagcggcggggcgacgccgccaccatcgtggctctgagaactgacgccgtgaatgttgacctgagtgccgccgccaaccccgccttcgacgccggcgaggaggtggacggggctggctcggtcatccaggaggtggccgcccccgagccgctgcccgccgatggccagagccccccacagccctttgagcagggcgggggcggccccagcaggccccagacgccggcggccgg

SEQ ID NO: 213587 - DNA, 647 bp, Homo Sapiens
  misc_feature (602)..(602): n is a, c, g, or t
ctcctgggtatttgcatgtaacttctttgaggaagttaccaccatctctgatatagacacactttttgagttgcagtttctgttagaattttttggagactaacttgccaattctgtgaatgttattgaatatttaaaaagctgggtctgtaatgggaggcattttattagctgttgtgattgggtaacatgtccccttagatttcctgatttaaaattatacaaaattactatttttgataaaataaaggaacacctacagaaaattaagtttctaagatgtttctatacttcattagaaaagattttattactattacttatggttattggtgattaacacttaatgcgtctcctctgattttgtgttccatgaggtgcttggaacatttggagtgctctgtgcgagggacatacagtgatataggaaatttaaaaattaaaataatacccaaaacccactttatcagatatggtattgtgatggtctaatattatgtgtcaacttggtgaggctatggcgcccatgtgtttggtcaaacactagcctagatgttgctgtgaatatattttgtagatgtgattaacatttacaatcaggntgattttaagtaaagcagattctcatccataaaaaaaaaaaaaaa

SEQ ID NO: 213588 - DNA, 717 bp, Homo Sapiens; identical to SEQ ID NO: 50153
  misc_feature (660)..(660): n is a, c, g, or t
  misc_feature (704)..(704): n is a, c, g, or t

SEQ ID NO: 213589 - DNA, 729 bp, Homo Sapiens
ttttgctgtggatagtcattcttttaatcccatcttttaagatccagctcaaaaactatcagtactttgacacttttgcccaattgcctttcatgtactgactttatttaacacatggcatttaattaaacttaatttaattaacaaaaatttatctctactacagcccttcaggatggtttggacatgggagctcaggcatatttatctttatatatccctggccccccttttaaagtttggtacaaagtagaagcacaagaaatacacgggaactgaatgaataagaggaaaattgaattacgatcaaagaagagggacaggggaagtagggaaagaaggaagaacatagcacaatcctaaatgcaaactgtggtttccatagccgttggtagaggagttgtagtgaaaacttccagaatgtcagtaactctaaatatcctcaatatctcctgttggtggtttgtttgaaaatacttcaggaacctagaaggtagagtgaaggagaaatgtgatttgaatttcagtggcctgctgggtgttggttgtcaggacataatgaccaaagacaacctttaacttccttctgcttcctctgggggaatcacactgtcatggccaggaaagataccatctgttggccaagaaggataccatgtgtgaaatggaaagtccagatcaagtcttggacacaagtgaaaatatcttcaccacaaaaaaaaaaaaaaa

SEQ ID NO: 213590 - DNA, 430 bp, Homo Sapiens
ttttttttttttttagaacattatatttcataaaagacaatgataaaaaagtacaaacatttccatgagaagcaaaaaaagaagtgggatacaagaaattactagcatttatttcagtgcatttatgtagaagcctttcatctaaataaataaaataatcttaagtacacttcctctttctgataaacaatactataaccattttagttctctcaaccggcatacttgcaaatacaagacaataaatctacaacagtatgtatttgaaaaacacataaagaaatatatcaaagacaagcaaaggccaaataaaatgacaaaatctgctttcacttgtaggaagcctccagaaagagaatattgtattggacatttttccattttgttttaaaatatcagtatcttggctggcaaaagggtatataaggaa

SEQ ID NO: 213591 - DNA, 610 bp, Homo Sapiens; identical to SEQ ID NO: 50663
  misc_feature (577)..(577): n is a, c, g, or t

SEQ ID NO: 213592 - DNA, 629 bp, Homo Sapiens; identical to SEQ ID NO: 55333

SEQ ID NO: 213593 - DNA, 649 bp, Homo Sapiens; identical to SEQ ID NO: 51654

SEQ ID NO: 213594 - DNA, 515 bp, Homo Sapiens
caggcctgttgttctcggaagggagaaagcaggacatttccccacgtaactcccagctctgggcctagagtgcgtgcatggcgaagtccccggagaactctaccctggaggagattctggggcagtatcaacggagtctccggggtgagttgctccaaacctctgtccctagccccgaggtgcccagggcctagtgggcgggagcagaccaggtgcgtttcctaacacctgggttctgccccgtccacgctacagaggagcaagatggatgttgctgtggtcttgaggaggatgaaatagtttgatttagtttttacagttaagcaacgatgtttcctcagattcccgtagttacctcaatcaactccttgatcttaacttggcatctttctcaaccggcgacagcagaaactcttggatagctctatgccatttttgttcagttcccatacgttgctatttaatccaataaaagtctgattcacagtttttacacatttaaaaaaaaaaaaaaa

SEQ ID NO: 213595 - DNA, 366 bp, Homo Sapiens; identical to SEQ ID NO: 50114

SEQ ID NO: 213596 - DNA, 609 bp, Homo Sapiens; identical to SEQ ID NO: 48645

SEQ ID NO: 213597 - DNA, 572 bp, Homo Sapiens
  misc_feature (535)..(535): n is a, c, g, or t
  misc_feature (541)..(541): n is a, c, g, or t
  misc_feature (548)..(548): n is a, c, g, or t
  misc_feature (568)..(568): n is a, c, g, or t
cacatagtttaggtcctggcttaactctacttatgatggttcaacttacactttttcaactttaagatggtgcaaaagcaatacacattcagtatgttcctcgacttaggatgcggttatgtccgataaacccattgtaaattgaaaccaccgaaagtcaaaaaccactttcgacttacgatgtttcccactcacgatgggtttctccggatgtagccccatcataagttgaggagcacctgttagttacttccaactgtctcaggcaacctgggcattcaggagaaaagcctggcacagggtgacagggaagcacccatgcaaagcacccccgctttgactgcttggcagacctagggtgcccgggaagcacaagggatacccttggccctgcggggtgtggcccaggtgcctgccatgagcctgaccccatcgagggggaacctcagcccaccctgggcctgggggtgacaagaacttccacaggttggccccaggcttataggaggcataagcagatcccgcgatggcttgncattgncccctgncctggaacaataaagcaagngcct

SEQ ID NO: 213598 - DNA, 466 bp, Homo Sapiens; identical to SEQ ID NO: 53274
  misc_feature (453)..(453): n is a, c, g, or t

SEQ ID NO: 213599 - DNA, 720 bp, Homo Sapiens
  misc_feature (611)..(611): n is a, c, g, or t
  misc_feature (621)..(621): n is a, c, g, or t
gaccctcgtgatgattgtacacgatgtggctgacatttggctggagtctgctaagatgttttcttatgctggatggacgcagacctgtaacaccctgtttttcatcttctccaccatatttttcatcagccgcctcattgtttttcctttctggattttatattgcacgctgatcttgcctatgtatcacctcgagcctttcttttcatacatcttcctcaacctacagctcatgatcttgcaggtccttcacctttactggggttattacatcttgaagatgctcaacagatgtatattcatgaagagcatccaggatgtgaggagtgatgacgaggattatgaagaggaagaggaagaggaagaagaagaggctaccaaaggcaaagagatggattgtttaaagaacggcctcggggctgagaggcacctcattcccaatggccagcatggccattagctggaagcctacaggactcccatggcacagcatgctgcaagtactgttggcagcctggcttccaggccccacaccgaccccacattctgcccttccctctttctcaccaccgccttccctcccacctaagatgtgtttaccaaaatgttgntaacttgtgntaaaatgttaaatataagcatgcccatggatttttactgcagttaggactcagactggtcaaagatttcaaagatttctcccacaaaaaaaaaaaaaaa

SEQ ID NO: 213600 - DNA, 667 bp, Homo Sapiens
aagagcttttgttgtcagaaaacttgaggtgtttgggacacatggaaattctttggtttgaaggccctcatcagtgtcacctttgcagattgttcttatcaaagtgattcaggagaaggccaagtatgcatttagattaatgatgcagggtttgttggcttggccacccaagcaaggtctgcaccagaggtgattcatctccccagcttactgttctaaagagaaatacatttctgtgtacacctgaaaaattggcagcccatccttagaagatttcattcataaattctttgcttttcatgtatctgttaaaacaaaaaaaattcttttaccaactattcaaagtaatgcagaattgtgggaaccaaattcagtgtgaatctctgaatttgctataacagtagtaatattgtgatagcagcttccaactatggaccatctagtatgttctaaacacagtataagatgctttcatttcaaaataccagttccaacaaatctttggcaaacatttcagttagcctcaggccaggcgcggtggctcatgcctgtaatccgctcatgcctcattttgggaggctgagacaggcagatcacttgagcccaggagttcgagaccagcctgggcaacatggagaaaccctatctctacaaaaaaaaaaaaaaa

SEQ ID NO: 213601 - DNA, 791 bp, Homo Sapiens; identical to SEQ ID NO: 48770

SEQ ID NO: 213602 - DNA, 773 bp, Homo Sapiens; identical to SEQ ID NO: 40447
  misc_feature (707)..(707): n is a, c, g, or t

SEQ ID NO: 213603 - DNA, 607 bp, Homo Sapiens
  misc_feature (560)..(560): n is a, c, g, or t
tgattggcaactatgatcatcttatgtctttagtaacagtaagcaaaatttacatgtttttaaaggaaaatttaatttctataaatattgttaaaaaggggttatttgtggatatgtaattttgttttggtgtatttttctgtaactttaaggaagcactaatctgtttagtgtttgttctgttttgccttgttgagaggttgattacttttaatatgaaataattttaaaaggaggctttttataaggttgtaggggctttttaaagttattgataccttttttttttagtttgtagataactgctatagagatcagtaccattgcatattttgcatagtgtagaaccagtggtcattaatttttaaaactaccttatgcaagtgtagttttcaaggaaataaatacatagatgcatatacaattaaacaagaaaatgaaaacagtttaaaataggataaggaaatatacagatagaatactgagagtaataaatatggagagtgggtcagaattgtaacattgataggcattgcataaaccctgcagcatttttaagntaaacttgctctcattttgggtatcaagaaaattgcaggaaaacaca

SEQ ID NO: 213604 - DNA, 456 bp, Homo Sapiens
agctggggcccactgaggctcctcccaactaaagcaactgcagctgcaccttcagcctcaaggcctggccccatggccctggctgggcctctgtgccagccccgggggccccccagttactcagtctttcctggagacagcaagaagctgcaatgtgcaatccccctgcccccacagccaaggtcaggaagaggccctgtggtcaccgtgtctggccaatctcaggctttcacttctgtactgcactgtggcttgccctggcggggggcagggggttggcaggacatggcaatgggcaactggggtgggcacagggcttattcctcggagtagaagggtgtacagggggcccagactccacagtgacttgccacatttgccccccatttggagaatgcttttatatcaaaagtggagacgataataaagttattttgggttaaaaaaaaaaaaaaa

SEQ ID NO: 213605 - DNA, 794 bp, Homo Sapiens; identical to SEQ ID NO: 45854
  misc_feature (5)..(5): n is a, c, g, or t
  misc_feature (10)..(10): n is a, c, g, or t
  misc_feature (789)..(789): n is a, c, g, or t
  misc_feature (791)..(791): n is a, c, g, or t

SEQ ID NO: 213606 - DNA, 772 bp, Homo Sapiens; identical to SEQ ID NO: 53860
  misc_feature (15)..(15): n is a, c, g, or t
  misc_feature (763)..(763): n is a, c, g, or t
  misc_feature (770)..(770): n is a, c, g, or t

SEQ ID NO: 213607 - DNA, 581 bp, Homo Sapiens
ccatggtggcaagtggccggttccttgcggggctgagcaacaaagtagtatcagtgttcggtggctccactggaactacgcagagccagaccagcgggaccacagaatgggctgaggcggcggcggctgtttggataaagtcaacagcgggacgtggggcgtgacgccggtccggcatcctaagacgtgtggtttgagttgcgggcgagaccaggctttttttaggaccttgggcctgataagtgggcgactgcagtagtgcgggaacctattatttgacaggaacatgacaggaagtgtagggaccccatgcttgatggatggtgacttatagtgtggtagtctcagtgttgatgggcatgaccgagacagcaggagtacccctaagttctggtgagaggtggagcctcagaaggacaccttactcaagctgtctttagttcccaaagacaaaaaggctcagtggaaaagattccttttttttttttaatgtctctatatttgagactgtgggtttattgtggatatgcattatctagttttaataaataaaagtataaacgtttaaaaaaaaaaaaaaa

SEQ ID NO: 213608 - DNA, 458 bp, Homo Sapiens; identical to SEQ ID NO: 53933

SEQ ID NO: 213609 - DNA, 640 bp, Homo Sapiens; identical to SEQ ID NO: 46199

SEQ ID NO: 213610 - DNA, 706 bp, Homo Sapiens; identical to SEQ ID NO: 48159

SEQ ID NO: 213611 - DNA, 670 bp, Homo Sapiens; identical to SEQ ID NO: 52467

SEQ ID NO: 213612 - DNA, 645 bp, Homo Sapiens; identical to SEQ ID NO: 52108

SEQ ID NO: 213613 - DNA, 530 bp, Homo Sapiens
ctgggaacgagagagccaccgaaacagaatgagggagacaaagaagtgggcatcacccttaactccacaagggcttcccaagggcgctgtaccgtacgcaggcccaggacgaactttatttctcgccccagcatcgctgtccttgtcggtgagaccctggctttagggcagacaggaccacgtttcataagttcatgctgtcccagcagaggaataacgccagaaagtgttccagtacaaccagagaaagagagtccatgagaaatctgcccttgtgaagttggaatcccctcaacctcaccccgctgacttgaatgaagcgactgagacgggctatgatggagcagatccggttgctcgaccttctcccttgcaccaacacatgtagttaatagttactggacatgcatattcagtgggttccaggtaccaaacttgtattgaatggtatgtgccagacaccgtcttgagatctggagaataaaaaaataaaaaaataaaaacgagacatccagaaaaaaaaaaaaaaa

SEQ ID NO: 213614 - DNA, 580 bp, Homo Sapiens
atgagaaaccctcttagcaatgcaattagactagcagcaaaggaaagcaagtgatagtgtattttttaattgttaattttatcacttatcaaaaaaggcttgaaccattgactttaatagaatactgattactctgataattttgggatgagaaaacaaacatatcaatacttggaacacagtctctttctccatcccatcctgctaccagaaagaagaataacctatcagtcacctaatgggcaaagaacacattgattaggaaatagctgtcacttatagttgaaagactcaaggcagatgtgacaatataacaaatgtatgattctcttaggcagctagaaaattagaaacaggccattaaaatgtacatgctagttagtaagaggaaatgccactggccaaatcatttgtaggttagagtccctatgtaatgacatatgtttaatattaaagctatctgtgaatatatttttctttcagagtcttcgcttcactcttcttaacttctgccattcctgttattatccagcttgccgttctccaaattacatatcttcctcacaaaaaaaaaaaaaaa

SEQ ID NO: 213615 - DNA, 672 bp, Homo Sapiens
  misc_feature (624)..(624): n is a, c, g, or t
  misc_feature (629)..(629): n is a, c, g, or t
  misc_feature (644)..(644): n is a, c, g, or t
ccattcttagatcttatcctctaaacctttagtcatcgtttcactctcctttgattccttgttatgggtctttcaactctggaaagacaaagagatagtgggagaggaagcccggtcactgagcatctacagagggctaaatatatttattctcatttgttattcccaatattctctgtattgtgatttccatttcacagatgaggaagctgagggctagaaacatgcagtactttgcccaaagtcacacacatattaagaagagctgaggtatgaatctgggtctgcctgactcaaagcccaaacgctttcctttgcatcgtgtcacaaagtcatagaccatgacattgtttgtatcttcaagaccagttattaactttctggctccaaggagatcccctgcccaagtgcctaggggcagtagacagctgtctcagggacagtcgtagcatgtgctggattattagtgcagcagctgacactttttcccagaagggagagaggcagcaagtcagaaagttcacgggaatgagttgggagggggtcccagggaagggggacaggccgccaggagaaggaaagtacacgggagaaaatagtggggctctgatgagttagtagggntctgntaccaataaaattgnttccataaactgtaaaaaaaaaaaaaaa

SEQ ID NO: 213616 - DNA, 681 bp, Homo Sapiens
  misc_feature (119)..(119): n is a, c, g, or t
  misc_feature (151)..(151): n is a, c, g, or t
  misc_feature (154)..(154): n is a, c, g, or t
  misc_feature (292)..(292): n is a, c, g, or t
  misc_feature (650)..(650): n is a, c, g, or t
aagatgtcttcctttgcaaaatcagaagatgaaagtgtgactccttccaggggctgtgagtgttgatctgcggaagccctggggccgaggttgctggccataggcagcagaggggccgngaggcgactcatggccaacaccggagtggggnggncccagtcctggttgcctgtagtgaaggaatctctagatgcaagtttaaaaccgtgcctagccctctggccaaatgctgttttcaagatgcactgttccacaatgaaagataaaagctcttttattaaaacaaagcagntgtaaaacagtttgtatctgatcctgagttaaaggcattactaagggaaccacatagggacagagtgaatgtcacttcttccattaagtttcatagtgtttgctgcccgcacatgcttgtacctgtcttgtcacttttcccttctgcctgggagacgggtcagtaaattccaaagggccttttgctaatctaacagccagaaaaccaagcaaaggcttctcccctactgatctccaagagcttagcaagaaaatgaaattcttgtggttctagggcacagctgtgataaccagggaccaacacccgcaagtgtgttgaaacaataggcctgaagtccaaaagctaaaagaataagtgntagaatccaagctcaggattcacaatgagtt

SEQ ID NO: 213617 - DNA, 685 bp, Homo Sapiens
  misc_feature (7)..(7): n is a, c, g, or t
  misc_feature (667)..(667): n is a, c, g, or t
cacaagncccttctgactgttggagaacctgacgcgcggattctaactagaactggcactctcttcgggtgttagataattaactcaaaggacagcgaaggccttttatgatgtctttcaagctggccttatgacagcttttcttaacgtttctgcggacattttggcggacttgtgtcggcctagctcagtgatcagtttcgttaaagaatttgagtatccgaacattaaaggattggacctaaattctagcaggaggatttttagccacatcaaataatttacgtctcaaagatttagataattagggtaaggatgcttagtaaaacctgaaggttccatcgcgccactgcactccaacctgggcgacagagcgagactccgtctcaaaaaaaaaaacaaacaaaaaaaaacctgaaggttcctggaggaaagagatgaactattagccgtgtatttcggtgggaccacctcaacataggttcctgtaggttagcaatgtagaaatgtagcgcttcaaagccggagcatcctgtcttcaaagagcatgaaggtatcaacggcattcattgtcgattaataataaccttcctggtactttcttgctaaagtataagccataataatatttcataatcgcaccaatacaataaaggatgaaagacgntacaaaaaaaaaaaaaaa

SEQ ID NO: 213618 - DNA, 472 bp, Homo Sapiens
ccatgcctccctggggctcggtctgtctgcacagtgaagggcttgggtgaatgagctctgagaggctgtgtgtgtgcagactgcttcctggggaaaggggtggatcaggtcctggccaagccaagtgaccaagtgactttgggacagtgaaaatagccagtgccaactgagggcttcctacacgcctggccttgggctttccctctattaactccctcaatcttcacatcagcctgctgtgtgatgacggcatcatggttatgcaagaaaccctcttgttttcacagatggccactaaagcatttaacagtgaagttacttgccttatatagtttgccacgaagtctaggatgtcctttaagatctttggcaaagaagaatgctagtaattgttaaacctagtgatgtattgattacaggcgtgagccaccatacctggcgcatgcatattttttaagagtacccactggag

SEQ ID NO: 213619 - DNA, 573 bp, Homo Sapiens
  misc_feature (19)..(19): n is a, c, g, or t
gttgaacctgggaagcagnggttgcagtgagctgagattgcactgctgcactccagcataggcgtcagaataagactctgtcttggaaagaagaaaaaaaatcgttagcctaaaaccaactctctctaaatttaaaagagtgattatttatcttagtatttatagaagtatgagattatcagaaggtgcgatgcacaatgctcattattttatcctagtacaagacacgtataacatctaacagtaaagaagatggaatctttctataaaaacaattctgttattaatagttgactgacttcagtaactttgaggagtagaatgaaacttattaggcaagatctttccacatacactacattgtattgttcaaaattcatagaaattacttgcaatatattgatttaagccttatgtagtgactgttgctatatttgaagtagcatttttagtttgctgtttttcctcactgcttaatcctacaaaaaccagccatctgcctaaaaaataaaagagcaaaaatgaatcagtgcaaccggtatacgaaaaataataattattaataaaactgta

SEQ ID NO: 213620 - DNA, 733 bp, Homo Sapiens
  misc_feature (614)..(614): n is a, c, g, or t
  misc_feature (661)..(661): n is a, c, g, or t
  misc_feature (679)..(679): n is a, c, g, or t
cacatcctgagctactagggggtaggacttcaacatgcacttctgcaggggccgcagttcagccaacatcatctttttttttgagatggagtctcgctttgttgcccaggctggagtgcggtggtgcaatctcggctcaccacaacctccacctcccaggttcaagtgattctcctgcctcagcctcccgagttgctggggctataggtgtgcgccaccatgcccagctaattttgtatttttagtagagacaggctttcgctgtgttggccaggctggtcttgaatgcctgaccttgccgcccgcctcggcctcccaaaatgctgggattacaggcgtgagccaccgcgcctggcctcagccaacatcatctaagggctctcacggagggcctcccagctgcccgccctgtgggcatttgcacatatcctgacaagcctgaaagaagctccgggtgcccattgttcagtccaggtgcccattgttcccgggactgaggcccgggaaagggaagcgacgtggcagggccagcagcagaccctgggcctttctctagactgagcaccattccccgtgggtgtgctctcagtgccgcaccgaccttcacactgcanagatggatgccaactccctggcaggggcaggactgctgccgagcagncccacctgcccttccagncacaccccaagtctgtaagggccgctcccaggaacacctgctactgcacacttc

SEQ ID NO: 213621 - DNA, 456 bp, Homo Sapiens
tattcatcctcctttaaaaagattgtaatgaacacctacaaacctttcgccaagtacaagaacatgacctgcttcctgcatctgttgatgtgtttctttcctttcccattcctatgctgcctcccttgcatacatggccactttaagatttgttattccattgcttattctgtaggaagattcaggtttttttcataaatataggctattcagatgttctgtttttgtttgtccgttttggtaatttgagtaatgtaaaatatttgcctactttatctttgtcttcccattactttttaagattgtttcatctcataatggtaaattttgtattttatcacaataaaaagtcagaaaaatatatttaacatatctacatatctttttataatgccatttaaaactgataaacctcaaaaaaataaaaggttgttacattgtaaaaaaaaaaaaaaa

SEQ ID NO: 213622 - DNA, 700 bp, Homo Sapiens
  misc_feature (9)..(9): n is a, c, g, or t
  misc_feature (631)..(631): n is a, c, g, or t
ctcgggttnagcaattctccttcctcagccctcaagtaactgggattacagatggaattaaattcacctgtctcggccttccaaaatgctgggataacaggcatgagccaccgcacccagcccagttatttcaacaagtgcatgctcaagagtgtgttgtatcatttctatatagctgtaaatttatcaattatttatattattgttttatactctaattccattttttgtcgtagaaggtaatctatgaaatttcggttttaaaaaatgtgttaagtctttgtttttggcctatcaggtggtttataaagaagaatgttgaatgagctattgagaaggctgtgtatcccgatgttgttgaggagtgttctctataccttcattagaaattattgtttttgactgccttttagtcctctgttcccttactaatatcatcttgttttattattattacagaaagtggggtattgaaatatcctactataattatattgctctctctgtgtttattcagttttgttagtatttactttatatatctgaaagcctaatttgagacacacacacaaatacatgcatgtataaacaaatttgtcatacattcacagggaatgaatctatgtattgntaaatgtccttttttgtctgtttgaagttttgacttaaagtacattttataaaatatgacagtttttta

SEQ ID NO: 213623 - DNA, 487 bp, Homo Sapiens
actgtttgttgtgtgtctactgggtgccagacactggtctaaggcaccgagcgcccagtaggaaaccaaatggacaaccccctgcccttgtggattgtatatttttgcttcaatggtcttgtctctactcagctaaaatggactttgtaccccgctatttatgtcctccctcatgcaaaggggttcaaataaagcaattgggaaaaaaaggtgggagggatgaggggacgggaagaagcttggtgtagcaggaagacctggaaagacctcaaccttggggctggactccaatcatagcaatttaccagctgtgtggccctgggcaaagcccttgacgtctctgaacttcagttctctcatctgtaaaatggaactaataccagcatcctgaagaggatccctgagataacatacatcactttgggcccagcgaggggcatagggagagctcaataaatagaagctggaactcaaaaaaaaaaaaaaa

SEQ ID NO: 213624 - DNA, 672 bp, Homo Sapiens
  misc_feature (672)..(672): n is a, c, g, or t
caaagtgctgggattacaggcataaaccacaactcaataaaaaagtttttaaaaatttacaaagctcatatttgatccagctaggattttaccctgtacatttgtatttcttgtaggctggcgcacagatatcttaaatggctactaattgctgctgtgtatgaaaacaaatggctatcaaggccgggtgcagtggcttacagatctggtctgaatctcaagtccagaccagtccagagttcaagaccagcctgggcaacatggtgaaaccccatctatacaaaaactcggcaaggcatggtggcatgcacctgttgtcccagctactcaggggctgaggcaggaggatggcatgagcccaggagcttgaggctgcagtgagctgtgattgtgccactgcactccagcctgagtgacagagtgagacccccatctccaaaagaaaaggctatcaatacaaaagtttatctaaattactgtacagctatacaatggaatactctacaaaatggagagatccataagataaagcaaatgaataaagcaaaatgcatgtgttgacagctgttgtgatacctcagttcttgtcttcttggtttaaaagaatttaaatgagacagcaaaggagatgcagcataatttattgcaaaagaaaaggagtattttgaaagn

SEQ ID NO: 213625 - DNA, 638 bp, Homo Sapiens
ttttctccagcatttgaataaattgttgtttctttggttgaaccatgatgagataattggcttaaaccaggagtcatgcatggtatctggaaacttcctcacttgaatcaccagcatcatactcagcatgcataatcctctcatcatgagaggcacaggggaaatgagccagcctgtctggaaaggaagcaaatgcatgctttccatctcccactcagtactggacatgaggctatgtcatcaccacttaatgccagcaccacttaaatgatgtttctctctctctgccctgtacttgctggaggcacatgcccatatcacgtagggtgtcagggcagagagctcttaggaagagctgagctgtggggacttcctcccacgcagaagagggaggcctccgcagaattctctgccatgtgcttctaggcttcctcaactcagaaattttattatagagttttagaatgtgaagagctcttggaaatcatgaaagatgaagaatcaagatggaagtttgatggcttgtcccaggccccagagtggaccctttgctttttggaatccaacagcaaggactcatgggaatatcgtgggatttgacttggagagacagggctcaaacctcatctttgtcactt

SEQ ID NO: 213626 - DNA, 594 bp, Homo Sapiens; identical to SEQ ID NO: 48525
  misc_feature (555)..(555): n is a, c, g, or t

SEQ ID NO: 213627 - DNA, 736 bp, Homo Sapiens
atagaaacaagttagagacaaaaggatgctgacaaatacttaactaggagcactatttgtttactgcactatacaccaaagtcaatcattataaagattcacgatggaagttggttcaattgtgcccagacgtcaaagctagctatctgatgagtcgctgtgccatagcttgatctatgtttctatcaaatatggtaagtataaacttcattcatactggccagagaaatactgcactacccctcctcaaaaaagtgcaacttaatgctttaggacttataaggcttgttataatgctgcatgatgattgaatattggcatttttcagacgaaggaggaggcagttaagtcatctacattttagtaaacccattttgaaaaaaaaaatcaagaaagcaacaaaatcaatcagctctgtcacactacttgcaattttctcatttgacggtttttgaactttacttgttttttttgtttttgtttttttccaaaaatctgaccatgtattcagaaacgcctcactgcacactacttcggctacacaggtaggtaacactttaatcattttgttaaatcacagccactttgattatgttatgtttccgatgatataaacattggaaggcacagtggtaacattgtagcattctaaccttgtacctctgaaaatcccagaataggttcacaaacgcaacattacaattcagacaaactctttttgccatgtcttggtaat

SEQ ID NO: 213628 - DNA, 698 bp, Homo Sapiens; identical to SEQ ID NO: 52417

SEQ ID NO: 213629 - DNA, 447 bp, Homo Sapiens
atagactggtttacaaaatcgaaaggaagagcatctgaaacagccttaaaaccgaaaccatatccaaggagagctgaaataaggcatgtgggtggcagaattttgcaagttaactgaaaagcaagaccatgggcaggagttctgaaacaaggccccgccatccggtgcccagtaagcctcaccacgcaccacacccgcgcaggacagacaggagtgctgcaggtcagccagaggaaggagggcccacactgccagcacagcgcaaggacatggtgcagagctgagagcactcagggagcagctcctgagtgaacagatgacagacacgcctccttctccgtttgagctaggtttacctgaacaaataaaccagttggtttcaatgggacaggtgagggcgatccaaacatacaatctgatttagacattcctaaaaaaaaaaaaaaa

SEQ ID NO: 213630 - DNA, 559 bp, Homo Sapiens; identical to SEQ ID NO: 44791

SEQ ID NO: 213631 - DNA, 400 bp, Homo Sapiens
  misc_feature (25)..(25): n is a, c, g, or t
ttttttttttttttagaaaagaatnaatatattttatttggcaaaaagttaaatatcatctcaacacaacaatttggtcagtaggccttgaggtaactattgcaaaatatacagtgtaagttcagtctgatggaaaccccagattcatcaaggatacaaatctacagtagcccaatggcggtttcatagtgtataatttattatcaataaaattaactccgttacaatcagcattcatttcctccgattaaaattaagcataaaccctaggtagtaaccttctgcacatatgtatagctccgaatttcctcactgttcgtctggtgcaaaaacaatattcaagcttgtctgattatgcatattttctttaatcatatagattatatatacaatagacaag

SEQ ID NO: 213632 - DNA, 606 bp, Homo Sapiens; identical to SEQ ID NO: 48728

SEQ ID NO: 213633 - DNA, 487 bp, Homo Sapiens; identical to SEQ ID NO: 40664
  misc_feature (458)..(458): n is a, c, g, or t

SEQ ID NO: 213634 - DNA, 686 bp, Homo Sapiens; identical to SEQ ID NO: 44970
  misc_feature (32)..(32): n is a, c, g, or t
  misc_feature (640)..(640): n is a, c, g, or t
  misc_feature (645)..(645): n is a, c, g, or t

SEQ ID NO: 213635 - DNA, 632 bp, Homo Sapiens
agcggcccttcgtggaggaggccaagcggctccgcgcccgacacctgcgcgactaccccgactacaagtaccggcctcggcgcaaggccaagagctcgggcgccggaccttcccgctgcggacagggaagaggcaacctggccagcggcggcccgctctgggggccggggtacgcgaccacccaaccgagcagaggctttgggtacagaccccccagctactcgacagcctacctgcctggcagctatggctcttcccactgcaaactggaagccccctcaccgtgctccctccctcagagtgaccctaggctccagggggaactgctgcccacctatacccactacctgccccctggctctcccactccatacaaccctccccttgctggtgcccccatgcccctaacccacctctaaccctcatggacgcagacctcacgggacgggcctcatcctccttttttaatccagcagcatcccctaccccaggctgtcaaccctttctcctgttggactacagttcagaggcagcctgcagtcctcccatgatagccagggagagccgcacaacatacaattatatttttggtagtattaaacagttttgtattattcaaaaaaaaaaaaaaa

SEQ ID NO: 213636 - DNA, 543 bp, Homo Sapiens
ttgtaacctaaggagggtcttatagaagttggtatgttaactaaatcttggactgggaaacagcaccatttgtatcctctgcaaacagatttacgcttttgaggctcaaaccaactagtgttctcatgggctgttgcctaaggacagataaacatggaaaacaggctatgtccagggacagatgattggtggttaagaattacagtaaaggaaaattacacctggattttcttctgtaaagtttcaaggaacttggatttgaactgtgaatctactgttttggcaaaaaatctcaaagaaaaggatgtttgttactgtctcagtcttcctgtctttgctacacgatttggatcccttacgctttttcgttaagaatatctgtctgctatagtgaatttgctagccccttatttttttttttaattttagttctttattagaacgtgtacttgaatggactgtagttgctcataacccatgttaatctctgatagtatttgggttttatttcaggagcttttgcaataaagcagtaactgcaat

SEQ ID NO: 213637 - DNA, 576 bp, Homo Sapiens
ctgcaggccacaccccatggtctatgccttcccatcatcccctaaatataagctcactcagcctgtggacaaaagatctgaaagacctatgtccatggcagaatcaatggggactaatacctattatgaaaataaagggctccttctcttccaggaatcagcacttggaacaggggtcaacataatatccatcaattggtcaaccaacaaatgatttattgagaacccattgtgtgctcagcatttaactcaaagaatcaaaacacagacatcaagtatgggtttttagagagacatgggatatgtggtgaggggttctctcaaatcgtgttactgcaactactgtatttccaagcctacctttgggccctgaagcaatctatctgtagctgttcttgcactagctcctctttcccccacccctgatcccttggcctccagactgaatgtttggctcaacaagacaaaatgtttggctcctaagtctcagctggagacagattacattcaactgagcaacagaatttgttctatggggcagcaataaaaatactagtttgtaaaaaaaaaaaaaaa

SEQ ID NO: 213638 - DNA, 601 bp, Homo Sapiens; identical to SEQ ID NO: 50824

SEQ ID NO: 213639 - DNA, 729 bp, Homo Sapiens; identical to SEQ ID NO: 44515

SEQ ID NO: 213640 - DNA, 504 bp, Homo Sapiens
  misc_feature (469)..(469): n is a, c, g, or t
  misc_feature (503)..(503): n is a, c, g, or t
aatccgcccgcctcggcctcccaaggtggtgggattgcagacatgagccatcgtgcctggcctccagcaaggtctttatgatctatatcttgagtcgacctcctatctcattctgtaacctagaatgcctaactgtctgggaatgcagcccagtaggtttcagcctcattgtccccagcccctattcaagatgcagttgctctagttcaaatgcctctgacagttgtgcttcaccaaacctagagaatgaacaaagcgaaggacctggagttcaagaatggagggatccaactccaaggcaggaagcaggtccagaaagcaggcagggcagcagcaacagggaagaacagcttatctgatgactggctgggtgggaagcacaactgagaggacttgaaggactttggaagactaagttagctacaaagaaaactaagtattataccaaaaaaacttatccgggcgtggngacaggcgcctgtagtcccaaggtggtggggatnt

SEQ ID NO: 213641 - DNA, 793 bp, Homo Sapiens
  misc_feature (739)..(739): n is a, c, g, or t
aatagtgacagatattttcacccaaaccaaccaccaaaattaattaccatcttttaggtacacagggctatttaggccttttgacacataggaacgcatttgatattttttaacaattacacaagataaagcatgtaaataaattaatggaaaatgactattactattcacttcctacaatgctaccaactaccatatattgagtgtctctacccaattccaagcaccatatttgataatttcaatcttcacaaccctataaaacagacactctttttatccttgtttcacatatgaggaaattatagcttagagaggttaaataattctttgagttaaccagaccactggtggatctaggattcagacccaggcagtctgagaacagagctcctaattttagctactatttttttcctgttttttgccacaaaaaaagaacacagagtatgtttgtcagccttgcagccagtgtcttcccttctgcctgcaccattctcatatacatttaagtccctggacacaagagtaaattcataaacattttgtacatactgagatttttgtcagcttggttctaaagcaacaaaggctacctcaaagatgactggaagaaaaaggggtaaaaaactgagaatttaaactgaaatctctccatcagagtttaaattaaaatggaaatttataaacaaattatctcacccaaataatctactgatttccagtcccaagtgctagntattcccacttaaaatcccaatataaaaatctctttaaatattaactcaaactc

SEQ ID NO: 213642 - DNA, 668 bp, Homo Sapiens; identical to SEQ ID NO: 45926

SEQ ID NO: 213643 - DNA, 621 bp, Homo Sapiens
cgtttaactgtgagatctctataaaataggaattattattttcccttttaatggatgagaaacataacatcaaagtgtacagatcaggtgacttgttgcgtgtcagtggtaattggctacattggttgctcacagtgaaccatgtcttttatactcacactcgtatagtcactactccttgaatcaaggctggccctgggattcactttaaccactagactgtgtcagaaatgatctcgttccagttccagacctaagcattaagtagacctggcagatttcacttctgtaatcttgaaagccctgtcacctggtaaaaaaaaaaaaaaaaagaaagtctatttatgctgctggagagactgtatgctgagactgtgtagagagacacaggaagagggagagaccctgagattctaggggaggagagagagaggttcaattgagcccagatcccagccaactagccagctgaatgcagccacatgagcaaccaccagtaagatgaacggaacggtgccactgagccccgcccagattatggactcctgagcaaatacaatggtagttgtttataaccactgagttttgggtggtcagttacatagcaaaaaaaaaaaaaaa

SEQ ID NO: 213644 - DNA, 647 bp, Homo Sapiens; identical to SEQ ID NO: 55837
  misc_feature (12)..(12): n is a, c, g, or t

SEQ ID NO: 213645 - DNA, 347 bp, Homo Sapiens
ttttttttttttttatatatatagagctgtatgtaaatagcattggggtgtctgtttctgcagctggatttccaaagggcttccccagtcccattctgtgtttctacgatcgctccaggcgctgtctttactctccacttccttctcgaagtgccaaccgcggcctttcaagctctgggctccccctctggaaaacgggaaccagctttctccaaggacacagggttttcaccaacctgttgctcgctccggctgggtctcggctccggccccaccaagaagccccgcgttcctacaagttccgcctgccgagcagccaggccgccagcgccgccacctgcgcggcc

SEQ ID NO: 213646 - DNA, 751 bp, Homo Sapiens; identical to SEQ ID NO: 51942

SEQ ID NO: 213647 - DNA, 711 bp, Homo Sapiens
  misc_feature (658)..(658): n is a, c, g, or t
  misc_feature (692)..(692): n is a, c, g, or t
ttacaactgaagaaattaatgttaattctataatatcaactgagaatgggtgtctttttaaaatttgcatagacatgccctgtgagctagcagagctttatttttctcatatatccaaaaatcaggaggcaagcagctatggtgacaaggtcaggtccagggtctctactgttctcctggccttttctcatgctggctacttcaggatttgagtgtctactacacctgtaggtctcatattttcaacaaagtacaaagaaagatgtagggatgatattacccgtgtctgtccctttttatcaggaaaaccaatgtttctccagaaactcccctatgagaccgggtgccatggccatccccagcagctgatcataattggcttaaacaaattaggatttattgcttggggttctgttagcaaaagaaagggataattatctgtattaatagacagttaataatgtctcccatagggagtaccaaacaatgacaatgacagaaaccagttttcgagtatatgcactgtatcactccctccccaccactgtccactcactctccactagacctcacatccaggtattagcttctatgcacagagacttacctcttacctattcaactttaattgctggtatcaacaaaatacactgcttangctttaagatatagaaacccttctgaaggctttntcacaaaaaaaaaaaaaaa

SEQ ID NO: 213648 - DNA, 637 bp, Homo Sapiens; identical to SEQ ID NO: 53228

SEQ ID NO: 213649 - DNA, 532 bp, Homo Sapiens
  misc_feature (340)..(340): n is a, c, g, or t
tttttttttttgaaattttctgaagatttagagtcatataagatatcagtggtaatgcaggaatcagctgagaaactttcagaaaagttacataagtgtaaagaatttgtggacagttgcaggcttactttccctactagtggtgatgaatacagcaggggcttccttcaaaaccttaaccttattcaagatcagaatgcgcaaacaaggtggaagcagggcagatatgatgaggatggcaaacccttcaatcaaagatctttgcttttggggcatgagcgaattctcacaagagcaaagtcttatgaatgcagtgaatgtggaaaagccattaggcgtnaaggcatggtttgatcaacatcaaagaattcactttttagagaatccttttgagtgtaaggtctgtgggcaagccttcagacagcggtcagctcttacggtccataaacagtgtcactcggcggaactgtgctcccggaatccttctgcgcactctctctgcagaagtccctccgtgctgggtccaggcgct

SEQ ID NO: 213650 - DNA, 671 bp, Homo Sapiens
tttattgcagaacatatgagcagttgattagttaaagatatccaaagtgctgggattacacgcatgagccaccgttcctggccgatattttattttcttaaaaggtcattatcagatgccacaagagtatttctataaactatgacccaagtatagcctaatgttaatagcttaaaataggttttatttaccttttttgccctttaaaagcaaggaattattttttaatggaaagaacatagactttgatgatcagttcacatccttgctttaccccttgaaaaatgtgcaacctggaaagacagcttaacattcctgagtcacatttgtccaaataatacaaacaatggcaacaagacttcagcactaatgtctgatgttttttgtatgattaatctgtgccaggttccattctagtttctttacacacattataccatctaattctcacaacaactttgcatagcaggcattgtcatttccactttacaagcaggaatctgaggaccagagttaaaagtaactggtccaagattgcctagttaataaatggtggaatttgcagtcagacccaagctggtttgggccaatacacttgaccttcttatgatacgtcagccttgtgaaatagggcagatactattaataatatccaccttgtgtgatcatta

SEQ ID NO: 213651 - DNA, 569 bp, Homo Sapiens
  misc_feature (538)..(538): n is a, c, g, or t
  misc_feature (552)..(552): n is a, c, g, or t
  misc_feature (556)..(556): n is a, c, g, or t
cctggctgctgggtgctagagcttgtggaccactggcttgcctcactgtggttggtggtggcggtgacagagtgtgcagcacgaccagagtggcttttctggctttgcccgcccagctgctccatgccaggaggaggaggagacacctagagcctgcgacaccatggctcgcctcgctgcaggttctacccatgtaacagatgaggaaaccaaggagcacagttatttactaactcgcacaaggttcgaggccgagctcagacctgtggagcagaagctgagtgcgctgcagtccccgctggcccagaggcccttcttcgaggtgccctcacccctgggcgccgtggacctgtacgagtatgcatgcggggatgaggacctggagccactgtgacgccacccatgagaacgccgctgcggggccgctccacacgtgccacggccaccactgggacaccgccgcttgtgtaaaaactgttgtcttttgtggaaaatgagtgtgtttgcatggaatgataaatttttatttattcaaaanaaaaaaaaaaaaanaaanaaaattggcggcc

SEQ ID NO: 213652 - DNA, 344 bp, Homo Sapiens
taaagaatgaccaagaagtttgtccaggttgaaatgtgtccagtgagcagttgaaaatagggttttggagtatttaatggacagaagcactgctcagcacgcaggcatgtgaggaagctgggcttaaaggagactccagcaaatggagagacagaccacagtcctgggttggaaagctgaatatcgttgaatgccagatcttcccaaataaatgaactggcttaatacaattctgatcaagatgccaacaagaagagagtgtatccagacaaaatgatctttggaaaatattcttcaccttgtggaataaacaggaaagcatggctaacaaaaaaaaaaaaaaa

SEQ ID NO: 213653 - DNA, 654 bp, Homo Sapiens; identical to SEQ ID NO: 48921
  misc_feature (8)..(8): n is a, c, g, or t
  misc_feature (544)..(544): n is a, c, g, or t
  misc_feature (550)..(550): n is a, c, g, or t
  misc_feature (581)..(581): n is a, c, g, or t

SEQ ID NO: 213654 - DNA, 598 bp, Homo Sapiens
aaaatttaaatttatattacaacagtggaatataatgtttaataacttgtgttggggggattatgtgttttgtttgtttttttttttagctcttcagagaagtaagaataatgaagattttaaatcatcccaatataggtactttctgcttttttaaatattttggggtctaaatacgtacttgaaattatgtcataaagctaaacacgtattctagaaatggtagagtacacttctagtaaaatatatatacaagttgttgatcatttgtattagctttttgaaattgctgaagacaggttaaaagcttaggtattaaacgttgaatttaaagctttaatctggtagaaacatctgtactctgattataattttctaatttttaagtatattagaaaatataattgtattgcatgagtagatagaagggaattataggaagtcagaattaatattttcaaaggggctgggcacagtggctcatgcctgtaattccagcactttgggaaaccaaggcaggaggattgctggaggtcaggagctcaagaccagcctaagcaacagagcgagaccccgtctctccaaaaaaaaaaaaaaa

SEQ ID NO: 213655 - DNA, 623 bp, Homo Sapiens; identical to SEQ ID NO: 48177

SEQ ID NO: 213656 - DNA, 484 bp, Homo Sapiens
ttttttttaaatgaactaaaatagctagcacacatctataaaccactctgacactggtgttaaggcctattctcaaaaaagaaaaaatgaaattactctgaataacagtataacatcatgatataagggatatctgaataaaacataggcaagtggtttacaaatggtagtcagaaaacaaaggtcagaaagatggtagattctaagatggttagggagatagtcaaaatgatgtggctaggtatggatgaaactttgtaagaataaaaataaaataaaattggccactaggaaatcattataatgttcttttactttgagaaagggagaaattacatcaaaatacaaagatgtaaattagaaaaacatgtcagaaagtggctatttctgaaatgaacaagccaagtcaggtcacagccaatgttagactaaaagcagaacacaggagtactgacaagaaggggttgaagataagctgggggcc

SEQ ID NO: 213657 - DNA, 469 bp, Homo Sapiens
tttttttttgcattctcctaatttttaattggtggcaactgattttaaccatttttttgaataggcaaacaccaaaatatcaaaacttttaaagaacagtgaaaaggatacctctcaccccagatatccaccattctcaaatttgtgtttatccttccagagaatagtaatgtctttttcacatagataatagcataccacatatatttttctgcatttggctttcatatcttggcgatgtttccacaccaattcataaagaactcttaacccatttttacaacattatagtattccatcatatggttgggctataaaggaataaaacccagatcaataatcacttgggttctttctaatcttttgctgtctcactgtgcagtgactaaccttgtacatttatcttttctttcttgtgtgtgtaagctggattcctaggggtggaattactgggtctgaggacatttcc

SEQ ID NO: 213658 - DNA, 558 bp, Homo Sapiens
  misc_feature (544)..(544): n is a, c, g, or t
ttttttttttttttttttagcttgcaaacccactttattgagtgctggagcatttacacagcgtggaggaggagataagctggggctgagcaaaccgcacccaaggggttagagggattctgggtgagagggatgagctcccaaggcctctgaggcttccacccacacccaccctcactcccagggtccaagagaggcccagaagttgtacagcagcatccagcaaggccccctcgcacagcttggacttacaggccactcacctccaacaggggagatagtcacccatgtactgcaaaaacagggactaccggaagcagcctagggcccagaagtgtggaagcctggagtagagctgggtcgggggccaggcttgctgcactgtgccgactgctcccagggtgacggcctgtgcccagtgcggaatatggcccatagagaggatgctgtcaggcagaggctctagcatctggcttttattggttgcctttcttaaacccagcattttttaaaaagtcacctgaggtggtagtttagtcagggntggagaaaggggta

SEQ ID NO: 213659 - DNA, 430 bp, Homo Sapiens
ctaataagatgctaatataaatcctcagaagaatattaagtggaaaagacagcttgcaaaaggagatgattaatgtggttgcactttttggcaaagattacgtgcatatgtaggtgaacatggtcatgtgcatctcatccacagaaacatgtctggaaagtatgcaccattctatgggcaacagaccttttgggtcaggaggtaggagttgagctactgagaggtgaagattaattacaattcatatatgtgcttttgtatattgtctgaaatttggtattcaggaataaaaatattttgatgaatatttagacacaacataacatacatttgcacagattgacaaaagtaatgtgtattatgttcattaatttgaaatagctattactgtattctatttaatggtgaaggaagtagttaagtagaagga

SEQ ID NO: 213660 - DNA, 640 bp, Homo Sapiens; identical to SEQ ID NO: 43652

SEQ ID NO: 213661 - DNA, 671 bp, Homo Sapiens; identical to SEQ ID NO: 47813

SEQ ID NO: 213662 - DNA, 503 bp, Homo Sapiens; identical to SEQ ID NO: 54656

SEQ ID NO: 213663 - DNA, 677 bp, Homo Sapiens; identical to SEQ ID NO: 50112

SEQ ID NO: 213664 - DNA, 599 bp, Homo Sapiens; identical to SEQ ID NO: 54143

SEQ ID NO: 213665 - DNA, 484 bp, Homo Sapiens
ttattttcttttttttttcactttctttggcaaggcattttttatttctgttggacgagcgtctactcttaggtaaatctgtgatattttaaactaaggaaaagtacaaggtatcataaagacatgagttacgcagaactgaaacgcaacgtgtgttccttcctgtgtgatggttccatccacctcacctctcaatacctgcctgggtatttctggggttcaagccctgctaaggagggccttcacccagggcgcgccccctgtacctgcgaggacgcgctccacggcgtactcaaagttgaaagtgtgcacggaagtgtgtccctcccgcgccgcgtgcagcgcagcctcattgcagatgttggcgatgtcagccccactgaatcctggtgtcagctctgccagacgctgggagtaaaaggtgctggactgggtcagcttcaggctcttcaggtgctgctcaaaaatctcccgcctctcctgc

SEQ ID NO: 213666 - DNA, 490 bp, Homo Sapiens; identical to SEQ ID NO: 53193

SEQ ID NO: 213667 - DNA, 551 bp, Homo Sapiens
  misc_feature (481)..(481): n is a, c, g, or t
agcaatgctggtattgatgcttttaagttcagtttaatcagtagtacaatgttatgtatttgccactgaaaccatttagaaccatgcataatcagacagtttagcatgagggtttccatctaggatatggaaattactttagattgctaattttgagttggaaggcgtgagaatttgaataattttgtaaatagtattggaatatttaagataactgagattcacgattttgtacctttaatttatttgatatgcgttagtaagtcttgctttggtttttggcttttggttggagtgctgtggtcagcagaatgccacccttccccaacaaaagaggttcattccttaatccctggaaccagtgaatgttagtttacatggcaaaatgtgtcctgcagatgtgtttaatattaaaaaccttgaggagggagattatcatgtattatctggctgggcccaacctaatctcatgagtccttanggacaacctttcctgtctgcagggaaccagagaaatggttcgtgacacagactgaacctgctagctctga

SEQ ID NO: 213668 - DNA, 362 bp, Homo Sapiens; identical to SEQ ID NO: 45433

SEQ ID NO: 213669 - DNA, 617 bp, Homo Sapiens
ataactgttaatgaaagcagattcaaagcaacaccaccaccactgaagtatttttagttatataagattggaactaccaagcatgtggctcctggtcagtgtaattctaatctcacggatatcctctgttgggggagaagtttctgcagaaaaatgtgggccccctccacctattgacaatggagacattacttcattcctgttgtcagtatatgctccaggttcatcagttgagtaccagtgccagaacttgtatcaacttgagggtaacaatcaaataacatgtagaaacggacaatggtcagaaccaccaaaatgcttagatccatgtgtaatatcacaagaaattatggaaaaatataacataaaattaaagtggacaaaccaacaaaagctttattcaagaacaggtgacatagttgaatttgtttgtaaatctggatatcatccaacaaaatctcattcatttcgagcaatgtgtcagaatgggaaactggtatatcccagttgtgaagaaaaatagaatcaatggcattactattagtaaaatgcacacctttttctgaatttactattatatttgttttcaatttcatttttcaagtactgttttactc

SEQ ID NO: 213670 - DNA, 542 bp, Homo Sapiens
ttttttttaaatataaagttttttaatccaagtcaaaaaaaatctccaaagaataaaatgtgaggtgggatgcagtggctcacacttgtaattgcagccctttgaaggccacagcaggaggattccaagtccagcagttcaaagttacagtgagcttcagtggtgttactgcactccagcctgtgtgacagagcaagactgcctcagaaaagataacattcaaaaacagcagcgattagtggttaatatataaggatcatatattgccataatatataaagacataaatggtgggcctaggggcttgtcacactaaagctgacttgaaattgaccatactcagggatgttatggtgtaactctctaaaactagagatttaatacattttttttctttccccccagagtttcactggttgcccaggctggagcacaatcgtgcgacctcagctcactgcaacctccatctccggggttcaagcaattctcctgcctcagcctcccaagtagctgggattacagcatgcaccaccatgcctggc

SEQ ID NO: 213671 - DNA, 346 bp, Homo Sapiens
tgtgtgtgtgtgtgtgtgtgtgtgtgtgtgtgtgtgtgtgtgtagagatgaggtttcactatgtttcccaggctggtctcgaactcctaagctcaagcgatccacccatctcggcctcccaaagtgctgggattataggcataagtcactgcacctggccatggcatgattcttttatctctcctggggctgaactccctacatttgcttacacctggcctggaagacccaagatccccctcacaatactacttctatacccagggccaggtgatgtgttggtttagttcaggactgagctttattatgcatctcccagcaggcaacctggggcttctgatactgc

SEQ ID NO: 213672 - DNA, 435 bp, Homo Sapiens
tttaatcatataactgttcggttaactaatgtttattaacagaccatcctgaagttcactggcttacaaccacaatcatttttttatcactcacatctctacagtgttcattgaattcagcttaactcagctggggtggccctcactctcctatctctcatcttccctcaaccaatgagctagcagagacatgtttttctcatggaaatggcacagatagaaagagaacaaataaaaatacccaaggcctcttaaggcttaggcttgaaactgatatgttatcacttttaccttagcaagtcacatagccaaacacaaagtcaaggagtagggaaatatctctgtcactttaatgaaaggaactgcatagggtcatggagtgaacataaggaaaagtaaagcactagggtcaataatgcaattggtagtggtgat

SEQ ID NO: 213673 - DNA, 459 bp, Homo Sapiens; identical to SEQ ID NO: 59346
  misc_feature (407)..(407): n is a, c, g, or t

SEQ ID NO: 213674 - DNA, 576 bp, Homo Sapiens; identical to SEQ ID NO: 47033

SEQ ID NO: 213675 - DNA, 528 bp, Homo Sapiens; identical to SEQ ID NO: 55518

SEQ ID NO: 213676 - DNA, 579 bp, Homo Sapiens
tgctttttttttttcatgaatcatgtttggttcctgtgaaagtccctggtccagggatcctcctcctttctcttttacttctgaattctgaaattcagttagttacttttgcctttcgctcttctatcacagccaccttgaccttgggtaaaacccaaggtctttccttctggctaccttcctgcaggtccaccctgtctgccattggtctcctctgcctctgactacatctgccaccaacaaccctcccctcacccctgccaggggcagacaggcttctcagcagaactgtgactgaaatcagagctgctgtctggggcagtgttaactacacagaggcacatcctgacagggtttgccccagagatctaaattccagaaggagggcaccacacctaggaaggtaaatccagtatcagaaggttgctaaaagattaaagatcaagaagcttggaaacatcccatgggtacaatgtcttagaaagtctttaagtcacataccatgaatttttgcttcattactgaccatatatgaccttggaggaactctttttttttccttctactcatttctgtttc

SEQ ID NO: 213677 - DNA, 517 bp, Homo Sapiens; identical to SEQ ID NO: 59830

SEQ ID NO: 213678 - DNA, 555 bp, Homo Sapiens
tttttttttcttttcgtgcctcattttcctcacttataaaatgggtatgttaaaaatagcacctaccggctggacgcagtggctcacgcctgtaatccctagtatttttaatgcagacagggtttcaccatgttggccaggctggtctcgaactcctgacctcaagtgatccaccctccttggcctcccaaagtactgaaattacaggcatgagccactgcgcctggcccagtttttaaatttttgagacaggatctcgctgtcacccaggctggggtgcagtggtgtgatcatggctccctgtagcctcaacctccccgagtgttgggatcacaggtgtgagccaccgtgcctggcctccccagaggctttgttcaattcccaccgtctccagaggttcccccaggctggccccctgcaggccgctcacccagctagaatgttctctctggtgggaatgtgctccttgtccagtgggcccccctattgcagccccccgctacagaggagaggggctccatctgttctattcactgctgtgtccctggcgcacag

SEQ ID NO: 213679 - DNA, 575 bp, Homo Sapiens; identical to SEQ ID NO: 51360

SEQ ID NO: 213680 - DNA, 549 bp, Homo Sapiens; identical to SEQ ID NO: 43891

SEQ ID NO: 213681 - DNA, 545 bp, Homo Sapiens
gtaactcttcatttatgttaagtattaataggtcaaaaccaaaatgacctaaccctcctggacctatttatcctgaaacaccttcttgtattcattaaccatagtactcctccccacctcaagtagacacctctctcaggagcttctgagtcagacgcctctggagcgagccctatgtcaggcactccacctggggggcccttccccagcatacctgctggtgtgtaagtgtggactaacccgccgccaccaccctctgttccagcaggctctgcatgaatctttgtgcacttgcacctctttttcacatgggccacagtttcagtacttcagcctcagtggggttcctgatgtttatctagggtgttactcaagcccagtttgagattttggagtctcctgtgatcacatcttgtctcggctgtaggaatcaacagaaggagacgtcctctacataaaagctccatgtgaaaagctactcctagtcttaacatttgcagtccttgtgtcactgtcttctggtcctgatgtagtcccactgtttc

SEQ ID NO: 213682 - DNA, 385 bp, Homo Sapiens; identical to SEQ ID NO: 53163

SEQ ID NO: 213683 - DNA, 453 bp, Homo Sapiens; identical to SEQ ID NO: 50438

SEQ ID NO: 213684 - DNA, 645 bp, Homo Sapiens
cgaacaaaaacaaagaggatgaagacatagctaaagctattgaattatcgctgcaagaacagaaacagcaacacacagaaacaaaatccttatatccatcttcagaaattcagttaaataataaggttgcacggaaagtgagagctttatatgattttgaagctgttgaggacaatgaactcacctttaaacatggtgaaataattattgttttggatgacagtgatgccaattggtggaaaggagaaaatcacagaggaataggacttttcccatccaattttgtaacaactaatttaaacatagagactgaggcagcggctgtggacaaattgaatgtaattgatgatgatgtggaggaaattaagaaatcagagcctgagcctgtttatttagatgaggataagatggatagagccctgcaggtacttcagagtatagatccaacagattcaaaaccagactcccaagaccttttggatttagaagatatctgccaacagatgggtccaatgatagatgaaaaacttgaagaaattgataggaagcattcagaattgtctgaattgaatgttaaagtcctggaagctctggaactatataacaaattggtgaatgaagcaccagtgtactcagtctattcaa

SEQ ID NO: 213685 - DNA, 509 bp, Homo Sapiens; identical to SEQ ID NO: 43615

SEQ ID NO: 213686 - DNA, 583 bp, Homo Sapiens
tttgtgaaaagcaactttgatgcagcacgcaggtttttccttgatatagcatctgattgtcctacaagtgatgcagtaaatcatagtctttccttcataagtgacggcaatgtgcttgctttacatcgtctactctggaacaatcaggagaaaattgggcagtatctttccagcaacagggatcataaagctgttggaagacgaccttttgataagatggcaacacttcttgcatacctgggtcctccagagcacaaacctgtggcagatacacactggtccagccttaaccttaccagttcaaagtttgaggaatttatgactaggcatcaggtacatgaaaaagaagaattcagggctttgaaaacgttaagtattttctaccaagctgggacttccaaagctgggaatcctattttttattatgttgcacggaggttcaaaactggtcaaatcaatggtgatttgctgatataccatgtcttactgactttaaagccatattatgcaaagccatatgaaattgtagtggaccttacccataccgggcctagcaatcgctttaaaacagactttctctcta

SEQ ID NO: 213687 - DNA, 469 bp, Homo Sapiens
gttatgcatgtattttataataatttaatctattttacaattttaaactcaaatatgatttagtattatgcacataatacaaacagtagtggtgagcaaacgtgtgtttcccccacatgtgcagaatatgatggattttatgaaaataaatattcttaactccaggaaatatgatctatatggttccttaaaagattttccaatacactgaaaatttagttccttatgttcattgtataaaaatcttaggccaggcgcggtggctcacgcctgtaatcccagcacttcgggaggccgaggcgggcagatcatgaggtgaagagatcgagaccatcctgaccaaaatggtgaaactctgtctctactaaaaatacaaaaattagctgggtgtggtggtgtgtgccagtggtcccagctactagggaggctgaggcaggaaatcacttgaacctgggaggcagaggttgca

SEQ ID NO: 213688 - DNA, 480 bp, Homo Sapiens
cattttgtttactcattcagccctgttgcaggtcccaataaactcttcataaggttgacagaagcaccctctgccaaggttaagttgctaataggtgcatacagagtgcagctgcagtgaccaaacagaagggactgggcggagttctcttcagaccgattcctatactctctttgacagcagtttggaattcttctagcacatctatgtaaagttttgtctgtaaacctcttgcagttaagcctgttgtctgttgtagtctgtaagatgcgacatagctgtgtctgtgccagtatgccggaatctcagtgcagtgtccagactgcgtatttcagtttttccacaatgtggatagtacatatgaggattatttaagaaaattaaagacttcactttcttttttctggagacggagtttcgctcttgttgcccaggctggagtgcaatggtgcgatctcggctcgctgcaagctctgcctc

SEQ ID NO: 213689 - DNA, 523 bp, Homo Sapiens; identical to SEQ ID NO: 46694

SEQ ID NO: 213690 - DNA, 613 bp, Homo Sapiens; identical to SEQ ID NO: 46020
  misc_feature (539)..(539): n is a, c, g, or t

SEQ ID NO: 213691 - DNA, 582 bp, Homo Sapiens; identical to SEQ ID NO: 40278

SEQ ID NO: 213692 - DNA, 556 bp, Homo Sapiens
agtaacccgaccgccgctggtcttcgctggacaccatgaatcacactgtccaaaccttcttctctcctgtcaacagcggccagccccccaactatgagatgctcaaggaggagcacgaggtggctgtgctgggggcgccccacaaccctgctcccccgacgtccaccgtgatccacatccgcagcgagacctccgtgcccgaccatgtcgtctggtccctgttcaacaccctcttcatgaacccctgctgcctgggcttcatagcattcgcctactccgtgaagtctagggacaggaagatggttggcgacgtgaccggggcccaggcctgtgcctccaccgccaagtgcctgaacatctgggccctgattctgggcatcctcatgaccattctgctcatcgtcatcccagtgctgatcttccaggcctatggatagatcaggaggcatcactgaggccaggagctctgcccatgacctgtatcccacgtactccaacttccattcctcgccctgcccccggagccgagtcctgtatcagccctttatcctcacac

SEQ ID NO: 213693 - DNA, 547 bp, Homo Sapiens
atttatagatgggtgtacttggaatcctttgaaagcagcgtgtttagttttcaagcaaatgctaatgttcttaatcctaatagtatattagacttcgttgtgttgaatatatcaaatgaacgaactatgaaccagagctttaaaatagtgatttgtaagactttgttacaatggtacttaaaaaattgctttgtataatttacacactgtaaaattcacccattgtacatgtacaattaattgtttttagtaaacttaagagttgtgcagtccaattttagaacatgtccatcagcccccaaaatttactcctgctgctctgcggttaatttgctcctgcctccagccccacgcagccacactgatctgctttctgtacagatttaccctttctagaaatttcacagaggtagaatcatgcagttagtcttttatatctggcatctttcacttagcatgtttttgaggttcatccatgttgcagcttatacctgcgtgtagttcctttagttgctgacttagtgttcactgtttggatataccacat

SEQ ID NO: 213694 - DNA, 577 bp, Homo Sapiens; identical to SEQ ID NO: 44957

SEQ ID NO: 213695 - DNA, 485 bp, Homo Sapiens
tgttaccattctgatgttggagcggccgccgctccaccattttttttttttttttttgaacatattgccatttattttgttgaggttaaacatataattttaacgtattcaaacttattaatggacatttaaaaagctgaaaaagtgaagagctgtaccatgtcgtggattattttaatgtcataaaattcaaaggaatgccacatttcaataaaacattttaagaagttgacatacttttattagaatcatgcaaatattagagaaaggttaatggctttttttttagtagacattactgagaaaactggctcattatatcacaaaaagtgaaacttggatctcatatataaaggtgtatttcactgaattttttttttttttttttgagacagagtttccactcttgtcgcccaagctggagtgcaatggcgcgatcttggctcactgcaacctctgcctcctgggttcaagcgattctcctg

SEQ ID NO: 213696 - DNA, 598 bp, Homo Sapiens; identical to SEQ ID NO: 48189

SEQ ID NO: 213697 - DNA, 752 bp, Homo Sapiens; identical to SEQ ID NO: 50395

SEQ ID NO: 213698 - DNA, 631 bp, Homo Sapiens; identical to SEQ ID NO: 47207

SEQ ID NO: 213699 - DNA, 660 bp, Homo Sapiens
cacgcctgtaatcccagcactgggaagccaaggcaggcagactgcttgagcccaggagttcaagaccaacctgaatgacatggtgagaccccgtctctatgaaaaacacaaaaactagctgggcattggtggtgtgcgcctgtaatcccagctactcaggaggctgagacgggaggatcacttgggcccaggaggcggaggttgcagtgagccaagactacgccacagcactccagcctgggctagagtgagaccctgtctctaaataaataaataaatctaaaaaatttaaagggggcatgtgtctgtatgtatgtatactttacacagtaacagaatatctcttaaaaaacataagaaattagtagctgaagtttcctccaggaagggaagcaggaagcagatgactggattatagggatggaagaaacatttttccttctttttttgagacggagtctcactctgttgctttaaaccttccctacccattccctgggtaactcacacccctctctcagggctgaacgagtcatcccaaagtgtatttcctcccactcaccactgccacccttgagtccctcctgctcccatgcacagttttaaactcctccctccaaaaccaaagggaatcgagagacccaattcccaggcgtctgg

SEQ ID NO: 213700 - DNA, 542 bp, Homo Sapiens; identical to SEQ ID NO: 50484

SEQ ID NO: 213701 - DNA, 558 bp, Homo Sapiens; identical to SEQ ID NO: 52768

SEQ ID NO: 213702 - DNA, 592 bp, Homo Sapiens; identical to SEQ ID NO: 45583

SEQ ID NO: 213703 - DNA, 625 bp, Homo Sapiens
gctggccacagtttggagtaggagctgaaatctgtgccaggatcatggaaggtcctgcgttcaatttcctggatgctcctgctgttcgtgtcactggtgctgatgtccctatgccttatgcaaagattctagaggacaactctatacctcaggtcaaagacatcatatttgcaataaagaaaacattaaatatttagtttggacttgaatatcaagtcgttgaaatttatttgaaatacttgctggcactgcacctggatttgtactgcaagacctgactattcataacggaaaatgatttctaaagcaacagcaggtatttttgtacagggaagtttaaatgtgtttgtgtatggaaaactctccactctcctcccctagatgccatgcttccttttgtctgttacggttgccatgttctttgaataacaaattatataacattttatcctctctcaccacaaggacaaagtatggatgtggcagagtcctgatgaaagatgtatccaaacaagataacttatatgtataaaattaaagcatataatatacgtttactgttagtttgttttgataaggaataaaggaatttctaacatgaaaaaaaaaaaaaaaaaaaaaaatg

SEQ ID NO: 213704 - DNA, 567 bp, Homo Sapiens
actgataagttctgggcatccctgagaatttgttttcctttcagaaagtttcctacactactgaggtttaggggcactgtgaagcaaaagccacgcctcagaatcccaggcggagactccgacctcgtcccgggagggaagccagtagctgagcacctgcgggagattaaagagaggaataaggaggtgagtacatgacaaagagccacagtcgcaggcggtggggcctggctcagaacaggctgtgctgggaagcgggagcaggagctggcgccgccttgcgggctggcagaggaccatccactccctggcgctggggccgtcccatctcatgggcaagaaacgtgagacccctggctcgctccacacacaacctaagtgccagatggatgagacgcctacgcgtgagtaaatgccaggaacatgagactcgaacgtggcaggatatccttctgcccacgaatctaaaagcttactcggtaatgggagaatggttccaatttgataaactcgggtttttggaacgtctgtgctccagaaacactggaaggcaagtggctgctgact

SEQ ID NO: 213705 - DNA, 544 bp, Homo Sapiens; identical to SEQ ID NO: 55313

SEQ ID NO: 213706 - DNA, 559 bp, Homo Sapiens; identical to SEQ ID NO: 51907

SEQ ID NO: 213707 - DNA, 587 bp, Homo Sapiens; identical to SEQ ID NO: 49998

SEQ ID NO: 213708 - DNA, 628 bp, Homo Sapiens
caactacctctgagaagattcacgagagatctggacccaaaaggggggaacatgcctggacccacagactgcgtgagagaaaacagctggtgatttatgaagagatcagcgaccctgaggaagatgacgagtaactcccctcagggatacgacacatgcccatgatgagaagcagaacgtggtgacctttcacgaacatgggcatggctgcggacccctcgtcatcaggtgcatagcaagtgaaagcaagtgttcacaacagtgaaaagttgagcgtcatttttcttagtgtgccaagagttcgatgttagcgtttacgttgtattttcttacactgtgtcattctgttagatactaacattttcattgatgagcaagacatacttaatgcatattttggtttgtgtatccatgcacctaccttagaaaacaagtattgtcggttacctctgcatggaacagcattaccctcctctctccccagatgtgactactgagggcagttctgagtgtttaatttcagattttttcctctgcatttacacacacacgcacacaaaccacaccacacacacacacacacacacacacacacacacacacacaccaagtaccagtataagcatct

SEQ ID NO: 213709 - DNA, 617 bp, Homo Sapiens; identical to SEQ ID NO: 48001

SEQ ID NO: 213710 - DNA, 568 bp, Homo Sapiens
tggagcggccgccgctccaccatttttttttttttttttttttaatttataaagtcttcatttgttttaaaatatgtgaaatattcatatagttccaaattcaaaagatgcattcagcataggttcttcctttcatctctgctttagatgaggagaaatgctttcacaggggaaatgagtgttaaagtttcttaggtatccttccggagatatgtcttgtatagggcaacggatttttataaatattctgtctccttctttacacaaatgtaagcatacaacataccatattctgcacattgcttttttagttgttatatcttaaagatcatatcagtacatagagagctttcctatttatttcttatagttatctagtggcccataatatagttatctagtagtccgtaatatgaatatacaacaatttgtttaatcaaaattgttatttgctaaaagaaacccactgcccattctaacaaaaacacattttttaaaaaatttgattttaggttataaattatctactgctttcctaggcctttaaaacatgtggcactctcattct

SEQ ID NO: 213711 - DNA, 536 bp, Homo Sapiens
ttttttttttttttttccgaaagcttgccaaaaaaggaaagaagaagaaaagagattagttatatcaaaagcctgaagtggaatgactgaaagatgggactcctcctttatttcagcatggagggttttaaatggaggatttcctttttcctgtgacaaaacatcttttcacaacttaccttgttaagacaaaatttattttccagggatttaatacgtactttagctggaattattctatgtcaatgatttttaagctatgaaaaatacaatggggggaaggatagcatttggagatatacctaatgttaaatgacgagttactggatgcagcacgccaacatggcacatgtatacatatgtagctaacctgcacgttgtgcacatgtaccctaaaacttaaagtataatttaaaaaaagcaaaaaaaaaaatacaactcttttttttaaaccaggaaggaaaatgtgaacatggaaacaacttctagtattggatctgaaaataaagtgtcatccaagccataaaaaaaaaaaa

SEQ ID NO: 213712 - DNA, 596 bp, Homo Sapiens
tttttttttttttttttactcaacattcattgtatttattttactaaacagtatggttcaaaaaaacacaaaccggaaaacctttatttaaaactagtccaactaactggatggggctcactccatcccatcccacccccgatctttctatatatatggagctggaaccctatcagacagcgagcattcacgtacactttgtctttcctgttgaacatgaataaacgtctttgaacataaatgaacttctctgaaccaaaagaaacaaatgaagttttacaagatacaggcactttatgttcccagttttaaaaataagccaagtgaaaaatatttaataaaaataactggagcagagaaagctttaggagttataccattagttcaaatgacttacactcaatgcaaatagacagcatcaaacaggaaaacaaacaaaaatttaactgaggttaatggtcgtatttgtaaaaaaaagatatccaatttaccaaaattggagaaaaatggccatttgaatccaacttaaagatacgccaataatgtgcattacatctgcgtaactatgcagctgagtaacacctgaaagctctgca

SEQ ID NO: 213713 - DNA, 505 bp, Homo Sapiens; identical to SEQ ID NO: 52981

SEQ ID NO: 213714 - DNA, 583 bp, Homo Sapiens
tttttatttataaatcttttattttaaaattctaccttgttaaaaattaatcagtaagtgtcctggtaactataccaaaacatattttgttacaagggcaagcttaattcagtaacacaaaaaagtatacatatgtattaatatgaagaaataaggaattaaaatagattcttatttagatttacttattcagaaatgattcaagtcaaacagtttattttctatagatttataatattttgccctcaacagaactaaagtactaaacagaaagcgattctgtacaactggccataatatgtacaaagatgcctccagttgtttttaaaaaacttataacaatacttagttacttctaatagtcattaagattttagttctgttccttgaattacattccgaatcttctcagcatcaatttgtacaattttgttggatggatcaatcttaagtgccgcttcataatcctgtaggccttctacatacaattctagttgacagaatgctgttccacgtcgtacatgtgccttcattcttgcattagcattgtctgtaacaggtggcatcaataattccagtgcct

SEQ ID NO: 213715 - DNA, 491 bp, Homo Sapiens
atttttttttttttttttttttgggtaaataagtaaatttattgcatgtttccttattcaagcaccactcagcaatgtaataaatgacaaatgaattcagtaagctttacagagtttgcagaaattcttgccattgggccttttctcgtgctgacccttgctaacaccaagtgtttaacaataaaatggaaaacatctttagggggtttagttaacgaaacccaagtaaacacctttttagtgattaaccttaatacaagaaaatctcaactactcatgaagtgtacagaaaacatgtaccattgaatgtctttctcaaatattaagtttttcacaggagctggacaatggtccattcaaggctggaggatttatgctcctgaagaatacttgtgctgtggctatcaaatgcacaggtgacaacactgacattgttttgaaggttaagaaattgaaagcaatttcttctggtggaaaaaaatattttcttc

SEQ ID NO: 213716 - DNA, 524 bp, Homo Sapiens
cgccgctccaccattttttttttttttttttgatttggataagatttattgatcagattgttttagaaaaccaacagcaaaacactgacaaggtacataaatacagattggacattttagggtaaattcactgtatttcctacttgcttgtaggaaaccgagtaaagtggaaaagctgtcctgatcatatggcatgcacaccagactgcaaaaggacgtccacactatttaacaggactgtggcaaaatagctttaaagtaaggcgagcattgtgtatggcccaagcataccctgtaggaagagcaaagctaggctcacctctcagagactgtgtctcagaaagaggcttcctttcttgcctaggttcttccatgaaattcgtcattggcaggtgcttttccagggagatgcctgtgctctccctgtgcagactctgtgcacaaggaagtggctttagagagtgtgttttctgatgcctcctttatattctaaatgtataactagtaaaacaacaattactacc

SEQ ID NO: 213717 - DNA, 452 bp, Homo Sapiens
cattttttttttttttttttaatgtatagaagggtcttgccattttgcccaagctggccttgaattcctggcctcaagcagtcttcccgcctcagcctcccaaagtgctgggattaccgttgtgagcccctgctctctgccagtaatttttcagtctcaaagaatacgtaattcctactctccctaccctgacataagtgaactgacttcctcttcaaaaggttgaagtctccttccacgccccctccctccccagaaaggctgctgcctcagcatggggctgggcgcactaaccttgatcatctccactgccgcccctgccaggcactcagaccctgatgcagggagagtggggtttgccagtgtttgctgggggtgggaggcgggatacccaccagccacctgcctgcggcccaaggttctgttctgtccttgcatcacaatgggaacct

SEQ ID NO: 213718 - DNA, 654 bp, Homo Sapiens
ttttttttaaagtgggagggtctacatgaactaaatgaaaagctctgaactgtcatgaattggagttttctagtaaaacacaatgttggcagtatagagcaggcactgatggtagtgaaaacaagtccacagaacagagtgttacaagaagagatggtttcttgctacggaggagttctccctttgttacaaagcttttctaggaagattctttcgattaaaaagaagttgcagaaacatggatttggtcacacaggtatgaagggaatcttgggctttaaattctctagtaatacatcaataccaggattcccaaacaattaatttcaattattaaatattaaatacaatgtggaggcagatgacattgaagcggatgctcattcttaaataccatgaacaaaatacatgatgaattgaaaagctccaagaaaaataatattttccagttcttctgaaccaatctgttaaactctaagatgctttcccaacaattggattttccctagagaagaaaaaaagtcatttttcaaaatttaagaaatacaaaaatttaaagggtgacaaatatataatccattaagtatttagaattttccctggataatctctcatgccaaaatgtgtttcattaattcaatgagtacttactga

SEQ ID NO: 213719 - DNA, 520 bp, Homo Sapiens
accattctgatgttggagcggccgccgctccaccattttttttttttttttttttttttttagcatttaagagtcactattatgttttgccagttaaaattttttaaatcttttgaagagagaaacaaaatcttcagcgttcttgagaaataaaattattgttcagtaagtaattttccatccccttgaatatatgttatatattctttttcggcagattatcagattagtaagtgtttaaaaggcatcagtttttaaaactgcatataccacacacacacaaaacagtacacaaataaaggttttcacaaattaaacaaactcacatactagtcttcagatcaaaacacagagcattatgtgtaccccagaagccctcctctttccccatcttaacactgtcttctttcttgctgaaagttactatcctgacttctaaaatcatagattagttttgcctgttttttattttatgtaaatgtaatcatacataatacactttttttcattcatcattttt

SEQ ID NO: 213720 - DNA, 604 bp, Homo Sapiens; identical to SEQ ID NO: 52500

SEQ ID NO: 213721 - DNA, 647 bp, Homo Sapiens
aaaatatttttattttcttaacacacagaggtaacaatgacatttgcccactagacacagtagttcaagacatatcagaaatggatcacaattcacatgttacaatattcatcaatatgaccagtctcatgttttcccaattatctttgaaaacttattaaaataccacagcatactaaactggtaaattcatttatcatgttaaagagtaattttgattttgattagtgaaaaaccaaggcatagtccattgttgaaatacaataccttatccagcatcactcaagtatgaagcattctaccgaaacgtttagtcaaatgacacctgttaaaaatctaattctgtattttaactaccatagaggaaataatgtttaacatgccttcttaaactttaaaatataccacgcagaatataacaatgttctttcattaatcttcctcattagaaatatgaaccacttagttttctagtgcaacacaatatcctaaaaatttaccaacgtgggtatctgccttactagagataaccccaaatggctacattaaaaaaattgtgaacttttaatttttttggtcacatttaactgtcagcgattacttcttgctttgattaaatatgctggttttctgttacctttcctacc

SEQ ID NO: 213722 - DNA, 662 bp, Homo Sapiens; identical to SEQ ID NO: 46868

SEQ ID NO: 213723 - DNA, 588 bp, Homo Sapiens
cgaaagtgctatttattttattacccattatgaatcagccatctcctgatttatcttttacagttttctatgttttgaattgatatcaattcttagaataaaatgcagtacctgcatctaaaatagaatttatttttcttgagacacgtctttcaggcagaggaaaggtaatgggcacacaaaccttgatcatcttcttataaaacaaggcagcatccacatttcaatactgtagcatatgaaataatttctcaattcctactctgtcatagcttaaatgacttactgattaaaatatgagtaacaataattctggagctgaaagacattctcaagccaaaaggtaacattaaacaatgttttactttaaatttaatgtcatgtagggtcactaaaaacaaaatgtaagggataaatgtaagtgcataaaacagagataataccaatttccacaaatacaacttttattatccaaaatcatcttggaaggactttttctaatatgcccattttctaaataagattaaccatttgatgggaatatttccaattgtatcacctccttccttgactttttcttcatcaact

SEQ ID NO: 213724 - DNA, 600 bp, Homo Sapiens; identical to SEQ ID NO: 48787

SEQ ID NO: 213725 - DNA, 568 bp, Homo Sapiens; identical to SEQ ID NO: 45160

SEQ ID NO: 213726 - DNA, 545 bp, Homo Sapiens; identical to SEQ ID NO: 53834

SEQ ID NO: 213727 - DNA, 616 bp, Homo Sapiens; identical to SEQ ID NO: 47804

SEQ ID NO: 213728 - DNA, 647 bp, Homo Sapiens; identical to SEQ ID NO: 40449

SEQ ID NO: 213729 - DNA, 453 bp, Homo Sapiens
ttttttttttcagaaaatgagaaagaacgaatattcttctaccttagtataattttttacatggtaaaatcatattttaagaaagaagtctttgaaataattttaataaaaacgttcttgaaaattttgtaaagtgccccattaacataggtaatagcaccaataaaaacagtacattataccaaatgtaagtagaaacagtgagatcactaaatgtttattcgttctttctaggatgttgatgtggaatacacactgcccaccccccaccacacacacacagctggcttaaaaggggcagctactataacacaatcttgaacaaatcatcacgccatccccctgttgaaaagggacactaaccctctgcatctaaatctcatctggggcagatatttgaatctggaaagcccaacttcaagtcaatgtcagtctttagataaaactcaaaac

SEQ ID NO: 213730 - DNA, 487 bp, Homo Sapiens
tttttttttctgaatccatttatatatgcggtcagtaaaccaaaacagttcactttccttagtccgtgggagagtcccacgcatctcctctaatgatctcctcatccctcaggcttgggtgtggagtagcccactgagtcctctgcaatggagctgacacataaagatttaggtgactatatattaaatggcattatcagccaccatgggttaggctttctgttgtacacaatcttggaaggaaatatatgctggctggctgcttctgttttaatttccactatgagagcaaactcacctgttgctgtcttatacaagagtaacaatggaaagtaaatgtaccatctcagagatgtttcagggtttttgtagtactctttagcttaagaactaaatgagactcattcccgtatttattaaagacatgagacagacctagaaataaaaggctttcaattaaaaaattacttgttaggtggaaactgat

SEQ ID NO: 213731 - DNA, 470 bp, Homo Sapiens; identical to SEQ ID NO: 60156

SEQ ID NO: 213732 - DNA, 414 bp, Homo Sapiens
tttttttaaatttaataatcccttattgctaaaaaatgctgattatcaatctgagccttcggtgagtcgtactctttttgctggtggagggtcttgcctcgaggttgatggttgctgactggtcagggtggtggctgctgaaggttggggtggctgtggcaatttcctaaaataagacatcggtgaagcttttcgcatgagttgactcttcctttctagtaatatttctctgcagcatgcgatgctgtttgatagctttttgcccacagcaaagcttctttcaaaattggagtcaatcctctcaaaccctgctgctgctttatcaactaagtttatgtaatattctaaatcctttgttgtcatttcaacaatgttcacagcatcttctcctaggtgtagattccattctaagaa

SEQ ID NO: 213733 - DNA, 452 bp, Homo Sapiens
tttttttttctttaaatacagcagtggtcttgctgtgttgcccaggctggtctcaaactcctggactcaagtgatcctcccacctcagcctcccaaaatgctggtattgtaggtgtgagccacagtgtccagccaagtttctccatcttaaatttctttcataaatcttcagcttctagtcttatataagcaaatgcaaaatcatgggaaaatgttaataacaacaaaaaagttttttgtgggggagtgggtcagttatagctgtgagtaccaatgtcctgatttagccagccagtatggtgcagtagtaaaaggcttgggttctggaaccagagcctgggcttatatccaatcccaccactaagaagcagtgtgagagtgggcaagttactctatctctctttaacctcagccctttcatctgcaaagtaagaataataataatgaggatc

SEQ ID NO: 213734 - DNA, 1000 bp, Homo Sapiens
cgggaggcagaggttgcagtgagctgagatcgcgccactgcactccagcctgggcgacacagcaagactccgtctcaaaaaaaaagaagtaattcggcagttagttgtttaatgtgtgtctcacgggctgaaatataagagaggcagacaatcacgtttgttcatcactcacagcatcaaaatgtgccttgaacacagcatttgctccgtaaatatttggggaagcaagagagaaaattaccatggtggtaataatataaaaagagattgtgatattatacaagagaatataaatatgtatgtttgccatgacaaaagtacttcttatgttcattcattcattatccattcattgaacttctgctggtgtgagaacgactgttgccattcgggtactgggctgtagcgatgagcacaagagtcccagggcatgtggagctctccagcccgagtgtccaatgttaaactattaaatatattcaaaactatcgcatttctattttgacaagtattatgacagagaaatatactagatgtctgagagcatatggccatgaaatctgatctagtccaaggacatagtaaaaggattttggagaaaatgctatttgatctattaccgaagggattagtaagattttaataccaagatagggagtcttttaaagtatgtcaacaaggccaggcgtggtagctcacacctgtaatcccaacactttgggaggccgaagtgaaagactgcttgagcccagaagttcaagactagcctgagcaacgtagacctcatctctactcacaatttaaaaattagctgggcattgtgactctaacctgtggtcccagttactcaactcgggaggctgaggtgggaggatcacttgagctggggaggtcaaagctgcattgagccgagatctggccacgacactccagcctgggctacagagtgagatcctattcaaaaaaaaaaaaaaaaaaaaaaaaaaaaaaaaaaaaaaaa

SEQ ID NO: 213735 - DNA, 481 bp, Homo Sapiens
ttttttttttttttttcaatttttaaaagttttgttttgtttaatgaaacacagtataagaaactagaaaatattacagagaactatgcatactgatgctaagttctgttttatttcatatacatgtccattttatatcacaaaccagtaaaaacatacaaattgataaatgtataaacacattgcacataggtgtatacatgtgttatgttgggtcataatgtatattgggtcataatgtaagctcttccaggaaagcttcctggtccctcatatctcccaacctccaaagataatgaagcattctctcatctgctaggactgtaccatgttaatgcttctatcattgctttaattctgtatttgtgcttcctacaagaccataaacttctaacactgtactaggcatttttcctactacttgatatgtacgatctcatttaattctcacaactcctgttttcgggggtgggtgtggggg

SEQ ID NO: 213736 - DNA, 475 bp, Homo Sapiens
  misc_feature (469)..(469): n is a, c, g, or t
tttttttttcgataatctctaatctcaggacaagcagggagggtcatgtaagtagtatattcttattgttcaacttagttatctttagaacatgactgcttaactaatatttgagtttgacagtattaaaatttcaaggtcatttagcagtcaaaaaaaatacagccatagcaccttaaaaatatgtttttttcttaagagacaaggtctcactatattgcctaggctgatcttgactttctggactcaagacatcctcctgcctcagcctcctaaagtgctgagattacaggcctgagccactgtacctggcccaatatcttaagttagtttactccatatagtattataggtctgcatgtagtagtataggttaagttcctgggaaaggtcattttcttacaaaagcattgttatgctacagcgacatactcttggccaaaaccttaatcatagaaatgacatctanatttat

SEQ ID NO: 213737 - DNA, 449 bp, Homo Sapiens
gcctcccaatgtgctgagattataggcgtgcgaccgtgcctggcctgcaaactttataaacagaattctggctaaagcctccagtataaatgggcaaagtagatgtcttaatttattttatgctgctataacagaatatctgagactcggtaatttatgaagaaaataaacgtatttcttatagttctggctgagaagtacaagaccatgaggtctgcatctgataagggacttcattttacatcatcccaggtcagagggcagaagagcaagagacggtgcacactcctttataactaacccactcccaaataaagacagtaatccattcacaggggcagacccgtcatgaccgaatcacctaataggccccaactcccaacactattgcaccagggattaagtttctaacacacaaactttggagaacacattcaaaccacatcagt

SEQ ID NO: 213738 - DNA, 482 bp, Homo Sapiens
ttttttttttttttttttagaattatcttcctctgttttttttttattggtctttacttcaaggtgctgctgccagtggggcatgaggcatagttttcacctgggtcagaaggttttggaactcttccactgcctgtgaatgtgccttggggttgagcaccaggtgttggaagagattgaccggctcagcattcctaaatgtcttagggattgggatggtcaggggcagaaaattgttaccaatgaggaaatgatggagggacctttgctggaggccacggcccaagaaccagagaatgtcctggagccgctgagagagcatgttgtgggcccagtccgtgaggggcagccgtagcaagaggtgcatgagagctgttttaaaatggtaagaagtgaggatggggcgggatgctccatggggtaagctctgatgctgccggagacttaaaatgatctggaggcacttgaggtgacaggtgttc

SEQ ID NO: 213739 - DNA, 434 bp, Homo Sapiens
ttcactttttcccttttccttttgatacgacttctgcaaaagaggtgtgaatgaaatcataaagctgtttggcatttgcagcattccccagaatactcgtgagctcgtcttgtgacagggctgctaattctgcgatgttcttaacgtggtgcatcaaggagcggcagtttttggcattcacccctggcatttttaacaagaagtcttggggaccaggattatacttctctgactcgggaagggtttcagaatctgctgtaatggccagtgctgtcgccgcatcaggctgtggcttgctttgtttcagctcctcaaacaactccgccgttgcatgaagagaggggcaccagagaatccgtagtctggggaagtgaagtgtaagaagagtgagtttggaactaatgtcattgctggagatctccgaaacaaggcac

SEQ ID NO: 213740 - DNA, 608 bp, Homo Sapiens; identical to SEQ ID NO: 54606

SEQ ID NO: 213741 - DNA, 648 bp, Homo Sapiens; identical to SEQ ID NO: 55011

SEQ ID NO: 213742 - DNA, 565 bp, Homo Sapiens; identical to SEQ ID NO: 51573

SEQ ID NO: 213743 - DNA, 633 bp, Homo Sapiens; identical to SEQ ID NO: 47447

SEQ ID NO: 213744 - DNA, 550 bp, Homo Sapiens; identical to SEQ ID NO: 49913

SEQ ID NO: 213745 - DNA, 602 bp, Homo Sapiens
cacgtgagtaagtcaagaaagctccttgagaatcagcccgatcagggagtgttttggcttcagaacaggtggaaggagacacgcccctctgtgggctctgtcaccatgatacagtccttgagagagctgtggctgtgacttggagggcagtagtctcctgatacctgcctcttggccactggtcactattgtggtcactgatctctcatataaaagtgagggtggcggggtcatggaccagcgcctcagtgcattagtcattcgcttttccttacagacaaatcagataactcttccccagtgattgtcaaatgtatgaatgtatctctgtaaatgtggttttgacatgtcactgttactgaaggagagtatggaatccccacaggatattatatcttgcaaggaaagtctatttttttaaagaatagtatgtttttagctttacttttctttcttttccttttcactcaaatgctcacttgctgggcaaaagggtgagtagcaagaaaagtaatgatatgtagcttttctcaaatggttcttttatactgtggatgatacaggactctgttacctaagatgtgataagctgggctgcaggc

SEQ ID NO: 213746 - DNA, 609 bp, Homo Sapiens
tttgtatattatatataatctgtgccattcctactgggaagttgaaacaatgaaaataataaatcattttctttcagatgagccataattgaaacttttaagattagcataattgtatcgttgaataataaagagaaaaattacctcctttgttaattttatcatatgtgaattagtaactaatggtttctttgaaatcctttggtttagctgcaatggctcctgctctcatgtagctaaaaagaacatgttggaaaaatgcaaatgactttataactcttgggattgatgtttatacccttcagctatttccagttaatttttaatgccataatcattatgtattatgattatcattaccataccaactctgctgtctctggtttttacaagagtaacacatttaaatttacagaggtaagaatttccttggagaaataggtgctggtgataataggagtatctttcttttccatatcaacataattataataaataactcacagatttaaaggcttattttgtgccaggcattctgctgagtgctttacatacatgtctcatgtaatcctcccaacagctctgcaggacaggagtttatgattatcg

SEQ ID NO: 213747 - DNA, 1000 bp, Homo Sapiens
gaaccggcagccctctggccgcccgctacatgaaccctgagctcacggacttgccctctccatcgtttgagaacgctcatgatgaatatctccaactgctgaacctccttcagcccactctggtggacaagcttctagttagagacgtcttggataagtgcatggaggaggaactgttgacaattgaagacagaaaccggattgctgctgcagaaaacaatggaaatgaatcaggtgtaagagagctactaaaaaggattgtgcagaaagaaaactggttctctgcatttctgaatgttcttcgtcaaacaggaaacaatgaacttgtccaagagttaacaggctctgattgctcagaaagcaatgcaggtatttgtaattttactgaggaagattcttcaaattctgcctagtgattgagaattcaataaagcagaaagacacaatgctaaacaccaagatttttagaatcaaaattttaagagtggaacatatgtgatagatcatctattttatcaccttaacaaatgaggaaattgatgcctgggaaaatatcaactgatcaaagaccatttttcatccaaccaacactctttctactaccttattttaaaaacaatatgactaccagaaattttatcaagattatgtaacattaaatatacacaaatacattggaagaaagtattttagtggttataaaaaatctgctgcatattcttctgaacatttttatacattttaagcaatgtattaagcatttgataaaaggattgttttgtcaatatatctcaaccttacctaatgtgagattttaaacagcattcaataatagtaataacataacattttatagctccttctcctacattatttgtaaatctcacttaaactgctatcttatttttcttttcgtagtatgcatcctatgtttccaaaaatatcatatgaaagacaaattgaaagttaactattaattaattataaaaaaaaaaaaaaa

SEQ ID NO: 213748 - DNA, 550 bp, Homo Sapiens; identical to SEQ ID NO: 40789

SEQ ID NO: 213749 - DNA, 797 bp, Homo Sapiens; identical to SEQ ID NO: 43569
  misc_feature (11)..(11): n is a, c, g, or t
  misc_feature (766)..(766): n is a, c, g, or t

SEQ ID NO: 213750 - DNA, 721 bp, Homo Sapiens
ttttttttttttttctgtgtagacttctttattaagggggctgctggtgtagaactgtctacccaactagacaaaagtccagacatgatgtaaacaatccactctccccaacaataaatgtaccgttcacatatcctttctcagtaagggcatactcttttgagacaaagactgcttcaagtattaaatgaacttacacaaaggcgtataatatataattatctaccattttctatttgcatacaaatgaagcaattgaagtttttcagtcttctgctgaatgcatttttaggagctgccctaactatgctctgagcaagcaagtatatagagtcttgggtgagtgcagacacatgagactacaactgagtatctgttcccaggacagaatccccagccagggagacttgaccagacttgaattgagccccaggaaccaaaaaatggaggggcagggtggattccattctctaaagcagctgatgactgcctgaggtggaaggtataaactaatctccctgggatataacaagtatttaaaaaaggattttctacaatgaaaatggttttctttaagacatttccaaatactgaatatcaagtccaaattaattccatgagaaactaatctttcaattattatctctgccactcttcattctttcattaaagagatttttaaaaaagtatacagaatttctctttcattaataatatttac

SEQ ID NO: 213751 - DNA, 795 bp, Homo Sapiens
  misc_feature (26)..(26): n is a, c, g, or t
  misc_feature (725)..(725): n is a, c, g, or t
  misc_feature (778)..(778): n is a, c, g, or t
ttttgcagcacttaaactctcatagnacatatcagtaaaactgtaggccctcagacaaagcaaagggtttcccctaccctctttttctttgctatcctctatgctctgcctcttgctttagtttcatacaacattcagcttatcattaaggaataaggtttttggctcttatatcactatcatggcgaatcagtggaaaatgagaaacatagtaacacatcatgataaatcctcaacctcggtatctcccctcagtgtcattcttggaaacgtgggagatttaggaaatgacattgaagaggaagaattctgttgaaatagtgattctcaacgtggggtccttggacagcaaggatgaggaaaaaacacagtcatccaaggagccagaagttatatgctgacaaaatgccaccgactactttagtggaagctgttgttgggatagggaatctgcaccctctagagaagcagggacttcagctgctgaggaagggctgtcagagttatccatgttattttttttcatttttgtgagtacggtgcctcctaaacaatcacatgaggatttgagactgttagaactcggtgttgttatccacacaaatggaaacattcattatttttaaaacatgtttgtttgtaaatatcagatgaagtaaaaaattgacattaactgtattatagaaatgggaaagtatatccttttgtaatataagatgtattanaagcaaagaagggaaatgggcttcaaacaaaaataaataatgtaaagatcagnttaaaaaaaaaaaaaaa

SEQ ID NO: 213752 - DNA, 488 bp, Homo Sapiens
caccacgccctgccaaaaatgtgcatttctagcaggttcccaggtgacgctgctggccacaggggctgacgctgcgggaagccctgacctagtgcacaacccattgggctcttcactgtcagtgtagaggcataggtccaaaatatgtttccccagtcaaaaacatgtaaggtttgcaccaggagtggaaggaaacaaacaaacataaaccaaagcaaagacacttaagggctgggtactcatgcctgtaaacccaacactttgggagtttgaggcaggaggctcatttgaggccaggagtttgagaccagcctggggaacatagtgagaccctgttgcaacaaaaaccagaaaaacaacaaaaagaagacattggaaaatggctggagctgattctaggtgaataaacaaccctcgacttaacttgctttgcctctgggatatgtttatcgagcgtcttgaacgttgaggaagccagccaagagaaa

SEQ ID NO: 213753 - DNA, 501 bp, Homo Sapiens
aacacacagcgccatgcatgggggacaggagtggcgacgctaatatttacatgcctgccaagttggataaacaggaatatcctgagccatagaatgcaggcctttccagatcaggcccttccttatttattggaccacttttgtttaaccagcaaaagagcagtggtctccattcggttcatcagttctcccaacggcttgttagtgtctgggcagtgcggtgagacagaaagcccaggggtgtctggaatcagataggtccaggtttgaattctgctcctgccccttactgatccagtgacttggaataagttacccaaggaagaaagaacattaacttgattgagtgccttctggagccaaaggctttatcgatgctatctcattaacatagcttcttgaggcccaattacttcacctgtcaagtggggatgataaaatcatccttgaagggttatagtgaagattaaataggatgaggcattgaaagtgtttggcaca

SEQ ID NO: 213754 - DNA, 499 bp, Homo Sapiens; identical to SEQ ID NO: 55655

SEQ ID NO: 213755 - DNA, 363 bp, Homo Sapiens
aatctaaatgtaatacatggaaattttaggaactggtttgaaatctgccaaaagtagtttttccaaagagtagttcagaccaacccagacctcttgcttcttggaagagcaagtaagtaagctagttctgggttaatgttcacaccagggtgatcaggcctgatgggagtttgctgtggacgctgagctgggcccagggacttcacctcctacttcctccaaaggacaaggtcactattgtgaatcctgctttacagagcaggacagaggcccagagagcaaacctgcccaagaccacacagctagtatgtggccgaacagggactgaagcccagatctttgacaccaaaatgaatgtgtgtc

SEQ ID NO: 213756 - DNA, 582 bp, Homo Sapiens; identical to SEQ ID NO: 60275

SEQ ID NO: 213757 - DNA, 807 bp, Homo Sapiens
  misc_feature (681)..(681): n is a, c, g, or t
ttttttttttgtttttttcagaacttcattttattctccaaataaaagacagctcaatcttctgaggaaaagtaaaaagagggaaacatcatctttgatcatgcagtaagctgatcccaaaatgtggacaaaaagcagagactcgacggcaatgactctgagaaacagagaatgtcacaaggagacaaactgggctctttataaagaggcaatttctcctctacacattccccctttcatctagagatggctgcggctcccaatcatggcaagagctgggctgtctttcttccaccaaatgctctgctagctgacagagcccagggagggaggggcggctctgctggtgaccaccctgccgtggccctgcacatcccccagctccttctgcaaccgggcattcttctcctcctcctccagcagtttcctcttcacggtgcgcagctcctgctgggcctcacacttgatgtcattggccaccaccactgcggtctgcagatccgcctggaaccgcctccattcctcggtctcctccttcatctgcttggtcagagtcttcagctgcctctccaggtctgacttctgttcctccagcttgatcaaactactttctagctcactgatgagttgattattgtgtaacttgacagcccggtgctgttcacctgatcttcaattcanatatggtttctttcatgtctttgatctctgcatcactctctgatgctttttcttgcagctttaggctggttctgctcagctgttcggcttggtgatcacatatctccttcaggtatgaataatcct

SEQ ID NO: 213758 - DNA, 722 bp, Homo Sapiens
  misc_feature (25)..(25): n is a, c, g, or t
  misc_feature (670)..(670): n is a, c, g, or t
  misc_feature (702)..(702): n is a, c, g, or t
ttttttttttttttttttactttanaaacaagaagtttaattgactcagttccacatggccggggaggcctcgggaaacttacaatcatggcagagggagaaacaagcaccttcttcacaaggcagcaggagagagacagtgacagcaggggaaactgctgtctttaaaaccagcagatcttgtgagaactccctctctattatgataacaacataggggaaaccacccccatgatcccatcacctcccatcaggtccctcccttgacacatggggattacaatttgagatgcaatttgggtggggacacaaagccaaaccatatcagatggtgaaaatgttatactaaaaatgcacagtctctacaaactccctggtttcttttctgtcagtgaagtcaaatatctacacaacggccctggacaatgctacagggaggacacattaccttaatcatctttctgtcccacttctcagccacaaaggcccgagaggggcatgaacttggctggtgagctctgcacctcaacattctcttcccaggcttgtctaatcaaagataactgttccaattacattttgaattggtaactttcagaaatgcacaattaggcatgctatccagatacaatgcacaatcagtattcccttattgaacacctatttttanatatctgggtctctaccacctgtcattcttanactacaggtccacatttgac

SEQ ID NO: 213759 - DNA, 757 bp, Homo Sapiens
  misc_feature (654)..(654): n is a, c, g, or t
tttttttttttttttgttagaaaattaatttttaattgtgccgctttcaaactatactgaattttacatttctaaagatgtaaaaactcaactaatagaaaatatacatgaccattctgtctacatagataacagaatctatgaatcttgaaactaagtacatcaatttcaaaaagtattggtcatttaaacagaatcaacaattcggattgacaagaactgttcaaattaatttgacctgtagattctgagccatgtttttattaaagtcagatctattcctaaatacaaaatattttgaagatttattaaaactgaatattacaatgcaaggtaaattaagactaaaggcacataaactttggtcccacctggttgtcagttttagaaaactgccacaaaattaatcttcctgcatattttcgcagtacactttctttatctttgaaaaatacatgcaccagttcctgaactagctagaccagtctgcacatgctcagaaatccacaaccatattccaaatcttaattacaaactaaggatggcaatatatatttaaatgcacgtaagtcatgtcaacttcaaaaacatctacgaaaaatattcagccacaaacaagacattacttagtgctgacatttatatgatacgtcncacaagagtgtgtacaaaaaggttaagattccacaatgctttccacatagggctcaaacttacagaaatcactttgttgtcttaaagaataatactctgcatc

SEQ ID NO: 213760 - DNA, 863 bp, Homo Sapiens
ttttttttttttttttttggtagatagtaggatttattttaatttttcaatctgaaaaaaaaaaaacccaaaacaaaaaaaaacaaactatcctcatatatatatatacagtgtcaacattttcagagcacttacattaggaaacattgtttctcttcaactgtatgacaatactgtatatgccacaataaaatttacaaaaacaatcgcatcagcagtcataacaaacatcatgattttacatttcaatacacaagaaaaaaaatagacatcttcccggcacttggctcccgcctgacggcaacgtctcctccacactttgagagacctcagcttttaaaacccagcagcggctatttcagaagtcatgtcctttccagatccaaacttaaataatgagaaatttgccatttcaaaataactgagagtttattcatggatgtggtgaagtttactccaccaaaagatgtgtaaaaaaattgcatgaaagtaaaaataaataaagctgttgtaaagcagcctcgttgacacggtagcccagaacaaaacacttacgtgtaaaagtgtcattaaaattttaaagtaattatttatattcaaattacaactttttgacaaatctaaagaaaacaaactgatttggtaaaaggttcaaagacttccacattcaagctcggtgttgtttcacacgcgtgcgccccggctgcggcggtgacatattgctgtattcggacataaggcactgtgatctgaacataccgtgcactcaccttatgccacatcacctgttccataccagtgaatttctttgaaatgaaaataatgaaaacttcaggacacagtgcacttttatgacatacagc

SEQ ID NO: 213761 - DNA, 803 bp, Homo Sapiens
  misc_feature (745)..(745): n is a, c, g, or t
ttttttttttttttttttccaggctggtctctgtggtttttattagtgtttcctgggacccatcaaacaaataaacatattttgaaaaatataattctttgacaaaacaggaatagcaggaatagtttgaatttaacatagcttaaagggaaagatttctgattttttttaaatagtagcaatagagttgtttccacaaattgtcaacccaggagccagatggaaagaaaaacaagaattatgcagataactacagaaagattaatcccaatttagttaaacttgtgaaggcttgtacgtttcagaggttcataagacacagtctcaacaggagttttttttaataaatgctctatctctagttccagaaactgaattccaagaagctacactgaggataattcagctctgatattgtgattactgtgatgttctttcattcatacagtaagtatctgcccaatacgtaactaccgagatctattgcttcctacataattagacaagctcctcacacatatgggcccatgccgtgcacatagcaggcactcaacaagtgtttgcttaactacagaagaataatataattgccttccttcttaactgttttacctttttctatacttgatatatttgaaaaacaacatgcttgcaaaactaaaatctaacatgcattactaactttatcaaaagatccctcagtatttttcaaaaaggaaaaaaataataaaaaccaatcccccanatactaaaacttagaactgctttacacttaaatagcatttacatcatattaacatatt

SEQ ID NO: 213762 - DNA, 779 bp, Homo Sapiens
  misc_feature (755)..(755): n is a, c, g, or t
tttttttttttttgttttaaaaataaatttattttattacatgataatattgacagtttacataaacaaagttatttagtgtatgcaaagcaactataaaatacattttgaaaagatataaaaatctttgaaattctttcttgatatcagatctaccaaatttcgagagccaccattgatattttaggatcaaaacaaaatggcttgagagattttgttggtcagccaaactcagtccaggaaaaaagaaacattaaagcattgttttgtgtttttaaaagctctaatggatatttattccaagctcctttcgtatcgaagaagactacataagagaaagggcatgaatgagcttaaatgagacttttgaaaataaggcatatacaacatggatcagttggatataattgtgtttcaagtatgaccattaaatcaggagaaaaaatagattttgaaaattatcagttgtttggcttagcttttactaataggggagctatttatgtatcatatgtaagtacagccccagcttcactcaaaacaccatggatgctagaaggtaatatgcgatttcagcatttgtctgaattctccacttcactatggaatctacattgcaaagtaaaatttgcaaagattctaaaaaagaagctgcttggccgacaggcacaagttggggggcatcttccatcgatttttgtaagtgaacacgtaatcaatggtaaaagttaaatattctatgaaatattcactanatgtagattgtgcttttccaggtt

SEQ ID NO: 213763 - DNA, 696 bp, Homo Sapiens
  misc_feature (596)..(596): n is a, c, g, or t
  misc_feature (670)..(670): n is a, c, g, or t
ttttttttttttttttttagtgaaaataatctttatttgacatttagagaacaggattgtggggaatattcttattaagaactttggtacaatgtactacatgtggaacagtcaggaactgcctaggtccacaaagaaccatttactcagatagtctaactgtaaacaaataaataagctgcctaaggaaacctcagcaatttaaaatcatttatataatttatagctaaaattttttaaagttgtatttcataatagagcttactcttatgttaaagaatggcacaaaattaagctaaccagcttgaattacattttctttacttccagaattgtcctggaaaaagcagtaaattcgacctctcctcagctacttgctcttcatagaaactggcctcagtcaaatgcacaaaggctcttcctcctggaaaccagtactgtgagcctcaccacccagggcttttagccagcactcacagtcagtctcctacttcagttggcacagactggataatgagctcctgggatgggaaaagcaggccactttggggttttcttgtcccaaagcctgcttttgaggtattgattttttttanaaaaagggaatcctttttcctaaagtttaactcacatctattgtcaccagttattatcttcccagttcagctcnccttcttcttcccagccttcagcctc

SEQ ID NO: 213764 - DNA, 555 bp, Homo Sapiens
ttttttttttttttttttacctttatattgatatttaaaagaaaaagaacatgatggatacgggaatgggggaagggacaacggttctacgattaacaacaggaactgataggaaccagaagctccagggatttaaaaaaaaataaaatatatatttatacatttatatatatatatatatatatcacgttatgtatgtgagtcccagacaagcaggaagcagcagcaagaagcaactagcacacagaaacacccgtgcgtgtgcactacacattcaagcaaagccattcctctagctaggacgcagcaatccccaccctcccacctacgggcaaaagagaacagctgaaaacaaacttccctctttaagggccactcagtaatttttgtcctcatggccaggaaaaagaaagaaaaacaaaacaaaacagaaaaggtcgatcttgccttgaaagcgggcagtggctattttcttctctctgccaaagcaggacacgttattcttaacacagagggccacatcgctgtccctcacaaatacttcagcctcgtgcc

SEQ ID NO: 213765 - DNA, 776 bp, Homo Sapiens
  misc_feature (700)..(700): n is a, c, g, or t
  misc_feature (728)..(728): n is a, c, g, or t
ttttttttttttttttgtaattcaaaaataatttttattttaacttacatgactgaaagatcaatgaatacaaatgccacacaactaaaagcacccctcaaccaaacataaaatacagaagtgaatacaaaagatctggaattaattactcatgcaatagtcaaaataaaaaataaaaaaaatgacaaaccaaacacaaaatcctgtaacatctgtgtttgactttctataaaaagaaccatttcaaccatttaacataagctataggctatacctcctaactacagactgtacaatgtacctttaaagtgaaggatgtatgaatatatataatatttataaatatacagatatgtacacgataagttcacagttgaaagaaccatttgccagaagcctggcaaacaatttgcactttgaaatgaaatgagtcctttttaaaagtcttgctaaaatgtaaatatttaaaatgacatctaaatgatacaaacacgtccatagtacagttgatattccacagtttaaattacactcacatatattgttttgataccttggcataccccaccttgtacactctttagaggaagaaaagatattttaataagagctactgaatggtcttgtactttgcttaatgaacttgcatctctgatactgaagcaataatgggacctgatgtttgaactatttggccagngaatcctaccagtgagtgatttccctgngggcagtaacacccctcaagatgtccttctttctaatccacggtcatt

SEQ ID NO: 213766 - DNA, 698 bp, Homo Sapiens
ttttttttttttttttttgactgtaggaatattttaattcatatttttaattacattatgtaataatatcacagtctattttacaagttaaatgtatgagaatgtatgaaatagaaatggtaggaaaaaactaaacatgggtcaggaacacggaatttttccaaaaccaggggccaaaggtagatgtgtagcctgtagggcccaaggaggagacaaggagggtgacaggtacagttaccggtttgtggtatgtgtttgttccctgtgtgtatgctgggaaggacttgagacctgtcccctgccctggtctggggttgggagtttagtctggtcagctggaagatggcggcttgggaaaaagagccatctggttacctacacagagctggtcccctggtggctgcaggtaggttctgctgttgagggaattaggggtgtatgtgtcaaaaatcaaacgtgtggaggaaaaaagtaaacagtttcctcctccctccaaaaaacccaaattcttgaaatgtacacacattcttctttcaaacatagaaaagtctcactctggatgtgcttacaagaagatcgtcgtcaaaaaactttgtttctatgataacgttcccagttaagacgcttgctggcatcatctgggactcgggtgctgcctctatcaaggactgccaggtatttgtggagttagggatcac

SEQ ID NO: 213767 - DNA, 700 bp, Homo Sapiens
ttttttttttttttttttggaagaatgaaaaacaataaaaatgaatacacagcacgcacttacctgtcaggcctcacattaaatacatttcacattttatcacatttagtccttctatctacctatgaaaccagtaataaatagcattcactccattcaacacttgaggcaactaagaggtcaactaactcctcaaggtttctccataacctggacggccaagattccaggaaggctggctattgagtccacaggactcagtacattgcttctgctgagtgaggctgactttacagaagtagcaactgaggccccgagagggggaacgattttacaccggcatgctgccactataattagaggcagggcaaaaccaggctaaacaaactacaattcccatgagcctccgggggcaggggcccagccagggacgctgcaggctaccctggggcctgctgggagatgtagttctgcagtgtcacctgagactgggcgggctcactcaccgcaggacataggaacgggcaggtgcgctcttgtagatatactgcgccagccaccactgcaccgtcatgttccagtaccgcatgccatcgcgcacccgcacgcagaaatctgtgctgtagcagtcgatgttgcggatggtctcatagtcatactccaaggaagccgccttctccggactggggggtggaggatg

SEQ ID NO: 213768 - DNA, 731 bp, Homo Sapiens
ttttttttttttttttttagttatcatacatttatttttaacatagcaccccagtttcacatcatgtatattttccaaagttggagatctttaactatgttcttcacagacttttcaacaagtgtgaaaaagaggcagtaaggttagcttgagtctacaagtcacaatccaaatataggacacctatgtttaaggtcaatatacataatgttcccaatgcttagcaaatgaatgagactctggctgagtaaaatattaacacaacttgttagcacattatcatgaaaagacagaaggcatcaaatatatactttgctgttacactttttactgttcaatgtacttgtagtgaaaaaatatacatttttactttcaaggttaaaatagaccatcagctcattatctctcttagccaatagctatgaagactaaaatggctcttcttgcttctggctcacttgaacatcttatttgtgctgaagacaaaaaggatagcagtgctaaagaaaagggtatacccggttcccaagataggtgcggttgaggttctcgcacaaggtgacttaaaacaaaaataacacaactcagttgatccaatctccacacaatggggttgcataatcaactgttccagccccagagaagagctccctgaaagagctttaggatctggccctgttgttcaacagagggcttcaggatggaactggtatctgaaggtttctttactg

SEQ ID NO: 213769 - DNA, 682 bp, Homo Sapiens
  misc_feature (625)..(625): n is a, c, g, or t
ttttttttttttttttctacctttggatttgctctgaagagactatcaagaccttgattcctattcagagcaaatccaaaggtagaagaaagagagaaaagagccaaaagccttgaaagtctcatatagatgagtacccggacagataaagatggcaaaggaatccaaagccttggaagtccgattaaagttaatcaaaggactgacaaaaatgagaaaggaagacaaaatctcgaatctgttgctaaagtgaatgccaggatgaataaaacgagcagaagaagtgaagaccttgataatgctactgaagtaaatcccaaaggacatgaaaataccactggaaaaaaagaccttgatgggcttattaaagtggatcctgaaacaaataaaaatattacgaggggccagagccttgataatctcatcaaagtgacccctgaagtaaagagaagtaaccaaggttccaaagaccttaataacttcatcaaagtgtatccaggaacagaaaaaagtactgaagggggccaaagtctcgacagcctcattaaagtgactcctgaaagaaacagaactaaccaagggaaccaagacttggaaaatcttatcaaagtgatcccttcagcanacaaaagcagtgaacaaggtcttggatgaacatattaatgtcagccctcgtgccgaa

SEQ ID NO: 213770 - DNA, 744 bp, Homo Sapiens
ttttttttttttttttttgatggtagcatgaatgtatttataacacacttaaaagtggttaagatggtaaattttatattggtgtattttaccacaatgaatacatttggaaaaataactattgattttcagagctttttggatttcagaattctagaaatgggatctcagaccaatacttggatataggggctaaccttttaatcctaatgcagttttaaaaataaggtactcaagttttctgtgccttactttcttctatcaaacaaagtatggcatacatcttcaaattagacaataaaatgttcaaattgttacctcctctgttgagtttttttattattcagataacttatcaagaatggttgaacagattatccaaactaattttggtatccaacgggtacgtctctggaaagaatcccttgggttggcactgagcactctgacttttctccgtgatcatgatcttcagcagtaccatgaagacagcagaactcaaagttcaaggaattttcatttttcaaccaatcttcttctgtcttttctccactgacatcttccattgcaagtagatcatctttagtgtcttccagtcaaggggaaccacatagtcatcaggcaacaaggattccattggaacgcctggagatccaaaaagctttactaattgaaaggcaacccttgtgataatggtagctcaagggaacggtagtcagtgcttgttaagtcttggctgtcctc

SEQ ID NO: 213771 - DNA, 771 bp, Homo Sapiens
ttttttttttttttttttagaatagttttttctcatcaaaacatgatttattaattttaagcaagagtaagcatatgtgatagtggccagcttggggatagaactcttcctggttgatgcacagttcagcacctgttgggtcttggctgttgggatgataattcttttgggtgaggggaacagccgtggtcaaggctgcctgcacccccatccaggcacaggaccctgggcaaagtctcaaaagaggtagtgtttttactttcgcaccaacaatacaacataagtattgggtacaaaagaggagatttccttcccctctacctcaacgggcaaaaggccttccatcttcagaagaggcttgtgaggaccatcggttgatgacctcctagtgaattctggctcccattcagagcacagagaaacccacaaaaggggcctgtggctctggttccaggtctcaagggtacagcttggttacatccccaggccccaggctgattctcctgccatcatactgcaagccttcctgtaccactttgacccaggttgaggtctggcggaaaataacctcaaaggcaattaatacaaaaagcttcctgtaagctaagaggggttatcaactatatgtacttatttttccagagattgaagagagaagagaacgagccaaggcttggttttgttttatgttggtggacatgtagaactttggcatacgaacccatagagctgcagcccatccatctgttttggttagatgagttttttttc

SEQ ID NO: 213772 - DNA, 798 bp, Homo Sapiens
  misc_feature (650)..(650): n is a, c, g, or t
ttttttttttttttgtttgttaatactttattagtattttctaatggacagaacacaaaccaaataaattttttaatccttttagttgaataaaaataactgacattctgattgttgtttcttctttgttaaagaaagaaagtattgatagaacagttaggcacacagttgacacttactgtacaatgatatgcacacattatcttttaacaattataatcctaaaatgtgctcttcatattttttcccttgtaatacaggagccatgctcctaaaagcaaaatttactactaataaaagaattttccaaggagtgacaaaaagacttttaaaacaagtccttaaataaaaggatgcagcaacaacggaatgtaagttgttggattaagaagacagtttaagctacatctcaaaaaattaaaaattcatttatcttacaattactcaaatacacatgcattaaatgaaaatattgcacaaaattaaaattttagattgtgaaatttatatcattcttaatttttataaaaattggtacactttctggtagcacttaactgattgatttttcttcccaaataccagcagcacaaacttaaaatgaacaaactgaaatattcaagaaagtttttgtttttttttttttttanaaaaaattaaggctaaccaagtgcatccattggtcaatggcacaattgatttcagcaactatttggaatatcctaattataggaaatgccaatctaagtgatatatttaaataatacaatcaattttttaaggtgaataaactatgat

SEQ ID NO: 213773 - DNA, 667 bp, Homo Sapiens
ttttttttttttttttctatattttgacttgaaagaagactttattatactgtttgaattttttcaccatgtgcactggtaaagataagaggaccatccatattagattccagctcattgttgacttgtgggaattcaactcatgttattagcttctcatttttaaagggaaacaagaagtctgaattttatgtgaaactccctgatttttaaatgttggcaattaattttttaaagcactgtgtgggttgaacaacatttctgtataaggccactgtgtttagatgtaccctgaagaaggtaccccagcaacaaggtgggagtgaaattcaaacttctagagaagggctgggcctgcctagagaattctcacaaacgtgctacagagactgtgacaactctgcttctatgcaacctctggattatatggtaggacattacagctggagataatttaagtgccatattctgcaagaatgaccttattctaacaacccaagttgcccatctgctaggcctatttattcttctagcaatggcaatagattgcatgaagcctattttgtttagcagtattatttgtcactaatagtgcaaggtgcatgtgttaactgtatagtgatatatgtgtaatatacatgtgtgaatatatattcagctgaatcct

SEQ ID NO: 213774 - DNA, 649 bp, Homo Sapiens
ttttttttttttttttttccatgcagtcaatctttattatagcagtattcgcatattcacatcaagtacatagaactttttttgccttttatataatacagtttttaaataactttacacagaaataaatttcttcaatctgaatttcagctatctttttttattctccatgctttctatccaaactgaacaatattttctgttatacaaatttacatgagaaaaactccaaagtacaaatgaagggacctgagcaggaaagagaaccaaagtatcaggaagtgggtatgggggagaattaaaaaaaataataaaagattcaagcaaacattgagaataggggaaaagagggagacatcatccatttgactgaaaataaatgtcttttttatgaattgaaaaataagctttaaaaatagttactccattgtaatttttgcaaagcaggtatagagaggtctgtggacaattaaaaagtccccatcttttcactgggcacgccccagactccacgagaaccttttcaatgcttgagtggaactgaagtgtactaaacccgaacctttggcagtaacagaaaagaggaatgtgtgtgtgagtcgccataaggtttggagtggtgaaacaggaaccgtgaattcactgcagt

SEQ ID NO: 213775 - DNA, 558 bp, Homo Sapiens; identical to SEQ ID NO: 40438

SEQ ID NO: 213776 - DNA, 717 bp, Homo Sapiens
  misc_feature (663)..(663): n is a, c, g, or t
ttttttttttttttttttaaaagccaaatagagctgtatttttatactgtacaaaaaaatttacactcttaatgtaactagatacatctaagggtaaattacacatctctcaaacacagtattttaacatctaagatatgtttctgcattgcagactgatactgaattttatacatctttatttacaataacttaaaatattttttcatctctggcagatatttacaaggtcaacagtgactacatttcacatttcaacaatcaacagcattaatcggttcattaagacaggataatggcttacatgcaccaataaatatgatcttaaattcacggttttttcttcagctctgaaaaaatgaaggttgtcactagtcctaggttgaaaggacatcactcaatacaagtcataatttctatatgcctatcctatttaaattttcaccagcactattctctaaatacttgggaagtttataccaagttataggttgatgctagtttaaaaaaaaaaaaagagctgatgtgtacattccatatccttttatgaagcaaacatatgaaagtgagatagttcttatttaatatcattgtgacagagatcagattacataatgccaaagtagtaaaaatccttcagaaattatagctcaggagactcanattatcatgagaaaaacagtgggaaaatatttttgcaccctaaaactgtttcac

SEQ ID NO: 213777 - DNA, 474 bp, Homo Sapiens
ttttttttttttttttatgggtttctagaggttttaaatacttggcatgagggggaaaaaactcaaacctatacccgaaggtataaaacattaattctgtttgtctcctgttccagggacctgggtgcagccggatgctttgtgaaattttaaaaatgttgcatctctgcttctctccctgccccaggagccctcccaggcgctgagtccctgctgctgcagcatccagccaccgacccagctcctgctgaccacgatgtcgggtaactcggctgcttctcctagggtcgggtcaggcgggccaggggcatttcaatccgggtgtgtttccacggcttttccgaagggcggcctcccggcggagtgcagggtcatcgggagccccggacggctttccccagctcgcgctgcgcggactcgccccggagcctcagtgcgcctcggagaaacgcctgccccagaaagggagggggt

SEQ ID NO: 213778 - DNA, 617 bp, Homo Sapiens
  misc_feature (600)..(600): n is a, c, g, or t
ttttttttttttttttatgatcttaaacagactatttattagaaaagtagaactataaagggagacggttgtgccccttgctctcctcgcaactctctggcaacctggagaggtagtataagatagtatatacacttttcttacacatgccacacacatttctctgaacaatccaaaaagaaaagcaaaacaaggccttgatggcagtaggcattagaaatggaggtggggtaggaagagaaaatagtgcttgtctccagaattacttttttcacttctagccccttgctgtaacagctcacacttcctggcacaggttcaaaggccaagaggggtatgtaacatagtgtccaaagagggaaggtccttgggtgaaatgtgctatatgtgtacttgggtatggcttaggaaggccagagttgtgatccaagaagttgaaaggtgggaaagatttttctgaagcagtgaggctaatgggtggggactcacttcctccttagtgtatatgtgtgttgactcctgagcagccctacaccgatggtcctgataggccaacactgcaccgagacctaatagggtccccatgactctccatccctngggtgctggagttatca

SEQ ID NO: 213779 - DNA, 654 bp, Homo Sapiens
  misc_feature (608)..(608): n is a, c, g, or t
ttttttttttttttttttcaaaacaagacaatgttttaattgtaaaactaactcgaggcaggggtgggcgggctggggctgcgctgaccgggcaggaacctggttcttcaggcagtggttctgccagggccaccccgcaggacagggaccatctgtcccccaataagggcaggggctagagtgttataaaatgacaatataaatagacttctagaaaagaggaggctgtccaggtgcagtagtcatttgctgcaggggctggagagggtggggggccctgacctgtctccccatccagccacagaaagggggcgcagggctacgggaaaaggccactcttcggacattcatgatcgacccccacaatggctcagggggagagggggctgggtgtcaggcaaggcgccagacaccccttgcgggctggaggacggggtggctggacctttgcacacacacacacatgcacactcacacgcgtgcacacactcatacatgttcacctcttagtgttctctccacccccagcgacccccactgcagacttccagtgatgggagggccgctgcccttcctggagacagaagaacatgggggagggcctgtcncagagggtgggggtcctgggagcctcgcttgctcccacctcgtgcc

SEQ ID NO: 213780 - DNA, 700 bp, Homo Sapiens
  misc_feature (49)..(49): n is a, c, g, or t
ttttttttttttttttttcgggagaagaaaagctttactgggagaaatncaacaaattccagagtgcatggtttttagcccaccctatcaccccaccagcaataggaacacagaccactcgatcaccacacattccctacctcagggagtaagtacagcagccaacatctggtctcagagctgctgggaaaaggggcaggaggaagaagtatctgggaataccattctctcactcttttcccctccttcctggcctgatttagaagaatctgactgtcccaggatacagaattcttggttggatcttgtggaactgggggcaaaaaaatagcagcaaaagcacttaagggcaagaattcagctgggactttcagactcagtgaccagtgataagacaagtgcccaagctccagccactgtaatcagtccttagattaatgacttattcctcaatcctaaaatatcaagaggtggacaaggtttaagtcaaacccaggaagtctttcccttcactcttctataaagaagggaactggcatgaagttggatggcttaatgatcaagcagctaaaggtaagagagacagagtgagagagtgtgtatgtatgtgtgtggtgtgtgtgtacatgtcttctgtcacaaagtaccacaatagtctgcagtggtggcacaccctaaagtagttaagttttaaagacag

SEQ ID NO: 213781 - DNA, 642 bp, Homo Sapiens; identical to SEQ ID NO: 52032

SEQ ID NO: 213782 - DNA, 773 bp, Homo Sapiens
  misc_feature (764)..(764): n is a, c, g, or t
ttttttttttttttttttagacttttgtgttttatttaaaaaaaaaaaaagtgtgaagtaagacaaaatggacctctaccaagttgtagggaaggacaaggaaaagaccaggggtagaaaaggagtgtaagttttagaatggtggcattggcatagatgtgggaagagtataaaactagaagaagtctccagataaaaatatgcaaaatatgtctgtttaagtataaacattttctgtccacatgcaaagaggtgtttacccacccaaaaagggtatatgttggagtggggacttcactcgcgctggatatgtattaccctccagcctggaaactttgtcttggtgcaaccccctaaactgtatgttaaggtagaaaaggaacattcgcttccagccttataaaaatgacagactccctctttggtgtttggttaccttcacagctatacgccagccactgagcagctttcttgtcctcttaagttctaaactctgctcctatgctggtgtcctccaaccattacttattaccctaagccgtcactgcacagcctactcccctggcctatcacagcaggacctatctggagagttcacactattctagggcgatcagtgagctaaaaatcccagagaaaacactgtaggaatagaaattcccaagtttaattcccaagagtttaaaattatgagccttttctagccccaccttcccaccctcagagaggacagtaagaatcagtgatccaggtattacctgttngtgattgtg

SEQ ID NO: 213783 - DNA, 845 bp, Homo Sapiens
  misc_feature (758)..(758): n is a, c, g, or t
  misc_feature (767)..(767): n is a, c, g, or t
  misc_feature (779)..(779): n is a, c, g, or t
tttttttttttttttattgctttcttcttttattcggaagcagacacagggtgggaggcagtgcgacacctcctggtgagaaccaggataacagcagtcagagtcagggacaccaccacagccaggcctacgcccagcagcaccactgaggtgtcagaaggcaaagcccactgctctacttcatggtcaccactcctgtccaggaagatcagtggcccccacggtgacatctgcttcttctgtcacatgcctgcggttacgggaagcagacgtggaccactggctcacgacacgaggctgcctcctggaatggcttggagtgccacagtcacctttgttacagcattgacagatgtcagccgggccttccactgggaaccagctgttggaaggcttgctgaaggaacaggccttgttgagttcatctgggtcctgctcagctagggtgaccttcaggtggcaggtgatgtatatcatgtttctggagtcattagcaaagtggaagacatccactgtgaactggagtgtatctggcccgggtcgaggaactttgaatgcagaagaggcatcagtgagaccgtcgacaagacagcttcttttattttcctggccatcaaggaatatttggtcttcttcctccactgtccttttcttcttcttctctttgagggactcagtacagtctcctttgcacatgggtctggggcatacttgatggtgaggacagtgttgagctgattatctgctctggtatcgcnagacgcganatcttctgtcangaggggcgatcctcagagtcactgggctacacaccatcctggagttgcgaggggacagcacagcct

SEQ ID NO: 213784 - DNA, 737 bp, Homo Sapiens
ttttttttttttttttttcctggttataaatcctgcaatatattacattttttaaaatcctagtacaacaaaaacaaatcttaaataaaattgaacaaacaaacaaataaaaacagtagcagcagtggttacctgtctgagcacctacattttcttaggaggggatcgtgtctcaccagccaaatagcccataaaccttctcaaaaaaagtgagccaggagaaaagtataacacaagatttgatttcacaatgtctctaagccccacaagccccaaactggggattcactgaatgaaacaaatttgcttctccattgctttcttcttgagaaaaagagatgattttcaaagtcaatgccttcaatatgttctcaaagtctgataatgtgcttgatgaatgccaagtctcttgttgggtttttctactgttccagggtagttttcttattggtaacatatacaggaagatttcaatgttcattggagaaaagccagcagaaatgaccaatcaattataggcaccaaaaaagaaaaaaactattaaaaattttaaatagaatagttcatacttgtatgtttagatatataaagtccagttttcatcatgggtgacataaaaacaatatcagaaataatcatttttgaaatacaatttagaattacaattttaacaatatacaaaaattttacaattcagattttatcattacacatatttgatatatacattctctctc

SEQ ID NO: 213785 - DNA, 645 bp, Homo Sapiens
ttttttttttttttttttactacttttaactttgcagaaagcttcatttttactgtgggttgtggttaagttaaaaacatttgactatgccatgtaggcgactccaacacttcaggaatacaaagctctgaaaagaggttatgtagcaaagctcattttcattcacattgataataggtcagacacatttttgaagaaaaaaatggacagagcgtaaaggataacagagtacacattttcattttctatgatgaaaaggaattttaaaaattgtctgttgtacataaaaactttttttttaaaccaaacaacctagaattaaatggagtaaaatgtgagaagccccccttttttcctccttcagcagacaaaaccgctgtcaatagcttgatatgtgttatcacagactcttttctagggtgcacacacgcatatatgctacgtataggtaaacaagttttaactatacaaatgtaaacaggagtgcgtggttactgtgcaacttcttcgtcctgtcaatgtcttagaaatattttcatgtccacactagagagctattgtctttatctgctgcagagtgttatatgtcagaaattggtatgtactaattcaacaatttctgcatttctcctcgtgccgaattct

SEQ ID NO: 213786 - DNA, 758 bp, Homo Sapiens
  misc_feature (643)..(643): n is a, c, g, or t
ttttttttttttttttttgatattcaagcatgttcttttattaagcgtaggatgcgaggcacagcaggaggtttaagtacaatgtgaaagcaagagaactgagactgtgattgacagacaaagggattaactaacgttttattctctgccccccaaaatatcctgtgtattcttaagtatatacgcttcccttcctgcctttcaaggtatctaaggaatgatttgaaaaatttgttataatctctaaagaattttttgtatagcattagcaaaggagtctatgacaagtactttgccacctggtagttctgcgtattctactccctctgggtgtcactgtcatcctcactggctgggacaaggttctgagatttgtctccccagcagttgctaagctggctcagtcttggtcaggatgaatgaaacaattatctcctggatcaatgcagcaaggagcagtgaacacttgctttttcttccctaagtaggagaaggccagcccctggctgcagtggtggccgtggtggtagctggatgggacgaggggacctcaggctattctataacagtaaaagaaagagaattgctggtgcttctccagggagatacggaacctacacgccaaccaggtttttactttcanacaggccaccaccagaaagcaaagagacctatgcctagcccagccccagaaaagtgatactttaccccaaggaattccctgcttcccattgggacttaagattttcactctgtcc

SEQ ID NO: 213787 - DNA, 675 bp, Homo Sapiens
  misc_feature (637)..(637): n is a, c, g, or t
tttttttttttttatcttaaaatgcatattttatttcagtagtcaatgaccatcaatcaaataaaggaaagaaaactaatttcttgaagaaagacaaatctatggagtggtttacaggaagtgaagaatgagatggcccaactaaaccaatttggaatcattaactacaaaatgtcaaactaactgcaagacaagtgtcaaaatgggatgtttaagcagttttgctatgttatacatcttttagttgttattttcaaaattatatgtataagttatataagtcatagtaatagctaaaaatgccaatctatggaagcagtgattttcaatataaagttctattttgatatttttccatcttcaagtcagttactgtcatctggagtactcagttaagttgtggtttgaccttcctcaacttgacaagaaaagctgtatgaccaggttgccagtgtactggtctagcaacatagggaaatgatccatatggaaaatcagaatgcgattcttcatggtcatcctcttgaaacagctcacctttaactccaattttctcttgagaatctagttgtacatctgtgttgattttagattctactttttgagctaaaattccatttttctgttttgcaaggcnaccaaccaatctctgacaatgacctcgcttatcttttc

SEQ ID NO: 213788 - DNA, 663 bp, Homo Sapiens
ttttttttttttttttttcaacctgacctgaggcatcaattcaggcacagtataactctgaccagtaagcggaagctaacccaaatgctttccagggctgaggggacatcatgagagttgtggtcatgtacagaagcacagtcccaggggcacaggtggtacccctgtaaacaaagaatttgcaatattagggcacctcaagcaggacatccattaggctgtacaggtgaacagacctcctaccaggggaactcctgcccaagtgtttccagtcccatctgaaaagttcccagagtccttggcttccaagggactgcctgaaggcagtgagtcccaaacagttttgcttgttcaggatacaagttgatccatctcatgagcatggatgacatttgtgggagatcttcatggaaagcatagaagctagacccactctgttgtcagtctgaactcaaagcactcacagcacatggaaaggcagcactgggaattttccttcagcaagaggaggcttccagggatcaagcctccccaggtgccaggctttaattattttctccaatattacaaaaacagtcgtgccctgttcagcaatcataacattgcattttttcaaccatctcttactctcagctaggctttcctctgcctcgtgccgattct

SEQ ID NO: 213789 - DNA, 624 bp, Homo Sapiens
ttttttttttttttttttccagatgcctgtgatttatttccaaaggagagctacagcacataggaaaatacacatggcttttcagtctacatttttacagagaaaagagattcggtcattggctttctcagtgccatcatcctgttccatgaggctccaggatggatggcctgtctccaagatcccgctttcaaagcagcagcttggccaaggcctctgggggtaggagtgaagggcagcgacccccatgtgcgggtggaggggaggacatgagcagcactcactgcaaagctaaggcaaagaatagagctggtgggagatgcctcccctcaccccaggggcatggcttgctgaggcccaggatacagaccaggaggggtggggatgggggtctggtccagcctggagcggcagcaggactctgagtgtacacatgggtgtggggtgaagaggggggcatgctgaagaggaagcctaccagggtatagaggggctttagcttgcatattccccctgccccagaacagctcccagaccatggtccccaatcctacacttggcccctctcttaagttctacttcaggtgggggtcctgctcaggttccttctgccaccttatcccc

SEQ ID NO: 213790 - DNA, 603 bp, Homo Sapiens
ttttttttttttttttttcagatttctagaatcctttaattgtctgcacccatagctgaagtaaaatacaatatcttattaaaaggcccgtactgaaagaagaatcagtaaactcttcttaagaagagtcagctgctcctgcgagtcagcgcatcttcttaaatgcgtgctctgcttctggtatccttgagtcattgctttagccaggctgcttccttgaacttggctgtgaggtgggggaatgtggttctcccttgagaaatgggttccagagagctcgaagatgagcagagtttgcctgggttaggtgaggtccaggtcatgctgtgccaacctctgggaacatgtagcagtggcaaagtgcaaccctctgaccagacatgggcagaggcagactctgacattgggtcttgtatatatatgtgaggcaggccctggtggacttgagtggaagctcagactgcagagtggggcacatgatgggctcccaggctgtgcctggaggagcagactgacctggcccttcagtttaagggccaggaaactgcacttgctatgcacatttgtgctcattctcatctgtgcctcatgccgcctcgtgcc

SEQ ID NO: 213791 - DNA, 767 bp, Homo Sapiens
ttttttttttttttttttcagtggttaacaaatagctataatttattttctttctttttgatgcctagcaagcagaatgacttgcttgccttttcccttagtaggtaactacagagcagagcacccatgtttccacagcggggtggtctcactgtccagactgagaattaagagcaaatctttcccacacattggagtaggtgttgcagtcctagaagttaagtactggtctcagatctcatggcagggtgctctctgccatgcagacatgtgcaattgccatttcaggatcccacactgaaaattcacggcgctccattaacaacaccagggtgtgtcatgctcttgggtggggtcacactagttctccaagtgacaaaacacacccaacacaacacaagatgttggtaagttagagaagagcaaaacacagctacttaaatgaaatctctggtttgttaatgaaccaaaggtggcttgggattattttagtagttaaaattaagagtgcattctattgcagaaaatgcagttattcaacacacagttcctcagccggcctagagccgcattacccttatcatttagtttctttttcatcctctggaggagagcagggcaggaagaggtggggacttctcttggagcatctccatcatctgtaagagggtatgtgttactgctcaccagcaccctcggctgtagttgacgtcatcttttctgtctttttggacttcctctgcatttgctcctgctcctttctcctt

SEQ ID NO: 213792 - DNA, 633 bp, Homo Sapiens
ttttttttttttttttctaagatcccttctttatccacatcacttcagccaacaatctgattggtatttccaagacaacagagcagtatttcaaactcatgaatgggattttaatgtgctgtatggaatttgaagcctcaaacttaaggaactttccacctggaaagcattcttaagtaacatcaatgaactgtcctccctaaaacctagacacagtatcactgtggaaacagagtaatagttctggaatcgattgaggattaggttagaagcgcccacaccaggaaaagcttccgggaaacggttttaggacagaatcaaggcacacctgtggaacctctttctgcatctgtcaaatggggacgctgtgtctcctctcttcttaggagaggattaaatgagccagagtgggctagcacagtgcctggcatgagactacagtttcactgggtgctatactcactacctgggtgacaggatcattcgcatcccaagctcagcatcacacaatatacccatgtaacaaacctgcgcacgacctcctaaatctaaagtaaagttgcaattaaaaaaaaaaaagcctacagccgcgggccgctccaacaacagaatggtaaccctcgttccgaattc

SEQ ID NO: 213793 - DNA, 777 bp, Homo Sapiens
tttttttttttttttgttatttcaattcaggttttattaaagttgtttctgaatattttttctcagtgatccttgttctgatgaatattacatttcatccttagttttgctcatttgattttgctttagtgtttaaagaacttttatttatcaaatcctttgccatgaatgagagcaccaaataacatatcaatacccaactgcctgattcctttacagcagtaagaaaagtcagtaaaacatttgtacagtccaagtactacaacaccaagatcccctcttcaagtgagagtgagccaaagcttccttagtatcatctcaagtcaatgtcttttcactataccattaagatgaaaataactaagagcactgacacaattttcttgctctttccatctaaaaatgtgggtttcctgtggtgtggctaattttaaaaaccagaaaatggaaggaaaataagtcagtgaatgattagcttacaagttttttctactcatcattaaccagtcttcccttttccctagactttagacagccataaaaaggcaggaaaaacaatgtgcataataaaaaaataaaaataaatatctgagcacctactgtagtaggcatttaacacatttcacttaatcctcacaacgctgtgaaagaattattataatcattttacgaataaagaaacaggctcagaagggtgaaatcactggtgcctaaagtcctgcaggtgactgagctgagatttaagttcaagcctatgctctaatatgctgctttggc

SEQ ID NO: 213794 - DNA, 790 bp, Homo Sapiens
  misc_feature (690)..(690): n is a, c, g, or t
  misc_feature (737)..(737): n is a, c, g, or t
  misc_feature (783)..(783): n is a, c, g, or t
ttttttttttttttttttcagtttgttagtgagaacattctttaatcagttgtaagcatatttgggttacagaaaaacatttgagagatctaacatttgttatgtgccctctgtatatcatctacacgataagactgaaatattttattcttttacagagaagggaactaaagctcagagaggttaagtactttgcccaaagtcatttgataaatgaaaggtagaaccagaattcaaatttggacctgtctgataccaaaacccatactcgctctactacagaagtactgtagtggtaagctgaagggtacaggttcaggggttagtaatgaatatcacagtgagaattttaactattactttaggcttatagtttgctaataaaattgctacctgaaggcagaggcagtggctcactcctgtaatcctaacactgggaggctgaggcgggaggatcacttgagcccaggagttcaagaccagcctaggcaacatagcaagaccctgtctctacaaagaaaattaaattagcagggtgtgatggggagcacctgtgatcccagctactcagaatgctgaggttggaaggattgcttgagcccaggagttaaaagaggctgcagtgagctatgatcacaccactgtattccagcctgggcaacagagtgagactgtctctcctttatttanaaaaaaaaaaaaaaaacctacttcttggggtcattgtcctttgtcanaggaaactcttctaatatcatacctacatgccagaggaagtcctantaatttt

SEQ ID NO: 213795 - DNA, 803 bp, Homo Sapiens
ttttttttttttttatttaaaaaatcattttacttattaaaactttctcatttcccaaggcacttcagtagctttcacaaaaacatgtttgttcttttttaaccaggtgaggcatatgctttaggagtaccatggtaacataatcagcaaagagaagacaattacactgaacacaaaatatcacccaataaagttacaggactaaagtgagctactctgaaagactatgaacacaatttaaatttcttttttgtaatatcctcccatgactaagtatcaagaaaggaacacacacaatgacactgtttttggcacttagagaagtgctagaggctagggctggtaaggccttgcaccagtggcagctgcagacaattgccagagtgattctgtgtttaaaaaaaaaaaaaaaaagacacaaaccaggaggctaaggaaccagcctttcccaagtgcattctgaagggcaaataacaaggagaaaaggatacaacaacaaacaaataaacagtaaaacaaaacccacattacagctttgagagaaaagacaacgttgctcatctctctcacctgataaatttcctttaaaccatacataagacgctatagtagcaaggaggtttccacagcagtggaaaacaagaatagtagattcaatggagcatttattatgagcctggacaacccagtgctttgatcagatgtaaacaagtctactcagtcgtcatgctgagtggtcttaagagctcacacatcagtgcactttgctggtgatctgcatctgctcattctgctccatcttc

SEQ ID NO: 213796 - DNA, 722 bp, Homo Sapiens
  misc_feature (642)..(642): n is a, c, g, or t
  misc_feature (653)..(653): n is a, c, g, or t
  misc_feature (698)..(698): n is a, c, g, or t
  misc_feature (702)..(702): n is a, c, g, or t
ttttttttttttttttttgcacgtggagctctttatttgcttctgatatgtacaggtatatacagttggtgagagtctatggtacattatttcacaaaattatcttacatctgtgcacactcctgggcaagaagtggcagattctgcccctaatatcccatagatggtgaaggaaaaggatgctaccaggagccacccccttccgaggacattcatgggggccgcctgccctcttcccagacactggagccctcccacggacaatctgtgcctcccacctgctctgagcacttgctgacaggagtggtggcagcagcagcagctgcttccaaagtctttcttctagagtagaagacttgtcgtgggggccaaaaacaaacaaacaaacaaacaaacaaacaaaaaacaatggcccccactcactgatagcagcaaacggacacctgactcctagagcctgcctggaatcctccgccccgggtttgagggcagtggctcacccaccttcccccagcacaggtgcagcctggcctcacggggcactggcatgcatcttctccaggcaacttgtccagaacgtgaccagccggttgtcacggttgatgcagaagtccgtgaagtccttcagcagccgatcagcanacttttcatcncctgtggcgctggagcgccatgttttggtgagcatggtgttgtangccnagttgtagccgacccgctcc

SEQ ID NO: 213797 - DNA, 654 bp, Homo Sapiens
ttttttttttttttttttaattggggagtcgttttaatatttacaagaaacaaatcagcagaacaagattatatcagataggctgtgtacagtagctgcggcttataaaacataccagtaatttgtacctggtgagtataaagagaaccaaggattcagatgactttacaaccaagggagtacacagggcaacaacaaattagaggaccaaaaaattcacattttctacaaaaaaaaaaaattacagatctcacaatgtcttcaaagacaaagaaaaattcaaagtccttaaaagggtggcaaagaagaaatctgaaatggaactctaaatataaaaagttttacttcacaagaccaattttcttggcttctgtttcatatatcaataatctccacattttgactataaaaacttctgcttcttcatcaagtaccatggcaacatcatctaaaatgctctggggtgaactatgagccataaccttagaacaaacaaaatcaactaatgtagcttcttcttcacctatatattctatgattttcttattaatccatggtctaattcgacgttccatcagtatagaatccacaatagaccaatccaggggataagcgaagagctcaggtttggctgtagggattttccctcgtgcc

SEQ ID NO: 213798 - DNA, 653 bp, Homo Sapiens
  misc_feature (636)..(636): n is a, c, g, or t
ttttttttttttttttttggctcttaagggtctttaatggtttcattttgtggcccttccccccaaccctggtgactgtcccagcaagcagtcagtagaggtccccggagttcagtgggggcctggagatgtcggacttgtgagggaagggccactctccccttgtaacctctggtggctgctaggtggaagctgcagcaagggggtcccaagtgcagggcctctgggtgctacacatctcacagccagggcggtctggggcattgatgaaggtgcaggaaggacaggaccagctgggctggagtggactgggcaggctggaggcagctggctgggggcctgggggtagccccaatgatgggggaaacaagcgtccaagttccccgtccatcttctgggggtgctgagggctaggtcctgtggctggggcttctcgaggagctgacagcaagtagaggaaagcagggtccccatcctgccgaaccccgtaagaggcaaggctgcgctcaggcacacacaggcaccgtccgatgacccagcgttgcacggctggcgggaaaccgagctctgagaaacctgctcctggagagctgcaacagtgcagtggggggtggacctgcagggcaacgtgtgcanaggacgcggcggatgcg

SEQ ID NO: 213799 - DNA, 737 bp, Homo Sapiens
  misc_feature (645)..(645): n is a, c, g, or t
ttttttttttttttttttcaacgttttcaagttttatttttaaaatatattacaacatcacattaaaaacagtagaggaaaacaagcaaacatgatagaattacttttttccaactcaatagtacttagctttacctagaattttcatacagttgatgctaacttcttctgaaccctttctgactagtattttaccttatgtattctttatagtatttccatataatctttaccgagacctattcagagcataacatagacagggcagcacaagcaactgacacctttgttggtagtacagtgttttttcaaccagtttatgagagaatgaaaagaatgaaagtgaaaattttacttaacttagggttaagtagctctaggtaatctcttcagaactcccctgcttcaccttctcaagttaatcaacagtggctagtttataactagaaaccacttaccaaattgcctaaacaagaaaactttttaaaataacaatttgctgatctgtccaataactccaataaagttgaatttgctttatttttccaaaaattatgttgtctaaagactctttgtaagtgtaaatgtatgatatattgagttgatttttagtccctattagagagttgttagacaagttattanagtttaagaaaatttggattctaaatttccacctggatacatatatgaaatattttatattttcaatatatacttacttatattttgcacac

SEQ ID NO: 213800 - DNA, 692 bp, Homo Sapiens
ttttttttttttttttttagtttgaacaatatttaatctctgatgcttcagaaggcactttgagatcttgaagggccttagggttgagtctttgatggtgactatggctccttagggtgctgtgtggatgtacaagagcactggctaaggagaggtggcagcatgcaacaagggtaagaacctcagctctttccctaaatggcaggctgacccggggttagtcacttcccttccccagcagcactgcgtcagagcttctctgaggcccctcttacctctgatattctattaagactggcagaggatgtattgtgtgggttttctatcactggaactgagaaaaatttaaaactacctgcatcagcacagagaagatctgaaacggttcttgggtgtttataaagcccgtgggctgggctcccatcttgatgtcagccagccctggggtcagtgcagactgagatacggagcaggaaagcaggaagaacgggagtagcagagtcagggacgacagcacagttggtgattgaatttatcaagcctgtggagaaggactctccctggtggaggtagtggcataaatatgtggtcacttatcctgccttctcagaccaacaagagctgttctgctatcaatcaaccgagagattgggttacagggacgtatcctgtctttgggactggtgatactg

SEQ ID NO: 213801 - DNA, 555 bp, Homo Sapiens; identical to SEQ ID NO: 48252

SEQ ID NO: 213802 - DNA, 382 bp, Homo Sapiens
ttttttttttttttttttaccctgtgattccctttaaatataaagcaagaacaggcaaaattagtttatggtatcaggagtcaaaagagtggttgtccttgaaaaaagcagtgactgagagggaacacacaagtggcttctggggcactaacaatgttctgtttcttgatctgctgctggttacacaaatgtattccatttgtgaaaattcatcaagatatatacttgtcatttgtgcatttttctgcatgtatattaaaaattaattttttaaattggggtaaaaaaaaaaaaccataatgtacacaatttaaaaaatttttaggccgggcgcagtggctcatgcctcggcctcccaaagtgctgggattaccctcttgcc

SEQ ID NO: 213803 - DNA, 657 bp, Homo Sapiens; identical to SEQ ID NO: 53875
  misc_feature (598)..(598): n is a, c, g, or t
  misc_feature (634)..(634): n is a, c, g, or t

SEQ ID NO: 213804 - DNA, 738 bp, Homo Sapiens
ttttttttttttttttttgaagaggacatcttgtaataaatttattgtattttgttacattttccacttttctcttaattccaactgtatactatataatcaacgctgtttcagaaataaaacgtttcaaacgtaaaaatataaattctgcttcttaaaagtgcatacactttgaataataaaacatacaaataaataacagaaatcagtgacacatctcatgcacttgttctaaaataaatttaaaatgtacgatacacttttcttccagcctctaggaaagacatcctgccttccatattactgtacaactgaaaatgaaaacgacacagaaatcactatccacggtgcatgagtaataccaaagcactttgtgtacagtgatgtgacatgcagctttcaagacaactacagaaattccagtgtaaaaactgaagagttcaatcaagaaacgacttatgtcaatgaggcttaaattcaattttaaccagtggtgagaggcacagttggtgagcagacctctatggaatgcaaacacgtatttgaaaggcctacaaagagaactccaacttcggaaatactgtaactgcttttgcatttggtatgacaccacaccgtttataatagcacctaggaaatttcatattgcatttggacgactgcaacagatatcattattctggatggcctttctaaagaaaatttccaacttgcatgtctacttgtatcttcattcct

SEQ ID NO: 213805 - DNA, 732 bp, Homo Sapiens
  misc_feature (708)..(708): n is a, c, g, or t
ttttttttttttttttttcagacatcatcttgtttattacaaaacttaaaacaccttccaggcaagatccaaagcaattttatcctaacattgttcaccttcatctgtagagtcaaatgtatctgccagcttgtgttgacaagggggaatgcttcccatttggtcaaggttgagggacagtaaaggaatcttgtattctaatgagtacagcatcctttcattgtccaagccatccaccttaggctttgaggttcaagtccaggtctggagaagagaaagtttcatacccaaccttgtggtctttccttcggtagtacattcgtgtcagcacagtcattagaaaagtctccagtatgaggaggtggcaattcatcacttgagacctggttttagaggaatagggaggcgaacaagcaatctgcccaccgttggccaagactgagaagatggagggctgtagggcagtcaggatgaggagaacctggaacagagcaaatttggctcccatgttctgctcacccaggtgtagcctggcttgacgggaaatgatgcccagggtccagagagccagcagtgtggacacgccaaggaaagtgttgatccatagagctgtgctcccctcagaaatgtctgctgggtcatagatgccgtcggggatgagaaacaggcccaccagggtcagcgttatcttcaagaaggcgtattggnaagggcccaacatcagcagctgaa

SEQ ID NO: 213806 - DNA, 658 bp, Homo Sapiens; identical to SEQ ID NO: 55727

SEQ ID NO: 213807 - DNA, 756 bp, Homo Sapiens
  misc_feature (600)..(600): n is a, c, g, or t
  misc_feature (668)..(668): n is a, c, g, or t
  misc_feature (673)..(673): n is a, c, g, or t
ttttttttttttttttgtggaaaagaggtacctttatttgaacagaacaagcaccctggccccagggcaaccacttccccaggtgcacagccagggccctcctgtctgcaggagaattcacagctggtgtgggactcagcccctaggccattcacagctttgtctggctctgtacattcattcagcacggggcaggggggccatgccaccagcctgggggctcaccaggcccctggatgcacacaactcaggcagggcacctgtgggaaggcgcatatcctggcggcagcagcacgtggcaccaggtgccaggccagttaggtggatcctggggccccagggagcgcagcttgctgggcagtttcataaaatgcagcccctgcccacacccacctggcttcaggctttggatgtctccaaaccaaaaacctcccactgaaaatccaggtgtgatggccgggtgtggcggctcatgcctgtgatccccgctacttgggaagctgaggcaggaggatcacttgagtccagaaggtcaaggtcacagtgagctgtggcaccactgcactctagcctgggcaacacagtgaaaccctgacccanaaaccaaaaaccaaaacaaaacagatccaggcatggccaagcgattcatggctgggcagggccagtcncgtcncgctgcacgctgaccaccgtgccctgcgctcacgcctgcaagcactcagctggaactggcctcctcggatatgcgaactgttc

SEQ ID NO: 213808 - DNA, 728 bp, Homo Sapiens
  misc_feature (538)..(538): n is a, c, g, or t
  misc_feature (704)..(704): n is a, c, g, or t
ttttttttttttttttttcacaaacacaggtgttggcatactttattagatacaaacccacactcacattttatatattattgatctctcaggtaaaaataagttttctttaaaaagtatgacttcatagctaatcatcaaaagctggtagaatgacctgattttaaactgctcttttaaaaaattcacaactaaagtgtagtgatgtcaagtatttacaacactaaaaaggaaagcagtgaaagttggtccagtgtcaactctggaaaggggcatcgtcagtgtagagacgagcaacgcaggggacaggcacgctcacccctgtgccagcagccgggccctgcagctctcgcggagcttggcgacggtggccatggataagcttccaggttctgaaaatattttctgcataaacgtgtgacactccatcacgaaactccctttggttatctgcttaaacttatcgcaaatgtctggaacgctggtggcttccaaaatcaactcctggtgctgcttaattaaggtcagggccacccgngaagataatcttcgagccttcgttaaacaaacagtcccagatccgaagcactgtctccacgggcaagatgtccacaaacaggcagatgaaccagcgggacaccagcagcgtccacagcacaccgagacgctccatcagggcccccacagccggcagctcgcccgcnacagctcccgaggactcctggtcg

SEQ ID NO: 213809 - DNA, 800 bp, Homo Sapiens
ttttttttttttttttatgatagaatattgtatttattaatgtggagctctttgtaccaaatataagtttaaaaatcaggttatcaaagagtatgtatgatacaacgcttttttaataaaataaaatacatttacatacatagtcactatgccacaagatgttaagaatagttttctctagatagtggccttacaggcaatttttatttggggtgtgtgtgttttactcaataaatatttattacttttgtattcagaaaaaacattaagagaatcataggaaagtttaactaaaaaagaaaatctttaaaatatcattaaattatttaacatatccttcaagtgagattgtttccttttgctaagctatattttgtaatctccacaacaaacatgaaatagtaaagttgacataaaaaaacttgcacagtaataggaagcagtgtttacattttgccaccccttacattttgaagagggaactcatattcttaaccaagactgtttcttatcattattcaaaggtacctacttttcctaaatattgcaattaaattatttgtacttaagaaagcagtgtattgtaaaggaaccagccagacctgggttaaattcctaattttgccatttaactttgacataaccacctaaacccaatcaaaaaacgaaaagtataggtactcaactgagccagtgaacagaatatttagtccaggtacacaccaggtagttccaatttaatactcagcaaagtacatatcccctctatttacattttgctcatttccttttgatattcc

SEQ ID NO: 213810 - DNA, 745 bp, Homo Sapiens
ttttttttttttttttctaaatttagtaggttttatttttatcactaggtcagtgattctttatagaaaataacatgttgaaatttaaccttaaaaaaagacaagatgaaaataatatttacatggaagatatacttaaacataaatctcctgaaagtgaataacactgggcaacatcaaaaagaggatgtgatttgaaagtagtaaaatgcgtaagaatcaaattatagatatctatttaacccatgttctagaaatatgtttaaataaggaaagcataaaaattattttaccaataacttataatccagtacagtagagaatgcgaaatatttcttatatctcatctatggcttaactaactgatggcaccaccaaagtcagttccactgactggctgcaaatgtccgcacaagaatactgcatgtctggaagccagcacatatctatgctacttcgtgggtcaaaatgcctccaaggtaatgagaatatatttaaggtcatattgtatggtcagttcttcccacttcacaagttgttagatctcatgctgtcttccaaatatttcatgaacgttggcggaatcttgacttctcttctgcttcaagtctttggagagcacacgcatgatactttcccacagcatctcctcttccgtgcggacctccgaggcgcggtgcgctccagtttccactccatctccggctgacttcgccctgcctggcgtttgggctctctgctcgac

SEQ ID NO: 213811 - DNA, 723 bp, Homo Sapiens
  misc_feature (657)..(657): n is a, c, g, or t
ttttttttttttttttttgctgcatatatagctgtggtacattttaatgtgaaatgatgactgcatcagcttatatccatggagcagattttagcattcagcttgggtctcccagtcaatatctacgagtctcttcttaaggagatcgatgacacagatacatacagactaataaatgtgataccaataatcaagaattcactcagttaagattttgcccactgagttccacacaagaaacctagaatttactagattcttgtgcctgtgaggctccactcatttccctgaatcacaaaagctacagagtatttagatagaaatatacctactcttaacatgaaccattttaaatatatgtattactgtgtccacaggagtacactttaaagcagggacttcactcttcaatctctccaatcatgtgttacctaaagtggcatgtggttccctaaagcttaataactgacattgccttaaaaaaggggtttgcttcccaactaatgtggaaaaagtctgaaaaatgattttaaatctttcactaaatttctcatttggtcacgtggaggaaaatgatttcaccaaatagatactcttattaattttttaatgtaatttatcaaagaaatgaaatatttagataaattccaggtttcncccaccatgagcttctccgaaagtatactccatcacagactgctcactaagaactctactgcagtc

SEQ ID NO: 213812 - DNA, 712 bp, Homo Sapiens
ttttttttttttttttttacattttagagttgtttacttttattaataaaaagttagatcacttatatatatatacattgaaaaaaactattattgtccctttcctggtgaaaaggagtatacacaacagacctttgtgatattctgcaacaatgacccatattgctgtggaattctcactttttagtagaacctttaaaaactcaagtgagctgtacaacgccccgattgctttaactccagtgaaccacggaggtataaagacgctagagttctttgtaattcttcagtgccaaaaataataaagttggaaacttggattcctgtttgactctactgtattaagtgatcagaataaaattactgtaaggctaatcttcaaccacttcatggttttcattcttgctttctatagtgaacatctgttgtttccacttgctctaaacccctttccttttgggattcagcccactactcatccatgtgattctgacaggagttagcaatgacagtgcagatagatagcccaggcctggccaagatcacaggcccccatcccctcttccacagggactggtccaatgcaagggcaggtgatcctgggaagaccagagtccttttatagatttgatttgtggaccctgaaaaaggaagttctctctctcccttttgaatcatggataataaggatgtggacttggagctgacactg

SEQ ID NO: 213813 - DNA, 762 bp, Homo Sapiens
  misc_feature (537)..(537): n is a, c, g, or t
ttttttttttttttttttcacagcctactatcagcaatagtccttgtttattagaatctgcagatgtccatattacatcaaatataaatatatattatatttacatttccttcttagctttcaatttaggtgagtgtatttatagataatgccactaacgcaccactattctaatcctcagtgcaactcataccttctttccattagatgctcattaatgtaagacagcatcttaaaagaggggtactgttcttttttaaaataaaaggaaagaaagggaatccaagaatggaggtctagacatttcctaagagatttttgttttgttttttatacttagaaatacttgaaaaatgtggtccctttttgtagtactagtctctacttggggacaagaaaatagaatatgcaactcagaaaggaaagagcccaaagacgagagaacctgcttgttagctcattaacctgtttagtaaagatctgctttaaaatgcctgatgctgtgcagtatcatacaaaacaatcttcagccttcanagcagctgatgcaccttctcagagatctgtttgtctgattaacagtctgctgccttggtgggccttggtcttggtcactttcggtcatcgatggttttaatgaattctactgctgctgtgaactgcatccaccaataggactcctctccagacagacagctagcataaaagctactgatatactgcacagtagacagcaacagggtggatttgcctttatcacac

SEQ ID NO: 213814 - DNA, 767 bp, Homo Sapiens
  misc_feature (636)..(636): n is a, c, g, or t
  misc_feature (663)..(663): n is a, c, g, or t
ttttttttttttttttttggcttttaaagcatttaataagtcaaaatcaaataaaagtgatttttaaaaagaataaatttacatacggtacataagcaagacagctgaaggtttctaaaatagaaacctggtgcatatggccccaaaacaccacatgctttgattacactcaggaagcatgagttgcctatttgggtgagaaaatcccatgttacagtgcgatcactgggcacgttttggagtaattccagccactgctatgtaagtgtttttaattcaggggtgtcttctacgttttcatcttctgaatatcttgtgacggtgcaggtttgagcaaaactggcatgaaatgagagctgttttagatgaagattgcaagatggatggcttggcccacagtggcagtgggttgggggtggaatgtggacaattaggaaaaaggcatgtcattctatctggctcctggagaggcagatagtcctgggggctttggtgtcacagttcccaaaagcaaggttggccagaccataggcttacattgtggtgagcttgccttttaaattaatctccaagatgccagatcgagagggatggtggacctagactgaagccaaaccagtagggggctctctttcnccagagagaaactccaaatgtcttganaggagcctgaaccataccctttgaaggggcaagcaatggtctgagacagagagaggatttaacagagcaaagtgctgtgtgagaaatgaatggaagagggctag

SEQ ID NO: 213815 - DNA, 744 bp, Homo Sapiens
  misc_feature (659)..(659): n is a, c, g, or t
  misc_feature (729)..(729): n is a, c, g, or t
ttttttttttttttttttcaattgagcagatttaatttccctgagattatattccataagtgatacaaatactaccccttagaccaggggttttcaaagtttgctgtgcaaaaaatcagctaggtatcttattaaaatggtccccaacatgtctgagctggagcttcagtgttcacaggtctcaggtgatgctgatgctactggtctctgggtcacactttaaagaggaagacattagataaagtaaaaggagtcatgagaaaaggtgcacctaaaaaacatcacataacaaaatactaaagtcacgagtggagaataacaaacatgtctctctactctatattctaagatcagtctttggttttctatatttccatgtgtctgattataaagactcattaagtttatgggctttttaaacttcaaaaataaagtgctacgatttttaaaataaaaacacgactataagggcttttaagaaacttgcctgtttctgagagtgaaggacaatctttgagatccaaactcttctgaaattctatttcattgcataaaccctcgattatttattgccttttgagtctaatctccatgagatttaatttgctccttaagggcaaggccattttatatattaataatagtttggtctcctcganagcacttaacatttacataaaagttcacaatttgtaaacctaatcagaagtccatttttccttgcagcangataggaaaaaggac

SEQ ID NO: 213816 - DNA, 708 bp, Homo Sapiens
  misc_feature (667)..(667): n is a, c, g, or t
ttttttttttttttttttcctgagacaaagcatgtttcaaatacgaagcagcccctcaggctgccataatatttaggttttgcatgatcacttatgacataacagattaattatacataacatacttttatacattttaaccctgaagataagaaaaataattgttgcttgaaaaaattctttcaggcagccatttggttggtgtcaagagaaactgaccctccacgagtttagtgtctgccaggtcggcatcatcagctcaagtcagtgaatcaggtatgtgacacgcttcacagcgactgttccccacatcctggcaatgcgtcttctcctacagtacaccagatgacgaggcatttccaggattacccttgcctgtggctttcccttttcattttttgttgctggattaactgtatgacttagtattatttcctcttctcccttcttctatggccttccattttagttactcataaatcctttcagaatatcctcagaaagctccataaagggaagctctggagatggaaaatctgagggaaaagattgggtattggaatgtacttggctttcctggcatctgctgcaaacctctgcaaggctgaagagggtatagcagtttctgaatgcagaggcgagctccgtaactctgacttttccacanaatcagcacccacatccagctccttttctactggacctttt

SEQ ID NO: 213817 - DNA, 652 bp, Homo Sapiens
ttttttttttttttttttaaggaaagttcctttaatatttacaataatttacagccattttttttgtaaaaaggcataatagatcacaaacaggaaattcctggctattttacagatataagtacagaatttaaatattcaagcttgtgatgaaaagcggcaaggtggtcgcagtgtacaatgtaaacaagtagctttggaaatgaacaaagtccttgagtgtttttctttattaagaaagaactctctttcattccttcctgaaacatgatcacaggtcagagtaaagttcatatataaacataatttaaatggaggtcagtctaaaatcactgacttaaaaacagttttatccagcctgtatgggagggcagtgttgaggtccctgtaatagtaaacattttccatttctttaaaaaagaaaacaaaaaaaagtactacaattttgtagtacagtgcagcataatccttaaatataaaaatattttctcttctgttgggataatagaccttgcatcctggaaagaagtaacaatactgctactgatagaagatctgtttatatctttcaagtcatgtaaggcaattactgtgttggtttatgatatatggctaaaagaaaagtccagaaagacgaagtatccctcgtgcc

SEQ ID NO: 213818 - DNA, 706 bp, Homo Sapiens
  misc_feature (481)..(481): n is a, c, g, or t
  misc_feature (503)..(503): n is a, c, g, or t
ttttttttttttttttttagatacaactgtttttagaagattctgaaagaaaataggaattgacacagtaagaaggaaagagaagatggagtgggtaaaatccagatcttatagccagggactttgatggagtgatggtgaagaaactgagaacttgcaggttaaaaacgcaatgtacagcaataagaaatcaacgttatagtccatgtccctcttttatatgggtgataatttcaaagtactatagccagagtcccaggaaggttctagtcacccttgtaccccaaaagccagtctttccttaggctctgagctcctcaggctagcgctggtcccagtctgcacatctcagaccataccctcttcctatacaggaggtggggcaggctttcagccctcaggtccagtgtggggagcggcaggagcaggagggctgggatcctccagctgcacatcatgcaggtgcactgtgggggtggtngggggtctttgcccacaccctnggtttgggtcggcttggtcagggtggtgcctgcgtacgtgcttgaccacctggaacttttgcttggccttgtagttgcagaggcggcaaaagaaggggtggcggtcggtgtgggtgagggcatgatggcgcaggccagcagcccagcggaaagcacggtggcacacattgcacacatagggttttggcctcactgtgcttgcg

SEQ ID NO: 213819 - DNA, 468 bp, Homo Sapiens
ttccagagaacaagacatgaacaggtttatttacagaaaacaatgaattctcatatatctaacctaaaatatagcagattctttccgaacaagtctaatgtagacagtaaaattaacaggctaaaaattaagctccatcaaacaagatgaactctgagagaatagatggggcaggccgccatctttcctgttcaggcaacttagtcattccagcctgagggctttggagagtataaaccgacaaggggcagaagagatcccacagcacagctagctgctttaccaaatcatggccagaatgcttctgtaagcaggcccccgaccttgttgcacatcactgtacaggacctcccaaatggggcctccagctaccaccaccagcattccttggccaatagaaatttgaagtgttcacgggacagagctcccagagagaggggcaggccaccacctttgctgtttgggtga

SEQ ID NO: 213820 - DNA, 694 bp, Homo Sapiens
ttttttttttttttttctggctgacaaagatatttattgagggtttactgggtacagcgagaagggctgaatggcttgggatgcagagagagacccctcccctgggatcctgcagctccaggcccctgtgggtggggtgggggctggaacctatgaacattctgcaggggccactgacttctccacggtgctcccttcttgcataacctggcagctgtagcttctgcgggacctccactgctcgggcgtcaggctcaggtagctgctggccacgtacttgttgttgctctgtttggagggcgtggtcttctccacgctctgggtgatgagggtaccatctgccttccaggtcaccatcaagattcccggataaagttattcatgagacacaccagtgtggccttgttggcttggggctcctcacaggacggcaggaacagaatgaccgacggggtagtcttgggctgacctaaaacagtgagctgggtcccactgccaaacacatgcttcactgaattatgcttggattgaaacccccagggccagcatctggcgccagtccaggagccacgctggagcaggaacctgctgggtgtgaggggcacagggctgcagtgtgtaggctgtgacccaggcacagggcaggggggtggccagtatcccagtagtgtccccagtagtgtctctgtgcctg

SEQ ID NO: 213821 - DNA, 742 bp, Homo Sapiens
ttttttttttttttttttgcagatatgaagctttaattcaccataggcatttctccaaccattctgtacattaaactttcatgtcttcacacatatacatcttttataagacagttttcttagcaatatggtactctgtaccataccaacattccatttaactagttaagggtgtattatataacatgaaccactgattaaatataaatacagaagttgaatacataggttagaaagtttaaattttaaaaaaatttaagaaaggctaaataccatgaaagtttacatgtattctttaattctagacaccgtacaacagtgacaaccaattacaataaaatcacaattgcttttagatgacagtactttcagatttctaatacccaattactttcatttccacaatgtcaacttcatgctgcattttcatttctatagagcagacaagcttccagactgcagaccaagtttcttgtgtaataatactactatcttgatcatgaccacaggaaaccaattttatattccctgtactatagagatgagacattatttggtgtatatgaaactcttcagtggtggtgttcaagaatattcaaatagtagctgaaaatagggtttgctagagcagtccacatatttcattaaaagaaaaatgcccagtcaaaacatttagaaataaatatatagtacagcctttccctctcccagatactacccaggaaaaaagttccaagctgac

SEQ ID NO: 213822 - DNA, 712 bp, Homo Sapiens
  misc_feature (676)..(676): n is a, c, g, or t
  misc_feature (693)..(693): n is a, c, g, or t
ttttttttttttttttttgcattttgaatatttattgtccttgtttttaacataatttgcaaatttacataattataatggctgtgtttgacaactggcttgcaacaaaattcttgaaaattgaataattggcccacctgggctgggatgagccagctggatcacaccgttgccccctcagcctctaggaggcctcaggattatggcgtccatcttatgatactggccgaaaggagacagtcttggaggtgctgcttactgttgaacttccttttggaatgtatgggagaaggcagggaaaggaatctttaggcagactgccatccagggactgctattctgttcactgagattcagctgtgaacatctgttctttcttcctcttctgtctactgcatgcaggcccggaagctgagcgttagtcaaaggtacaggaagggaaaagagaagagggcaaggcccatcccccaagaaaggaagggctctgatgcagagggagcaggagctgaggtggagacggccactgcctctctcaccctctgttccatccctctgctcaagaaaaccaggcttagcagagtgggacagacgctttttattggtctggctggcgtgcctagtggaaagctcaggcagagcttcctatcttgccctggctccatcttccctctcctgngagttcatcacacatcncgagagggaagcgtgtcct

SEQ ID NO: 213823 - DNA, 750 bp, Homo Sapiens
  misc_feature (611)..(611): n is a, c, g, or t
  misc_feature (726)..(726): n is a, c, g, or t
ttttttttttttttttttaaaataatagttctttattccatattcagctaagaaacagcaatatgaaataatgctgatttttagtttgtagccattggatttgctggagttctttctcattcgactttggagataaatattcctgcagcttccttttctttccccaaagtcaagacctatgactactatgcagagaggtctatgatctgggaaagtaattggttagtaaatcatagagtaggatgttcgttctatgacaacatcaagtatacttgtgggaatggtgacaaaaatatatacaccatgataacaatggaaagtcagccctttgctaagcaaaagcctagcaaaggcagtaaaatctggaatgcaataatcttgctagggatcaatgtgtttttatgggagggcatagcaatacaatggtgagatgaggatgatgacaaacacacaggttgcaatctagtgaccagagccctaagtgggaattccacttggagaatggtctatagttttctgggagaccttttttatgtctctgtgcttcgggatctacctgtatgacagaagcctggctgtggctgctgccctgaaggaagtaagtcttctcncccagatactatattctactgatctgagggggttcactgcttacgagattgctacaagaaagtcttagttaaagaccaatgggaaaaactataaaatgagattctgattggcganatgcttatgggtatcttgccagga

SEQ ID NO: 213824 - DNA, 787 bp, Homo Sapiens
  misc_feature (641)..(641): n is a, c, g, or t
  misc_feature (695)..(695): n is a, c, g, or t
ttttttttttttttttatgggcaaatattagcaatttaatattatataaacataattactgaattattacatacagcttgatgtcctttctatgcattaaaaccaaacaaaataaaggcatttttaccatcacataagaaatgagaatacacacgcacacaatttaaagtgataattatcttggcggaaggagcgaaggtgggggcgttacaggatgagatatgacagaagttattgttagagtcctagttttgaagttgggtagtaagctcattggtgctcgtgacattattaaaagaaacaaataataggggatgcgtgcatccatgaggagaaacgtggcatgaacaataggtataaattctaactctcacctccgctgtgaatgaggcaaagatctacagcacatttacttgatcacacagtctgtgaaacaaagacacgttagtggccacggtgggctgtgacaactctagtctcacctcgatgagtcaggttaaaaaggatattgacacttctcttccttaagtaattttcagctatgagtgtgaagttataggtttcttgtgagtcttgagttatttgccaattacaccagtttttgtgtgtacaaagtttcttttccccagaaaatgattcanataaagtgtagctttgggaaggttgtttagaccaccccaaggcagtgtccgtcncaggatcccaagtacagtgcaaagtcttgaagtcctcggtttcacaagaaaagtccttgggctcctcaagtacttttgagacaaaaagacga

SEQ ID NO: 213825 - DNA, 775 bp, Homo Sapiens
ttttttttttttttttttagcattttccaataaagtttattcaatcttctttaattagtgatttaagatggtctaggtgatgctctcctatgaaggattctgcttgattcaaagcttttattttcaccaaaataagaattatttcttcgacttcatccctgaattcacttctagataatttatgtgcagactgcaataaaaactgaatgaagttttctagctgtggaatagatgtcctcatggcagaattttcaaaccatttttctggtagacatgctgctacctggttgcactttttaaccacatctggcccaggtgtggcattgagaagtgctataataaggtaacgatttagcagcttccctagtcctagttcttgcaaggtgtcatctgtaaggagtccattccaaagaagaatattgcggaagagctttaggcctgaccagaactgtctttcttggaactttgaatgaggtgatgttttgttttctacagcactctttggatacagaggaataaaaacatcatcttctactgcctttttcattcttgaaacaatggatttaagtaaatcctgtctgcttttactaacttcattttcacaagtggaatgttcttcaagaatcactctgcaatgtgttattaaacttgttgtctgtgaggttgacaaaggatcccaaaggaattctacaaagtctgtaagtcggggaataatgttttgttgatgattgcagacaagactttttatctgaactacttccttcttttgaatctc

SEQ ID NO: 213826 - DNA, 581 bp, Homo Sapiens
ttttttttttttttttttaattacaaaaaaaattttattattacaaaacatacaatctcacaaaggtacaatttgaaatacggggacacccttctaactaccacccaggtgaagaaacagaactttgtcaggcaccccagaacccctccaagtgcctcatcacaatgacaactccttccctctagaagtagccattattcttgtatagtactgactgtgtttctttatggttttatcttattttttagagacagggtcttgttctgtcacacaagaacaagtggacaggtggagtgcagtggtgttcatagctcactgcaatcttgagctcctgggctcaggtgatcttcctgtcttagcctcccaaggtgctgggattataggcgtgtgtcattgcacttgacctagttttattttttttttgagatggggtcttgctctgtcacccaggtgttgcccaggcttgagtgcagtggcgcgatctcagctcactgcaacctccgcctagccaacaagagcgaaactcctcaaaaaaaaaaaataaaaaaaaaaaaaaaaaaggcctacagccgcctcgtgcc

SEQ ID NO: 213827 - DNA, 590 bp, Homo Sapiens
ttttttttttttttttttgcaaaataaaatgtttttttaatggactgaaaaagcaaagtgagtcaccttcgtttttaaaggtgagatttagcaaaggaaggattagaagcagttttttactatttacaaaatgtcatttagagtggaggtggccaccttcagtagctgaggcaatgtctttcacgtgagatggccacagaagtgtggttcctggaactggctcacaaaggccacaggctgtcctgggtgagggagagttcctctgagggagcaccaaaaaggctcagtcttctgtttcttcatacgtcgtctcgtcaaagggcctgtccagtagaggtaccaaccgatgacgggaatacttcagctgcaataggtccccaacttcatctatctcctttaaagcagtatcaagtatttctttggtatgagctgctgacaggcaaaacctggctctggactcaataattggggtggcaggaaatccaaccacaacgacaccgatgttccgcttcagcatctcccgtccaaaggcgccaattttggcaggcatgtagagcatcaaaggcactactggagagtctcctcgtgcc

SEQ ID NO: 213828 - DNA, 722 bp, Homo Sapiens
  misc_feature (21)..(21): n is a, c, g, or t
ttttttttttttttttttggnaaacattttataatttatatataaaatctcagtaagaaaccatgtaaaatgacagaaatatccaccttacattaagagtcaaaataaaaaaaaaaacccatacacactgaatgtaaattttaattataaaacaagaatatgaacaaaacattttaaaataatctcaattatttggcaactcatcacatcattgcaagagacaaatttgatcgtaagaagtttaatcttatgaaaaactgaagttggacagtttgctcatatgagagttaaaacatgtttaaaaaaacacttggcaataaagccagtttctatactgaaataactgtgtataaaacaacataaaatcctgaaactggatagacaggagggacctaatcttgaatgcatttctcttcactgaaaaagacaatatggaaagagtattggtagaagcttcagaacagcacagaagaggaatgaacacagagaagaggaatgaagagggatttctgctgcaggtgactgacgcaactttacctgaaccagaacctgttttgtgtcaacgtggctggtagtaaagtcacagatgcaagtataatctaaaaacaagttacattcttaaaaaacagagccacaactgtgaacagaaaagcaatgaagaacctttctttagctaaactactttacttggatacatgcgagtttctgccagacctcgtgcc

SEQ ID NO: 213829 - DNA, 691 bp, Homo Sapiens
ttttttttttttttttttaaaaaagagtatatcactttattttcaaacttttatttcatacacacacacacacctatgtaatgtaaaatatgagatataaaatacttctgtcaatgagacaaaaaaaagttaacaagcttttgttagcccaaatccagtatagcctagcaccatacgtgaggataaaaaactcataatatattttttacccattaattcagagactattacttaggcagccatacattctgtaagctctacaaaaaagtcaaaggaagctataaggttgttgctaaagcttatgtagaaatttttagtccaggacgtgctcctagtatcttaaacaggattctaactgcaatgctgtgccattagccatctgttgaagaaagaaatcacaggaaagctttgttcctctaagtcattcctccgtgaaatgacagaggacattacaaaggccattagatttgttcctaacttctgactccagcagcaactaccaaagaaacatcagaaatgttgatgtacagatcaactcagttcttgcaggtgtaggcagaactgagtctttaattgaatcaaaagtctttaattgaatttactggtgatgaaacattaaattctcaaccaaacttagatcttcagaactgtatgagattctcattttttacttacctaaatctgttattac

SEQ ID NO: 213830 - DNA, 777 bp, Homo Sapiens
  misc_feature (686)..(686): n is a, c, g, or t
  misc_feature (712)..(712): n is a, c, g, or t
  misc_feature (718)..(718): n is a, c, g, or t
  misc_feature (742)..(743): n is a, c, g, or t
ttttttttttttttttttcccctttcaagttgttgcccaaagactgcttctaagaacaacacagcaattctagactcaacatacaggagacatggaggtattattcctttcaatctagggatctttcatgccaggtccacagaagcatttaaaggaagtattgtacttgattgtattagatttgaaaaacttgctaccaccatgtgaaggccctagctccaggcctgccctgctatactttggcatcctttgggtagaaagcctctagctacttctgagctggtaatggtaaggaaactgaatattatttcacatgtttcatctcacagcctttttggctttagtcatcccccagagaaacatattaggctcttggttagcctctaggtaaaatctcaaggggtatggttttctgggtcaaaattagaagcacagctctcttctaaagctctgggtggtcagtgtgagataatggctgggggaatttagccctgccattcaaatggagatggtactggtggtgggagccagctacggctttaagacagacttaagtgggtgggtggggaaggcaatctagctcactcagcagggaaaatggagctccccaatggataactttttatgctcataaaccctgaaatagtactaaaaatgagaaaaatccccaagacttctctgattcncaggttgggattagctgagggaatangaacanagaaccagatcctacttccatganngcatgctggagtcagtattgtctccagtgtctac

SEQ ID NO: 213831 - DNA, 785 bp, Homo Sapiens
  misc_feature (583)..(583): n is a, c, g, or t
  misc_feature (673)..(673): n is a, c, g, or t
  misc_feature (676)..(676): n is a, c, g, or t
tttttttttttttttttacaaagacatttattttccccaaaatatacccccagtttacaaaatccctccgagtcccacatttaaattagaagtcctcacatcttccattcctggggcagggagagatgacatccggaaggcatcagaacgtctgaagtctcactctaccagaggccaggagctggccagaggcaagccaggaaaagactgccccagccccagaatagcaccatggtgggggtggggggcagtcccctcggtgtccccaaagcattcctggccctgccctgccccaggctctgccttttctgctgctatgaaaggtccagagggccttggtgcctgcccacctgcccacacctggacagacattttggacaccaccagattctctagccgtggcgaggggctatgtccctctctccaggtttccgccccaaccccatgctctgggtaagaattatgggtgggatgggggtgaggtatccaggaagccttgagccacagaggaggtgtggagcagggagccaggcaggagccccctgcaaaccgcagggtgcagtgtagttagttgtctgtctcncagctggatggggagtccttgagggaggaatttatcttccacgcagggcccccagcacctaacacagtgctgacatctgtagttgctcantanacatcaactgaatggatacatgaaaagaaaggaacaaagaggtgagaaggcagagggacagaagctgacccccaggggccccatcacagacccctggagaccagtgtga

SEQ ID NO: 213832 - DNA, 710 bp, Homo Sapiens; identical to SEQ ID NO: 55579
  misc_feature (83)..(83): n is a, c, g, or t

SEQ ID NO: 213833 - DNA, 720 bp, Homo Sapiens
  misc_feature (681)..(681): n is a, c, g, or t
ttttttttttttttttgtgggcaaagtaggaggcaaatggaagttgaaaaacaggctttgagtaacaactaattttgttagaatcatgaccctcattgagaacattcacctcccaaacattggtatacgcactgcagcctggtcattctaatttgattcaacatttaatcattattaatgcaagtaggggaagctcttaaaaataagtttctatcttcttaacttcctttaagacttcaagctaaaagggtctaaaattcctttaaatcactgtaagtcaaaatcgttttctgtgttgtcaaagagtcaccaatgatttgtttattgagcccttcctgtgtacaaacacggtggcaaacacacaatggtgtaaagcctcatccagtcatctttaaggagcttgcaagagaactgagatctctttgagtgcctatacaaccaatctgtttttcactttcaatacagtattcaataaactacatgagatatttgatgctttaatacaaaataggctttttgttacatgattttgcccccattgtaggctaattgcaggtcacaactgctacatcagccagccacaggcctccttggaaggaactgtgcccccaaccctctcctgcactaagcaggtccagagtgagtgataactggaagggtccattcactggaactcttganatgtggcttgatgacaagacatcctgggacatctcttca

SEQ ID NO: 213834 - DNA, 611 bp, Homo Sapiens
ttttttttttttttttttgaatataaaaatattgatttattaccaacaaagcaggatttcccagttttttcaattacacacacacaagcacacacaatagcagaatgaaattacatttttcacatctaaaggtttatacctcaaagaaaataggcatgtgtccaaaagacaattagaaagcaagaaatctttccttttactttgaatatggaaaatcttttaacagagactctttccaggcaaaccaatgaagatttaggcatagaaaatgcttgtcaccttaaggttttaaaatataactgtattcaccaaatcaagtttttactagaagtttttacgatttttatgtaattaaaaatcaacttttggccgggtgcaggggctcacgcctataatcccagcactttgttacttaaagttctatgtcatacctggcaatggcctaatcttcaacttttactttcttcatactggctctgtctcttcattcatacacacacacgcacgcacacacacacacacacacatgcacattttttttcttgggagactttttttattacttacatttcttttcacctgtaatgctttgtatgatgtgtgaaaaaaaa

SEQ ID NO: 213835 - DNA, 572 bp, Homo Sapiens
  misc_feature (543)..(543): n is a, c, g, or t
ttttttttttttttttttcacctaaattgtttttacttgcttcaccttaaatcagttattcggttcctttgaagaacatgtagctttagcaacccccaaagtgaacccagatacccagaactactgattgttacatcagagtttttgaaaacgccaatactggaaacaggccgacagttaaggagaggcaggcctcaaactaaagcagaaccttctcaaaactacttatatttcaagagatggattaagcgaaaagagctgtacaaagaaataagccattttctatgcgcctgttatatgcaaggcactgcactcccttgtcacttgttaatttacaagaagactcgccggtccagggaagggagaggggaataggtgcaaggtttgtggagggcggcaaactgcactccatgtggcgcgaggctgcgcttgcggagatccgggttctggtgcctggcgccggcagccagtaggggcgcgcgtcctgcgcagttgccgcgcgcggcctcctcgggcttcaggccgggccaatcaggaggcggncgggagggggcgcggtaccaggagggaac

SEQ ID NO: 213836 - DNA, 736 bp, Homo Sapiens
ttttttttttttttttttcaaaataattaacctttttaattttttaaaggaaaaatactctccataggaaggcatttctattttttgtccatcagtagccaaatggaacttgatataaacacttccagtatgccaactttggtttaatgcacaactttgaaaataactcattaaaacacacatcaagatgctactaacaaattcattaatatccaagattcattactgtatgtcaaaggtcatccaggattaacattttcattacaatgaactgtgaaattccaatgaaaaatgtttgcctgaattaaattatttaatctctcaaattggaagtctagcactcttgaaaatcaaattcacacacacacagacacacacacacacacttacaaactgcacattaggacatgagggcaatttaatggaaaaagaaaatagaaactgaaagggcatttgtaaaatgtaggatatcatttggacaactggatagagtaggcagaaaatcctaaaggtgtacataaaaaaatagccagtaaatgataggctacagaaaaccacactgaaacatttgatgaatttcactgcagtaaacagacttggcaaactgaaacactagaaccatgactacaagcctcacttcattccacacaaataaaatctctaaccattataagcacagatgagaatcctcatgcaacagaggaaatataattatttttaatttttaaaaataaaa

SEQ ID NO: 213837 - DNA, 765 bp, Homo Sapiens
ttttttttttttttttctcaaaaacaatgtttattttaacacataaaatgtaccatctagcaccaatgcctgtaaataccagaattccatccggttactactctttggaacaagtatgattaaagtccttgacagattattgtatatgagcgaatggcttcataacataaaacagagagacacagaacagaaattcatttggtatatacatatagaactacatttgtagttattcaaaaacctttcactgcttcatgtaaacaataccagtatttttaagccagattttcctggaacatatacataaagtgcatgagccacgtaagtgcataagcctgaaactggtctttctattctcactccatgctcaaatgaaaaatctgtaaagatatcttttgttcctccaatcttctgatttgtcttcttagcaactcattacagtacaatttactgattaaatcacatagacatgtatggtggaggaaaagaaaactttggccaatataagtatacaagacaatatctcagttctttttaaaattaaaagaacatttcagtattaaagatattttaaaagaaatgaagtggaaaatacaaatgataaatattgtataattatgtacaaaatgaaaaccttttaaactctgaagacaaactaaaatttactagtttgaatttaaaacattattatataatagcagatagttctcttcagaaatttatctctagcttcctgtaaaaggtccagtcaaatcatgttggctg

SEQ ID NO: 213838 - DNA, 690 bp, Homo Sapiens
ttttttttttttttttttaattgcagaaagcccctttaatgtctgtggaacagaagaaccatgttggatggggaaagcaggggcaggacacacgtgtcgcgtatctatggggtgttatcagggttatatctgtgacaggatcaactaacttactggctctcatttcacctgataacataagaccctccccgctgactacacacagtttaggttatcactccttatgactcctgctccctgccctgcaccctagattctctgggactcaccgcagttttcctgactctgatggaatgtgctggagtctattacgagccctgcttttcagaaggtgctcaacaggccctgaagatgtgcatctggccgatggtgggtcaaaaccagagttctgcaggctgagatttttccttttattattattaaacttggctgtgttttccttcggtggctctggcatcctatgcagtagtgctggacatttgcaggcagttaaggcccagtacagcaggaagaatgatttctgtgactgctggtctgtgcaagccctccagctgcgggagcaacctcccttgaggagaagttgtgggggtgggcctggtggggagggcgataggctgggacagaaggaaggatggaatactggacctggtggccaggggtcaatgggatgtccttctcaccagaagcaac

SEQ ID NO: 213839 - DNA, 754 bp, Homo Sapiens
ttttttttttttttttttaaatcagatttgatttttttaattcaaattgacccaaagcaaaacttacattaaaaaggaagaacaaaatacattatgatataacacactaggagttacatgaaagctaaatttgtgggcaaatggccttatcccaatcacattctgggctcatgagcactcctgcaggaaagttagaatctcaatttcgtatggtccacgccggtcattaaactacacattcttgtctcttggggtgtgcatctgacgagtcatgctagagtccctcatgctccagatgtgtactcttgctactgccagaacgctggattctctagtggaaatgctgttccaagcatgactgacaatgaattaaaaaatgagacagtcaagtcctccaaactaacaggcatggattactgtgtagtaaatagtttagaaatatgggaattaaataatctaaaaaacactcttactctgctgtacatttataaacacaaatatttacaaaaaaaaaaaaacacaaaaccttgttttcgaaagatgaggtttgcagttcattaatgatcataatcttttgtaagctggtttctttggtgtatttgccaaatatatttttataaaggtttagtaataggcttaaataataaatttcaaaggaaacataaaagaatctgacaaatttgaaaatattctgaacattttctgttctgtttctggaaaaaacaatcggttgatttttctgaaaatatctgtt

SEQ ID NO: 213840 - DNA, 735 bp, Homo Sapiens
  misc_feature (648)..(648): n is a, c, g, or t
  misc_feature (682)..(682): n is a, c, g, or t
ttttttttttttttttttaatttgaaatgcttgtttatttttaatacaactctaacaagatgaataatctgtgttactacatcattcccataggttatagttgtgcatgatatttataaaaaatagaaaagaagaagaggaagcaaaagaaaaagaaaacaaaatttaagagatgatagtaggaaaaaaaagtttcttatttctcatatgcatgtacagctcaataaacatgttacctgggccaggcatggaggctcaagcctgtaatcccagtattttgggaggctggtgtgggaagatcacttgagctcaagggtttcagaccagcctggacactatagcaagcccctgtctatacaaaaaatagaaataaaattagttgagcatggtggtgtgtgcctgttgttgcagctacttgggaagcttgagcccaggaattcaagaccagcctggacaatataataagacctcatctctacaaaaaaacattaaaaaaattagccaaacatggttgcacatgtctgtagtcctagctacttgggaggctgagatgggaggatcaattgagtcaaggaggtcaaggctgcaatcagccatgattgtgccactgtcctccagcctaggcaacagagtgagactctgtctcanaaaaaaaaaaaaaaaaagttaaacaaaaatttanaaagaaaatgccaacataatccatgattatgtcttttctagcaatctaaaata

SEQ ID NO: 213841 - DNA, 657 bp, Homo Sapiens; identical to SEQ ID NO: 46378

SEQ ID NO: 213842 - DNA, 485 bp, Homo Sapiens
ttttttttttttttttttacaggcttaaaagcaaagtttattcctaaaggtgcctgcaaaatagctatacctatttgccttttcaccgtaagcagctttagggtgcaaatgcacaccaggaccccctcagttttttggagcagaagagccatgttttccccttggctgttatacattcgcaagaagcaaaataaccgtgactatctgagtatgcaacccccgccccccacccccaacagggatcaaggaaaatgcatccgaagcttcccttttcctttccttttcagggcatcgatggctcggtctcactaacgggacatcacacagttaaatgtgcaacacgccacgctgctttacggcgacgtcgtttctgcgtctttagaaaaagcaccccacgcgctcatgttcacggcttacggttagaaagatggcgttaccgttggcgggaaggtaggtgaaacgctggtactggcttccctcgtgcc

SEQ ID NO: 213843 - DNA, 756 bp, Homo Sapiens
  misc_feature (718)..(718): n is a, c, g, or t
ttttttttttttttttttgggatttcattatctcagtttactttaatttgcttgtttacacacacgatctgtgtgtacataacagtggcaagagccattctctaaatacaatctggtacccagactatgacagatgcacgtggaaaatgaggcgtcagtgaattaatctcaacatagaaaggcaaaataagcatggcagtattctatgatcacagatgcccccagagcctgggggtaaccgacacttttcaacataatacaggacaattttaacaaaagacccagactccaaatggcacccaaaatatattcgtttctctgccttctctagaggagtcagaaagttctaaaggcttactcaagaaaaaggaggcagggagactatggcctgctaagcacagatgctgagcactttacatgcaccatttctcttcatctccacctgacagacgatgaaaacgaggtttgccatgatcacacagctatcaggagtggtgccaagatatgaacccacatctcatgtttgcttgagcccaaatcctttcacttatgtcaggctgtttcacataggaatagaaagcatgctcccaaggaagaggcaagggggctaagcatggacaagtggcggaagcctcatcgatacagaaggctctgcaattgacactttccacatacagttaatttagtgctgagcccgcatcagacccacgtgggatanatatctggagatttaagtgtcacacatgaacttctggg

SEQ ID NO: 213844 - DNA, 711 bp, Homo Sapiens
ttttttttttttttttttgcaaatcataaggaagtttttattgggtcctgtacagaagagaaatgctccgttgtcaaaaaactacaaagggatccctggctctgggtgtgctatgaagacaactccctccccagtgagcccagggaacaggctggatgctggacaaagtttgggagggagctccaggcccagggtcctccacttggggtctccccctttatgtttgtaaaaaccgcaggattggagtatttagaggactctgtccccctgcaagtattgccgttggatatgaaacacacagagcaaaaccccaaggtgacaaatgagtgaaaacctaaggtgacaagtggacagacgccccccagatggaggagacactggctagctggcgacctctgcccctacgtaacttgtcagtccttgaaggcacagcagcattggccagagatggcccctcccgcggccagggctggattgcagttccctgccttgctcacctgtggccacagctcatacccccagttaccccacagccagggactggaggggcctctgaagcacagacaggcttaggcagcctcccacccccaccccagcagcttcttctgggagtgggaccctatctgaaggatgaagagatgggcttggccacctgagggccagaaggaactgggcacaggcaggctctatgctcaccctcgtgccgaattt

SEQ ID NO: 213845 - DNA, 729 bp, Homo Sapiens
ttttttttttttttttttaatagaaaacatatttttattccgtactttaaaaatatagactttctagcaacttataaatttctattataataataaattgatactttgagccaagaaaacaatataaccaaaaattcatttgttccctttgtttaggggtgttttacatttatgcataattttgcttttataaaagatgattgttacaatcaggtatacaactacttggttatgtctaagttctgtctcttaaaatatgttcttttagagaattcatttaatcatcttattcttttcttcaattttctccaaacagtggtagaagtactatttgatagacagaataaagaaaattgtttttggccacacccagatcatactgatatctacagcatagtcctggctacaggggagctcaactctaactcgtgaagcgggcctggtttagaaagtaacaatgaggtagtaactcatgatagtgctagctgttatcaaaaattaacaactttaggtatttttgttttgggtttttgcggtttaggtacatccaaaatttcttcatagtctgcactcattccctttgcccagcgaccaactgtgaccattcgctctgtaaaggaatagaaaaatcagaatgttagaaaaacagtaatcaaatgcatccactcagattgttattggtttgggaaaggaactcattttgatatgaatatcacaaggagggaagat

SEQ ID NO: 213846 - DNA, 793 bp, Homo Sapiens
  misc_feature (687)..(687): n is a, c, g, or t
  misc_feature (698)..(698): n is a, c, g, or t
ttttttttttttttttttggtgtggcacacgtttaattctgtggccaggctagcctgtctccaaggcctggtggacagcacgtcaccagaggctgccgcaggagcaggcagggccagccctgcaagaggagtgcaggcaaaggcgggggctctgaagtggctgctggaggcagcaggccccgggctgggagtgctcagtagccgtcgttagcccaggtgacctcgtagtcggggtacttggctttgattttctcagttgaaatggcgtgctgggcaggaccataggccttgatggtggatcctggggcctgaggcgcccagagggacgcacgtgggtctcatctgctggtggtttttgtgaagagcacaggtggggactctgagctccacccaggtactgactgcctctgggggcccagggcccaaagtgctggaggacagctagagcccagcaaggcctcccaaggcagggagaggagacagccggccatgcctgggggtgtccgtcccacccctcaggtctggcgtgtgctccatgggggaatgcaggaacacaatgggccctggagggagggctctgccgccgaccctgggagaaccccaggaagcctgcgtgctcagctggggccacgggtcagggcagcaggctcaggtgggcctcgaagctggtactggggcctccggcanggcgggacggngctgcggctcaccatggaatagccgtacacgtgaatcttcctgtcctgactctggtgggagatgcgcccgccgccagacactcacagtcgcagct

SEQ ID NO: 213847 - DNA, 519 bp, Homo Sapiens
gctaataaaacagttaagacaattgtccattttatttgttaaattgctaaaaagtcatcaggggaaaacattaacaaaaaatgaaattgacagatttaaatatcaatgaaatccatgtttcattcctacactgttatgtgcccaaaatgactatctcagggtaagccacctggcatccctgagttgtatgggaaacatcactcacagcaccagcttcgccagggcacatggggtgtgcactgacatgaaccctggtaggagggaggggagcagagcaagtagagtgtacaatggagccaacacctaaagtttgctctcatttgacaatgaacacggtgagagggagccacttactggtaaccatgcagaacatgccttctgcagttcatggagaggctacatgggacgcaggcctggaaattcagcttcctcaccaccaggcgtggttagatcctccccactgacttgtgcgctggtaagagaccatggataatgcaaagtggagcatatcaccatgcc

SEQ ID NO: 213848 - DNA, 394 bp, Homo Sapiens
agactacatagggctcgcgtggatttcaagggaatgcctgtgtttggacaagaaacatatctgtggtggccagcatggatgaatatcagaggggtcccttggatatcttggttttcataaaactctgggacttttgtgctactctatgaggagaagtgcccttgaaaacaaatgtctatgcagctaatgggataggaccttggtgttagatttgataaaaaaaataaataaataaagtaacatgatctttctagtacaattatatctgtggtatgacaatcatactcattatacttttgtatggcttgactcttttacaatgagagcttttcaaatattctcaaattaaaaacaaataatagccatttgaactaggactcagttcagcacctag

SEQ ID NO: 213849 - DNA, 458 bp, Homo Sapiens
caaaacacatgtaatgtattatgtattacacattatttcaaactgttcttttccatgcaagaatgtatcaaacacttcctcaacattccaactcttagatttcaaccagaggacattttgaatctatttcaaatttatttacttataggatagtgatctaaacagaacatcagaggccaataaaaaattttatacatcaaactttttggcttattttagaacccccaggaagagtccagtgtctttaagaggaacttttatatgtggtggggtatacttcaattaacaggtaaatgcaaaaatgctagaaaaagacagctgagtatatataagcaaattcaaaactttaaatatatatagactataccatctggaatgccaaaatcttctctcaatagacatatttttcagatatacttagggtactaacgaattagtagaaaccatgaaaagacctt

SEQ ID NO: 213850 - DNA, 529 bp, Homo Sapiens
cagaggcaagtagcatgtaaggtagtcggggcgacacacagctgaggagcaaggtcccagagcttgggaaaccaagggaggacacacccaggggaagcatgccacaagatgcagaaggggcaggagggcaccaagaagcacagagcttctccacaggtccaccacccagggcagctggcagcttgtggggcccaaacccagaaacagaaaacatctgattctcactgaaatgatgcccctaccccagggagggggaatgtgtgcccctccctgccaaccccaggcactgccattcagcctgggcagccagtgatggactacagatgggcaggacagttacctccttcaggtcccagggcccagccccctctctaaagcaggaagggtgacaatgtattttaacatatggaccatgttggagggcatgatgaggctggacctgggagtagagagagcacttaagattcatacagaaagcactgctgatgaggcagtcatggaaaacctcacccaaccaaggagaaaatta

SEQ ID NO: 213851 - DNA, 424 bp, Homo Sapiens
ttttttttgctcttctttcagttatgttttatttgtaagtgtactgggacacatccccctgttgtattttggcgcatagaattggttctgatagaagtaagggaggagaaaggtaaaagagaaaaaacataaccaaggagaaagctcagcagacatacatggacaggtagatcaatccgtgagacatttcaggatgaacactggcagtctgttaccactgtgtgaatgtgtgcattaaataaaatatttacaataatcttttttcctttttctttgaatacaagaatatgacaaaaatgttttcagtggaaacaggcagtagactgtgaaatcgcactagccacaaaacggtctaccagaaagctagcccagtttagtgctcagtttcaaatgcatagaatgtttgccctgcaaacaatgatat

SEQ ID NO: 213852 - DNA, 515 bp, Homo Sapiens
ttattccatttctcttttatttaatataacctccagggcttagaacttagctgagtcctgctattttttgcatccttacttaaagtaaaacagtacaaaattataaacggtgtttgttctgtacagaacttcatggaatatgtattatgacccactctagcaaacatgggccaatctctaaaaaactatagcttctaaaaccaatcttcaagattatcttcttaaagaacgccttttaaacagcaacatgctgataaaagtttaactggctttccaaaaaaaaaaaaaaagacctttatgtatataaaggatgtgtagtacataatttacagatgacaaaaaacgtatacaatattctattttaagttccatatagccaattgattctcatggaagacttttgttgacttttgccgaactcttgtatctgtagccaacctgtggttgcaatttgaccaagattttacaaacggtgttgcatcccaatctgctaattctttccccagtaaatttat

SEQ ID NO: 213853 - DNA, 554 bp, Homo Sapiens; identical to SEQ ID NO: 47814

SEQ ID NO: 213854 - DNA, 745 bp, Homo Sapiens
  misc_feature (630)..(630): n is a, c, g, or t
ttttttttttttttttttaattgccaaggaaaattttattttagctttgcattaacatattctaaataatcctttcacttaatgcaatcagattcctgtgacaagccaaatacttgtttttttgtgtgtgtgtgtttccccttcacttttcattgtatgcccttcagaaaaatctgagaagtgggcttccatttttgaaaaacaggacttccttagtaccatagatacgtagattgcaattttgcttttcctgcagcattactgaccttgtgaaatgatgcctatgtatacgtcattaatctatttgcttaacttttaatatctagtaatgctagaaatacaagaattttttaaaagaatttgcttaaagcttcaaaactcactaaggtttggatatgcaactccacaggtaatatgaatgagatgctttgtaaacaagcagccatgccttacagcctgcaacaaacaagcaaacaaacaacaaaactatgccttaaagaaggtttgtgaggtttctcctggacaaaggaattccaatttcctgttttacattcaaatcaaaactttcagatggtaaatggtttgaaatttaagatgactacagttaccacaaatcgacctgatttccanatgtcctgaaatgtgatctcaattattttgaggcactcttaaactcaatgtatttgcatctagagatatacttcatccttcatttgctattgacattttacaggttaaataactg

SEQ ID NO: 213855 - DNA, 585 bp, Homo Sapiens
ttttttttttttttttttaaaattgaatcacttatttttttttaaagccctgcatagaaattcccaaggtatcaaaaacaaatgagagaagccttattcattacattagccaagaatgggtgtggacgtgaacattctggaagggtgacgctgatgacttgagaatgtctaaggcacactttgtgttctttgcaacatcccatgagcaagtacgcaggggactgtgtcctcgggattcaggggagctcttcctttccctggcatggccctgggtgcctggtgaccgatatgcagcacccctgggcagaactccgtctggattcagtgcacgccctgcttgggccagcacagctctcgtgcaaaagcacctttgcagcttctgatcgcatcgtcgagctctaggcacttgttcaggcctggcactgcagatctccagccgatgaagccctgggtggtctgtgggactgggggggatggaaagaccttgatgtacttctccactggggtcaccggccggatgcggaaacgctcaggaagctcgattttgggctttggggtggggaagatcttcttcaccctcgtgcc

SEQ ID NO: 213856 - DNA, 540 bp, Homo Sapiens; identical to SEQ ID NO: 51896

SEQ ID NO: 213857 - DNA, 702 bp, Homo Sapiens
ttttttttttttttttttcatgtttttatatttttatatatttttttgaaaaattacattaacagcataaaattcaaaagttatacagaagaaacaataagaagtaaatctttcgtcctgtcctgtgccccatctagtaccttaagacaatcagtgatagtagtttcttggctgtaccttcacaaatattctaggtatttatattatttattttcccgtacacaacaacagcatattatagacaacattctctcctggcttttttcacttactctttatccatattgatatatagaggactgtctcattctgcttaacagctgcatagtattgtgttttatggatatatcatactttgtttaatttctattctggtaatagtcatttgggttgattaccatctttacgctatgataaccaagtatttcagtacttatctatgtattcattacattgtgtcataacgagaccagtttatttgtaggatatataatgaggagtggaattcctgggttaagggcatacatatttgtaattttgacaaacacaaaattacatagagagggctgtaccaacttatatgtctaccagcaatctgtgcctgtgtcacgtttcctcttactctggccattccagtgttagcaacttttacaatttgcgaatctgatttttaaaaatgacatcgttcctcgtgccgaattc

SEQ ID NO: 213858 - DNA, 700 bp, Homo Sapiens; identical to SEQ ID NO: 51246
  misc_feature (646)..(646): n is a, c, g, or t

SEQ ID NO: 213859 - DNA, 508 bp, Homo Sapiens
ttttttttttttttttttgcatttggtatatgctttaatttcatgcatgtataagatactctttttactttctactttaacactgaaggaggatagaaaacttgtaaatgagtatttaaaagcctgatcctcttaagaactaaaagcagaatcaagtaacagttggctttcataaccaaatacagtcatatgctggataacgatgttttggtcaatgatgtaccgcatatacaatggtggtcccagaagattataaaaccatatttttactgtcccttttctatgtttagatacttaccattgtgttacaattgcctactgtattcaatacagtaacatgttgtacagatttgtaccccaggaccaacaggctataccaaatagcctaggtgtgtagtaggctataccatctaggtttgtggaagtacatgctatgatgtttaatgacaaaatcgcctaatgacacatttctcagaacatatctccatccttaagtgaccctcgtgcc

SEQ ID NO: 213860 - DNA, 465 bp, Homo Sapiens
ttttttctttttaaaattctcatcaatgaacttgagcactttcaaagtattaccaagaagcacacaacaggagtgctggaacatgtggggaggaggagcaaaaagaatgctttaaaaaatgggccagaaaaagggcaactgttaatgcaggtacaatgttaaggttgtataaggaaggaggttgtgatggttaatactgagtgtcaacttgattgcactgaaggaggcaaagtattgttcctgcgtgtgtttgtgagggtgttgccacatttgagtcagtggactgggaaaggcagacccacccttaatctggatgggcacaatctaatcagctgccagctcggccagtggccagattaaaaagcaggcagaagaatgtgaaaaggctagactggcttagcctcccaggctacatctttctcccgtgctggatacttcctgcccttgaacatcagacctcgagtt

SEQ ID NO: 213861 - DNA, 425 bp, Homo Sapiens
tttttaagacagggtcttggtctgtcacctaggctggaatgcagtgggcaatcacacactgcagcctctaactcctggcctcaagcaatctcacctcagcttcttgagcagttgggactataggtgcatgattttttaagttttttattttattttattttattttgttttgcagagacgaggtcttactctgttgaccaggacggtcatgaactcctggcctcgagtgatcctcctaccttggcctcccaaagttgctgggattacaggcaagaaccaccatacccagcctaaacgtatttttgaaatcactcattaccatcaaaaaaaaaaaaaatcttgcttatgcaaggacaattactgctcagattggtctgttagtatgcttcattgaccagcaatgacacacactaagaaactgaagg

SEQ ID NO: 213862 - DNA, 512 bp, Homo Sapiens
cacacgtaggtgtgtgtcgttagcagttgtcttcagtgtacactgggcaatagctataagagcttagggaaatggccatatgatcgagtgattctgaagagaaaatgccttgttaggttgtattgggatagctactgtcaactattgaaataactgtcatcattttaatgagatttgatattgttttagcaaaatgtctgtcagttttggagctcagcacatttttttcctatctacagaagttaatggtaatcatattcttgacaaggcaaagtgaacctatgagatttttttcagaattatctttttaagatggacactgtaactcgtttaatcctcataacagttctaagagataactaccatttattgtcagatatgtatttagcacctgtattaggctgttctttctataaatatctgcgactgggtaatttataaatttataaagaaaagatgtttatttggcttatggttctacagactacaggaagcatggtgctggcatctgc

SEQ ID NO: 213863 - DNA, 603 bp, Homo Sapiens
ttaaagtccaaacaagtcaggctattttaatctcattaatttctatgttacatattgaagaatcaaatctaccattaaaccacattttccccaatgtgtctcaaacattcactatgaagcaagataaattttgaagggtaggtaaaaagggaaaaagagaaaaatgaaaaggaatttgtaatgtaagtgtataataaatgtagaaaaaaatctgctttttattttaaaataaataagtaaccagtcagagcaatttggcttcctaaattattaaatatgatgctcttatcagaactcactgtgactcatcataaggtgttctgcagatacagtacaattcctcactgctgccctcttgtgcccgtttacaatcattacagatgtacacatccattttcttagcctccttttctgtgatgccaacacattctccatgataccagttagtacaaagatcacagccaatatagaacctaaaagtattcacaatgaaaatgacaatgtaattgtcattttgagctgcatggtacttaaatctgtcttccctgccttgattcacttttttacagtgtaacttcctgcaatgagtcagctaaacatttc

SEQ ID NO: 213864 - DNA, 542 bp, Homo Sapiens
  misc_feature (15)..(15): n is a, c, g, or t
cagcttcttctgatnatttcaaaattaagtcgatttttttttaaccagtccccacttactgtcctaactctcctcgctgaccctatctgggagcccggaaccgttaggtactgccgaatgcggtgcaaaatttccccctctcccccagttcgcagtgcctggagccgctggggttactcgtctgttctgatgccaccgcgagatggtccccgagctccccgagagtcctcagtgaaaggattccgcggcactgcctctattattataccgtaaatctttttaaattctggaactaattatatagaggatatgtctcaatttgttctgcattaatgccacagtggggatggaggccaggccgtggccagagcagatacgtaggcccatgaaattgatgaactgagagttgcttccagtcctgagcgcaccatctggaattccagtctgaggttacaattagaactcctgaccccagattcaactttgcaaacaacaggggaaaaaaatggggaaaagaaaaaccacgagagagggaaaaaaaa

SEQ ID NO: 213865 - DNA, 606 bp, Homo Sapiens; identical to SEQ ID NO: 40542

SEQ ID NO: 213866 - DNA, 698 bp, Homo Sapiens
tctgcagttacttcctccctgaagtcttgaatctctcaaagtcatccatgagggttggaaccaacatcttccaaactcctgatcttgatgtggaagaaatggaggactcagaaccaaggatttccaagtgatttcttccaaagcacaggaatctcactctgttaaagctggtctgttctaactgagatgacagtcatgtccctttccagggacctcaaggacgactttcacagtgacacggtactctccatcttaaatgagcagcgcattcggggcattttatgcgatgtcactatcattgtggaagataccaaatttaaagcccatagcaatgttctggcagcttcaagcctgtattttaaaaatatcttttggagccatacaatctgtatttccagccacgtcctggagctggacgatctcaaagctgaagtgtttactgaaatacttaattatatctacagttccacagtcgttgtcaagagacaggaaacagtcactgatctcgcagctgcaggaaaaaagctgggaatatcgttcttggaagaccttactgatcgcaacttctcaaattccccgggtccctatgtattctgtattactgaaaagggagtggttaaagaagaaaaaaatgaaaaaagctgaagaccacctcctatgggccaagatcacaaatgcttttcatctcgaacagaaat

SEQ ID NO: 213867 - DNA, 561 bp, Homo Sapiens
aaaagaattttttttgagggaagtattttttgtaaccacatgatgatcctatacagctgcccagaggaggacaccatcagagtcattaacatgccgtatgcgttctgaataaataaaagctacaaagcccaagttatatacaaatatctcaggcaataatgtttacaaacctatgtacaataaaacaaatgtaaacagtaaatgcagcatgagagtaatcaaaggatgcacagggacagccgccgctgttcagtccaccccggagctggcaccggcccaccctggaaccagccactcacccttcctaacacaacgggacggcccttggaagagaaaacaaaaacactccaaagatgtcgttgaactgaaggacgggaaggctggcgagaggctgcccgcctccctcaccccgagtctgaggcgcacagaggaggagacagcacagaggctgggcctgtgtgtgccccgtcccagaggctcctgccacgtggggctcagacgggcattgtgctgctctgggaggcaagtccatggaatggtagctgcttaagtaaaatcaga

SEQ ID NO: 213868 - DNA, 493 bp, Homo Sapiens
ttgatttcgtacagcacagtggcttataaggaaccagcagtgtttttccctgagtaattatgaacttagtcaagatcagaagctgggttttggggttgagaagagttcatttatttaaataaagtttctatttaaaaacctttttaaaaagttaacatcataaatattctgataatttgcatagtagtaaaaattagaagttgaaattctacctaaagctgtagttgccgtcaattgtgtaacatgtgacaaaggttttcccatatgtcatttcatttgattctcaccacaaccatccaaggttgatgttattctcatttaacattgagttaacgaaagtagttgattcactctcgaagtccctgagtgtgagctcttcatcctagcactgtgaagtggtttgcctgctggggcctaaactcctcattccctttaacaaagcttcactgagtgctgcagttctcaaaatatgtaacagttaacacatttttca

SEQ ID NO: 213869 - DNA, 492 bp, Homo Sapiens; identical to SEQ ID NO: 45456
  misc_feature (443)..(443): n is a, c, g, or t
  misc_feature (485)..(485): n is a, c, g, or t

SEQ ID NO: 213870 - DNA, 483 bp, Homo Sapiens
cctgatgcaagatgccccttccattttaagtctgtctccttacagaggttaaagtctagtggctaattcctaaggaaacctgattaacacatgctcacaaccatcctggtcattctcgagcatgttctattttttaactaatcacccctgatatatttttatttttatatatccagttttcatttttttacgtcttgcctataagctaatatcataaataaggttgtttaagacgtgcttcaaatatccatattaaccactatttttcaaggaagtatggaaaagtacactctgtcactttgtcactcgatgtcattccaaagttattgcctactaagtaatgactgtcatgaaagcagcattgaaataatttgtttaaagggggcactcttttaaacgggaagaaaatttccgcttcctggtcttatcatggacaatttgggctagaggcaggaaggaagtgggatgacctcaggaggtcac

SEQ ID NO: 213871 - DNA, 522 bp, Homo Sapiens
tgtaatttggggaaccaagcaggggcctggagctatctccatcttcagctccagagtccttggtttctgtctgagaacaaatggcacagcatccctgccaggatcaggaacaaaaggtagaaatgacctccaagcagcagagaagcacatccatagaagagacaatgagaccacaggaaaaacaggtaaccatcactgaaaccctgtgggaccaggtgctgacagtttttaaggatatacaaaaggagctgcaggaagatgctcggattcgagggatgagcaactgctccatgacacccatgacatcagcacccaggactggaagcataaggcctccagattccttgatgaccccaaagttgagaagattgcagttcagctctggagagcagccatcaggaggccgtatccacaacctgaagacacagctcttcagtcaatcagcttactaccctggaccctaactctacaatcaaggaagaaggacatctctgcttccgccagcacagcttcagttgggga

SEQ ID NO: 213872 - DNA, 480 bp, Homo Sapiens
caggagacagagtcaccatcagttgtcggatgagtcagggcattagcagttatttagcctggtatcagcaaaaaccagggaaagcccctgagctcctgatctatgctgcatccactttgcaaagtggggtcccatcaaggttcagtggcagtggatctgggacagatttcactctcaccatcagctgcctgcagtctgaagattttgcaacttattactgtcaacagtattatagtttcccgtacagttttggccaggggaccaagctggagatcaaacgaactgtggctgcaccatctgtcttcatcttcccgccatctgatgagcagttgaaatctggaactgcctctgttgtgtgcctgctgaataacttctatcccagagaggccaaagtacagtggaaggtggataacgccctccaatcgggtaactcccaggagagtgtcacagagcaggacagcaaggacagcacctacagcc

SEQ ID NO: 213873 - DNA, 491 bp, Homo Sapiens
ttttctcctactggctaaacaaacgtcattcactttttttctctctttttgtaattttccctcttttttttccttttttgaaattggataggaacactgacggtgctaaacataaatataaatacagagaccacaaatacagctaaaaatcttcacacagaaacggtcacagtttgtaaaatgccataatgacccccaggattctttaaatacaatttgcctgggctgggcatttgctggggcagaggggctaggcagggactgcggggaggccctgggggttggtgtggggccaaggcgcgccctccttgggcctccggccctccccggctgccaggccgggccctgaggccctggagcagaggccccagcaggcccaggagccggctctctgcacggggggcgggggtgggggcgtcgaaggagtgggggagccaagtcctcacttggagggcaatctgtagagtctgagttcagggtccgagccccca

SEQ ID NO: 213874 - DNA, 443 bp, Homo Sapiens
cctgctgcccccagtgagctcggggaagctcttccacgcgcgggaggggcctgcgcggcccgagaaccccgagatccccgcgccgcagcacctgcccgccatcccgggtgaccccaccctgccgtcgcctcccgcagaggccgggctgggcctggaggactgtcggctccagaaagaacaccgagttcgggtgtgccggaagagcgtggaccgtagctgccccctggtggccctgtcggtgcagaacacggcggagagcagattcggcttccgcttcctcagctgcctgccggtcaccgcggacacctgccgcggcgcctaggggcggaggagtggggccgggaccgcgagggagggcgcgggcgggcgccggggctgggcgggctgtgtccgctgcatcatttattgaaccaacgtggcctacaaagtaaaccgcatttctg

SEQ ID NO: 213875 - DNA, 499 bp, Homo Sapiens; identical to SEQ ID NO: 40118

SEQ ID NO: 213876 - DNA, 457 bp, Homo Sapiens
cgctgccaggcttgctgcagcggcccgaccccggggcgcttagcgcagcgcagctggagcagctgcgaaaattcaagattcagactcggattgctaacgaaaagtacctaaggacccacaaagaagtagagtggctcataagtggtttcttcagagaaatatttttgaaaagaccagacaacatcctagaatttgctgcagactacttcacggatccaagacttcccaacaagattcacatgcagctaattaaagacaagaaagcggcttaattagcaaaatcatgatgctcagctgttgggagagaccagacggaatccagcctcgggggtcatctggaggcatgagagccctactgccatcagtgtgggtttccaagctgccttgggctctgtctactgtcgcaaaagcttttaaagatattcattaaacacggaccttcaaaaaaaaaaaaaaa

SEQ ID NO: 213877 - DNA, 499 bp, Homo Sapiens
agaatttgcactgcgagaccaagataaatatcgctaccgctatcccaagggagagtcctatgaggatctggttcagcgtctggagccagtgataatggagctagaacgacaggagaatgtactggtgatctgccaccaggctgtcatgcggtgcctcctggcctatttcctggataaaagttcagatgagcttccatatctcaagtgccctctgcacacagtgctcaaactcactcctgtggcttatggctgcaaagtggaatccatctacctgaatgtggaggccgtgaacacacaccgggagaagcctgagaatgtggacatcacccgggaacctgaggaagccctggatactgtcccagcccactactgagccctttccaagaagtcaaactgcctgtgtcctcatcgccttccacctttaggaaatgctatctttgctcttctcctactctgccttggcctcactgaggcaccccacttccagtgaagaagtcct

SEQ ID NO: 213878 - DNA, 447 bp, Homo Sapiens
agcgctggagagtttttttttttttttcataagacttactcaaagaaggaagcagtgcactgatttacttctaccattagctcctttctcatgcaaactggtaacaatttacagactgctgctttgaaaagcattgatctaaatgattagttactgcaagacagggacccaggaaacattcaataaattcctactgattgctttaagaaataagtttgtctttaaggtaaatttttttttgttcgtttgctttttgagatggagtcttgctctgttgcccaggctggagcgcagtggtgcagcctcagttactgcaacctctgcttcctgggttcaaatgattctcccgactcagcctcccgagtagctgggactacaggtgtgtgccaccatgcctggctaattttttgtattttagtagagacagggttccaccatgttagccag

SEQ ID NO: 213879 - DNA, 505 bp, Homo Sapiens
  misc_feature (464)..(464): n is a, c, g, or t
gcactcaggtggaatgcctcaccccagtcctgcggctggaaagcgatatggccaggactgcaccccacccctcatccctgcaccccttccctgcctgggattcctccagccctgtgcactgtggagcgcctctgccttccgctcatggaggtttcccaagggcacgcgctgagggcagctggtctcagcctggggccgggtcctagtaactgtctctctttgctttccagccagtgttttggggtttgaagttggaatcttcagctactgtcaagaacagccacaaaaatgtgtcacgatcaagatctttgagagtccaccaatcaggaggcgtctgtgacagtcgctgtcttctcagaacagaatccacacccaggattcaacccaaatgatttctcatcaggtgattcttggttgtagcaaagttcatgtgaatgtgggtgagtttctgttatgaatgtggncaataaatgttatttgtggaaactctaaaaaaaaaaaaaaa

SEQ ID NO: 213880 - DNA, 483 bp, Homo Sapiens; identical to SEQ ID NO: 52791

SEQ ID NO: 213881 - DNA, 493 bp, Homo Sapiens
  misc_feature (430)..(430): n is a, c, g, or t
  misc_feature (473)..(473): n is a, c, g, or t
  misc_feature (485)..(486): n is a, c, g, or t
agcgctggagagttttttttttttttttgcagctgatgaacattttatttataaaaaggtctgtaaaacacagagaagtgctggaataaagtgatggaacgataaggtggaaaaggcaggatacaaagttgtatatacaagataattgctctgtaaaaagaacaccggcaaattatgtgaagaagaaaagagtggaaggaagtacaacaaaacgaaataatgatagtctctggtgagactatgggtgacatttttttcttccttttctttttctcctccatctttccaagttttgcatactgaacaactcttaatttcactttttaaaggaaatagggccagacacagtggctcatgcctgtaatcccggcaatttgggagactgaagcaggaggctcatttgaggtcaggagttcaagaccagcctggncaacatggtgaaaccccatctctactaaaagtacaaaaattanccggtgtggggnngcgtgcc

SEQ ID NO: 213882 - DNA, 500 bp, Homo Sapiens
ctttttggcccaagaatctcagagtgcttctaatcatcacagtagtttttgtgttttgttttgttttgttttgttttgttttgtttttttcacaatctcagccagcctgtggtgtgacctggggagaaagttgagtgtcaggggacatgatgagccagttggccctgaaacaggaatggggcaaagagaaaggagagccaggagcatttaaaaatcagcatctgggccaggcaagatggctcacacctgtgatcccagcattttgggaggccgaggcgggtggatcatgaggtcaggagatcgagaccatcctggctaacacggtgaaaccccgtctctactgaaaatagaaaaaattagccaggcatggtggcaggtgcctgtagtcccagctactcgggaggctgaggcagaagaatggcatgaacctgggaggtggaggttgcagtgagccaagatcatgccactgcactccagcctgggcgacagagcgagactcc

SEQ ID NO: 213883 - DNA, 496 bp, Homo Sapiens; identical to SEQ ID NO: 49933
  misc_feature (478)..(478): n is a, c, g, or t

SEQ ID NO: 213884 - DNA, 424 bp, Homo Sapiens
ggcgttccaggtgtctgcacccaaggagatcctggggtcagaggcaggacatgtgggaaaaaccattggtcccttttacccagggaaggactcaagaagccgaacgtggtaggagatggaggctcccaagccctggcagacgttacagcagcgctgagcactttcaggaccaggactccaaggtccagctctggaacgcccctctctgccctgactttggttccttcatcagcagaggggctcctgggctatgggctcaagtctgaagtcaccttaaagagaaatctctacctttctgttctccttcattgctgaggcaggataatggtgtgaacccaggaggtggagcttgcggtgagacatgattgctcactgcaagcttgggtccaggtgtgttttgctgtagtgaaccaagaccatgcca

SEQ ID NO: 213885 - DNA, 488 bp, Homo Sapiens
  misc_feature (362)..(362): n is a, c, g, or t
  misc_feature (443)..(443): n is a, c, g, or t
agcgctggagagttttttttttttttttgtgtgtgtgacagaggttgttttgctcttgctgcccaggctggagtgcagtggcgcgaccttggctcaccgcaacctccgcctcccggattcaagtgattatcctgcctcagcctcctgagtagctgggattacaggcatgtgccatcacatccgggtaattttgtaccaaatatgtcatttttaaaaaaggacttggcatgtgtcgatttatgtatgcccagggggtggtagaaccacgctcctcaaatattaggggataactgtatttgaaagaaactgaggcttaaaattaaggctttactatgtgtttacattcatagcgtttatctccnatgagaattatttctatctgaaatgaaataacattaaagaatacttccctacatttcacacatttatagagtatctctccngtgagtccttttatgtctatgcaaggacctgagagaactcaatga

SEQ ID NO: 213886 - DNA, 466 bp, Homo Sapiens
aggatcggcggggaccatggcgggctccccagaccaggagggcttcttcaatctgctgagccacgtgcagggcgaccggatggagggacagcgctgttcactgcaagccgggccgggccagaccaccaagagccagagcgaccccacccccgagatggacagcctcatggacatgctggccagtacccagggccgccgcatggatgaccaacgtgtgacagtcagcagcctgcccggcttccagcccgtggggtccaaggacggagcacagaaacgagctgggaccctcagtccccaacccctgctcacccctcaggacccgaccgctctcggcttccgtcggaacagcagcccccagcccccgacacaagccccctgagggcctgaggcatcctgggtctcactcggcccccaaaaactgataaaagaataaaacacttaaatgaataacaaaaaaaaaaaaaaa

SEQ ID NO: 213887 - DNA, 474 bp, Homo Sapiens
tcgcgcaggagacttatttcagaatggagaatttgcaactcatcatagtcctgattcttggatctcccagtcagcttcatttcccagtaatcagaaacagccaggggtggattctttatcaccagtggccttacttcgtaagcagaatttccagcctacagcccaacaacaacttactaaaccagctaaaatcacttgtgcaaattgcaaaaagcctttacagaagggacagacagcttatcaacgaaaaggatcagctcacctcttttgctctaccacctgcctttcttccttctctcataaacgtactcaaaacacacgaagcataatatgtaaaaaagatgcatctacaaagaaggctaatgtcattcttccagtagaatcaagcaaatccttccaagaattttatagtacatcttgtttgtctccctgtgaaaacaactggaatcttaaaaaaggagtttttaataagtc

SEQ ID NO: 213888 - DNA, 469 bp, Homo Sapiens
  misc_feature (446)..(446): n is a, c, g, or t
agcgctggagagttttttttttttttttgtttgcaattaatctagtcccagcacttttatttgtagagttctcaaatcaaaagtaacaaataattatacatcaggattgttaggaataccaattattttacaactgccactacgtgtttcttcttctctgacacaagtggcacagatccaggcttgctgtgtttaatacgattcacttccctagaaataaaatatacaaaatataagcaagttatgggaactcatcttaaagaaaactttctcagaaaaatcaaagcattttctttcactagaaaaacacctatttaaaaaaatattttcacgatgacaataggtaaaaggaagctagtaccaagaaatcaactttacttatttaattgcttcttatcatatttacctaatagggtcctttactaagtttaaaaaccttccacagntaataaaatttctaaaagtgatt

SEQ ID NO: 213889 - DNA, 493 bp, Homo Sapiens; identical to SEQ ID NO: 40318
  misc_feature (391)..(391): n is a, c, g, or t
  misc_feature (431)..(431): n is a, c, g, or t

SEQ ID NO: 213890 - DNA, 453 bp, Homo Sapiens
agcgctggagagttttttttttttttttcatggtcgaatattatttattgtcagaaaggtacagcattcacaccaatatcagacaaaatagattttaactaaaaaattatttcgagacaaaaataacaatatatgttaataaaaggctcaattaaaaatgtataacaattataaacacatacacatcaaacaacagttccccaaaatacataaagcaaacattgacaggattgaagggagaaatagaccactctacaatagtagttggggtcttcaacaccccactttcaataattaatcacagccacttaaggaaccagtgcataccaaaacacacttctggcagtgttgcttcagggaattccgagtgtagggttaatgttccattttctctacctcttctaaaattcctccttcttcaaatggctattaataactttatatttttgtcct

SEQ ID NO: 213891 - DNA, 484 bp, Homo Sapiens; identical to SEQ ID NO: 50076

SEQ ID NO: 213892 - DNA, 443 bp, Homo Sapiens
tttttttttttttgtagagacagggtttcaccgcattgcccaggttggtcttgaactcctggcttcaagtgatcctcctgtcttggcctcccgagtgctgggattacaggcgtgatccaccacacctggcccagaatttttcttataactgaatacttcctatggattactttattttccttgaattaacaccagaatgtattttatcccctttctgtggtcttagatatacttgcatgtttggtttttttgttttttgtttttttgttttttttccctctcctgcagttccgtttcctttttctttcacctgttttcatttccctataaatccctgcaccccattccagctattgcataggattcttctagttatttcagtctgtttccttggtgttcatggtggtgttcaaactgagatttgtgttcatcctgggtacata

SEQ ID NO: 213893 - DNA, 479 bp, Homo Sapiens
  misc_feature (389)..(390): n is a, c, g, or t
tttttttttgaacattaaactgatttttaatatgctaccagcagggattcaggagagcaaactggtaatatgtaatactacatactctgtgtctccataattttactgcataaaggaaaatcttccaaaggaaaaaatcattaaacccaacagcttacagggatctaaatgcctaatacaaaatcaatggctaacctacagtagatcaacactctagttcagcactgtccaatagaaatataatgcaagctgcaaatgtaagccacataatgtaatttaaatttttctagtagccacatttaaaaagtaaaaagtaggcagtgtacagtggcttatgctgtcatcacaacactttgggaggctgaggtgggaggatggcctcaggaggnnagtttgagactagtctgtgtaaccctccaagaccccatcactataaaaaatttaaaagttagccaggcatggtggcacgagattgtagt

SEQ ID NO: 213894 - DNA, 412 bp, Homo Sapiens
tttttttttcaattaactacaggtagtgccaattctcagctagggttgagaattttggcttgaattcttagagatgaaatatgtaaaattagacgacctgaaaatattcacataaattgttagacaagaaatatgaaaaatgagacaatctgaaaatatttgtataatttgacttgtctaatttcagtaagtttatatacacaaaattaagtttctgcggacagaaaagttaaaatctgcagcaaagccaaaaatcactttcggtataagacccaaagaccaataacatttcaatacaaaaaataagtttctttagttctttagttaggtgacttaaaaatctccattagtatacatagcctaaagagatggtaatatcttgctaatacacttaaacgcatattacaaacat

SEQ ID NO: 213895 - DNA, 494 bp, Homo Sapiens
tttttttttaaaaagtttaccttattatgtattttattttaaaatgttaataacatttaaaatacataatatatatgttacaggggaaaacaaacttataaaattatatcacgtgattctaatttttttatatgcaaaacaaaactaaggaataaatatgcctacttcaaaaatagttatctcacagactacgttaaggaccctttatcatatgctatcaaggtaatataacctgagatcagagaaaacctcactagaagtggctttgaatggagaaagagaataaaagaagattcctaccagagaacttgtctacctcagtatcattttattcaaattaaaacagttttacaatcaaacttcaattcttaaaagcagaggaaaaatagtatgtgtgaattttggtatccaaggggatactagaaccaatctccgggctgatacagagggatgactgtacttggaaatgatttggaatgtctgtttgaaaatgt

SEQ ID NO: 213896 - DNA, 377 bp, Homo Sapiens
ctgcattaaattccttcctccctcgaaacccatcttccatttaaccagaatgggtatctattcaaaggctgtttcctttcccagttctcgatcatactatttctttacagtacaacttggattgccctgttcaagactgtgaactccttaagttcagagatgcaaattccttttgcatttccagaactttaccccagtatccgaaacaaaatatagactcagtaaatgtttgctaagttgaaatggattctggactctgatttcctcattgtctgcaaggagggtgaaattgttgtacttagagaattcagcaagacatttggttagaattttcagatggaagtggggaaaatgaatgaaccagaaagagaaatgtc

SEQ ID NO: 213897 - DNA, 437 bp, Homo Sapiens
  misc_feature (346)..(346): n is a, c, g, or t
tttttttttctatttttagtagagacagcgtttcaccacgttggtcaggctggtctggaactcctgaccttttgatacgcccacctccgcctcccaaagttctgggattacaggtgtgagccaccgcgcctggccgtgaatctgcattttttaaaaaccaacattttcaccaaaatgagcctacagttttgttcatcaggaaaaacaatggatattcataacattaaaatgaactgcgttgtgatacaaaaatacagtatatgtgcagaataaaaagcatcttttctcctagatacttaagtagaagtagtaatcctattttacagttagatttttgtttgttgtntttttttaagacagagtctcaaaaagaaaacgaaaaaataacactcaccatctgacaaagttaccttgcctcagtaagagtgaggaatcag

SEQ ID NO: 213898 - DNA, 597 bp, Homo Sapiens
ttttttttttttatgtttttccttttattagtagtatatatacatcttcactgatatagtcttccacacatgttgtttctacttgtaattccacaccacgagtctcatataaaatgagataatcatttcctcaacttaggaattgaggcctctttgttgcaactctgtgatcaaacagaacagacataattatcaacttaatatatttctataggatttatactcatagggtttatatgtacgtattgtgctgctacttatgtacaagtaacatataactaaaaataagacatgcataaaaacaagttttaatttgattgaaaataaaataacagtcgtctctgacagtggagaaactatgctcaaatgattactttgaaatagacctctaaattatgtacttttggatttgacatttcatactgactctcagatagcacataatagagaatcctccgtcttctagatttgtctttctctgaaatctgtacaagtcggttggatacactatattattgatgtctctggagtgaacactatacactagttacagttataatacatatcatcgtgctggatcgtggctcgaggcacatt

SEQ ID NO: 213899 - DNA, 481 bp, Homo Sapiens
tggattcaagggatcctccggcctcggctcccaaattgctaggattacaggcatgagctactatgcctggccacatttttttaagttttgaatcatgcaaaccttttttagaatttcagaataagaatataaaaaatcacatcctaacactgaatatcaacagaaacaaatgtatctaactatatatataactctaactagatacccttaatggactatagtctaagtgcaaaaacaatgtccaaaaaaaaaaaacagttgtactaagtagtttgctgttggtagcagtattagtattgttatgctgaaactattttgtacgtattgttggataaagtgaataagcaagtattgctgagaacctgggttttcactgtgagagaggggagatgcatatatagaatgtgagaagtgatgaagaaccttgtagtggtggacttgaattggagctatgagactaaattcgtgattttgaaaaata

SEQ ID NO: 213900 - DNA, 504 bp, Homo Sapiens
  misc_feature (422)..(422): n is a, c, g, or t
tttttttttaaagcaaataaaattagtccaagttcttaaaaattgagtgtaatccttattaagcaaactacatatctaaagtattcactctagtgcctccataattactactacttgtatcttctaagataattcccactaacaaaagttaatggcacctccaaaacataaagtttactttttgaagaatttaatttgatttcttggtaacataaaaaattttagccttttgaacaaataaaatcttacctataaacaagcagtgtccacagcacagtcaccaaaagtatccggtatctctttggtgctagatagcagccatgaataaagaagggtaagtgagtacccaagataactggaaatccttgactgaagtaccagtgccatggatgagaacctaaaatgttcccagttctgcagcngttaaatttgcaaagattaaattgaaccagagtccactggcaccgttgaaggaaaaataaatagaaatgtgttagtgccaag

SEQ ID NO: 213901 - DNA, 492 bp, Homo Sapiens
tttttttttttttttttaaagagttggagtagggaaggtttaatagtaaaataaacgtggctatattttaacataagatgtaaaatgtgtataggtgttttaagattttaaaaagttaccttaggttctactgcctgtggtagatggaattctaagatggcccccaaggtctcccactaccacctgccgtgaacatgccttgcattaatataatttctggaactgggactcagagggattttatttatttattttatttttatttcttgagatggagtttcactcttgttgcccagtgtggagtgcaatggcgtgatctcgcctcactgcaacctccgcctcccgggttcaagcaattctcctgtctcagcctctcaaattgttgggattacaggcatgagcgccgcacccggcctgacgaggcttcttgctgcacttaaaggaatgacagctatagagggcatatgggactggaaggcatcggatccataa

SEQ ID NO: 213902 - DNA, 350 bp, Homo Sapiens
tttttttttcaaatattaatactccatttcttatttcacttgccagaacagtattttttttttttaattatctacatacaattttaggttagaaaatgagaagtgattcaagggaacaagaaaaagttctggaaattacttaaactcttaaagactttaatattacaaaccagaagcaacatgacaatggtgagaggatgtgctgctgaagacatgtagttggggtagctgggtatccacctggctatcagttcagaaaattagaactgcttcctcccacacagctgcaatcccattcagatgggtcgcagagttccatgttaaaaaaaaaattggaatagcatatttat

SEQ ID NO: 213903 - DNA, 424 bp, Homo Sapiens; identical to SEQ ID NO: 62039

SEQ ID NO: 213904 - DNA, 460 bp, Homo Sapiens
tttttttttgagatggggtcttgctttgtcacccaggctaaaaatttttgtcttaatctactgagtaaaccagtgtaactgttgtagactattttgctgtaataattagtattgaatgctatttgtataaccaatattttaacataataatacaatttgtttactcttcttggtactatagcaatacagataacttattaacaaaatataaaaccattgctatagctgctgttaaaacaggctgggtgtggtagctcacacctataatcccaacacttaggtgggaggccaaggcaagatgattccttgaacctagttgctcaagaccagcctaagcaaaataggaagaacccttctctacaaaaaataaaaagtaagctgagcgttgtggtacgcatctgtaatcccagctacttggaaggctgaggtgggaggatcacttgagcctgggaggtcaaga

SEQ ID NO: 213905 - DNA, 377 bp, Homo Sapiens
tttcaaacaaattatttattacaaaacaaattttaaaaaatcacaacgtgattcgcatactggcaataggctgttacttgccatttgccagggtatgatttgtattttgttttaatttatgctggtttcaggaactatggccatttgcctttttcctgcactacccgtgcgcctcctgtgggcactcagcatgggggggcatgtagtttttctcacttcccgcagcacgtttttatcttatattgccataatgatctagtaatcacatctccactttactgagtgcccgcacaccatgctccggtgactccatctcgaagccggacttctctatgtgaagcacagatctgatggcatcatcttccctgtcacctatg

SEQ ID NO: 213906 - DNA, 355 bp, Homo Sapiens
ggatgttctctgtttggggctttgcattctcacattccaaggcatctcttgagtgttctgctgccgcctgaaactcaacatatcagaaacaggctaagtatttcctaaacaggcctgtcacttcttttcataatttttccgactttcctcatttctgctatttgtgtgtaactcagaaattgactggttgccctcacacatgttaatactgtttcctcaagcacatgtcgcaagctacctttgatctgacatgctctccattgccacagcaacagcccactgatgttctccaacctccatgaacaagtgatcctaaatcatctgatcccaaatatccagggatcctcgtcatgac

SEQ ID NO: 213907 - DNA, 501 bp, Homo Sapiens; identical to SEQ ID NO: 61946

SEQ ID NO: 213908 - DNA, 522 bp, Homo Sapiens
tttttttttactaaaactggtcttgtagtctttattgactgtttgtaccaaattgactccaggagaaatggaaaatctaattagatctataactcttcaagacattgaaattacagctttaaattttacaataaagaatattctggccaggcatggtggctcacgcgtgtaatcccactgcactccggcctgggcaatagggcaagactccgtctcaaaaaaaccagaatattctaggctcaaatggtattacagatgagtctaccaaacattcaaggagcaattaattccaatcttaaattcttcaaataataattaaaaaaaggctgggtggtaggcacatgagtggacatattatttgttaatccttttgtgcataataaaataatttttttttcttttttttgagatggagtctcactctgtcacccaggctggagtgcggtggtgcaatatcggctcactgcaacttctgcctcccaggttcaagcaattctcctgcctcagcctcccgagtagctg

SEQ ID NO: 213909 - DNA, 732 bp, Homo Sapiens
ttttttttttttttttttcagcaataactatttactgagattttaaaatatttcaaggtaattggtcctagcagactggaaaataccaaattcttttccagaactgaatcccccatcaaagttcaattttactcataattcccttttcatttgaagcatctcattgtaagccagtcttaacccttctctcacactttgcttggctgtttctcaggtagaactcagtaagtctggtagcctccaggactgccgcttagattattaaacaacatgtcagtggttggaagagtcaatgttattttgatttttctgttttgttttgttttaaatgcagttggcggataattgcagctttctttcattccctacatgagttcaaatggcagcaaacaaactaggagaacgcagaccttctgacttgtgggtacccctactcatcacctgaagacccttggaaatcaaagccctgacccattaaagacggatggagacagcaacatacgatcatcactattatcttgctttgccccagtccaggttaaccatctgtggtatttttagttgctaagtccatatattcaacataaatcaattatatatccactaaaatctcagcactagtctaactactaaggaaatgacagcgaagaaaacagaccaaacgtctgcccttatgggatttatattattttctctgtgctggttaaccaaggagttctgctctttcttagt

SEQ ID NO: 213910 - DNA, 678 bp, Homo Sapiens
ttttttttttttttttgtctaatacatgtttatttcactggggatggagagcaggccctacttccagggaacaggttgagatctggagtccctgtagggtcagagctagaggacccagaggaggaagtcctggaaggccttcctggaggaggggctgtcagagctgagtccaaactgaagaggcatttgcaatccaggagaaagcgacccctggtagggggagctgcaagaggaaaagctgagagataccaagaaatgcaagggacctgcatccccatgcatccctctgcccatctgcaggggcacttagaagtacacggagccctcgctgtctccttggtcatcgaatttctggatctgagtcttgagatgcctcagtttacccttcaggtagtggcagcgagcctgcttgtccaggaagccaggatccattcgcttcatctcaaactccctccaaacccgggctgcaacttgggcctccttctggctttggggtgggggcagggagctcagcagggcctccagctgcctgagctttgcctgtgcacaccccacctcgtgctggagctccaagaactctccgtactggtcctggaacactgcgacatagcggctccgttccctctcactgctcactggcgggtacttaagctcatagtcgggcactgggtggggcct

SEQ ID NO: 213911 - DNA, 751 bp, Homo Sapiens
  misc_feature (692)..(692): n is a, c, g, or t
  misc_feature (718)..(718): n is a, c, g, or t
ttttttttttttttttttaagtattctgtccctttaatagctttgttttaggggtaactcccctcgccttgtggggaggcttaggacgggcgggtgcaatcctcgaaggggagtctcagcgaccatgggggacaccatccacatgcaggcggtagttggggcctcggcagcgcctctcggggtgccgggggtccctgttgcccctcagtgccctgtgggccaagggctgcaggggccggctgttaccgctgaggctctggaagatctgagatggaggattctggctcaggagtctcagggagtgcatctgaagggaggtgatattgagggcccggtcaatgaggatccaggtgacagtctcggagcagggcggggtgctgagagagccctgataggtgatgaagccgaaggattcagggaacaggagctccaggctcaggtcttgaagaaagtaggcatcattcttgtaggagatgcgagtgatggtgtcgcggttaaggaggcgactgaggaatgggttagaggtactggcaacgttgacaaagaggctgagaatggccaggccattggggccgcgggaggcagcgctgaaattcccgtagagttcctggttgaagtgaatgagctgcacctcagcagagaagccctggtggttgatctgatgttccgagccggctccgtcgcgagctcanacagcagccgcagttcactgagtcgngtggctgtaaggaggggacctccagacacattg

SEQ ID NO: 213912 - DNA, 622 bp, Homo Sapiens
ttttttttttttttttttggtgcagcgatgtttaatggcaattcgtataaaccaagcccatgcacaagtagaaagtgcccgtggagccggcaggaggcccccgccgcgctagagaaccacaagcccggccgtgcagccctccccgcggcgccttaaatagattcttcactatactctgtatgttacagtatgtacaagacccctcccctcgggggacggggcggactccgcaacgcgttcctatgtacaccacctccccttcggccctgaggtcagtggccagagtcgggtgatggggtaagacagggccagagagggaggaaacagacgcaaacatgcggagtcgggtggggacacggtcagccctgaaacacgaggggcgtgcgcagcgaaggcagtggtgggaaccgaggcggatacattcagagacgcgtcgaacaaataaataaggcaagtcaggagggggccgagtcgggtgcaggcaggaggagctggggagcaggggcaggcagggctccggaggtcacagcggaagatgcaggtatgtggggcgcgggttttctggagccaggaccaaaagagacggggcacgaccaggagggacgaggagaggggtgtggga

SEQ ID NO: 213913 - DNA, 736 bp, Homo Sapiens
ttttttttttttttttttccttgccaaactttattgtgattaaaattccagagacagtaccagctccacatacctctagccctgtctttgccctagttcccgagtgtccttcacccccatcttccaaatcatctctggtttcacggggaagaaaaaacctagggctgctgtgaatgtgccctctcaggtccctgagttggccccaggtagagctgtaagagatcaggaagagggcctccctgcctgacggcgatgatcctggaggcaacgtgtggagcagaaagagaagtcgaggtagtgaaagggagtcaggccttggagggatgccccacaactccagcagcgtcgagtattgacgattgcagagtcagggattggagaggtaggggctcccaactgggcagcgagtcggcgctctgcagccagagctctcttctctcggtcactgagggcggcaaatcgccgctgctcttctcgttcacgctcctcctgctcctgctgcctctgctgctgttcctcccgttgccgccgggctgccttctgctcccttttccgtgtagcctgccgtgcctccatttctggtgtcaatggtcctggcacctgagccttgttgtaatcgtaggcatctggattcttctccatgaaccttcggaactcattacgtgttgatttgtcagccgcaacattataaggtggccgggcccgagagtcctgcacagtggggtcagcacctgct

SEQ ID NO: 213914 - DNA, 735 bp, Homo Sapiens
  misc_feature (716)..(716): n is a, c, g, or t
ttttttttttttttttttcctttttagaaatgaggtttattttcaaggctactcagtcctaaaagcctgcatatttactttttttccttcctccaggtttacctccaagtcaggatttcaaaaaccaccaacattcaggctcattcttattggtataaacaaacaaacaaaaaaaccagacaacaaaaaactcaacaagcaaatcacacagttgtgggattcagcgccaaccccgggcgtttcattttggcaacaaaaccaggattccctttcaaagaagcttctggaaaatgctgtatttcctagatgaaggcccctggtttttcaacctcaaaatcacctactcaaaaagcagactcagaaacccaaggttttagaacatggtcccaatgtaccacatcataaaatcactctcattcctgcaactgtacaatgaatggctcccaaagtcattttatttaacaaaggggtcaaggcagaggaaagtttcccttaatatccccacaactgctccacatgtcttctgtggaaacacttcaccaggaactagctcaacactcttgctaacaatttagtgtctatacaggaaggctggtgtctctgttacaggtggcccgttccttaaagcctttagggttaatcgcagctgcactgagtggccaagcagaccctgttgggatgtgaaagcagtttgttaacagggccccctggcgggnccagaggctgtcagactca

SEQ ID NO: 213915 - DNA, 732 bp, Homo Sapiens
  misc_feature (718)..(718): n is a, c, g, or t
ttttttttttttttttttgcctctattgctttatttggtgttttatacaagtgactaaaataaatagagtaacaaaggcagctacatggcccaaatctcccagcttcctcaggctgctgtctaggatgcctaaccccggggtaccgctgaccacccccaaccctgcaaagggcagggctgtgggtaactggaggaggaggtcacattctggggttagaaggggcccaatggatgggaattcttcatataaaagaggaaatgcctattaaaaaagtcccaaaaatgtaagaaactctattttaacccccaaaaaggcttataaaaaaacaaagctaaaaataatcaaaggtcccttgtctacccctgagggaagggggaggaaccaggcactgctggtgagagtcacagtggccacaatctcctgtatggcagcagctggtaggctgagcccaggcactgtaagagcaagcacatgacggccaggacacccagtcacacaccaggagcgcccggcccagcctggccccacagtgggctacataacatccacaaagaactcgctgggattgcccatggccatgtggaagctttggcggctggctgtcagttctgggggcacagagcccaggtctctgactggaggggcccccggaggctgcactgctggagggactggaggtggaggtgggggcatcatgaccacatcatggggttgtangggagggccatgca

SEQ ID NO: 213916 - DNA, 695 bp, Homo Sapiens
  misc_feature (571)..(571): n is a, c, g, or t
  misc_feature (652)..(652): n is a, c, g, or t
ttttttttttttttttttgaagattatccaactgaaatgtatttgtgttcctgtttattaacatgttggtaaacttaggtgtcagcttttccataagtcccctctggaggtctgtagtacttggggaaagccatcagctgtagcatgttgaaagcatactttctgcatttgatattcttcagtacattctctatgcggcatccttctcttctcatgcaatccagcgctcggataaagaagtccttgtgtaactggtgctcatctctcaagattgagcattgttcaagtgtcactgacatcgatgtcctgtctttggcacttttacaacaggtgaaacgaataccattcagtttgcggcaaatcgttgcagccagccacataatttctacattctttctttttttggattggatattttgaaggagattttctagcaatgcttttaaatcattttgttcctgaaaatgtgaaatataatcaggaggcatcttttccataaatatcttgtaatattcttgtagaagttcgaagttttcctgattaatactttcttgcaaagagacatctccanacctttcagccagagtttgctgttcattgattccaacattaaaaagtactggatacacatgaagcaactgtccttctttantctgtagaggtagtgactcaaacattctggctggaagcttgac

SEQ ID NO: 213917 - DNA, 734 bp, Homo Sapiens
  misc_feature (422)..(422): n is a, c, g, or t
  misc_feature (599)..(599): n is a, c, g, or t
  misc_feature (681)..(681): n is a, c, g, or t
ttttttttttttttttttcaaaatgatgggtttatttatgtatcagcactagatattaggtatacattgaacataacataatcaatcatttctgctctcatatacagttttggacaagaaactacatgaaaatctataggctgacatacattgcagtatttttggtataagaatttccccacatggccaacgtttataataatttataattctagccttttctagactacacaatctcaccagcgccccccacacactcagcgtaaacataacctgattttttccaacactattactaaaaataaaaagaccacacactgagcgtctctcagtatcctcagaaccatttgaacaggcagttttcattccattcaaagccttcagaaaattagcctttctccatagaagaccacagaatgctnaggccaaaagagatatgtaggcatctaatctctggctcggaaatatattcttcttattattttaaattttagctgcaaagcctccttcctgatagatacaaatggtgacaccttggatgaaggacagaggacagaaatgggatggggtatcctgtagtctcagcccccattcagatngaacacagagtcaccaaagtgtctgtatctgtggatgaggacaatgaaacacattctacaaccattttcgtgttcctagtangggtgtgtcaggagttgatcgagtcactaggggtggacatgggtcactgggga

SEQ ID NO: 213918 - DNA, 654 bp, Homo Sapiens
ttttttttttttttttctgtaaacatatgattgatttatgttttaataatgaagaaacaggaaacaaaccatttcaggggaacatacaagtaattttatcaacatagtatttgcagagaaagaattcacttattcaaaatatcacaatactgaatttcacagttaaattcacatgcagattgtaaaattatgttatgggatgttttgatggagtgtgttaaatataaaagtaatccaatgcaatactatttagcacattgtacaaaactaatttttcaatgggattaatacatttactatctttcctataaggtgtgatgtattcaaagtgctctgtagcattgagtttgaaatcaggaaacaaatactgttagagctccacagtaatacagctcagtaataaatgaacttgaatataatgtagatgaaatctactcataaaactttaagacagatgatggagatttatgatgtgcagtgagtaatatccttgaatagggagtagggcagagggacttcgtgcatgtatcaatacaatcataataaaaataagtttaagattgactccaccacttttatattgagtgccatttactagagaaagaaggacagataaatcagaagacaggaaaagacagagagacatagagaggc

SEQ ID NO: 213919 - DNA, 733 bp, Homo Sapiens
  misc_feature (711)..(711): n is a, c, g, or t
ttttttttttttttttttgaatcaggagctatttatttttaagttaacagtacagaagggaaggttctctttccatcaaagttctcctccacgctaccaaacctggaattattaggaacggcagctccacagaatggaaaagctaccagcaggcattcaactgaaatcaagtgctctaccacatatccctccttcactctccctatcacagcagttctcattctcacttagtgagaaagttagtggaggaactactagggttaggggtgagagaacaagcagcattcacccaggcagcaatttgcaaggcaaaagatctacttacccacaatctaatagcagccctcttatcctaaaggatgccacgaattgcaaagccctggtctcccacccacactgtcccagcaagttctgagcatgtttgtacatgctcttgccccacaggtagcaacgctctcatagtgtgtctcaaagttcagtcccatagatggccttataacgtaggtattcttctaagcactgaagagcattatcatctacctttgggtcaaacttgttggccaacaggtgatggttttgaagcatccaattcaagtccccagccccataaacgcaaatagcccgctggtggattccagagcagggagcataaggagcacccttatcgatgtctccttcatgaccctgccacttgaccagcctggcaatagnagtcatgtctgagatgtcgtat

SEQ ID NO: 213920 - DNA, 717 bp, Homo Sapiens
ttttttttttttttttatcctagttaactccaggatagagtaactccaatatcctggtttgtacccaacttggagagcttttatttacagaaaggcctgggtggatcggggagaaaggggtggggagttatgcgagaaagagaagggagatgatgtttaaatactgagctgggaggcagggaaggaagtagtggggctggcttaagggtatagccgcctcaggggagtcacccagcagcagtcacctggtaggtccagagagtgagatgggatcaggaactggcatagacctcagtcattggtcctcaagctgaggggtggaactgtagctgggcagggcccgggcctcccgaggtgcccatgtcccactgacccaaggacaagatggccagtggagaaaggtgcagattaagatgtttgttttggtaacagccgaatgatgctcgctggaaggaaagccgccctattccttcagcgcttcgactccatcgacaccacttgccctgtgtgttggcctcactttttcacccatcagtgctctacctccccttcccccatgttttagaattccttttccttaggactcctgagtcccagacagaaggtcctgggggagatggtttcctggactggggatgggtgcatgtccacccagaggggacctggtccttctcgccaggatgcctgccaggctctgtctgggcctgatgctcaagg

SEQ ID NO: 213921 - DNA, 664 bp, Homo Sapiens
tttttttttttttttattaaaaaaataagttgcgtgacatttattttgtcttgttaacattaatatctgtagaaacatttttattgtcagtataaaaattaacaggttttattaaatactttctccaattttgtaacacataagatcagtgtaatctgcattcatcttgcacggctattgcaaagtgagtgggtgtttccaaagcaaaacacaatactttagtacagaaggaacaacggcgatattttgtctgatgtaggtatgaggctggatcttttggtgaggtcctgccagaattagatgaaagcaatcccttaaaaagatggacgtatccccaaaactatcagcagaacaactctgtgtttcaattttctatgatgggacttgaagatcctaacaggcgtctccaacgccaaagagtctggaagccattatcaaaattcactgaagagaatacaggctaatctgattaatgtgcaactcagaagcagaaggccagctgccagagagaagcacattctgctatcatttcaactaaggtctgtcctcaaggaatggattaaggcatcttttaagaggacgctggtaccatttatcttgggaagtccagttagacgttgcgttgacgtaatgacagggttgcacaccaaaatgaaacaccttc

SEQ ID NO: 213922 - DNA, 699 bp, Homo Sapiens
tttttttttttttcttttagacatgaccaatttattcagagaattcaaatttcgtttggcaaagtatatccggggcagagagtttgggataattatgtcattggaagcaatcacattatctacagcaaattgcctggggtagtatctgaaggaaaggcaaaacttttaaaaacaatttagtatgtgggggggtgataatcataaatatttgcaaaggtaacaaaacaaacaaccagcttatacaaccaaggcacaaaatatgctaatgctaataatcctttattcaatttagctcaacacacattaagtacttaatttgtgcaagagactgggctatgtgctgggggtgaggtggaaatacaaaaacaccaagatgcaatccctctcaagaactgtataatctagtaagagcacatacagagatggtgcttgcaggtaaaaactgctctgaaaccatggggagagaagagtttacttccttccagagggtgaagtcgggacccatttaaatttggtagtatgggtgaggaaggtcataacacgctaagtaaactggtgtctaagcatgtgacggcaacagctaatggtctagttcctccatggctttaaatgcatgaaagggaaaagagtattcaaaggtatttttattttatctcattgttagcccagtataaggcaggatgacaaaaaataaataaa

SEQ ID NO: 213923 - DNA, 704 bp, Homo Sapiens
ttttttttttttttttttcaatataatatatgttttattaaataaatactattcttcttgtcccatcaacatatactttttacatttttgcttaatttacaattcgagttaatattttgagaacgtaaggaaagacaaataggtaaatgtcttgttgaaagggttaagatactgacaggacataccttcctgttccatcctatataaaatccactcatgagttggatgccaagtatagatttctgaaactcataaccaccaatcacgataatgcaatcattaaaactcacaccattgcaaggaccaagtataaaatattctgctactattttagatacttcaaaaacatccactactttaaatgaaaagctttaaatgtgtcaatgctatttgctttttaatggaaattaaagaagaatttttctattattctgtttcgatcaactattaacctttaggataattgttttatgtgaaaaaaattagaaatttttttaaagcaaaattagtactattggtttttatttattttactgttcttaatacagttaacttatgaccaacagcatggattatttatacagggtttgaaaatgcctctcaccaaccacaaatacaataggcagcaaataccaggctcatgaaattagcagtgactcaataggacgcactgtatgtttgatgactggcaccactgttgttct

SEQ ID NO: 213924 - DNA, 616 bp, Homo Sapiens
ttttttttttttttttttccaaaaatagagaactttattgtcagggtcaagggcatgtgggacccagccccagaagcctagtggtgaggaagaggttaatgcacaatacacacagaaggcacaatgggaaggtgccctcccctggcagactccccactcagttatccacaggaccccaggtctccctgtttccctcctagagaagcacctaggtctggtctgacatagagacctaggtttggagtagacttcttacccatttccctccccacttacgctcacctgcctaccacccccaacccataaggcccagtagctggtccagggtccagggacttggcaaatcacaggtctctccccagtggggagagggcagggaggagaccacagagcacaccctcccttaatcttcactcagcctaatccgtgtgcccggtgaggcactaaggccccacctcccactgctggctcaggctggcccccaacacgggcaggcacagtaaacctgctccatcactcccacacctcggtccagatggctccgtggtaggggtggggtaggggctggggtgtgctgagctgaaagggctggcctacctgcttgctggggtatttg

SEQ ID NO: 213925 - DNA, 777 bp, Homo Sapiens
  misc_feature (652)..(652): n is a, c, g, or t
  misc_feature (738)..(738): n is a, c, g, or t
ttttttttttttttttttacattttttaaaagttttttatttttcagtttttgtagagatgaggtctcaccatgttgccctggctggtcttgaactcctggcctcaagccttccttccgcctcggcctcccaaagtgctgagattacaggcctgagctgctgtatggctatgattttgttaaaggccgacacagaggtgaagtcaactgctagaaatcacggcttttaagaggtggagtcacatttgaactctggcctctgatgccagatctgcaggtcacatgttcaccatggtccaggtgaccctgactgcggtccccacctcttctgtgaggcacagggcaggattccacctgaggcgcgaggagcctgggacgactcctttggtctcttctggggttcgcaaaaacctgggggtcccgggtgtgaagaagggtgtctgcgctctcagcggtcaggctccaggcgctgcgacaggacgccgaggacgcgctggaacttctcaaagcgttcagcgcgcggagctcccgcgccccggctaccccagagcagcctccgcacgaagccggtggtcagggcctccctcagctccgggttaggccggaatcctcgcaggcgctgggctgccaccttgcggaatttgggtgcgtcncggaccatgtgacgcgcccgtgcagggtgcgcaacagccgctcacagctctcgtccagcggcccgcgacttcctcgcctccagtangcgaacatgggtgcacgtgcggcagcgcactcgcggggt

SEQ ID NO: 213926 - DNA, 755 bp, Homo Sapiens
  misc_feature (558)..(558): n is a, c, g, or t
  misc_feature (656)..(656): n is a, c, g, or t
  misc_feature (698)..(698): n is a, c, g, or t
  misc_feature (716)..(716): n is a, c, g, or t
  misc_feature (739)..(739): n is a, c, g, or t
  misc_feature (741)..(741): n is a, c, g, or t
ttttttttttttttttttaatttgttcaattatttatttattgtggagtattttacatgcaagaacccaattagagagagggtatctggaaggagggccagtggggtggatggatgctctgagcctcgggtgcactgacccaccctccagaaccagctctgcccacagaaacacatgacagtgacaaaaacactaaacttctaggacgagtggacagcaaacgcgacattcaacacattcctcttttcagtagcccccaacaatcctgagaatcctcacaattaagtgcaaactttaggaaataaatatccgtccccctctccgggagagcctggaggtatggacagacagaagcagttctgactcgggggctgatggctgctccctatggctggtggccgcaggggaagcctgacttggaccccacagataggaagggctggtgacgggcactgggggaggcgagcacttcaggggctgacagacaatgtctctggggtggaaacacttctctctgggtggggaaggcctactgtaacccaagtgggtgagacgtcnccaaagccgacagtgcaaaagctcccagggaccactccagcagtgccagaggctgaagccaggctgcaagcaagtgctcctccacactgctcttccanagctgccccaggggctggcctggccccaggtgggcccatggnctaccccaagccatccanaaggctgggcccaactgagttananatgcgtgtctgcgg

SEQ ID NO: 213927 - DNA, 715 bp, Homo Sapiens
  misc_feature (702)..(702): n is a, c, g, or t
ttttttttttttttttttaacagtcaaagtgcattttattgccaacagaacacttcaggaggaaatgctaacacaaagccaaggcgctggtgctggctcatttttgctcctcctgaccttggccagtatttggtagcctttccagagcacagggtgaaaggctaaagggctagggctggggtggggggagcaggagggcatggcagctgctggctctgtcctcccagcctggtcccacccctcctgccgctctccttgggctcaagggacacacattcgttcaaatctgacgggcaaagccagggcctagcccactctagccgcagggtcccctccctgagggccctggtccagcacctgggtttctgggctttttctggctgagctggagggcctagggccaagcccactctccggagggctggaaaccaccccttcaggtgggcagtggggcgcggccagaacgggggaatggaaaacaggaaatgggggtggctgcagattccagctggaaatggaaactccaggagtgaaggcagcgcctgggccgctatgtctcacctcactccccagaaagcggccccttccagcatctgacccctcctggggggctcccatcacggaggcccgagggccaggcctgaggagtaatgggcgacattcctctagcccacacagagcctggtctgcggagacacgcanctggagggctggt

SEQ ID NO: 213928 - DNA, 727 bp, Homo Sapiens
ttttttttttttttttttaagaaagatgccagctctttattaccagggaagctgtgtgcacgcgcgtggagcgcgctccttggagctgaccgggcccttaccttctcctgcttgtcagaggtgagtcctggtacccagcacggtggcctccgggaggctttgataggtcagcctttgctgcctcccagctcagggctcctccaaggaacctgcggggccccatgtgcccacagcccgaggagggaagcaccgaccgccctcctcgtggcacgctgcactccagcgctgggcacttcacctgcttcctggcttgcggtggtcaggctcgatactgactccactgatcggcacattgagttccaaaagaatgcaaaccgcgtgggtgctgtggcgacattgtttgcaccgtttatacaaccagacagctttttagactaaattcgtgtccaaactaacacgcacgggaacgggctccagctgcagctccctgggtctgtcaggccggggagcggttctaccggaagagccggtacgtcctgggcaggcgcccgtccttactcgacagggcggtctggatgtgctcatacgtgggcaggtcagtcaggtcacccagggcggccactgccggcttccctcggagcatcttagaagcgactctcttcacatcttccggcttcacgttgcggatgagcgtgcacagctcgtgcggcagctttctggagcgagt

SEQ ID NO: 213929 - DNA, 735 bp, Homo Sapiens
  misc_feature (692)..(692): n is a, c, g, or t
ttttttttttttttttttgctgctgttaccttttattgagtacccacaatgtgctaggcaactgtgctagatacttttacataatctcatttaatttaaccctcacaacaaccctgtgaggtaggtatttgctccattttacaaatggagaaatcgaggcacaaaagattaaacatcttaccaaagtctgcacagccacttatatgctggagctagaatttgaacccaggtgtgcctccactttttaatactagaccaatcttttcacgggggaagtttcctagattaacaccctcacatcttttaagaccattccaaaacctgcgttctgttttgcagaagccctcactgtgtttctgctgccctgaaacagtggaggcagacaaaggtgagtgccaagtgaggaaccataagaagtggtagatctctgtggagtgccataagaaccctcaagagccttaacaaaggtagttgggggagaggggaagaggtgtttcagcagctctgctcccagcagccatttcctctctccagggcaaaggggtggggctgcgaggccagctgaccaagaaacccctccagctcctccagtccaagtccagcatctttcctacaactattctgccttccacttcgtcttcttccttgcctcactctatgtcatggttacccttaccaactggttcaggtangatggagtgggccttagatactctcctgaagagctagctattt

SEQ ID NO: 213930 - DNA, 756 bp, Homo Sapiens
ttttttttttttttttttgacaataggaatttttaatgcatggacaggcctgcagggactctgggcagacccacaggtagcaggaagaggcagggtcccacaaactcaataatgtccagcaaaaaagagagagaagtccttaaagacccatgcttcctcactgcaaccatcctcagagcttccttcctggtgctgaagaggtcaaaactgtctcctctaggggtcaggtcaaaactgtccctccataggtctcctccaggggtccatggcaggaagaaagcagagtgtggcaggaagaaggaagaagagcaaaggccgcttggtctccacctgaaaacttctgcctcgggattgacagccatccataagaaaaggtttaaaaaggagagacttttgatagagtcaaataatatctttgaaaaaataaaagatagagaaaaatgaataattccattggttacaaaggtctctgtccactatccacaggagaaaccgtttgctttggccttgctggcaagcttcatctgctaggcccatcctcagctgtcccccagcccacccaggccccaggatccaggagaatactgctccccctcccatggagagtctctgtgctcacggagggcaaaccctccctcaccggcccttggactcccgtacgtgtttcgggccattgacaccatcttctcctcacacgtgattttggtgtccttgaggatgctatacacaccatgcctgcaggccggactcctcgct

SEQ ID NO: 213931 - DNA, 702 bp, Homo Sapiens
tttttttttttgttatttaaggatttgtttaatgttttaaaattcaaagcactttaaattattttaagacaaaagattaataaaaacaacattacctttcaaatacaactttataacagcacagtggaagaatggtaaacagtccctcttttttttaaaaaaaaatcagtacttaaaaccaaaggaaggcttatatgtacagctaattcagaaagggaacaatgacacctaaagacatagataaatgcttcattttaatccaataaatgtcctacctactggatcttaataatgatgttttcaatatgccatttaaaataaactatccttgaaaataaagttttaaatcattcaatataatctatgaaatagcatctagttaactagattaccttaaatataccaaatattataatcagcaaaataaaaaccagtaaatcaatttgtatctgaaagcctgatgttctgatctactggattttaattttttttccctaagattaacaatataaacaaatcttttgggtactcaacatattatgacaagctcaggcatgttcagggtggtatggccatagacagtaccaacatattagaaggaaattacctatttataattattaactttcaaaaatatgactcaccaccgaacaccagtacaatattttagcaatcatcttatgtgacgtgacaagtggaaaa

SEQ ID NO: 213932 - DNA, 710 bp, Homo Sapiens
  misc_feature (461)..(461): n is a, c, g, or t
  misc_feature (464)..(464): n is a, c, g, or t
  misc_feature (689)..(689): n is a, c, g, or t
ttttttttttttttttttgcttttcaatcaggctgctttattctgttgtggcaggagttcccgggcccctgggcgccacctctgcccactcccatcctctccccaagctcccatttctccagggcttgtccctgcggtgtgggcagaagcagcttcttgcccgtctgcaaaagctgcaaaagaccctttgcccggggcgtttcctttcccgttggggcttccactgaccctgctcaccggaggcgtcctagatgtagtagagcggcacctcgccacacagggtgctcacggccatgcccaggaaggccgggtcccctccggagggtgctgagcctgcatctcgcccctctgcctggcccagcttagacgtaggcactgcgggcttggcctggaagttgtggacttttctagtgagagcctcaagactggggatgctctctggagctatcttcatgatgtancancaggtgccaggggctggcttgtaggcgatcagcagctgctggtagtcatacaccacgaggccagtggagccgatggagaaggtggcagtggtaaccaggtgctcactcagggccaggcgttgctgggcttccggcgccccaatgctcatctccagaaccatctccgtgtgtttctggctcatgtggagacccatgagcagggctcccacaatcaccacgacgatnaggacaccaccaccaccacga

SEQ ID NO: 213933 - DNA, 630 bp, Homo Sapiens
  misc_feature (582)..(582): n is a, c, g, or t
  misc_feature (616)..(616): n is a, c, g, or t
ttttttttttttttttttgatttaaaaaagatttatttacttgttgaatatttattagtagtagtagtaataaatataaccccgaagccacaaataaccttaggattctctcagctttaatggcagtagagtccagcttcttaatcttttgcacaaaatacactcaaggaggagctatccataagactaatagaagacttttgtctccctgacccagctcctctaatttcatatgggaaacacctaacagccataaagtgatgatctgggagtcctcattagagatgggctggacatgtcagaaagctgaagaaagaaatcaacctatttgtgaaccttaccatctaaaattgttagtctgtgtcttctaaataaacagagacctttttctcttggttgagcctttcctcttcttttgattttatctccaccactttatgagctctttcggcccatcgctttttccggtaatgctggaagaggaccactacaattactattatgatcatcagtgcacaggcagagccaatggccagagccaggaagtggatctcagagaagcgtacagtgtgcacgacgctnagccggatctcccctatcaccccatcaacatcanggtgggttcttcac

SEQ ID NO: 213934 - DNA, 687 bp, Homo Sapiens
  misc_feature (94)..(94): n is a, c, g, or t
  misc_feature (584)..(584): n is a, c, g, or t
ttttttttttttttttttcactttgaaaaatatatatttacaggaacaattccccattctctgggactctttagaaaaaaaaaaggtccatttntggggaagtaaaacaaacagtggagacgagtgtagcactgtcccccaaatcaccaacccccaggtcccaaggcctgggctgggccagcgctaacaggtgagcccaggagtcttttgaacccactctctcttgcctagaatagagacaggacaggctttatgtcccccattcctccctcccaactccagggacattgaaagggtcctttgtacccgcccgcaggaaattggggggctgggagggagggaactgaaaattcatgtttggtatcaaaaataaacacttggagtgggggaggcggcaggaagattcccccccaaatcccttccttcccacccaccccaccaaatataggaagagatgactccctctcccctattgaaaagccccatttaaaaatagattatactatcaaaatggcagcgggggagagacagggagacctggagtactggctggaggggccccccagacggggaccaccccccanaaaaccctccattgggaggaaacaggcaggaccccagggaggttggcagacaaaggaatggcttctcagggggaagaacaaagggaattcctccctggccaaa

SEQ ID NO: 213935 - DNA, 672 bp, Homo Sapiens
ttttttttttttttttttagtaaaaacattttattaattcctatgatgttgacattttcattacttgcttttcaaaatgaaatgattgtttcaccacaattcacacaaatcaactgatatactaatccacaccaaaagaaagaactcacaagaaaacagtatcatctaagatggtgggagtcacaggagccactcagtcctaactctcatgatcatgagcatgaaataatgatcctggtccacagaatgaagcccagtgagagggacccacacttgtctcccggtatccacctaccaaaaactgtttatccaaaaaaatgcagttatacagatccagagctaaccaaaagtttataaaccacaattctaatttagtactgactatattttctagtcagtaggttagatgaagaattattaataacatctaaccagaatttaaagaaaaatacgtgaaaagttcctttgataatgtttcctaattaataaaagtccatagaaagtccctacgcaccgtctaatatttctaccctttttttattttttctcctgatcatcacattttttcaggccaactataattcttgctatcacatctgttcttatttttctatcttgccatctaatctttgtccacatgcatatatatttgctgttataatcacagtgtgc

SEQ ID NO: 213936 - DNA, 641 bp, Homo Sapiens
ttttttttttttttttttgctataagataatttattacagactagcctataatctcctgtaacaatggcacatataataattaacaacagcaaagatgcttggtttcttgtttcatgtaatggccagtacatctgtggacaatgtcgagtcctcaggaagtccaggaggctgctacagaggaaatccaagaaccatgtcacatctctcaacaagtcttgggaagtccatctgactctctgaaacagtttgtctctgacctcccaggaagtgtggagggccccttccatccagcctgtacagagggatcagagtccaggctccttctatagggttgaatatcagaggggaatagcaaatgaccccgatgagagagagagagaccaaaggctagattctttctgcaaggtggaggacggctagaaggcagtggccacagatgagcaggactttttctagactggtttctacaatttttggctttgttcagggcccacccaagaagaaaatactcctggatccttcaactagccctcaggtagacacatgttagaacagcctgtcacgtcctgaagcatcactcccctgcctagaggagtgaggcagggagactcccaggcaggtggcccctagtgcctggggt

SEQ ID NO: 213937 - DNA, 665 bp, Homo Sapiens
  misc_feature (646)..(646): n is a, c, g, or t
ttttttttttttttttatagttaacaacaacgtattgtattcttgaaaaaaaggagtgatataggggtaccagagatgggcaggatgattgaagatcacagtccagccttgcaggaccccgggggacagggcgggcactcagaggtggacctccagcaggtagcgcaggcgacactggctctcctggtagatgaggtactcgctctgggagaatgtggagctgctgaactctgggcagggcacaggctggccctggggcaccaccacttgctggccatccagctccaactcagtgtcctgggtcggatcaggctcggtgtggcctcgggcaatgacactgtcgaagccaggaggtgggctcttcaagctggggttgtccgtgttgatatggtgctctctgcccagggccacctcacccaggaacatgtagccgacatggtgggccccacacttcatgccaataacatatccagctgacttgctgttctctgaggcaaagtagatgcccttgccaacacgcccaccagaatgtggcatgatgcggagcccactagtgaggatggcggccaccacggccatgttggtgccatgccacagcagcttccgattacccagtttggagtgggcctggaatctgtcttcctcnccttcttggtttactttcc

SEQ ID NO: 213938 - DNA, 714 bp, Homo Sapiens
  misc_feature (594)..(594): n is a, c, g, or t
  misc_feature (667)..(667): n is a, c, g, or t
ttttttttttttttttttgcatgaattaaaaattttatttaaaaacattacatctcttatacaagtgtacatatgtaaaagagagaacaaattttcgttccattgcaatttctctgaggaaattaaaagcctgccttcaaaacaagaggctgaaacagaaatcattctaaaagttaatgtcctaatgaccagcagaagagggcaacttcagttaggtagagaaaaacttgtgagtggctatggaaactgagaaaaactttcaacttagtagggaagaaaaacatatcatggaagaagtgagcatattgttgctaaaatagttttacctgccactgaaatttatgctctaaagggaaaagaagactttatcatcttttttgaggaaagctgctatttatatatttagttcttttgaggatagcaatggcccatgactgtttcactggggagagtttgaaatagtctttaaactcaaataaatggaccaaattaaatttgtcagtatagatttagtaaaataagattgctagccaataattgcagaaagaaaaagtatcatatttgttcacaaagtccaatattttgttcatttanaacagctttgagtggagctgttacctgtttatgtaatttttcttgttgaaatgaacaaaataaaattccctanaaactgaaataaaatcagagaattgtacacctccttaccagagacta

SEQ ID NO: 213939 - DNA, 691 bp, Homo Sapiens
  misc_feature (419)..(419): n is a, c, g, or t
  misc_feature (585)..(585): n is a, c, g, or t
ttttttttttttttttttgggtttttgtttggttttattttaacatgaagggtagtattaagtctaagcaagaacactgggcctgcaccaaaataaacaaacacacagtgattttttttttttttcttagcacagaggcagccagtattacacagcccctctctgtgttgtgaccctagcttgctgcttctggctgtgccaaatgctaagcaggggtttcactcagggcagcccgggaggcaaggtctgagagtggaagctcctgggagcctgagctctctctgcctctcgttagctgtggctttggccatcaactggaactatgtcattatttataaaacaggagcaatcacagggctgtggtgagaatcacatgaggtgacacatgtgaaatggtcctttcccctaagacatatatnattgtaacaaggaacaaaatttacatagaaaataattacagaacaacgtaggaccatgtcttcatttctccctggagcggatgtaaaataaggtgattgatttgagcaagcatgttatgaatatttagaaatgtcttctagggaagcaagctggcgctcaccgatnttggtttgccaggcatatcagaaggcactttgtgacaggtgcagtagggacgcggagtgatctcttcacgtgtaggcaatgcccagcccacacctaggccttgcct

SEQ ID NO: 213940 - DNA, 669 bp, Homo Sapiens
  misc_feature (636)..(636): n is a, c, g, or t
ttttttttttttttttttcaaaatgtaaacgtggttttatttaatgccttttatccatcacaaagcacccattccttcccagcatccccctcttcctagaaaacaagatgtagcgtaaggcacgtgcactgtccacatgacgtcaagtaggtctttaaaaacaaaaataagcaatagtcttttcaacagcttgaactgccttcctctctaatgttcaaagaatgattgtccccacaaagcacaacttggagaagagagtgcttacattagaactgtgaaccaccctacataccagttcaaaaaaccaaaccaaaccaacgactaagaaacccagccacacaggtacaagagcataattctggagtaatgagactagtccataaattaaaaagaagacaagacaaacccatcccctcctcatcaccaggcaccccccaaattggcaattccttgcttttgttctgtgagtcttacagaagagtctagactccgagccagcccttttccccaaagtcaaatactccgaagccaatgttgggtactttccttctcagaacccccatttggactgatggacggcttctgagatggtcactggacacgtcgtctcggctgtggggcccttcctggtgtcancatctgggtctctggagttctcggtggggaggt

SEQ ID NO: 213941 - DNA, 481 bp, Homo Sapiens
  misc_feature (410)..(411): n is a, c, g, or t
ttttttttttttttttttagcaacaagaacctgttttattttttccaaatacagatacagaagtctgcgtgttttgcaaatattgcttcaaagcaacatttctatatacagcgccttctgttctaatagcgcgtaaacatagatatgtatccacagtgcaatgttggctcatcaaggatccaccttgcatacacttaccacttaaagaaacaaaatgattagtcaaaccggaactatttttgtcaaggtaattttttataggtggatagtttttctaaagacaaaacttaggtagtgcacatatttctttcttttcttttatttttatttttttgagatggagtcttgcagttgtcgcccgagctggagtgcaatagcgcaatctcggctcacttcaacctccgcctcannaaaaaaaaaaaaaaaaaaaaaaaaaagcctacagccgcggccgctccaacatcagaatggtcctcgtgcc

SEQ ID NO: 213942 - DNA, 721 bp, Homo Sapiens
  misc_feature (686)..(686): n is a, c, g, or t
ttttttttttttttttttcacaggggcggagaccacttttattgcttgtctgggtggatggggcaggaggggctgagggcctgtcccagacaataaaggtgccctcagcggatgtgggccatgtcaccaaggaagggggtcttcatgcagccggtgcagagctggtccatccagaggggtgcctcgtgctgcagcggcgtacggcgtgggtagaaggtgaagtccacgcggtagttgagcaggcagctgagggaggccatgtagaggtcagagaagcgcacgaggcgccttgagaagtaggtggggttgtggaaggtgcggaagatgctgccgaactgcgcattgaacagggccttggtgatgcacctcagctcctgccgctctttcatccaggcagccagcacctgcctcgactccgcgtcctgataggtctgcatgcgctccagcagccccgtgagcgcctgctgccacgtcagcgagtgcatgtactgctccgtgttgatgatgcggatctcacgctccagctcggggatgatggcgcctgtgcgccagccgtgccgcagcatgagatccgccagatcactatagaggtggtccccgaagtagagcacgcgggggccacgccattccgtcaagcgtaagaagtcaaacaggtttccctgccgatagatcttgcccttttccangcgggtgatccggtccactgaagtgagccttctca

SEQ ID NO: 213943 - DNA, 720 bp, Homo Sapiens
  misc_feature (621)..(621): n is a, c, g, or t
  misc_feature (642)..(642): n is a, c, g, or t
ttttttttttttttttttgcttgtgaattattttactttcaaaaaatatgtaagttagaattgtaattctaaaggcactgtcgtttgcttacacattctaacatatttctaataagaaagtacctgctttcttaagagaaaaagggataagttaccaaaagcagcacgttctcctgggctcataccccggattcatccatgaggccacttccattgtaaagcttttagcatctcttgatttctcttcacactgaggcacaaaggcctgctacttataggcattacttcatttttccttatgaagggtactataccaacacagactttatagtatgtttaaaaatcccaactgcaagatacacaggatgctgtaggcctgatttcctgttgtagaacctccagccctgtgttgaatgaggaggtgcaaatatatagacccttaagatcagaccacagcaggcattcaggtggaggggatgaactccattcattccagctgtgcagtgggacatctgcgccctccgcatctcggctcattcctcatctgagccactcaagagggcggtctggtaagtgtcatctgaattcagcttctgaattccaatgatttctccccttccngtgtctcttcatccgagtcanaaggcagtaaacaagagaatagttgacggccacaatgctgagggcagccaggtagtgccagcagaacacatggtgatg

SEQ ID NO: 213944 - DNA, 726 bp, Homo Sapiens
  misc_feature (674)..(674): n is a, c, g, or t
ttttttttttttttttttgccagttggttccttttttaattacatttaaaaaagacaaaggcatggagctgtatggatgacacaccttgaccactgacgaggaagatttcactcagccacgtctcagtggagtctcagaggggagggtttccacacagcacggtgccaagggccagtcttgacgctgtcatagacaatgacatgcaagccccagccctggctcgtggttcaggtggccctccaacactgagctgtcccgggacgcctgccgggctcgctgagggcagggccgggacttgctcaggttgctgggtgttcatgaaggaggatcgggtctgccagatcaaactccaccctgcagcaattagcaaggaccaggccctggtctgctgaggctccactgctggccctgggttctcggcttttcgttgtcgatgactcctacgctggcctctgaaatactccctgtgtcttagttcaggggtgaagacacggaatatctttattgtcgagaaaaaattaactttgcacaaaaggaggtgctcatcagagagcttttcaatgagacccccatgtgttccactagaggccctgctcagcccagcccgtgtcctcccagcgtggggcccaccctgctcattacgtacattgaccaagacccttcaacctcgtcncgaccccagcacgggtgttctttgccacactcttgttctagtgttttcggat

SEQ ID NO: 213945 - DNA, 547 bp, Homo Sapiens
ttttttttttttttttttcggtcataagtttaatgaagtctgaaaggtaagcgccatcgtggtcagagatacggaggcccggtcagactctccctctgcacctcaatggaaacgatgtggtgtccgggtaccatggccaggcccagcacacggggctccccggcagagaaggaatccgacggcttgaggaactcctgcgccgagcccaggatgacattgcagtcacggtcagtgcagaggaagcagccgaccagtgtccgtccatctgtcatgcgaatgcgcatagtcttgttgagcagcgcctctagctgctgtcgggcgcgctcagccgccgagtcctcgcgctctccgtccgaatccccggcactggagctgctctgacgccgactgcaacagccattctcttctcgtagcagcatggtcggtccagctccggccatttgcccggaggcctcctctgggcctttcaacttcctaagcacctttcaggttgggtggtccgagatctcgcgagcgctcccgacctctttcctttcgccctcgtgcc

SEQ ID NO: 213946 - DNA, 735 bp, Homo Sapiens
  misc_feature (646)..(646): n is a, c, g, or t
ttttttttttttttttttgaaaagcagataaggatactttttgctcacacccaggaaaagaaacaaaacaagagacaaaactaagttaaaaatatcttccagacatagtgttcattcttgccttaggcaacggtaagaaaggcccaaaatgtccagaagaagctgcagaggacagtgtagcccccggtgggaggggaaactgaaaaataattattagcaaatccaaagatcttgccacatatagtttgtactaaaaagaaaaaaaattactttttcaaagtgatggcaaagtcaaacaaaaaaagaacatatataaaatgcaaactgatggagtaacatggaggtatgaataaaagtgcttagagagagcatcctcctccccttgggctgggcattgctagatactggaagccagagtgaatggtaacacagtttttctaagaaaaccttctaggaaatgcgagtctcaagttagattttgaaagagggggaaaacatggcctggcagcaggaggagctacagtatttccgttggtaccgtctgtcttcagggccactgacccccaagtccttgactgtctcactatagaatgaggccagcacataccgccagacacacagattcctatggcatgggtgagagacnacaggacatacattgctcaccttgggatactgacggtgacatattcagcaagatgcagccaagtacatcccagtctagctgcaagcgct

SEQ ID NO: 213947 - DNA, 421 bp, Homo Sapiens
tttttttttactttatacataattatgcagtactagtactgtaaagatcacaaattatatagaccaaattgtcacatgaaaagaatacttcctagccaaatctataattctgataacgactttaacctggttttaatactattttttgataatttccaggtatctcttgttagaatatctttagctctgaaaagaaagaagcaatatgaaatcttatactatgcagctttccaaaaattgcattttctgtaccctcatacatctttcatcatcatcagtagcaaaaacaaaaataagaaattgacagccctcagaaacccagatcagtattggttggggcttattaaagaaaagaaatgccttccctaataaaattcctaaaaatctacaggtcagtagcttctaaatatgttttgaggag

SEQ ID NO: 213948 - DNA, 667 bp, Homo Sapiens
ttttttttttttttttttaaaagcagggaatgcctttatttaaaaaaatgaaaaacagaaactaaaacaaaataacaatcacctctgttgcctccatttgagagaatacttccaggggctctgcatgtctggtccccaacctggtcggggagttcactttcagaggctcagggatgggccttccccagccccaccagcaaatcatctctccctgcttccaggagggtacttactctccaactagtgggctttatgggccaggaaggatgacaggaaggggtgtgtggggtactacgtccctccacactgagaatccgaaagccaagatgcccaagattctatcgttatctgcttgtcttgtagaagcccctctgtgagactgaggggcaaaggagagagggcaggggcgtgtctcaacccttctggccacttctaggttgtgcagactgccactcttgttactacgatggactgtcagatcagcaggtggcccaggagggcttgcttgatgcgggctgctttttccttttgcctccgtgccatgcctgtgaggtagttggtacttactggaatcccactgcatgcatgaagaaacaggcacagagaagccaaatgactttcccaaggtcacacagcctgaagggacagccggctgtcccagctgttt

SEQ ID NO: 213949 - DNA, 708 bp, Homo Sapiens
ttttttttttttttttttgcaaaatgaaaaaaaatttatttcctcagtgttttatccactgtcaatactgtatttttgatgcaatatatttgccaaaagaactcagcttttattttccattttaaacaactacaatatttacaagctgttcagaataacactcagacacacacacactcacagacacacgtaagtacatatgtccttatctctggtttatactgaatgctggtaaaggccatgaatactttccagagcccatgatcagaaaaggaaaacccattttcctttcttacgttcactttcctagaatcattttcaatattcctccttccatttcctcatgcagagctcattgccagacttgtataggtttaatcagtttttacattttacttttacttaaactataagcttttaaaaagcataagcagacatgattccccccccccccccatttctattattttggttgtagaatcaagcttcatagataaaaaatcttgttcaatcacaagtacactaaacccaagagtcatctggagcagccatcttatgctctatcactactctgttgtgaattccggggcaccacctcattgtgcaggtaaaactcaggaattcatccccatcacagtgttagatgacctttgttccttctagcttggctccactgaatcataaattgtcaggtacagagctgaggca

SEQ ID NO: 213950 - DNA, 500 bp, Homo Sapiens
gctcgaatagagctcttggaagtccctccaaccatggcctgggtctccttctacctactgcccttcattttctccacaggtctctgtgctctgcctgtgctgactcagcccccgtctgcatctgccttcctgggagcctcgatcaagctcacctgcaccctaagcagagagcacagctcctacaccatcgaatggtatcaacagagaccagggaggtccccccagtatataatgaaggttaagagtgatggcagccacaacaagggggacgggatccccgatcgcttcatgggctccagttctggggctgaccgctacctcaccttgtccaacctccagtctgacgatgaggctgaatatcactgtggagagagccacacgattgatggccaagtcggttgggtgttcggcggagggaccaagctgaccgtcctaagtcagcccaaggctgccccctcggtcactctgttcccgccctcctctgaggagcttcaagccaa

SEQ ID NO: 213951 - DNA, 504 bp, Homo Sapiens
gggtgaggcgcgcggggtccgggctgcggcttcccggtgcggccgcagtgggcaggctcgaggcgtctgccgcacctcagcccacgacctgccccgctgggaggtgcgggccgctggccaggccctgaccgcaacctggcccagaggccccagccctcaggcaaggttctccggtgaagccacagcctggccacctgtcttgatctccccaccgagaaggccccgcccctcccgctgcagccccacagcatgcagccccaggagagccacgtccactatagtaggtgggaggacggcagcagggacggagtcagcctaggggctgtgtccagcacagaagaggcctcacgctgccgcaggatctcccagaggctgtgcacgggcaagctgggcatcgccatgaaggtgctgggcggcgtggccctcttctggatcatcttcatcctgggctacctcacaggctactatgtgcacaagtgcaaataaatgctgccccgcatgcac

SEQ ID NO: 213952 - DNA, 493 bp, Homo Sapiens
  misc_feature (484)..(484): n is a, c, g, or t
gcctcagctcagtcacgtctcccagcctgccacccacacatgcgagtgacagtggcagtagtcgctggagcaaagactatgacgtctgcgtgtgccacagtgaggaagacctggtggccgcccaggacctggtctcctacttggaaggcagcactgccagcctgcgctgcttcctgcaactccgggatgcaaccccaggcggcgctatagtgtccgagctgtgccaggcactgagcagtagtcactgccgggtgctgctcatcacgccgggcttccttcaggacccctggtgcaagtaccagatgctgcaggccctgaccgaggctccaggggccgagggctgcaccatccccctgctgtcgggcctcagcagagctgcctacccacctgagctccgattcatgtactacgtcgatggcaggggccctgatggtggctttcgtcaagtcaaagaagctgtcatgcgttatctgcagacactcanttgacactt

SEQ ID NO: 213953 - DNA, 508 bp, Homo Sapiens; identical to SEQ ID NO: 54945

SEQ ID NO: 213954 - DNA, 504 bp, Homo Sapiens; identical to SEQ ID NO: 50189

SEQ ID NO: 213955 - DNA, 485 bp, Homo Sapiens
ggacgagggaagaacccagcattgcagcagctccaccatggcctgggctcctctgctcctcaccctcctcagtctcctcacagggtccctctcccagcctgtgctgactcagccaccttctgcatcagcctccctgggagcctcggtcacactcacctgcaccctgagcagcggctacagtaattataaagtggactggtaccagcagagaccagggaagggcccccggtttgtgatgcgagtgggcactggtgggattgtgggatccaagggggatggcatccctgatcgcttctcagtcttgggctcaggcctgaatcggtacctgaccatcaagaacatccaggaagaggatgagagtgactaccactgtggggcagaccatggcagtgggagcaacttcgtgtaaactcggcggagggaccaagctgaccgtcctaggtcagcccaaggctgccccctcggtcactctgttcccgccctcc

SEQ ID NO: 213956 - DNA, 661 bp, Homo Sapiens
  misc_feature (83)..(83): n is a, c, g, or t
  misc_feature (597)..(597): n is a, c, g, or t
ttttttttttttttttttcacaaaaaacagactttattgaagtatttagcactaaaccccacacaattccagctctgtagctnaggacacagccacttggcaatggcaccaggtgttatacaagaccaataagttaatgtaaaggacgcttaggtgtggagggccagtgctcagccgtctcctggctcagaacaaggcactctgggctccagttaggacactgagaggccagggaaaccaacatgccctggagaaaggggcttagagacaaaccggaaaagcacagcatccaagcagggtattcacgcatggggggcagagtaggcccaaaagttgggggttgctgatgcggtaagagcacagtgagagaaatgccaggtgcatcccttcagcctcctgcatcctcccccaggttcctttgatgggccatcctgggtcttcccttggcacccttgtgcaatcggctacatcgttttctttccagtagagagaactgtgcctcttctaggtcagacaccagagttcttggaaccttctgctatattcacagtctgttccagtccaggtaacatgggggcagagagttctgcacaggtnaagtcagaactcagctctccctacctctcctagcctcaattcagttgctttctcattgaagcag

SEQ ID NO: 213957 - DNA, 666 bp, Homo Sapiens
  misc_feature (586)..(586): n is a, c, g, or t
ttttttttttttttttttcagatttttagctttatttcagaaataaacctttaaaagtaaaaacaatactgggaactttatttcaataatatcccaagttatgggactaagttgatggttctgaaagtttacacagttgttctacatacagtcacatgctgcattatgacgttttggtcaataacagaccacaaatataatggtgctcccagaaggttacaataccatatttttactgtacattttctatgtttaaatatacagataccattgcattacaattgcctatggtattcagcaaagtaacatgctgtacacgtttgtagtgggagcaggaggctctaccacatagcctaggtgtgtggtaggctctagtatttaggtttgtgtaagtacattctgtgatgcttgcacagcaacaaaatcacctgatgatgcatttctcacaacatatccttgtcattaagtgacgcatcactgtacattctataatacaaaactctttttaacagaaccaaatgagtatactacagcgagactccagtgttatctatattgttttggttgacccttcctctcatatatnactattaaagataaaaataacctgtgggacaactatttttcatataaaataattccatatttaaaataataatgaactgc

SEQ ID NO: 213958 - DNA, 586 bp, Homo Sapiens
ttttttttttttttttttgtcccttcacagtgtatttactgtaactacaacagctcgcaagacacattctttttctgcagaattgtagcgggtacttagggagtttgccgaccagaccttctgcacaggaagctggcttgcatcatggaggcagtggactcctgatagtcccgcctgcgcaggcccctttaagacactgacacaaaagactgcccagagtggcatttgctgctgaggctccagggcaaaaaccccatgaacaggaaagcatcctctcagaaacagataatccgcttctcatcttcatagactttggcctcctctggttttatcaggtttccatttaggcaaatctctgttatgccagtgttgctctgtaacgcatctgccagctgggcagtccccttagctgtgatctgattctggataagccataaatgctttaacgtctggttgactttcaacatttctgccaaactctctgccacttcatcgttgagttcattttgggtcagccacagtatttctagagacgtgttctgctgcagggccctcgcaaggctctttcctccttctgtggagatgc

SEQ ID NO: 213959 - DNA, 675 bp, Homo Sapiens
ttttttttttttttttttgaggtaggaacttttattatcacaagtccagagaggtaaagttacttgcccaatgccacacagcaagcaagtggcctgtccaggatgtgatcttaggtttgtctgactgcagagcccccaccctcactttccagtgtgtgtgagggggtcaggaacagagggaggactattgtaagcggagccccaggcactgtagggtcctggagaaataagggggcagtggtgccaggagctcaacaggggtgtccctggccctggtgcctgggagaaggagccgatgtaggtggaggtgcaagggcagctgggcagcctgggagggggtcaggtggaggcgtctgaggagggcttcatccaggacctgtctttggggcttgttgttctcagctggcagcagaaatcgctggcccaggacagtgcccacacgggcagagtacatgtggtccccaagcacagggcagagctgtagtaccatgtgcacctgtagttgactggagaacactgtcagtggctgcagctggaccagggcacagccagagcctgtggctaccacacgaaagtgactgagagtcttcttgacaccttccaggatgtcctttcgggatggggccttcactggaactgtgagattgacccatcaatgtgttccagtttcagggc

SEQ ID NO: 213960 - DNA, 789 bp, Homo Sapiens
  misc_feature (719)..(719): n is a, c, g, or t
  misc_feature (774)..(774): n is a, c, g, or t
ttttttttttttttttttacgtatgctttaacttttttattttaaaataatcatagatttacaggaaattgcaacaacaacaaaaaaagtacagagattctgtgtacccttcccccagtttcgttcagtggtaactccttgtataactacacaatatcaaaaccatgaaatagatattggcacaatccatagacagtattaaatatacatgcatatatatatatttttaagtgaaaaatatttttaaacctcgctttgcctcacagccaagaagatcaaatactttctccaaaaacatagaatttgtatctaactccactcgctccaaactcaggtccaaccatgaaattattgatccctctctctaaccctccaactacaggcaagaagctgcccatacattccccaaagcaggagtgcactctgccacaggcctagatgccgtcaacctcctggaccttgaactccctaaattaatggcctctgtgtgagtatgtgtaagcagcccctctctgtcccagtccatcctaaaatcactcccttggagccaccactgcccctctcatcttctagaatttctagaaagataaagagctagataagcatctaggtacctttcttctgctgttagctctaaagacaagtgaatatatcctagctaggatgtactctaaggaatgcagaagtaggccgagtgcagtggctcattcctggtatcncagtgctttgggagggcgaggtgggcggatcacctgaggtcaggagtttgagtcnagcctggtcaacatg

SEQ ID NO: 213961 - DNA, 825 bp, Homo Sapiens
  misc_feature (676)..(676): n is a, c, g, or t
ttttttttttttttttttgcattattttaagatctttattattaagtaactcactggggttgtcaaagtatgttataaaattacacagataattagagatatatgttacatagaaatgctgattttacactctcttctgagtacaagcatttgattacagaggctcatagcacaacaaaatgtatttcacgggacactgatgcccctattctgatattgacaaggcaaacatcagcggtagcagagtcaacaaagcaaagcaagatgaaatgaaactagatgtaggtaaaacaagctaaaaatatttttaagtgtttttgtttattgtcatggtggctgttttctacttacaagattgcagtactctaatttagccaagtaattgctgctgtaaaatccaaatctacagagcgcacaattttttaaatggagtgtgcattcctcaagcaagactaaaaacaatcttacttgggtctctaatattaagcttcagaacagttttgcaacttttgacctgaacaaatctcttatccataaaacaagaggaataaaagattgcatacgtgcatttaaaaagtaactttattactcccaggtcaaaaaaaaaaaaaaaaaagggaaaagaaggagaaagggaaggatgagggggaggagggaagaaaggaaggaagaacanaaaaagaaaaaagaaaagaaaagaaacagaaaggcactctatctacctatacctatatattttacttgtatttctaatcttggactatgtaattacttcattcacttgtgtgttttaattttcatggagagagaagagaaagaagattt

SEQ ID NO: 213962 - DNA, 642 bp, Homo Sapiens
ttttttttttttttttttgatttaaataggtttatttcttcatttacaagaggaatatatttggcttctctcttaagactctgagattcacaatcagcagctctaaaaaataaaggagcagtttggcttccggaaggaagaggaggcaacactcggacctggttcttgtacaacaagaaaacatcgctggggccccgctgaggctggagtgggggtggaggctggtctttggaggatgccacccccaccccatcctcttgtcaggccctcggggtaccccagagcttggtgggtgagtattccacctgcttacacaccactgaagccacagccagccagtaactaaggggcaagaagagcattgtccaagctggctcttggggggtcccccattggccacaaggcctcaccccccaccccacccccgcaccagaaccaccttgattgcagcagaagtgcagggagtgggtgacgcagggggctaagctcccccaaagcgggttggggctggtgtgaagttggcagctgcatcctggtgtgtgcatggatgggaggtgggtgatcgaaggcctggcccctggggtcacttggtggaatgccagcagccagtgtttgggtacgggccgcctctctcggggcctc

SEQ ID NO: 213963 - DNA, 725 bp, Homo Sapiens
  misc_feature (664)..(664): n is a, c, g, or t
  misc_feature (700)..(700): n is a, c, g, or t
ttttttttttttttttttcaatttttaatttttttatttagaaataataaaataagacataatatataaaaatatgtacaatccatggtttgtgcagtacaataggaagactttagatacaaaaagacagcaaatgggaaaataataactatcacgattgtcaatggctaggattgttcaacttgccagagcccagagcggaaacccaaaattaccagaaaagagattctactttgctgagggttggggatgggcaggtagctatgccacacttttttttttcccaccttaacattattagacacagagtgaaaaagaactcactctacttctcaggacaagcttttgcttttactgagtggtttattataaaatatgaagtgacatttattaattgtaagggaaatatgatttacgggacagaactcatcaaataaacagagttgagataggagtgtactggtaagaaaggaagtaaagagaagaaagaatgcattaacagaataaaaacaaagtaaaacaaacttttctaggaatttggaaatgacaacagtgccatagtgacatccttaaaatgtctgattcaagtatactcttagagggatagaaaactactcctttctcaataatcaaaatagagttcactttgtctacattttgtttnaaaataggataaccaggaatctatggctcctcccanaaatatagtgcccttccagatatgg

SEQ ID NO: 213964 - DNA, 630 bp, Homo Sapiens
ttttttttttttttttctgtggatgatcaattttaatacaattatacattcatgctgtggtggtaacaactttcacattatttgtaggactacttttctcaactcatgacaaaggcacaatccaaaagtataaattaacattacaataagttttaaacaaatgtggacaaaggaccaatctgaagtattaaacagaaaacatctgaatatggatcaacttgaatatattttcattccagaaaatattttgtcttttcaacactgtctcattttgctatgatggcagttttgtgtacctggtgacttactcttaatacccattcaacatgtaacaattataattaagcattcacatactggatagacaacctagatttttaaatatgtctgattttttaaaattatttttaaatgaattattctgctaaatgtcttacttttccatttcagttaatcatgtgaaaataaatgctttttcttccccttatagaattcagtaactcagctattttactttagatacatgtgaatttagccaaggattattaaacaaatagaaaaaaagccatccaatcatagtgcttaaaggcaatgtaatatgtaaaatgttaaaatcaggctgatttattt

SEQ ID NO: 213965 - DNA, 617 bp, Homo Sapiens
ttttttttttttttttttcctagctaatttttgtatttttagtagagacgaggtttcaccatgttgcccaggctggtcttgaactcctgatctcaagtgagcgatcacccgcgtctgcctcctgaagtgttgggattacgggtgtgagccaccacacccggcctctcactggctgtttcaggtgaaccaaatcccatggccccaaaaagtggccagagtgcttcagatcactcagcaaacctttgagttgctgaaaagtttacttttgagttttaaactgtactttgaaaactatattgtgaactgtgttgacatgaggaaaggctgggctccctgaaaacatccagttccacagcagggcgggcccaagcccagccaatccccaggcaatgcagggcagggatcccacctggtataagtacgggcagagggcagagccaggctgtatcgaggggcggcgctgggaccctcctcgcccagaattcctactcatccccagcacagaagtgctctgtagggccagctgaggacaccccggttcactgagggtggcccacagtaagtcgccgtctggcagtaagttagctctgcaggtgtggaccccaagaccacacacg

SEQ ID NO: 213966 - DNA, 613 bp, Homo Sapiens
ttttttttttttttctttcttgttttgcatcaacttttatcagtccatgcaacttcaatgccctcgatgaaggatgcataaaaagccatacttcttaaaaaaaaaaaaaagaaaaaaaaagacttccttctgcataaagagatatatttgccacatcagtccctgtagcacagttttcaaaaccattctgtcaaaaatacagtaatacaagactggctttagtgtcactagcttacactgcttttcatgtatttaggccacctgttgttcctggtactgtatcatgcaataagtcatcaagggcttagtctagtgtaccggtaagctagtggcactgaagcgcttttcacaatctcaacatacatttgaattgcaacacacagatatttctagagtattaactagtgaacccttttattattaaaaaaaaaaaaactacttacaaccattgaagaaaaaattgcaacaaaaaatgtaaaaattgaccgtctccaacttgtcccctttactattaacaatgtgaccaacagatctgtggcacggacacagtacaaagagttgtcatggcaatgagtttggctgatgcaaaggtcattgtgcagggtcaaagggc

SEQ ID NO: 213967 - DNA, 601 bp, Homo Sapiens
  misc_feature (501)..(501): n is a, c, g, or t
  misc_feature (504)..(504): n is a, c, g, or t
  misc_feature (521)..(521): n is a, c, g, or t
ttttttttttttttttttcctttataaactacccagtttccgggtatgtgtttattagcagcttgacaacagactaatacaggcaggtttccagaaagcattttacctgagttcccagaattcatgctggggggtgtacggggagagaggtgggagatggtcatgggtggttagatcattgatttgagatcaaatcttttcagtagctaaatgaagacctaagagccagaataacctagattatataaagagattataaaaggaaataggcatttctaaaaatgtattacatttaaaattgaaacccataatgaagaggatgattgttttttacctgtggatagaacacagggttactgatgattacacttgggtattgctgtcatttggttcttttgatcttcactttgagtcaatgggactgttcaggcattctgtaaggaggacagacaccagcgtgacactgcctcagcatttcttcaggaagaggctgccatggancanacaccggtcataaccanagaattaccaggcacttaaaaacttaatgaaatggtcgcctttaagaaggaaaaggataaacggggctcagggaaatgat

SEQ ID NO: 213968 - DNA, 527 bp, Homo Sapiens
tttgctatgagtcatttatttgagatcatttatcaaaaggcacttaccgaggaccaatttttgaggcaatgtaataatgttattttatttttacatgagctagttcttatacaaccatcaattctgaatcttgtttagtttgatgttaagtaatatacacaatttatattgttcatgtatgaaatttgtctatttttccatagctttttctgatttcctcattaggatttcaaatatcttttggaaaatactcaaagccaaaaggtggtcagaatttcacattctaaattgactttttattttattttttttgagacagagtctcactctgtcacccaggctggagtgtaatggcacgaactcagctcacttcaatctccgcctccagggttcaagcaatcctcctgtgtcttctaaatcaatatcaaaatctaaatcatcatcactttcttcatttcttctgcagcttcttctatggttggaacttagattattttcagtatgttctattttttctgtttctttat

SEQ ID NO: 213969 - DNA, 551 bp, Homo Sapiens
tttttaatctcaaattatccacatttaatgataaattatggcgaactccatattcttcaactatctctgttgtagccagaagctacaactttcaatagcaagaacaaagagtggatgagaaactgacatacgtgctagggaaagaacacggcatttacctacccatcacatctttgccgaaataaaggccaagaaagggtgtatctgcaaatcaaaccacttgaagcctatctgtgaaagatactaggcagaggcaagatcctttctcacaagacttcctctgttccctgtcatcactgaattaaatcctggctagtttgttaagtattttcactgtgactctgactttttttttttttcttggttacaatggtttacacgtatataagccttcatctcaaagctatggcttatttctgttatagaaaattttatttgcttaatgtttgttacagaaacttaagctaactcagcatttttccatttaagttactgtgaaaaagagaacagagcaggccagagactgctattctttgatcttgcaaggttca

SEQ ID NO: 213970 - DNA, 452 bp, Homo Sapiens
tttttttttcaaatatatgaagtagctgtggtaaaaggtcaactagagcaaacttaacacctcagtcttatacacataagcaacacttggctgagaaaagccacaaggggaaaagaatacagtactgaagaaaaaacacatcagcaacacctttatgtgtgaagttgaccagtatgagactgaagccaaagcagagaatgggtaggctgcgaatgtactatatatactttggcttatcaatctctcatttgatgagattttgataagatatgacagctagttgctcttcaggcagtttggctggaatcagtggtttccggtaaacagtgacttgcctttcttgattgcagttgaggttttcagttttcttagtagttcagcttgtacttgagtcaccagatgtaaattagacatttctctcttcagttcccagtatgcatgctgcatattat

SEQ ID NO: 213971 - DNA, 548 bp, Homo Sapiens
ttttttttttaacctggaaaagctggttgtctttatttacaagatatcaaaaatataaaaactgtacaaaatgcaacaaaggcaaaaactggcagtgacttggtctaaatcttttagtttcccaaagcaaggctcagtactggaggtaagcaactgaaatgtctgtctgacttcaagtgtactaggttgtatgtagctgttttagctgaagtagaacatggaagctaaatttcttcacctggtttatcgagtgtttgggtgcactcaaaactcaacaggtatataaattcagatgtcagtgggtggctgtacttcctctagatctaagaaaggaaccctacctagttacatacattccattaatcatgggccaagaaaaaaaaagttagtggatcatttaacatagtttttgagtgccatacagtaactacgtttttacagcagaaacatacatgctcataggattcttcagctaaaattcaagatgatagtatatttctgaatttgaatcttgaagcaggatgaattattgaaatcaactttttttc

SEQ ID NO: 213972 - DNA, 465 bp, Homo Sapiens; identical to SEQ ID NO: 60205
  misc_feature (256)..(256): n is a, c, g, or t

SEQ ID NO: 213973 - DNA, 507 bp, Homo Sapiens
tttttttttcttattgttaacataaaatttaaattttgatattaaatgctaccagtattattcctttttcaaagcccagtttagctcccaaataagctcacatctgtcttttagccctagcacttccagttccacattcctgtttaaagtacttcatccccctgcccctacctacttttttccttccagaagtgactaatcttcctgttattctactctgtcagtttttcccctagtattcttttcatgttgcataatgtttacttttcactagctccttctataattttactaccgtctcccttggtactagccttccgttttcaacagattaaaatagccaatatttatgtattagcaaacttttttgtcaagtttcgtgctgttcagattaagctatttcctcaagtcaaaaatacaactaatcttttgatagagtaaatattgtttttaaaaaaatccatatgttgaccttcaaagttaaattcagtgtaagttttagaatta

SEQ ID NO: 213974 - DNA, 415 bp, Homo Sapiens
ggtcgacgaaaattatagcagcttctttcacaggtcgttttttattcatctattcaacagatacttattgaacacctataatgagctggacactctatgggccttgcaatttagacatgaatagagttctcaggtaccttacattctaattagaaggagaactttgacctctaaccaagacctgtttaattcataggagggtttcttttcttttttttaaactgcactcacggtcatccccccaaaggatgagggtttcttaagttatgttgaaaattcaaaccttgagtccgggcatggtggctcacgcctgtaatcccagcactttgggaggccaaggcaggtggatcacgaggtcaggagatcaaaaccatcctggctaacacagtgaaaccttgtctctactaaaagtatg

SEQ ID NO: 213975 - DNA, 499 bp, Homo Sapiens; identical to SEQ ID NO: 61471

SEQ ID NO: 213976 - DNA, 535 bp, Homo Sapiens; identical to SEQ ID NO: 61799

SEQ ID NO: 213977 - DNA, 474 bp, Homo Sapiens
tttttttttaaaaggtggatgaaatcatgagaatgtttagtttggtctggttttcttctaccaaaatgatggaatatttagaatttcagggcaataaaagtggaaagagagaacaagccactagctgggtatagccaccagcagagtcctctgaaggccaagaagactgattataaaactgtcccctaggctgggtgcagcggtgcacagctataatctcgacactttgggaggcagagattacaggcgtgacgactgcgcccggccttgaaaaagcttttaaatccatcctcatgaattcattcttgcagaatctagacaaatgctgtgattaatttaaccaccaagttcattttcctctgcagtttttacagtaaatacagtatagtatagtgtggcatgatatagtatagtaattttatagtaatttaggtgttagtttgacagaggaaggatgattaataccagttattc

SEQ ID NO: 213978 - DNA, 498 bp, Homo Sapiens; identical to SEQ ID NO: 62043

SEQ ID NO: 213979 - DNA, 491 bp, Homo Sapiens; identical to SEQ ID NO: 60152

SEQ ID NO: 213980 - DNA, 480 bp, Homo Sapiens
ttttttttttaatccaaacaccaacttgaacaagagactttcagttttaaaacattttaagtgggaaaccctgcctgtcaatgcatcattattgcccttcttgattgctgtcttggtagatgattcactgcccctccctagaagaggactatgtgtcatctgcctgccccatgacctcagccttggccacatgacttgtggtaccagtctctacagaagaaggatgcctccttatatgcaaactcaggtgtggccatgtgatctgcactggccaatgaaatgtgggcacaagtgacacctgttatttccaagcataagcttagagcctatgaatggtttgccaggtttgcctttcctcctccacccttcctgggtataggacagaagacaggaaggagcagaactatagcagacccacagtagacacacagcacagcaagcaataagcctctgctgttgcaaccactggggttttgctat

SEQ ID NO: 213981 - DNA, 430 bp, Homo Sapiens
tttttttttgagatactactaaattttaaaaagttgcttttctttttattctaagtagttgtggagttcctcaaatatgctaaacaattttcagaattattcatgaaagctattaaagcatccaagtcaacttattagtataacttgaaaaaatgcttccctgtctatatgcgtttttagtagtgagagagttttgtctagttttgaatttagttcttctcaggaacagctgacctgacaatggggcctttctctcaacttgtcatttagttctttcggaagaaatatctcagctgtggttaggctaacttaagctgtagagtttgtggggcttttttttttttttcttcctgctgtaagtttttattttgtttttggactttctacttgttttccaatacgcaatgtgcaaacagtatccttttttact

SEQ ID NO: 213982 - DNA, 398 bp, Homo Sapiens; identical to SEQ ID NO: 53776

SEQ ID NO: 213983 - DNA, 498 bp, Homo Sapiens; identical to SEQ ID NO: 61417

SEQ ID NO: 213984 - DNA, 468 bp, Homo Sapiens; identical to SEQ ID NO: 48287

SEQ ID NO: 213985 - DNA, 578 bp, Homo Sapiens
gtacaggagatttggtgaacactgtccctccgacttgttaatgaaagaataatcagaagcagtagacagcttcttctatttcacttctcctcttcactccctcaaaaactccttccaagtcctacaatgatttttttcttttttgtttatgtataatgttagcatcattagcttttagcttcttgaacttgttcttatttttgccatgtaatgtaaaaatgataatctatatcatggaattatttcatcagtattgtgtattttccaacttaaagtatacattgagtaatcgtggatgacctctcctattgtatgtaagcacattcacatcttaatcttttaaagaatattatttgcacataacttactgtcaatacggcactaatttgggggtagctattttcttattgttaccaaataggtaaatgaggtcaggtgtggtggctcacacctgaaatcccagcactttgggaggccgaggtgtttggaccacttgaggtcaggagtttaagaccagcctggccaacatggcgaaaccctatctctactaaaaataaaaaaaaaaaaaaaaaaaaaaa

SEQ ID NO: 213986 - DNA, 1000 bp, Homo Sapiens
ccggataaggtgccatcttcagctaccactgcaaggccctgagggcaacagcagcacggcactgcccacccagctgctgatggcctggtgccagctgggagtcctcccggcacttcgaggccactgagccacccttccagccccagcccaccatggacaggggtatccagcttcctcctcaacctcgtcctctgcccctgagccagtgacgcccaaggacatgcctgttacccaggtcctgtaccagcactagctggtcaagggcatgacagtgctggaggccgtcttggagatccaggccatcactggcagcaggctgctctccatggtgccagggcccgccaggccaccaggctcatgctgggacccaacccagtgcacaaggacttggctgctgagccacacacccaggagaaggtggataagtgggctaccaagggcttcctgcaggctaggggaggagccacccccgcttccctattgtgaccaggcctatggggaggagctgtccatacgccaccgtgagacctgggcctggctctcaaggacagacaccgcctggcctggtgctccaggggtgaagcaggccagaatcctgggggagctgctcctggtttgagctgcattcaggaagtgcgggacatggtaggggaggcaaaaagccttgggcactaccctccctgtggagctgttcggtgtccgtcgagctagccacaccctgacaccatgttcaagggtaccggaagagaagggtgtctgcccccaacctcccctgtgggtgtcactggccagatgtcatgagggaagcaggccttgtgagtggacactgaccatgagtccctggggggagtgatcccccaggcatcgtgtgccatgttgcacttctgcccaggcagcagggtgggtgggtaccgtgggtgcccacccctccaccacatggggccccaaagcactgcaggccaagcagggcaaccccacacccttgacataaaagcatctt

SEQ ID NO: 213987 - DNA, 904 bp, Homo Sapiens
  misc_feature (303)..(303): n is a, c, g, or t
  misc_feature (537)..(537): n is a, c, g, or t
ttttttttttgctctagagggggtagagggggggacatgagtgattttttttttaacttacatttttaataatattatttttaaaaaaacttggagctgggataagtggcagcagggaggaggggcccagagctttacccctctattaccagctgcctaggggaaggagcattcaacgaagccccgtaactttaagtccctaagggctgtgggtatagacaaccccaggcttgaaaggggtaaagtcagggggatgggaaacccacaatctggggtgaagatggaggcaaatgccctgggggngtggtcaggacatgtctcagaggcccaggttccaagtaggcatccacatgagtaccccctccccctaaaaggctctgtagaggccaggcccagcccagggcccactggggggcaaatcttggcacctgccccagagagtccagttcctccctgaagcgggtggatggaggctgccattttagatgctcagtctcttcattctgtcttctgctcccctgggctgtgaggggtggngccagtaggcagacactgggtggccacagcagggccttttactgggaggcctgtgacgtggggttctcccatttgctttcttggctggacggaggcttgcttgttccaggggctgttggcgccagttcaggggagttgttaaacctgtcctcctcgtccaatgcgttggctgcgtcaaactgggtggtgctcagcccgggtgaataggcttctcttcctcctccccaacttccccccccttagggttggctcccccacaacattcaataggtaactggcttgagaagggccaggtgctcagctgggcccctccttcttccgtttcgtttttttgttttgccaccacagaagtcatggttctgccccc

SEQ ID NO: 213988 - DNA, 424 bp, Homo Sapiens
ttttggtaaggcctgaaatagggcaaataaattaagatctccagatttctttaggtacttaataatttggagttaacagattttcctcaagggtgtattagacactataattaatagatctttaccttctactcctttaccagctcctacaaagcagcaatattaataatggttgaatttttaattttatcctgcttgcagtctgtaaacattaaaagacagtgaaattctacaagaaaagaagagtagtcaaaaacctataaagagtcctacactgcacacaactaagcagttgttatttttgaaaaaaacttgcagagggccctaaaagatgacagacagcccctcaaggaaaacttcagtaaaaccaatcggataggcaggcagaattcaaagaaacagttttgagattaaaagtaatatt

SEQ ID NO: 213989 - DNA, 520 bp, Homo Sapiens
tttttcctacttcaagtaagaaaattacagtttgtttctcccacctagaatgcgacttttgtgctaagccgttttggaagacaatggagaaaagcaacttttgcttctatggagtgctgtgaacaaatctgagctaaaaataattgtcatcctgtttaatcactgtggagtgctacacatttgacacagcacagtagatcttaacagtaacttcgcccttcaatagatccttgccattttccttttgtttacaagttctacagggaaggaaaaccatgagctgtaacactgagagtttactatttatttaccaccattaggtctctgaaatagacccagtataaaactgtaaagggaaagaaagagcagggatatggcagtgaatctactatctagttgcatgttgagatgacacacataatttcagattcaaacagcatctgatgctatctatggtttagtttacggaatacatccactcagcagatttacggcttaaggacaagtttattcactcatc

SEQ ID NO: 213990 - DNA, 575 bp, Homo Sapiens
ttttttttttgggccttcgagatcttttatttttctaaaggtgggggttgcccttctccatccccggccagtccgacttggtgctccgcgattgaatttaaacgaataatccctacttccccatccaaaattagcggataggcgcccttgcaccggaaggcctcctcaccagtcttttctttttgtctttgaaataattcttagcctcagaagtcagcattttcaagacctggcatccgcagcgtttctgacgcggggacttctctcttcggctctgaggtctccgcgcgcagaacccatggcagcttttggtcttacgcgtggctgtgagctgggctcagctgcgtggcgcatccacccctcgattgacgcgcggagaagcatttttcattttttctttcagcttgtatccttaaatcttaatcccgggcttcttagcaaaaatgcgtgtgcattcgtttctccttgtttatggagaggtttccggtgaatgttagacagcaatttcagggacggcttcttctatctcgaatttttgcatttgtagggaattttatggggtagaggagcgaaga

SEQ ID NO: 213991 - DNA, 501 bp, Homo Sapiens
tttttttttttagtttgttagaaataattttttatacactaggttataacttattcacatatataagcttattatcataataagaaaaggtttatatattttgggttttcttgttttaataaaataaatgtgctaaggttcctttttaatactttttgggaatatgttttgatgacagtagaaaatattcaacattaattcactaaacaaccaaagaagtaaaattttgatactacctccaaagttaaagatagcaggcatatcttaactacttcccaaaaagactagggagttaggtaaaagagtgaaggcatttgaggatttttcaagttccagatgaccagacagaaactgtaagccattggctacagaatgaatgatagcaaacactaaggtttttatgcactagacagtgtatgtaaacacttacttatcacagctcctgatatgagctgttaaccaataaatgagttccattcaggcattataaactattagatc

SEQ ID NO: 213992 - DNA, 379 bp, Homo Sapiens; identical to SEQ ID NO: 40530

SEQ ID NO: 213993 - DNA, 442 bp, Homo Sapiens
ggtcgacgtaacttgctcatctgtgcaaattactttcagaagcaggaaccagaaggaggcttctaccatctaaaacactagtggactctagacattaaagagactctgcctaaagatactaacaaaatccaagtattaagcttttcgcttagtatatataatccaagaaatgttactgttcatactccatgaaagacatgcgcatcttgaagcacacggacacagcacggggccccagaggttactatatttgcatcactttctagctttgtctgcgtgttcacagctgcgttagagttacgcaaagtctccacttgaatgaggggtcagtaaagaaaagggattgcttaagcacctcccaggacggctgttgtagccatttagactatttttatacactgattcttggtatccatcatctcagataaatgaagtggtccta

SEQ ID NO: 213994 - DNA, 410 bp, Homo Sapiens
tttttttttacaatgaatgttgaatacttgcataataataaaaaatgctaactgcttttctgacaaagaaataagaaattgatgaatgagaatataattcatggtcagtttttagagaaggaaaagtagcattcaaaagaagaatgggactaatgattttctctaaaaaaaaaaaaagcccaaaaagtttagataagattcttcagaagatgccagctccttgtgtacagaaacatgagaatggaaaagacgtgataagtacgatgacctactgtcatcttaaattatgtattaagaaaaagggccacaaacatcacaatttttaaatggtcaggcactaagacttataaagtcctactggctgcaccttcaaatatatatctagaatcccatcacttttttttttttaa

SEQ ID NO: 213995 - DNA, 644 bp, Homo Sapiens
  misc_feature (619)..(619): n is a, c, g, or t
  misc_feature (631)..(631): n is a, c, g, or t
ttttttttttttttttttcattgttaatgagtgtttattgttaataaaaccatagtacatttacagtaagtgacaacattattgtacagttaaagtatcatacaatattacagcaataaaataatgcctatttctttgtacatccagccaagcagctagtcaaaatattttccagaattgcaagcccctgggggcttttcagggtgacctgagtgccaccttctgaaatgcctggggcttttggtgaataaatagtttttaaggtgcggccagacagctgaagaagttgcacccagacagactgtgcctgatgctgccccagtgtctggtccataaatatgacaggtgtcaggggagcccagggcctgcagaattcgagggcaaggccgtgaggggacacagcagaaaggcctcttctcctggcccttaccttccatcaatgccctgtcctttaatctccaagagtcacagtccccagtgggacctgtttgcccagctctcaatcctacattaaaggagccgagagacttgaccaggggactctgcttcatcgcccccacaaaggcaacctagtctaggcctgaggttccagaatccacccatttactttggcccctanaaccagcagcanaacaagagctgag

SEQ ID NO: 213996 - DNA, 756 bp, Homo Sapiens
  misc_feature (599)..(599): n is a, c, g, or t
ttttttttttttttttttcataatttaaaatactttgttttgatgaaatgctttgctttcacaatagaagatcagtagtacacagtatattgaactctgtaacaaaattattttttgagaaatacagaagtgagaaatagtgatttcctcaatttgtttatagtcttatcacaaagtaggccaaagttcagtattaaataaatagatatcctaataaaagtttgtacaagtcttcctaaggaattacattcgtaagactgtttaccttctgtttgacagcagtgacaggaacgtggggattcccactcatgacgagtccctagcacttggctcctagcacccacagcctaggcgcactgcatcacctggtggggtgcagcctgggcttctgcgagtgaggtttcctcacctggaactctggttccatgtttgtgcttagcctgtgcgattctggtaaacacagaaaacctgcctgtccacccccagtgctgaagactgactggtcaaggaggtgttagtgagagtgttgtgttcaccatgtggagatcaggcggtgattaccgcatcttctttgctgactttagtaactgggtgtccanagaggagtgaccgggagtggccgagcggttgcctggactcagcttctgattctgcagccgggagtcagatgcaggcccaaggggtcaggggagttgttcagcgccctggatcaccatgcactgcgctgtgggccgcacgacactcctgctgtgttct

SEQ ID NO: 213997 - DNA, 721 bp, Homo Sapiens
ttttttttttttttttttaacagaacacagagtatagttttttattacatagctggagtttcataaggagaagcacgaaacatcgatgaatatgtatgtataccttggatgcaattccttctttcctggggaggcaagcaaaagtgtatcaaagaggccaatttactccctgtggtcaggaacttgcccacagcctgactcaaagcaaggatgttctctcaggagaacactgtggcattttccccagagctgaagaaatatcttcacttaaataatcttgaagtttgtaataaaataaataaagtgaattacacaaaaaggactagagctccctttaaaaaggcagctggttgagtttatgcaagcagtgtatacacaagctcatgccccaacaacaaccagaaaacaggttattattatttagccttcctattgtacttctagggcagcatttcaatataatttaaaaaaatccctcatacataatgtaagggtatattatatatgtacacacttttactcctcagttcaagctaacttctttagaagtaaagacagtaataacccaaagagttacacgtcttcccagtaaaatattctaattttttaaaaggtgcatattataaagagcagcttgtttttctgtcaatgtgaacatgttcagtctcagcagcctcagaatcacagtccatggatggttctgcatttctgccgggtcctc

SEQ ID NO: 213998 - DNA, 690 bp, Homo Sapiens
tttttttttttttttcttaccacacgcgttttcttggatacttccatttttccagtctatataattcaatacttctgtgacagagaggtgttggagttttttgttttgcttttgttttttcgcaactctttacatacaaacagctatggtctcccaggaaggaacttcctctgttgagtacagaagtctgggaaaagactggtgaaattgcatgcgaggaagaaacaggtctaactaaatgtgaatctatacttttaaagcaagggaccacaaagggtaggtcccaaggaagttgcattgcttgctgcacttgtcacacgggctgtactttcttctctcatttatttccatttacagcgttgaaaactgaggccttaggctttggttgaaaaccgaggccaagggtgaccagccagtgagttaaggaggccccagccgaactttgctggaagtgctccagcataaagcctctctccagaaccagccgccactgagacgtcttgaagtcaaagtaactcacacccttgtccacctcgccctgcggtgaagaaacttcggtcgcacaggctccagaactcatcttggcgtgggctgtgacttactgggggatgggcctccttttcgttctagctcctaaatggagcggagcgccaggtggtgtcagagggggcggcggccctccaatggtgg

SEQ ID NO: 213999 - DNA, 765 bp, Homo Sapiens
ttttttttttttttttatatataatagatatatatttccataggaaaacaacatcagatgtcttcccctagatgaacgatgaagagtcaaactgcaggttcttaaaacaaaaacaaaaacaaaaacaccatgatactaacaacggtggaagggtgagggtgaggaattacagatggagagattccaaatcagaaggaaacgtgacatggagtcccaggctcgtgccctccgccagaattccagccccgcctgtgctgggtagtttgtctaaggtgctccagggtccctcttggtctgcaagagaagtgtccctgccatttctgggtcgcttccttttccactctcctcagcccgcctgctccgtcacacttccagcaatcctggtgggcaggggttccctgggctgctggcccgctgaggtggactgttggttccttcagcattcatcttcttggtatatttgttcatccagctcctgggactctaggtgctccagacggtctgttcggccactcatgatttcatctggggttttcataaacctgaacaaaagcctttgtcctggctccttcctgataatgtttagtttgtagtagtggcgcagggctctggacattttctcataggtcatgtttgttctgttcttatggtttccccacagtcgagccagtccgttgggatcactatccggaatattttggattctttgtcctcccatcggatgaagttttcgtaccggctgtctagaagcaactgatagacgta

SEQ ID NO: 214000 - DNA, 773 bp, Homo Sapiens
  misc_feature (689)..(689): n is a, c, g, or t
  misc_feature (707)..(707): n is a, c, g, or t
  misc_feature (733)..(733): n is a, c, g, or t
ttttttttttttttttttcactaggttgcattttattagttgctgccaacagctcttacttctgatggaaaagaatttaacaacaacaaaaaaacccagtatactccaacttatgctttttctatgcttttatcaccaaatgatagtacatccatatataactctagatatttgttttatagtccacacacttgctagttaaaatgtataatcataagccacagtctgttcagaattacttgggtaaaatgctatgtcacctacaaaccctcatctgattaatatggaggttgtaatcactgtctcaatggtttcaggctcgtgaaacttctcatgctattttcttacgcctgtgctggctggctgacggccaagtcctctgcctctgccactgcctcaacccataagcatgctacagtgcagtccaaccttttttggtcttgccgacccaagagcagtgtaaaccagttgaatccaactgcatcacagtcacagcaggcaggaaatttcaaggatcgttaagtttaagatttgccaacctaagatcaagttataggttttaaagtgatttcattatcgcaaaaggatagcttggctgctgagtgtgattttcctatgttcacatgtactccatgggaatctaaaacagaaaattaaatctgaacataaatgatctgccagttctccanatgacaggcttgtggcanaataggagaggcagtgtcattttcanatcatgtagctagaatctgattcaagtccataatcaacgt

SEQ ID NO: 214001 - DNA, 772 bp, Homo Sapiens
  misc_feature (727)..(727): n is a, c, g, or t
ttttttttttttttttttaaacagtaagaataccactatttatttagcatttactatgtaccaggcacagggctaagagctttacatgaaataatcatttaaccctcattcgatcatttaatatctaataaggtagctagatatagacaaggaaatgtgttagtaacttgcccaagatcacaggtggtgaaggtagtattcaaaacttcagacctcaagttcttaatgactacagtagatagaaacatgggaaagtacttacaatactttgatttgaaaaagaagaatataaaatatatactaggtacagccctataaaaatatgtgtgtgtgggcaaggacagaagatgagctatacaaatgaacacagatgttatagtggtgtgggatggttatgagtgaaacagttctctaatgttgttaatatattttaagaaaaaatttttagaagtcatgaattcacaaataactcttctaccattactattattattctgctttcaaccatggacacaaagtgtgtgtgtgtttccataactcctgtgacacagctcactgcctcctctaccctcctcagtggccttcccccaagggaggctagtgcctaccttagtgctatactatactggtccattgcctcctgatactcattgacagctacaaggaaatctcctaggatccgatgcaggacacagtcactctgattagccagtgcgttcctcagcanagcaattcatcttcatatttctgttctctgctaagtagttctgct

SEQ ID NO: 214002 - DNA, 689 bp, Homo Sapiens
  misc_feature (584)..(584): n is a, c, g, or t
ttttttttttttttttttgcttatcaaaatattttattttaggagacccctcaaaaaaagacccaccacattagacagacgccccaacaacacccttggcctttttttggtcttttctgtattttttcctttttaaatcaactaaaacaatttgatgcttaaaataaaagacaggaaatatttcctgatgagactttagtcgagaatatagatatatttctgatccgggggcgggtgatcaggggcgggggaggagaaggatgtgccaccagtggttcgcgaggttccgtttctcagctcaggagggagcctggctgcctggacccgggctagggacccagagctggggctccacaggcctgaccagggccagggaagaagacggaggaggaggaagagaaggcggggctggcggctggggcttgtaatttacatgagaaccgtgctggtcactagcgctgtctgtgtctgtctgtcctgcgggacttctgctctggggagggaggctgggattcagcgtcgttgtcatttcctgtgtggcttcttttccagctgagaaacttttttttcttttttactttttnaaaagaatcacagccaaaataagacattaactgcaaaatccaaaatggctgcgcttaccctatgtataaaaatgcgtccagtccggtcggggcacggcctatgct

SEQ ID NO: 214003 - DNA, 669 bp, Homo Sapiens
ttttttttttttttttttgatttaaaatttattcaccccagtgttcactcccaccttagccccattccatgcgcccttacccttactcatcgcagtatcaaaataactcccaaatgggattgctgtgcttgaacacctcccatcatgcctcttaccttctgcatgcatttagttagttcctgaagcatacagccccctcacctgcaagccccgcctcagcgcacacccttgccaggttggaggaagtcctggtacccggagcagtttgctttgtttttgcagtgtcagtgatctcacaagcacttggttggccacacagtcctatcgataacttccagcagataacccaagtgggtgactggggggtggaagccaggtctcggttcctgtgtgtgacccaaggccccccagcacagggcccaccctctcatctggctcagccaggtcttgcagaatgggctctgctgagatctaaccagacacatttgctatctgttaggtgagctcattcctggaacctagcaggtattccgttcatggctgactctcaagggaatgaagggaaaaggaagagcgggtctgagatcctttggattatctttacgaagcaaagcttctgtgaactgtgatcttcagaacgaatgctgggcctatccaggtctgtccgca

SEQ ID NO: 214004 - DNA, 702 bp, Homo Sapiens
ttttttttttttttttttagagaataatactatatttgtaaactgcaaataacaaaacaaaacagaagtccaagaaggctaaagtctaagctataattacacatgaagtatatgttgaaagcagtcacaatgtacaaaaatgtgacaagatatccagatgtttaaaaaaacacatcctgtttgtctcagattatatccagtttcatctggtaggtttctgataagcctgttgtgtgaagtgtgtttccctcctgctggtaagaagcagcttgtagatatccataaattttttaaggagtgagtctacttggcaatattggtaactccatagtttcctattacattcattcgtctgaaaactgaaaacaactcatgactaaaatattcttccattcctttgccagtttttcaagtataaaatcaaaggaaagctggaatgtattgcttcttgtcatcaacaggcatttcaaaaagagggtaattaaccaaatcaagtgttctttggtcaagttagtaacaggcttccactttgttctaaatcctttcataatccttttttttctaatttttccagtatggcctgaatcttacaaacagcctcttttctggcctgccgtacagagtcctggcccccagtttcaactgaatccagttccaaaagttccttggttagcatttcttccagaagccagtatgctttgt

SEQ ID NO: 214005 - DNA, 638 bp, Homo Sapiens
ttttttttttttttttttgctagttcacagaaagaccatttttaatatgaaaagagaaaaacaatttgaaggccccacaatttgttgtgtaacaacataatttcaagtaaagtgaatgtgattaaaacatcttgatttcacaaagccattcagaggaggcttcgacaaacgcaaagcgacccaaaccctggagggtcacatcccggctgctacaaacctcggcggggcggccccgctcttgcggccgggacagcgcagcggcagcaggggccgcaggggacccgcagattggcacgccgctccccatccccgcagcgcgtctgcaccggagactctgcggggattgtagccggagggcgggccgggctccgaggcgctgctcaggcattggggtttgtcctcatgagctccacgtcggcgtgcaccatctccctcaccagctcatcgaaagcgacccggggcttccagttcagcttctgtttcgctttggtgcagtcgccctgcagaaagtccacttcagttggccggtagtacttgagatccacagtcacgtgaactttgccggtctctttacatctgcccacttcagtttcattctttccttcccacacaatggtttttccaatgtgcaagaatga

SEQ ID NO: 214006 - DNA, 777 bp, Homo Sapiens
ttttttttttttttttttagacaaatgctcagttttattgatttaattttgacactagggaatctcacagcagaagtacaaatcatgtgtacaagtatttatatcaatgaaaatttccattggtgattttttggcagaatattggtcttgactctgtggaataaatgacgacgtaaacgtagctgcacaggggtgttcctgtataatgcttgaatcaattgtgtgtgaaagcatcatgcaaatggctaattaaattgggtgatgactgaaaggttataaatccttcattccagctccacgagcagatccccttctccaactgtgtctccagcttgacagtgcacagatttcaccgtgccagttttcccagctgtcatactattctgcattttcatggcttcaatcacacaaatttcttgaccttctgctaccgcgtctccaggcttgacagagacggccaccaccactccgggcatcggggaacgcagaacactgcttgtgtcctcagtcactttttccagcataaatttgttcaattctgcggcaagtctggttaagatattcaccttgtacactgtaccaagaaactgaatgctcatgtttccacctgcttctcgagaaagaactggacagtcctctgagtgccatcaacgctgacagacaataagggcgaagccaggttccacgtgctggtcacatttagttttcgaccatcaacttccaccgagaacactgacccattgtttgatgctactacggtatgaactttatcatgca

SEQ ID NO: 214007 - DNA, 655 bp, Homo Sapiens
ttttttttttttttttttaacatcagatagattctttatgttcaagacagcaaattcagatacaaaaacccaccgccatcgtccctccctccctcctgctctgggccagggatgggcctggaaggagagatgggaggtggggaggaggttgcggggttcacagcagactcgtgtcaaatgcggaggtaacaggctccacagggagggggctcctctcaggaggggtgagggcattattgcatttgctggggggaaggacaaccctctcccctgtattccctgcgtcaggaaactaggaaggtcatgacccccaaacagaacccaaggccccagggagacagagggaccagtttggcagctgatggtggaaagtggtggaggcgggggtggccgcccaatttggctgatccctcccctccctgtgcctgacccagctgaggtaggtggggaacagggcacaggggggccggggaccccggccagactgggaaccagggaggggatggtaccgattggagcggggcagggggcctggccccacctcccctcaccatcgtccttgggctgctgagctaggctcaggctggaggctcgggtcctgacgtcagtgtccctgctgggggcccccaccaggttgcgcccgggtcatcatcgc

SEQ ID NO: 214008 - DNA, 622 bp, Homo Sapiens
ttttttttttttttttttccaagggttttagcagctctgtgccaggaactctgggcaaaggaaaaatatttattttttattacactacaagggttaaggtagacatcaaggtggacatcaggactggtgtcctgccctgggcccagcctcgggccagtgggcctcccagcacctgcctggctacaagggtccctagatgggtacaggggtatcttcctcctttcctttctttctccaggagattgtgactgctttaagctgcggcaagaacattgtgcccatcattgatggcttcgagtggcctgagccccaggtcctgcctgaggacatgcaggctgtgcttactttcaacggtatcaagtgagccccagggccctgggaccaggggggtagggtacaaatcaccatgacaggcagagtgtgggcaaacagctgactagcagctccctctgcccagctgtctgaaccacattggctcctgtgcccacaggtggtcccacgaataccaggaggccaccattgagaagatcatccgcttcctgcagggccgctcctcccgggactcatctgcaggctctgacaccagtttggagggtgctgcacccatgggtccaacctaacc

SEQ ID NO: 214009 - DNA, 694 bp, Homo Sapiens
  misc_feature (680)..(680): n is a, c, g, or t
ttttttttttttttttttaactttagaaagcgaattttattagcttcatgagaaacagctgccatgagtcaagacctggatggggatagagctctggtagcttccaaccaatggcgtgaatacagcccacctgttctctctacatcctcagaccagggtcttagtgggggtcccaagaagaacaccccacttccttgccctctcagtgcaggcacagattcagggaatgcattcttgttggaccttaggatctccgtctctatgatatctcactgaacaggaaaatgaatcaaatccacattctagacagccagatgctgacagatttgggatacgagccactgttctggatcatcagccaggaacacaacactttgaatcaccaatcagaaagtcaagattctggaatgcaaaataagaaccccctaactttctagcagatttcatcagtagctccacatcctagaatgactgtgttacaaatcaaccagaaatctgacattctaggttgtcaactaagaacccagtattctggcagaccaaatgagaaccactcctaacaatctgaagggctaacaaggagttcagcattctgggaagaataaacagaatcacaatattccagataatgggttgagacttaaagttctaaatgtcaaccccaacactcaccatgccanaccagaaaatgagc

SEQ ID NO: 214010 - DNA, 596 bp, Homo Sapiens
ttttttttttttttttttccagatgatgatatttattattgtatttgaagaacttgtgttaccatcatagcaactttataatttaattagctgtcagatgataaaaagatactgaataagtgacagaaacgaaatgaatgtaaaatacagagtgatggtgaaggctattacaactctaccccttgcttaaagttgtagcttcatctagtctttgtcaggtgacttttgtacaatctggctttttatcttcatttttacagagattataaaatcaatatcaaaccactactttaaaactctatttctctgattggtgtaatatgccataacaatcacagaagatgtctaacaagaagatataaggaatcttcttccttgttttgctcttactgaggttttaataaattgctgtaattttccagtgaacaggttcatctacatcaaatgaatttcaagtcatgcataaaaatctaaagaagttgtttgtgatgttatcattaactatatatgggactaaggattccagtaataatcccaaacagcaactcacaggatgatccttcggcatattattccagatcttcctgtctcatttc

SEQ ID NO: 214011 - DNA, 722 bp, Homo Sapiens
  misc_feature (692)..(692): n is a, c, g, or t
  misc_feature (707)..(707): n is a, c, g, or t
ttttttttttttttttttgaaaatacaaaaaaacattttatttgaacatgaaaatatcacaaaaattagtaagcctgagatgtagggttttggtgaaaaacaagaggcttgtagtgttttggctgctgataaagatgcatgtattgatagctggggtgaaaagcagaagaatgcacttatttcttctgcatgtcagtatcttcagacacagtaagccacatgcaccctttctttccttgttaaacagaggccagtttgctattcttagttccagcggaagtggatctgacgtgggcgatcagcaccttcctttaccaatggcttatggaactcacgtccagcacgagagtggatatttgcccaacaaaactcacagtaatactgcaggcaagtgacattggcacaaaaaaagggagcaaattttccaccacagcgtgcgccctggcattcatcacacatctggtcatctagcacatatggctttacctccacacgtttatcaatatcaccatgctgaagctgaacaaaccgagcactaatggcagcaatatagctctgctgattggagaaagcaactcgcccagcaccttttgggtattttagctcaggatctgtatcaattcctgcataacaaactccaccatacagccggtccatgatcatagcaagttccacagcccttaatggcctangaacacctccaacanaaattgtttttcggg

SEQ ID NO: 214012 - DNA, 758 bp, Homo Sapiens
ttttttttttttttttttggcatagagtatctaatattttttattgcaatagattatacaaccccaagtttataaatattaaaatagttccaaagagttagaggaaagtccaggacaaaacaacaaaaattcctttttgtttgggtacaatactctggtaactttttccttttgcacagaaaaggatgtctgagatggaagccatgctgactttcacagaacatgcctgatttttgttgacgggcaacctcaggccttcctgtcaggtgtttgtctcccaggttcctgtgaatccagtttttgatgtagacagaggctgtctagcttctgcatatcttctgtaaggccatttctaagatcctcattgtttctcagaaattccttcaccacttccagtcgatttgagagctcttcaggcaacacctcttgttcttctgcttgaagatatatctcttgaagtttctcctttagtaactgcatttctatttcattgacttggctctcactcaggtaagttcccatttcacattcacacccatctcgctgatcttcctcggggatgtgaacagcccagtcagacgtcaacagctgttctattctggagtatactgccacaatctctgggatgttcttgaattcattcagaaaattttggatcttcatctgaaaatctcgaagccacgtagaagaactttcatctctgaagagtgcatgatctcattacgacatttaattacctctgtgactttctttcgatc

SEQ ID NO: 214013 - DNA, 645 bp, Homo Sapiens
  misc_feature (598)..(598): n is a, c, g, or t
ttttttttttttttttttgctttttaagttttatttgcaatacttatatgatagatgttttttaattcctggaaaaataaatacacattattaataatagttatctggtagatggataacggtacatttctatgtaacattttcattttttgtaatcagaatgtattacctttacagataggcaaacacaaagatttgggaaaatgcatgtaaaatctaagaaaaaaggtaaattgtagatataatacattcacaaaaagaatataactgtgttgagctatatttacagatataaaaagatgaacaaattacattaggttttttaaaaaaagacaacctaacagtatgtatcgatgatagcacgtttgttctttaaaaaaatttgtgaattggtcaggagcagtggctcatgcctgtatttccaatattttgggaggctatggtgggaggatcccttgagctcaggagtgagctgggcaatatagtgagaccctatctatattaaaagaaaaaatttgtaaatagacactgaaaaggtatctatcaaaatatctctaatgaagtttgttttacaattttctacattttacattttttnctagttttcctatgatctttataaaagcttatcacttataagaaaaa

SEQ ID NO: 214014 - DNA, 678 bp, Homo Sapiens
ttttttttttttttttttcggcggtcaacgcgctttattccgaggggcttcagatacagatgaccccagccctgcatccgcccggaaggcgtccccttactcccatggggcacctcgataccagctgccctgccctgactcacttctcagcacccatcttacggcagtcggccctggcctcagacccttgggttcagatcccaggccctcctcctactcactgtgagaccctaggcgagtcccttagctcgggagcctaattccgcttcattaacatgggggtaatttaactacctagctagacggttgcaaagggatcagttcactaattctcaatgttggcagtgcatcacattgcaaactccctgcctctgctccagagctgatcagaatcaataagggtggggcctgaaaatactacatccaaatttccgagaagcacagtgtctagcatacccctatctctccatctggggttactgtcactctcaggaagaaataatcacccattattccttcaaccaggaaaagagatgtccagggcacagcttggggccccagaaagtaaccacggaggtcaagatcacaaacccgtcagtgcccagggcatggcctcgcacacatccgaggttttcaaggaccatgaagtgccatggcaagcatcctggcctgagggtt

SEQ ID NO: 214015 - DNA, 724 bp, Homo Sapiens
  misc_feature (646)..(646): n is a, c, g, or t
tttttttttttttattttctcataaactttatttttttaatgcttttaaaaacagattctaatttaattaatctagatttgcaaaattataaaggaaaagtcttgccggttgttgcttcggttacgttaatttcacaatttagtaaattccaactacgtatttaatacaaagcagcctttgtgggggggggggtatttaacaaaatgcatcttagcaacagtctagagaaacttttctgtgtgaaaacagaagaggggttaccatggagaaattcattacggatttcgggaaggctttttcctcagaaatagagtgaaaacaaaaaagtcgttgtgtaataaatctgataatgatgctgtgtgacttagaagttggtccaaaagttcatcttcagcaattatgtctagatgatcaactacatatcttctgcaacaggtgacacgaaactgcatttcccaagcaaggcaaagcgatcaaatgagctaagatgcgcgttcctgcggttttgtactttcatttttgatttaaccaaaaacaattttgaatcgaatgaataaccaaagttgggtgggtcttgtttggctttctgctttgctttttaatcagccatttaccagcaactgttgcacaggcccattagcactncgaagaataaaagcaaacatacaggaccagataaaattcccctactaacccaaatgatccatttccttaacacaattt

SEQ ID NO: 214016 - DNA, 762 bp, Homo Sapiens
  misc_feature (718)..(718): n is a, c, g, or t
ttttttttttttttttttactgttttatccaaatttattctcagggaaaaagaaagtagtggctctacgcaactttttcattcaccaaccacctttccatgcatcagaacctatgctgtgattgttagctgaacttcaatagtttccacctacttaagagagatgcctcaaacaaattaactttattttcagacaacaggtccaagaagacttcacagctcaatcatgacgaacatgtggctgtttcctcacagccaggaaccctcggtattagaagaaaactccaaccccccacaccatcatctagcctcttttctcactgtgaagaactgatgagacagaattcctgagaagggaacatttaggtaatctgggatagaagggcatggaaggactggacaaactaagcctccccatgaaggaagggaaaagaatattacaaaacagactaacagaaaacaagacccatcagtatcttcaggataaacaagaggccactctagatgctctgattaaaggttgtccatgcctacagaggcggaggataaatctaagaaacagaaatgtataaccagcccaatgcttccatactctgcattaggtcagtgtgaacatggctttgctcccaatggtcagacctgacatgggtccttctgaagatggtgggtcaggtatatcccagccaccctcaccagagaatacatctatgacaaaccanattcctaatcctgaagtactttgagccactctacatttgtggca

SEQ ID NO: 214017 - DNA, 617 bp, Homo Sapiens
ttttttttttttttttctgatgagtgggtaatcctaaaataagcaggaaatgcctgtggctcagcctaactcaaggtgagacgaagctggagctgggagctcgaaagtgtcccccagctccctcctcactttgcctgtaacgccacctctgcagaaggtaaagtagaattggtagctgtgtcactggtttgggttgagtcctcggtcagggccctctccagactggcgggaagggcgtggatcagcctctcccggaagtcctggcccatgaagacatagagcatggggttgaggcagctgttgaagaaggccagggcacttgtcacatccactgcaataccaatttctttgtacatgccttgcaataactcacggattctgactgtggctataagggccaccacctgatatggggaccagcagagaaaaaaggctgctgcgacaaaggagaggacccgtaagggacgactggacttaatcaagccttgcttgtggatcttggtggcaataagcccataactgacagcaacgatggacatgggtgcgctgaagccaatgatgaaccggatgatgcctctcaccgtcaacatggcaacggccacctttatcctctcttt

SEQ ID NO: 214018 - DNA, 716 bp, Homo Sapiens
  misc_feature (702)..(702): n is a, c, g, or t
ttttttttttttttttttccgaattcaaatccaatttagaaaatcacttccgatgtggtatccactaaacaccacactgcagccaacccagtccagccttggctgtgaggcagtgcccggggcctgtcctgctgaggccacaagagtcagacgcgcagacagctggggtctgaagggccctctgggctggcccaggagggctgggtgtgtggtctgtgagcgaggggcaactggcgctcctcctcaggactctggggagctcaggccacagcagaacagaggccccaggccctcactggcccatgggaatggcacgtggcgtccccagctctaccccagcaggggccccacctctccctccactggaggagacggaagccagcccagggcggagcccccaagcctccgggctccggtggtttcgccaggtggacagcctctttcagcagccgtcgctccaggtatctctggcgtcggggtgcagagtctgtgggtcagtggtttgggctcctccccgtgaatgagggtattgtctcctccacggccaccgtggtgacgtccggaggggcctgcagggcctcaatgactgtggcctcaccttctgcctcctgtcttttccgctggacggagacgatcaccttgactacatcaccccttggctttcttcttttcacacatatgattaggccaactgtggagcanacatgacgatgacg

SEQ ID NO: 214019 - DNA, 689 bp, Homo Sapiens
ttttttttttttttttatgagtaaagttaaactttactttacagtaaattttttttctatatacaaagaattacagtacatgtttatggggactcctaacacagggctcccctctttttcactaggagtttcacttacagctgacaatctatgggggcgggggggggggggcgcggcaaaaaagcaatgatggaccttggctgatccccccgacccctttcttaacaatataggtagatgtctatcgtcagcttgcctctttgccaagacctaggaggcggctctgccatgagctgctgtgtgctgccctccccaccttcagcacactcatctacacacacacaggtagcacccacctcgatgagaccgccttgctctggcctgccccaaccctggaagttgaaaacatagaaccatttatttctgcttctactctctgtgcccatgtcttgtccacgaaactttgctgaacttccaggaccttacacctgaagccccacaataacctgatgttttgaaagccatgggaaagcagctctagagaaggaaccacataagcagaaacagcgcatgttaaactcgaaacacttcttccgaggttgtggatttctagtttaattctttccacttccttagaaaatactacccttaatcttcataagcagtagaggggcttccatgagtggaag

SEQ ID NO: 214020 - DNA, 729 bp, Homo Sapiens
ttttttttttttttttttcgtcaggcaatttctatgtttaggttcaactctctcctgaaacatgaagagctcataaatgcactccctctttgagtctctagttttgtctccttcccacagtgagtctgcaggctgcgtgtcactcacgttcagctaagacgtagtgccccatggctcctcttgaaccctgcctcttccttaatattatgaacaaaattccaatgaacaagatgacgacaaaaacagcaattccactgatgactccaatgactagggtgccagacggtgagggctcccagatcacaatgaggggctgatccaggcctgggtgctccacctggcacgtatatctctgctcttccccagggggtacagccaaggttatccagccctggtaggtcccatccccattgggcaatacgtctttaggttcgaactccttggcatccattggctgcttatccttcagccacttcatggtgatgttctgggggtagtagttcaaggcccgacaccgtagagtggtcactgaagaggtcacatgatgtgtcaccttcaccaaaggaggcacttgttggtccaaaacacctctccccagctccagcaactgctgcagctgtgcagggcagtccctctccaggtaggccctgttctgcctggcccgaatcttgtgcctttcccactccagcttggtgggccaggccctgggttctgctgctctccaatcca

SEQ ID NO: 214021 - DNA, 671 bp, Homo Sapiens
tttttttttttgttatttcgatattatttatttgaaataacatgtttagccactagatgtcaccctttttaagcaacaaagactacttcacaaagtgtgacatcaatagcagttacatttgttccactgtatttgatgttctccatatggttctcggctacatactggacactttaacagtgaaaaactctttggtctctctaaagctcttgtccttgacttgtccaaatctgttgcattccattcctaattaaagaactccgatctcgcaggtttaatcgtatgggcatgcttttcatgaatgaaggcaccagcaattcctcctgctcctgcatttaaatacttgtaggaacaccagcaggcaaaatcaactccccagtcatgtaagtagagttcaacatttccaactgcatgtgctagatcaaagccaacataacaacccttcgcttgtccagcttttgtgatggcaggaatattaaagtgctgtccagtgtaaaaatgcaccccactgaacaggatcactgcaattgagtctccttccttctcaattacttcaaggatatcctctattcttaaggtttcttccccctctcttggctttatcatccgcatactttcttcaatgttaagtccgtgaagttgtagttgtgactcaatagcataatgatcag

SEQ ID NO: 214022 - DNA, 694 bp, Homo Sapiens
  misc_feature (632)..(632): n is a, c, g, or t
ttttttttttttttttttaacgctttcttctcagcccgagctcttttccgttgttcagccttttcttcttcttgctgcacaagggctgcttccttctctgcagccttcattctctgctcattgacacgagctaatcgggtttcagttttctgaacagctatatcccaatcttctaaagaaccttctgtcctctccatggtgagtaacacttcgcagacgtgctctgggtagtcactggtgcactggacggcccggtgcagagccttccggcagtgctgggtgtcaccatgagctctttccaggttgtaatactctagccacatgttggcgtacttggcatttcctctggtcatgatgctatcccagagttcccgagctttctgcatgttattgcacagtcgagcctcaatcctagcccagttctgcataatcacgcagcttggatcaccactctcattgaaacgctcttccacctcctgcttcagatactccaaggcacgagtaaaggcggccctcaactcctccagctctttactggagtcttgtttgaaatcaacccttctcctcaggtaatcaaggtatgcctgccaaatctccacataatcagtggcctggatgaagccggcattcanagctttctcgaaggttacagaaattacttgatgatcaactccatgtctctccatggccaaga

SEQ ID NO: 214023 - DNA, 753 bp, Homo Sapiens
  misc_feature (727)..(727): n is a, c, g, or t
tttttttttttttgttttcttttatttcatggatctgtttattccatttattagtaacagtgcattttttcacacaatattctattttacttaaacttaatgcatatgtagtaagaaagatttactatcccaactagcctctcagtatttagatgaggatagaacagatacggtgtaacacgcctctccactgcttactgtgtgtaccaagaaggcagaaagcagctcacccaagcctaacctggccctgtctttttcaggcttctcaggatgcccacagcacatactggggaactggatgcagggagaagccaggtctgtcttcaggaggtcacagccagcagggcacagttaggtcgtgccctgataagggggtacacaaggggaactccaggcagtggggggatggggacactatggtgcactcaggcagtggcaagggggcaatacgtggagtcaggatggaggaacactgggtgccaggacagaggggggccttggcaaccatctgcaatgcatggggcagggactatctggaaggactgcagggatacactgaaagctgtgccaatgcattagccatgaaacctaagaaactcagtacatgttctccctctgctcaccaagagtttgcatttatcttgtggtactttttgattttcagtccaatctacagtaattatggacagcccattgtatgcagaggactaaatgctatggcagacanagatgtggtggataaacccttgcttc

SEQ ID NO: 214024 - DNA, 655 bp, Homo Sapiens
ttttttttttttttttctgtgaataaaacttttaataatgtacagcagaaattggacaggctcattcttatattaaaacaaaagatttcctatattacaatttatttacatttgcatactgaagaggtaaagtgtctaagtggctattttacagtcctttctaataaaatgtacaaaaacaaacagaagtaccgagaatgccgttcgggggcctttatggcgacgtaagaacgggcttggacttggtctgtgaatccagaatccagaggtgcaggtagcactatggatcagggttagcctcggggggccaaaaacacggcttcagtttctccccaactctcacttagtgttaagagtggcagaggtgggtgtgggagcttcccaaagacctgctccatcttccccagaggtggaagagttggactgtgtgtggggtaagggcagaagggccaactggggagtgggctagtggcttgggagtggacgtgtgttggcagatcccagaggctacttgtgactctgggaagaggagtctaagttccatcattacctataaaccgccaaggttctgctgcagggcggataggtgggaggtcagcaggggtaaagacggtccccccaatgacacaatggtatttaaacgaaattagtggcc

SEQ ID NO: 214025 - DNA, 676 bp, Homo Sapiens
ttttttttttttttttatcttaattgtaaaaggtttatcaagaaaaaagattcaaggagcagcatccaggaggagaccatgacccccccgggggcaaggggggcagtggtgacacatgtcagcaccccacagcaagctgctggaccacaccctgacctgggtggggaggaggcagaaacccctcggggatgtaaacataggtcagagacagcacaacctgacggggagcaggggcccacattccagcgaggcagacagagggcaggtgggcatggaatccctcgcatggctgggcaagcaggcccctgtctttttcctcttaggtttcccattgtgcaacaggaaggatcttgggaagacagtgccacagagcccaaggaccctgagatcctgggtttggacctgcttcgagtgtggggagttattgctggtgaactcaaatatacagtcacttttgagagtcttctccaggaaggtgtcaccagggatctggggcccagggcttatacctcagcaccttgagtccgaggaggggaggatgctgcaatggtcccctgcccgagataagctgagggcccaaaagtggaggggagtcagaggcctacaggagggagatggcctgtagccccctcctgcaggggacagggtgatgtacggacagccagcaacatgggag

SEQ ID NO: 214026 - DNA, 870 bp, Homo Sapiens
  misc_feature (705)..(705): n is a, c, g, or t
  misc_feature (791)..(791): n is a, c, g, or t
ttttttttttttttttttgcagacaacttgctcttttaatgtggaatggatgaccctccaatatttccccagagcaccccatgctcttctatcagggaacttattaaaatcatgtaacatgtttcttggtgacaagatttaggtcttttgtttctgtaacacatgccagatacttagcccggtatctggcatgtggcatgcccagtaaatgtttgccgaataagtgaatccatgtctcttgcttgccgctatttgcccactgaatccatgaagtgagttttcataatggataccactgaaaattcaaccctgaaaagaatgtcttcggttgtgggcccataaagtcttagaaatagtgaagctcctactgtcagtccttgaaagggaacaggacagctgctgtatgccttgagaatgggcaaaagacaagcgacaaaaagagcaccgaaggcacctacttgtccctctgggccagggcctcagtgtattggtcgggcttgacctggtctcctggtacatcttcccagtttttggtgactcccttcagtttctctgagagctccaggttacactccttctctgcttccaccagagctgccatccgcgcagcttcattctttgctagcctggattcctcctgcagaagctgcatcttattctccaagagctcataaacatgctccgtctcctgctgtcgctcctcanactggcgtcggagctcagcttcattctgactgttgagattctccacatcagcccatgttttatccagatgctgtttcttgtcctgnagttctcgtttcaagctctcacttcaacttcagctcagtgttccgcttgtagatgtctcccggctggctcatactctgt

SEQ ID NO: 214027 - DNA, 740 bp, Homo Sapiens
ttttttttttttttttttaagtccttggaaagtttactttggagcaactctaaggtcctccaccttcaggaaatttagccaagctcaagtcaacagtttccttcccttctatctacaatagggaggtacttatgacagggacaaggacaatgaatcagaagtagcacccacccaggcaggttcccttcctcaagtttttagctccctggtcttagccagcaggcgacgatcccctcaagtttgccttttcctgtgacattgacagacctcaggacggactatagatcttctctgaccatggaaagacccagaagccatctcagaagattgggccctgctattcctccctgtcaggaacagtcatttcattaccaaccttggaccagagtctgtttgatgatctgaggaagtgtatgcatttttctttaaagctattttgatttagattaatgagatttttgcaaatgccttggcatataataggcaaactggcagctaggattcacagtctgcagaggtgaacaaaagggcccacacacctctgcatgatactactacatcccagggcatgtcctcctctgtagctcagtgaccctggtttccgcccacctccaaatcctgactagataagctcagctctggagcctgcttctccctcagtgcagtaaggatgtggctcgccagcgcaacgtccgaggaggtctctctgctgatacccgtgtctactgcatccacctcct

SEQ ID NO: 214028 - DNA, 733 bp, Homo Sapiens
  misc_feature (717)..(717): n is a, c, g, or t
ttttttttttttttttttagaattaggcattttatttaactcatcaaataatacaagttattccaggaaacaacaatcaaaatgtattacttgtactaacgatatgtagagccacatttccaagaaatctcatgaaaataaattacttgatggaataaagcaaataaatagattttttacaaacaataaccctgtgaatattagaaaaaaaatgtgagggttctggggaaggtgccacacggtgctgggggaaaatggaacttgaaactaatgcctgaatgagatgtaggaaacagcagcacgttaacaaaaattagtaacagacattctaactgctttcctccatctccccggttttagaagtgacttctcccatccccaccgagagaggctccaagtaccgctcctgacacccacagcctaagtgatccacataatgtaatcgcaccatcattaggaaccatgaaattgcaattcctcggggaaggagcgcgatcgctcagttacacggagaagagcgattaattagccgatctcagtttaatgtgactatgtactacacgggttctaatcccactctggagcagctctcgggcctaatgaattatctctaggaagctgagctggagccagaagacatgactcaaaatgaaataagtgaaataagataaaagccaaaactttaacatgatattggggaaaagctgtagaaaccanatgggagtcacctaat

SEQ ID NO: 214029 - DNA, 668 bp, Homo Sapiens
  misc_feature (634)..(634): n is a, c, g, or t
ttttttttttttttttttgggtcttggcattttaataaacgttcaaagaaacaaaatttacttgtaggggacgtgacaaagaacagaacccaaagactgcctgccttctcggcagaccctagggagctgtggtgatgtgacagctgccacagcggctatcttccatggaaataacgtacgtcatcaacacaatatacaacaccccttccactcacctgacccacccacctccctcctacatgccctaccccagcccctctgcaccctccaccttgctccaggctcccaccacccactcaccccaaataacctgcgtcccttttgttcatttccctgacgtcccagcttgtctgtccccttgtcataagatgcagcactacacacgctctcaacactatgatagagcagactcttttaccttagtggcctgtctgattgcatgcatgtaaatggggggaggggagtcaaacaaatcaaggctatgcataaacagaaaacaaagcaatattcgtaaagctaggcaagcgagcgtaacattggagaaacataaggcttgaggcttattgattctttagatcacaaccgtttggattcgctttccttcttaaatatcggtgtaccattttggcttcanaacaatctcttcttgcttctgcccctctctttga

SEQ ID NO: 214030 - DNA, 763 bp, Homo Sapiens
ttttttttttttttttttacagggattgctgaaacatgcagagaatttttatttatcacgaatgttaatacttatattgacttgcagaacagagtgagagagacgtgcaggccaaggtattagtagggttcaagggtttagcaggacatctagtacacagtaggttgctcactaaggacttgtcatatcttgctcaaatgccaacttttggtacagcagattgtcaattagtcatttcttatagagatgcctttttggatagttgtcatactacatttctgccaattaaggatttcagtccatttttcgttttttcaatcatcgtttaaggtcaggtagcaggggccccatcccccctcccccctcagataacagaatagtattcttattagaagttcctaagaccgagcaattccagcatgcaaattgtgataggacatagccgggaagatgagaaactgtagccatcatctagggatattatattccatcgctgttgctccttgcagcctgcgggtcctcttcgccgccccttttaaagagagattgaaagctcacctaatctgcaaggcaccgcagtgtcacacaaaccccacacagtctctctacattcctcaaccatcagccaagagcaaaagcaacaattcgcgcgccagccatccatcctcccggcaattcttaggtcgcctttctggctaaattggaacatccactgagactgcaggccatggggggacgaatcccacacctttgctgcagtatt

SEQ ID NO: 214031 - DNA, 786 bp, Homo Sapiens
  misc_feature (718)..(718): n is a, c, g, or t
ttttttttttttttttttcaattagcagatcccatacaagatggtttattttatcctacacacagaaaattgcttatgagtatcacattaccgctcttggttatcagttaacaaaggctgctaatgaacagcatcgttatcaagttgggtaagagacgccctgggagtccaggcaaatcatgacaacacagcactttgttctgaaatatagctcatctttcatcacacacaaggagggtagcccagtccgagagatttcctggaaagtggaaaggcaaagaatattccgtgatgtgatcccagaaatacagggttaatattacaagggagagaaatgctcacggggccttagcctgatggcaattgtagaatgtcatggctttcctcagcctccaccagtcatgtcttctatgcaacagccatgtacattgtaataataaccacaaaataattgtataaggagaaaaataataactgacattcatggccctctgcaaggcacagcatctgctttctcatttggtccttcgttggttccatcctttgaaggtctgagagcagcaggcccattccatgaacaccaaagcccttcctaccacgccagcccagactgccatttcccctccagaaggccagtgttcatcatcgatagggctagagaccatcccggagtccccatgtttcaggactcccgaatcttcacatagtccatctttangaagggatctcctggcagctaagagggtgaagctaatcgttctacaaagtagtgcctaactgttgata

SEQ ID NO: 214032 - DNA, 452 bp, Homo Sapiens
ttttaacagagtctcactctgtcacctaggctggagtgcagtggcacaatctcagctcagtgcagcctcgacctcctgggttcaagcaatcctcccacctcagcctcctgagtagctgggactacaggcacatgccaccatacctggctaattttttccattttggtagagatagggtctggccatgttgtccaggctgtcaaaagctttttgaggctgaggcttaatcattaaaaacaggaagcccaggtccctcaccctcagcactcaccctggtatcctcaccacagctgctagctttatgtccccggcttcttcctagctgggagcatgcctgttcccagtgccactggtctagggagaaggagggccaaggccatgtaggcaggaaaaaaagaggcttttttgggggacagagagaaggtagctgagctggcgcatcctgagccatg

SEQ ID NO: 214033 - DNA, 857 bp, Homo Sapiens; identical to SEQ ID NO: 54919
  misc_feature (743)..(743): n is a, c, g, or t
  misc_feature (755)..(755): n is a, c, g, or t
  misc_feature (769)..(770): n is a, c, g, or t

SEQ ID NO: 214034 - DNA, 339 bp, Homo Sapiens
ttttttttttttttttgacttggatcagtcttcctcatgttccccttcacactttatttatttcatgctcccaaggcgggaagacaatggaggtgcctagggaaccagtgtttccacatcttgctgcagctgtaaaggcagccattttgtctccttcccattgttcccctttgcctagtgattcgtcccccatccagaggggtgaaggtcagaggttgttggtcagtagtcctccatggtcttcagggctccctgaaggttactgtcaccgggcccacctgcccccagagagtgggtgctggggagacgaaggggctttaaggcccaagattccacggc

SEQ ID NO: 214035 - DNA, 467 bp, Homo Sapiens
tttggtcaacatgctgtgatctgggagcctggttaatttttaaatttgtgtgtgtggagacagggtctcaccatgttgcccaggatggtgtcaaactcctggcctcaagcagtccttctgccttggcctccgagtatgctgggattacaggcaaaagctagcacaactgtcctgtataacttttcataattactaaattatgcaaaaatttctgggtctgtacatatggatctatttcattccatttaactgtatggatatactattaattgaatgaaccatttacctgctgatggacatttctgtttataatgtttacattatgcagttcatattatatacagttgacaacaaaaaatgctgccatgaatatctttgtgcagctctttaatgcacagtgactatttccttagaattgttaagagtatcatttttcaattcaacaagaaatggttaaaaggtccctt

SEQ ID NO: 214036 - DNA, 481 bp, Homo Sapiens; identical to SEQ ID NO: 60550

SEQ ID NO: 214037 - DNA, 540 bp, Homo Sapiens
tttgagcgtgtaaaatatgttttattgttctttaaaagggttcagggtttggttttaaatcaggctgcacacctttcaaatcaatctgacatctctctatgtcaaactggcttcagctagcaatacttcattaaatcgaaaagaaaaaaattgctttaaggaaaaaaaatccagttttaagaacaattaacattagtctttaaaataaaaggagggctaatgtttcatgttgctttatacatccttctcctcaatacagaaccaggaatgtaattttcctaactcaggcaggcactgatactgatggacactgcgcgtgcacacacacacacacacacatacacacacacacacacacacacacacacaccccctccccccaaacaacaaaattcagagtatgtcaaaggaaaaaggtttgttattgtattgatcaaaacccagtggaatcaacaccatctatcttagcttagcaggtatgctgttttgatcttgagtctatattaatggaatctattgttgcattctgaaataaagaat

SEQ ID NO: 214038 - DNA, 469 bp, Homo Sapiens; identical to SEQ ID NO: 60489
  misc_feature (361)..(361): n is a, c, g, or t

SEQ ID NO: 214039 - DNA, 496 bp, Homo Sapiens; identical to SEQ ID NO: 60821
  misc_feature (415)..(415): n is a, c, g, or t

SEQ ID NO: 214040 - DNA, 1000 bp, Homo Sapiens
agctggaaagcagatggtactcggtacatgatgttgattgatggcacaaatgaagtttttatgattgatagagacaattcagtatttcatgtttcaaatctggaatttccatttcgtaaagatcttcgtatgcatttatcaaatactctcttggatggcgagatgattattgacagagtaaatggacaggctgttcctagatatttgatatatgacataattaaattcaattcacagcccgttggagattgtgattttaatgttcgtctgcagtgtatagaacgagaaattataagtcctcgacacgaaaaaatgaagactgggctcattgacaaaacacaggaaccatttagcgtcagaaataagccgttttttgacatctgtacttcaagaaagctacttgaaggaaattttgccaaagaagtgagccatgaaatggatggacttatttttcagcctactggaaaatacaaacctggtcgatgtgatgatattttgaaatggaagcctcccagtctgaattctgtggattttcgtctaaaaataacaagaatgggaggagaagggttacttcctcagaatgttggcctcctgtatgttggaggttatgaaagaccctttgcacaaatcaaggtatgtttgttcattttcagtgtacttttcctggatgttctcttatctggaatccatcaaaaccttgctaataataatcaacatataaaaatatcgtgttccagcactttgggaggctaagacaggtggatcacttgagcccaggaggttgagaccatgctgggaaccctgtctctacaaaaagaaaaattttttgtcattagccaagttcagtggcatgtgcctatagtcccagctactctggaggctgaggtgggaagatcacttaagccccatgagtttgaggctgcagtgagccgtgatcacaccactgtactccagcctgggtgacagagtgagaccctgtctcaaaaaaaaaactcgtgcc

SEQ ID NO: 214041 - DNA, 373 bp, Homo Sapiens
tctcggctcactgcaacctctgcctcccgggttcaagcgattctccacctcagcctccagagtagctgggattacaagcatgcaccaccatgcctggctaatttttgtattttagtagagacagggtttcaccgtgttggtcaggctagtctccaactcctgacctcaagcgacccgccccgcctcggcctcgcaaagtgctgggattccaggcgtgacacccgcgcccggcctaagacactcttgatctacacagaacctcacacctggctgcctgtccggtgtcaaatctccttctcttatgggttcagcctcaggggcttcttcctcagagcctgcttttcatttgctataggaaatggggaagaacaca

SEQ ID NO: 214042 - DNA, 479 bp, Homo Sapiens; identical to SEQ ID NO: 58765

SEQ ID NO: 214043 - DNA, 354 bp, Homo Sapiens
tttttaacctttcagtgtcattgtgaggtttgccacatgccttgagaaataaagcccaatctgaatgctcaaacatgaaagtctggctggctcaggcaattggaagaagatacccatgcatggtaaccgctgaatgacaagttaggtttcctggagagaaagacctaactattcaccttatatacttaaataattgcctcctttttaaggcaaaataacagctcctaaagatgtctctgtcatagccccagaatctgagtatgttacaccttacatggcaaagggcaattaaggatgcagatggagttaaggtagctaatcagctgaccttaagataattatcaaggtgggtct

SEQ ID NO: 214044 - DNA, 477 bp, Homo Sapiens
ttaaatacttttttcagtctctaagtgatgtttaaatgagccaatactcatccctgagaggtctgagaaaaataagtaatgagccaataagtaatacttacctttacacactgttcagctaagtctctgctagtcctgttgttaagttcaactagaaccaaacgattacaaagtgcttttatagctccatctaccccaacaatccttcgggtacattccgcagatacatccaggtagtatgttatggcacgggctgtcacctctaatacattgtctggagcactttcatcaagaaaaattttgcaaagggctggtaagaaggtacgaggaggacatgtttcaaaacaacgatccgcgttgtcagacatcaaaagcagcatgcatagctagttcagggtctattagttgcatgtccctttcatcgccctgtcccatctgtgagcattccagcaatgtatctgggtccacatctgccat

SEQ ID NO: 214045 - DNA, 664 bp, Homo Sapiens
  misc_feature (603)..(603): n is a, c, g, or t
ttttttttttttttttttataatttcaaaataacctttatttttgatacaaaaataaagatgctaactcctttagctcagtttcccacaataacctttaaaatagcaacagattcagtctcaaaaattgcttttcatttgtagtggaaaatgaaagtggagaacatggaacagcaatatttgtgctcttctcataggatgcagttacacacacatatgactggaatcacttcagagtaaaaaaaaagtgggctgggtgcagtggctcacacctgtaatcccagcactttgggaggccaaggacaggagcatcacttaaggccagaagtttgagaccagcctgggccacatagtgagaccctgtctctatgggcggggtgggggtggggggcattgtaaaaaagcagttgttcttttagaaggcatcagagagccctctagtgaccacgaaggggagttaatgcagagatgactcgagacagagaagcagtcatgagtgtttacaaaggaaaaagtgagggagggaaagctcttttggttaacagcatatttacaattagttaactgtattcttaaatacttttaacctgagtaacatttatanatatgttataggaaatctcacagtcacaagtcacactagaatccatctgtccagtatctgt

SEQ ID NO: 214046 - DNA, 615 bp, Homo Sapiens; identical to SEQ ID NO: 50749
  misc_feature (569)..(569): n is a, c, g, or t

SEQ ID NO: 214047 - DNA, 595 bp, Homo Sapiens; identical to SEQ ID NO: 42604

SEQ ID NO: 214048 - DNA, 572 bp, Homo Sapiens; identical to SEQ ID NO: 48209

SEQ ID NO: 214049 - DNA, 523 bp, Homo Sapiens
ttttttttttttttttttaatttttggaatcttttccaataaccagctaaagatttgcactgaaatacaacttgtatgccttttgcatttttaaagcctgcttcctggatttaagcagagtgatagtgttcaaagagccagttcagcctgtaacatatttgaaaaagatatgtctgcactttgaggtcccttttgaatgccattcactagacctctcaagcattttgtttcattgctacatccaagcgcctcacaagtccacaatgcgggacagcatcaaaagctcaagactttggaaaaagcttgtgggcttgcactgggggagggaagggaacaaaatttgtgtacttctttgtttaatttagaaataaggcatccaagagatgccattattttctgtgtttcaattgttgtgcctttgagttaaactgcatttttgtcttttggttgaaatctgaaatgtactgtcccaatataaaacagtaattatttgacctttgaaaaaaaaaaaaaaacctcgtgc

SEQ ID NO: 214050 - DNA, 715 bp, Homo Sapiens
  misc_feature (11)..(11): n is a, c, g, or t
  misc_feature (705)..(705): n is a, c, g, or t
gcggccgcttnggagcggccgcaagtgcttactttttttttttttttttttttcagctaccattgtttttattgttactgaggctgtcagtgccgcctggaagcactaacactttttcccatttcctgcctcagcccatttcacaggtgaggaaatctgaggctcagtgagggacttcattcccttcatctggtaaattccatttacaggggtggggctgggtgctctatcggtgcctggcttcctctcccaggggtgcagtaggggagagtccattcccctgtacctcatttagccccaggattgccctgcccaaaagatgacactcctgcccccagtgtcctggatgggaggcctcccagccttcccaagcaatggctgtaatcctgtgggtacagagtctggctggggatcctgctgctctgctgggaggaggagtctgccttcatgggagactcggtccctgccccatcggtaccgggtgcctggagtccacctgcccctcacggagagatttctggcctcttgtccttgaactctattctgtcctgctcctggctctccagcggctccaggtggctgtgcttgtcctggaccatctttcccggagtctttagaaatctgaacaggagtttctgccccggttccttcttaatgatattaagcttataatagtggcgcagggcacgagacatcttctcgtangtcatgttca

SEQ ID NO: 214051 - DNA, 554 bp, Homo Sapiens
tcggcctcccaaagtgctgggattacaggcgtgagctcccacgcctggctctatcaaggttttcaaagccctttgcagatctgccaggtatggggatgggcacgagtggatggactgtctgaagcgaacactcccatctcccaggtactcgggaggcctggccccacctaataacatagtgtccatctcccaggtggcctccgacaaaggtgaactctgcaactctcagctgcctttgctcggagaagagcacctcacagcatggccagaagctcagggctgcccacgtcaagccctcaccagcacgtccttcagcgccccgggaacaacgcttccccctgcaggcggggagcagccacgcacaaatgcttggcactgcagggcacacacaggagccgcagccacggagcgcagagcaccctgctcacctgcctccaccagggccatgccagctggtgctatcgcaatcacctcactgcctgatttaaacttggagaccacaggctaagtgccagtcccctgccttcaggcaggacactcattcctgaaaacta

SEQ ID NO: 214052 - DNA, 631 bp, Homo Sapiens
ttttttttttttttttttgggaaaatgcctactaatgccaaattcatcctccattatatctttcaatagcttgtatttaataagcttatgtgatgattccttcaggcttatggggaaaaaaaatgtctgcaaattaagttacatgcttcgccctccgccccctgccccaatcaaaaatgatacaaccaagttttggtctctctgtcaaatgccaagaaaattcttggcaagttttggttcaaatgcagctttcctcaacatccaatcatttctccctgctctgacacctgtcccctctttctcagcttggagtttttgtttcaaaattgtcttatccctatgatacatccatttgtacttctatatcccactttaggtaattaggttttagagcccacaggaatcacaattcacatgctgttgctaagttctgtgccattaagccaaaattgctatctaccaaagtatttagtccttatgaagagtattccaaggttttcatgcaaatgtgagggtcccattgcaaatattttgaaactgagttttggacaaagagtataaagtggaaacacagatttccccaaggaggaaaggaagggcagggtgaatcaagcatgatttttgggaaaac

SEQ ID NO: 214053 - DNA, 638 bp, Homo Sapiens
ttttttttttttttttttggagacacaaaaagtcagagagactttatttaaatagagttaatttgaagtaaaccagagagttttgtgtgcagaagcattttgcttaacttagggccatcaccacattatgaactcgtgtgtgtgtgtgtgtgtgtgcacgcgcgcgtgcacaggctagtgtccttctgtgggtgtgtctgcgtgaggacccatccatgcatgtttgatctttatggcctccccctgtgcacctgcgcctatggataaggtatagtcttgtcttgattcccagtattcattctccttgaagaatcctgacagccttcagtcaccttcccttttccagtctcccaaaagcaatggcgccttaaatgtgcggtaaggatgaggtgagtcttgaggtagcctaggccacagctgccccttcaaggcaaggcctcagctgagttcaggaaataggagaacctggccccggagcaaccccagaagcgcaggaccacgaacgtcccgacccccagcagcaagagggcgcccagggccccaaagaagatgccgaagaacgcgtcgagtttcatgctcaggtgctcacagtgctcgccccaggccgtgtagatggagaaggacacacagctggtgac

SEQ ID NO: 214054 - DNA, 590 bp, Homo Sapiens
  misc_feature (565)..(565): n is a, c, g, or t
tttttttttttttgaaaaagtgattttaatttattgactagccacaaaacattaagcttcagaaagttctgcctctaagttcaacgaattgctttttaaaatttaattttcaagtcctcttcatttgcaccagtttcaaattaagcaacttattgccaccacattttattcaatttcctgactttccaaggtctgtaagtccaagttaaaaccggcatctttgagcagaacaaagtctactctgctggttaactccctttggtgccatatgtaagtattgcattattttctcgcagaccaatttctccataaaagcagttaaaagttaacaacaactcatgtgcttgtagtaccttgacagaatgattatggaaatctgtaataataatctcattattgctatttacagctgcaaaatggggacctgcaaactgcctgtccccatttcctcggctaccaaacctggtgactattttcccgtttggctggaagataacacgcagcacgccttgttgtccacaacaataatgtgcccattgcggtccacagaaactcctttgggtcncatcagctttcctggatcaattttt

SEQ ID NO: 214055 - DNA, 720 bp, Homo Sapiens
  misc_feature (668)..(668): n is a, c, g, or t
  misc_feature (675)..(675): n is a, c, g, or t
ttttttttttttttttttaagttttccaataaatttaatcaataaaatatatactgaaatatcacataaaaattaacttacacttcaaagattgtgcagctgacaactcccccaaatcccccaaccctcaggccaaacaagataaaaagaaacaagaaaaaagttgtaacatgaaattgacttgttttgcttggaaataagattataaattagtaaatcaaaatcttgacctctcatgataatcgtggtgtgctgcaggcatcacgatgaaggcggggctgtctgcactcctgtgcttgcgacactaatactgttctctccactgcaccggagcacctttgttcggtatatatatgcctttgttacctctgactcacgtcgcttaaagaccagttttgcaaatgttgttttttaaaagcatacttgtcaaaactgtgatgtaagagaataaaatccttggaggccttgatttgaagctgtgaacctgtagcctaccaaggacagtaaaaacattcccgttgtgaacactgctccagaagcagctgaggaactagaaaaaagtggacacccctccatcaccaattcagcgactcatgcttcctggcttgcacagttcctcaggacttccctgagagtgatgagaaaggtgcccctcttccccagcccanaaggtangcagagaaaggtaaccagttgcgtggttcattttggacaggcatg

SEQ ID NO: 214056 - DNA, 499 bp, Homo Sapiens; identical to SEQ ID NO: 50727

SEQ ID NO: 214057 - DNA, 680 bp, Homo Sapiens
ttttttttttttttttttacacataccaaaaacatatttaatcaggtaaacaaaaattccaaatacattgttgcttatttataaatattgatttataataatcctaaacttttttttaaccttaaaaaaatcatccaaagacttcaagttaaatatatttcaggattagccagggatttttgtttttcgagggttggtttttaaccacttcttcatccagcggtctattatgagaacacaacacagtcctctgtcccttaagcatgcaggttccttctactgctctcagtgtggtcttgtctgccaggcctgtgattctccctaggactgtcttttcctctgggaggactgactcacctgtgatttgtggtatttcaaactagtgaaaaaaggaaaaacaaaagtggcatttgattcctaagctattactactacccaggaaaatgcttgctgagagaaatgaacatagctttgtgtattgcattctaaaaataacaccaaaattgtgcttttgtaatcttgtgcagatttgagtttgtgctttgatgttttcaaaggaatcttcaaggtattggaaatactttggaatccaaagtatttgttagatactttccagtgagtccagtcactttccttgggccttcagttttttttaggtctggccagcagatattaatatc

SEQ ID NO: 214058 - DNA, 694 bp, Homo Sapiens
  misc_feature (608)..(608): n is a, c, g, or t
ttttttttttttttttttcctggggtcagagttttaatcctgggaaaaagaatctggccgctgggccatgccctgggactagcccgctggtccctggtgtgtccgaatcagtgctccagtgcccgcctcttctccagcttcttctgtagctctgccgtcatgtctgccagcccggctgtggggaagagaggctgggctgaactgactggcagcttcctgcccaagccaccattaaagactttgggctctggcttgggtccaacgggtggctttggaagcttggcaggaggctttggcaacttctttggcttcaggatgactggccaactagaggaagccacatcttggttctcatagtcaacagctgggccatctccaatgggggtcacgtagttctcttcctggttcggtagtgggggcagtgggggcagcttgtcctggctagacgcaggtgacagcggcttggggccacctgtgcagggtgcaggacctgggcccggagcggagggcgccacccacacattctcgccattctccttatcggcttccacgtagcctagcaccttctcgtagtcctcgtctaacaggaatggcaccagcgccttttntggtatgcgacacgaaatagttgaccacggcgtccagggaggtgcaagagaacggctgttccacatcgatcacgtacttggggccc

SEQ ID NO: 214059 - DNA, 676 bp, Homo Sapiens
ttttttttttttttttttgatttttataacaactgaatttattatagcataaactaaatacaaagctctgaataaataatcgtttttttcagtcatcacatctgcaggtgtgtatgtgaacatttccataagcacataaggatacagatgtcacagacatatttagtgagggaagcccagagtcacggttctctgtgggtaagagctagatgccttgagatgaacatacagggcaccgtctcaaatgatttggactatgtgactgtgttcgtttctccttcagactctgctcaagaaagtgtattgataacaggttgctccgccctcaagtttagggcactctcccacgctctttcatgcaaagttttttaacacctctctttaagaaaattcacaaatcagaagtattaccccagcttcaatctgacaatcaggacccctactctgcccctctttcctaggatcttatctccattaggggtcccctttcaaggtacagggcaattgagtctatatgtccacacaatcggatctgacaaggctgggagccctccctccagagcccatcctcccatgagtgtctgtctggtattctgtgtgggtagtagtagaaaatagttcacatctggtggctcatgtctgtaatcccggcactttgggaggccgaggcgggcgg

SEQ ID NO: 214060 - DNA, 661 bp, Homo Sapiens
ttttttttttttttttttcagaaaaagaatctttttaatttgtataatttattagaagcttcttaggaactatatttaagccaaatatctacataagttacaacagaaaaagactgacgccgcaaataccaaactgccaaataatatacacagatttgtcaatgcccataaaaaatgtgaagggctggggactgggagtggtttttctttttacaacaaaatgtacagattactaaaaactaggcatttagtccaacttttgacagcgttttacagctacaagttcacattaaacaaactattttcgcggagggcggtcgccgctgagcctaggcggccagagggtgccggggagggggcacttcctttgtgtcagtgacaagtgggttatgttgaagactctttcctctccccagctcccgtcctcccttcaaaaaaaaaaaaaaatcctggtatttacaagcgagtcctctttgctggcagagtgtgcccagagtgaagtttggtctttagagtccagagccatgtcagcacagagccctctccaatctgtgccccgccctagcgtggaaaacccatttgaatcaccaaaaaaagacaccccaaagctgttttatgcccttctctgcttaaagattccttgagattggatgcgcttggt

SEQ ID NO: 214061 - DNA, 668 bp, Homo Sapiens
  misc_feature (615)..(615): n is a, c, g, or t
ttttttttttttttttttgcgactttggttctggtttattgcccctcagcaggcagcgggagtcaaggcctaggctggggctgcccggctcagccagcgggtctaaacagtgtgtgcaggggcgccgttcgcgccctccaggaaaatgcgcgatcgggaatgtctcgaagtcagtccaggaaagagtcggcccctagtcgtgggggattgggccagggaagggcagggcggggcggggccacgccgccgggccagtcggtcccgccaggcagcgatcaaacgtcgagggaggaggcgggggacagggagggggttcgagagggcgtggcgggcgccggccccgcgcccccagcgcccagcactcgccactggaagatgctggcgtccttgccgcccagcgagacgaggtgcgagtcgtcgtgcgtgaatcggacgctggtcacgtggctgccgtggcccccgtacatgcggctcggcgccttggcacgagcgcacgggtactggaagagatgcactttgcagaagtcgtcggccaccgccaccacgcgctcgttgtgggagcggcacagggagttgatgtcggtcccatcggagccgtccggccagacgccgtanacgtgaaagcccagcacacaggtgtaggtagcccattcccggtctcggctctc

SEQ ID NO: 214062 - DNA, 673 bp, Homo Sapiens
ttttttttttttttttttgactggaaatgggcacaagaaaactttttgggtttaatagacatattgtatacattgatcttggtgatgattacatttgtcaaaattcagaaagccatgaacttgagacttgtgcatgttactgcatgcagattacacctcaataaagtactgttaacatacaaaacttctagttgctagccagaaactgatttctgaacccactaacaagctgcaaccttcagtttgataaacacttgtccacgagatctgcaaaaatgggaaaatcaggccatatgactaacttatatatcctccaagccttgcagaattcttctgagtacaattttagagaaacttctagagataaataaaaatgtcaaatattactgaatttcaaatatgacagtaatttcaaatactactgaaaaattacaacgtattaggcactgaaaaggcagagtagatttggcagtcaacaaagtccctgccctcttggatcttatattctagtggaacagaattcagcatttccatcttagtacttctgatttactccagatcagactcatccttcctgatcctcttgtctgcatgtatcagctaatggtcaatgttctgaatgcagtccatatgtctccactcttgtgaggcttctctgctgtgtggtctccca

SEQ ID NO: 214063 - DNA, 587 bp, Homo Sapiens
ttttttttttttttttttgaggtttcaacttaacatttatttgcacactccaggtcactgctgagcccccaaaacccacagcctagtaacaccaacttcactttcaaggaccgcagagatagaccaactatataaatcttgtggaaacatagtaatttgggtgaggaaactatgacgctagaggctttgggatgaatattttgcataagcaaaagttcagaagcttgaaaatatagtcagcctacaaatctcaaatttcacctgataaccgtagcccttagccaccatgccttccagctctctcaactcccttgcctctagtttactcctcttcccatttcctacaactttgtagggggagcattttagcaaagctatttcaaaagcgtgaaaagtccaactgatcaataaatttactcagaaatttacactaacgggatgcttccaaaattttaaattacgaagcgttatttgtattagcataaaaattttaaaaccagatgcttaacaatagggtactgctgaataatttaacatatgtccacataaaattaaaccattaaaatctgctttttcaaggaatattt

SEQ ID NO: 214064 - DNA, 704 bp, Homo Sapiens
ttttttttttttttttttcaccttcggttttattatagtgatggatttatcaacagatttttcattttctgaaatcttgcattcttgggataaaaatatcttggttattgtggatgtttaatatatgactagaattgatttgctcttaatcttactcgtgattacatttaggacccccccccaccccaccaccacccccaggatactctgtcttaaggtccttagctttaatcacatctgcaaagtttcctttgctgtataaagtaacagtcacgggttctagaaatcaggacctgtctatctttgggggccaaccatttaacctagcacagatagatgccttaggaccttagggcttaattctcttctggacccagttgagaaaagctgtctaggcaaacatgctcattatagctacagatggcacaaaaccatgccatgtgactgaatcaagacccggtatggtcctggctgactctgaatgacaaaactctacaaagcataattcaaaagcgtgtgacttggttgcattctgtgtggaatggaaggattcaagatgtcagctggcaattccaggaaaaactgtgattaggcttttcttagaagtggcatctgaagagaaatggagaggctgttcttccaggtctggttggaccctacagggagcaggccttgactctgtgagtgagcctggcttgccttcc

SEQ ID NO: 214065 - DNA, 699 bp, Homo Sapiens
  misc_feature (599)..(599): n is a, c, g, or t
ttttttttttttttttgtggttatgacctttatttatataaaaaccaaatatttagtcaatttaccgtgtcttaatttaatctttgtacaccttccatttttaagtgcttaaatgagtactatattgcaataaaatgtagtgatataattaaccagccattaaaaatttacttctacagatacagtgtcaattgagtttatatattaggtacttgcatactttttatgattactatgaaaattagagcaattaaaattaatggtttctacaattaatctgagttctacaacctaaaattgccttcagtttactggcatccctggattagggttagacctgatattgtggctgacacagaaaggcaacaggaaattaacttcattattttcatattcataatatggcatatgagactcaccaggcaagcaaatccccagactggttaaaagtaaaaatttaaaagctgttagctatattttgtgcactgaatctttaatagcaaattgtctacaggctgcagttagagactttgctggaatatccatttctccttttagtccgtgccatttttgccacccctctaacccggggagagtanaagaggtgctgttgctgatgtgggtatggcttgaattcagttaaatatattaaaaagaaaacaattccttcttaaaccactttttcctctaggattgcaa

SEQ ID NO: 214066 - DNA, 678 bp, Homo Sapiens
ttttttttttttttttatctttttaatttgtataatttattagaagcttcttaggaactatatttaagccaaatatctacataagttacaacagaaaaagactgacgccgcaaataccaaactgccaaataatatacacagatttgtcaatgcccataaaaaatgtgaagggctggggactgggagtggtttttctttttacaacaaaatgtacagattactaaaaactaggcatttagtccaacttttgacagcgttttacagctacaagttcacattaaacaaactattttcgcggagggcggtcgccgctgagcctaggcggccagagggtgccggggagggggcacttcctttgtgtcagtgacaagtgggttatgttgaagactctttcctctccccagctcccgtcctcccttcaaaaaaaaaaaaaatcctggtatttacaagcgagtcctctttgctggcagagtgtgcccagagtgaagtttggtctttagagtccagagccatgtcagcacagagccctctccaatctgtgccccgccctagcgtggaaaacccatttgaatcaccaaaaaaagacaccccaaagctgttttatgcccttctctgcttaaagattccttgagattggatgcgcttggttgtttttcattttcttttttttaaaaaaaa

SEQ ID NO: 214067 - DNA, 685 bp, Homo Sapiens
tttttttttttttttattattatatattactccagtttattaaataaatgaaacaaggcttatgccacatattccaacaatgtttaaataaagagcttgaaatataaaggcttatgaaaacttcatactctttatataatgcatactatttctagcacatgaataaatataaaggacaggagccactttttatattatgaatccacaacattaagcatcaatgattacacaaatccataagcacacaaacaaaaaaacccattggttataaaaactagaattccttttggcatatttaagaaaacccaaaggtggggaggtacttatagccagaaccctgacaacgaggggaccaagtctcccaattccttaagttgtttcttggttagaagcttcaacaattgcattaactctttcaaaaaaacagaaaaagcaggttaagatcctgttcaataaggcacttaataagtctacactgaagaaatactatgcttttatcttaaatcgtgcttaagttttaccatgaggtttgaatttctttccaccttggtaggaacatgtatgtaatttgaataaactggtaataatactgtctgacattcgctctttacatggtcattaaaatgaatttgcttctactgttttaaaattgtatgcatatttgaaaaagtaaaatttttctaca

SEQ ID NO: 214068 - DNA, 695 bp, Homo Sapiens
  misc_feature (209)..(209): n is a, c, g, or t
ttttttttttttttctgtgtccaaatgttgctttatctttcggcacgaaagatcttcacagtatcaaaagtaaagaattggaaaaaaacaaaataaaaacaaaaacaaaaaaaccaaacacaaagagagcagtgttgggccagcagtaccatcagccctggcccttaggccagcccagtccacgggctctgagtgtggaggctgcgtancaccaggaagcggctctgctgaggtcaaggggccccagcacagtgtggcatccgttcagcttttggttggtccaggatggtggggagcacagagggtcttggacgggtaggtggggcacacggagggaaaaattatacgccttcagctggcagtcagggcctcaggatgccctgaagcagctcagcctgggcagggcctcactgagctgtgctaggagtggttttcttgaggctgaagttggtccagttcacagcaactttctgacgagtctgctttgcagaatccaaacagaacctcttaaagtactccacctctcggtcagtctcatccatctccaccccgtccatgtccttgggcaggaacacatcgtccaaggaggaggctggcttctcctgcttgttgcggctccggcggctgcggcccttgccctggggcaagctctgtggccttgctgggcctgggggctgcaagactcctgctcctga

SEQ ID NO: 214069 - DNA, 679 bp, Homo Sapiens
  misc_feature (624)..(624): n is a, c, g, or t
ttttttttttttttttttcacaatacaaatctttattaactgaaggcacggggctcaccacaatccttcggatggaaccacaggaagagaagaagcatgtttcaccctgggctgggggtgcttcccaaagccactggggcccttttcccaagccccagaactgagcccacctgaactcatcttgaaggtaggtatgtcagtgagtcctcccaaagcctcagtttccctatctataaaatgaggaagcaggactgcccctagggcaaggcctaggcctcctgccagcccaccctcacagacccagagggcaacgcagggtgaggcggggcagtttcactccccagtgctgtggcccccttggttgagtgaaagcacctccagagccctaaccctagccctgggagccaggcaagagacccccacaacgaccatcagaggtcgtgaggggtggcagggagcctggcagggagccaggcaggggccagggtctaggctcagagcagtgaaggatagatagggtcacatgccagttagtggcagaggtgggacttgaacccaggcctctgtgagacttggttctctcacctgtaaaatgggtctactagcagctgcttctccaagcanatgatgtcaagcacccagctcggcacctcacagatgtgggtcagtaaatggtaat

SEQ ID NO: 214070 - DNA, 751 bp, Homo Sapiens
ttttttttttttttttttgaggaagaatagggtttattaggtcttttaaaaaaaaattcactaacttttctctagtggtctcatcttctattctgtaaatggctcttagaaggaaatgttttccaggtacagatacctaaatgggtatctatctcacaatggcctggagttctgttccctcctcattccttaatgagtgcttgtcctgctgtgcccttgcattgtttaatttgttgctcctttttacgaaactcagaaattcttgatccataaagtagggcttttctgacgatccatcatttgtttccagatcaacagcaaaacacaggaaaagtgcatccagcacagtttcaaacacagataaaaaactatgggctactaagtaggcaaaaaaagctaccaataacagagggactgcccacacctggaatgcccgattgtagttaaaagccatgagtcctccaaaaacagtgaaacacaccactaacacctttcctagaaaaattatgaagtctccaaagcagttaatagatgtaaagtgacttgagttcttggacaagattttgaatgcatcttttgctgatgtacagaaatctgtcccattaatagcagttgtagtatatgcattctggttgagatggagcaggtatttgtcaagacaccagaaacagcagtagcagcatcggaacaggtacctggacaatgcacatgctgctgttctttcagtgcgttttgcatgtacatgacaatg

SEQ ID NO: 214071 - DNA, 685 bp, Homo Sapiens
  misc_feature (672)..(672): n is a, c, g, or t
tttttttttttttttattggtcttcactggtctttattgaatgagggttgtcaggagcaaaggtgggatcaagagcagcaaaagcagaaacaagtataaaagtatcaaaaaatacaaagtgctagcactgaggagagtgagaagggttgggttgtggcccagagggacctctgggacacaggattgaggacttgccacagcctccaagggaacctaggcctggggggcctgtgcaggatccttggctgagggtggaagtggcttgagcggggcccaaccctgggccctgaagtatgagaccagttgtgtgggcacttctgcgagcacggtctgtgccaatgcctcccgaggggcattctggaaccggcggtagggtacaaactgcacaatgtcgcgggcagcagcctgcccagaacgtgtatgcaggggtccaccatcagcgtccagctgctccatggcctcaaagtcagcaccacccacacccacaatgatcactgacatgggcaggttcgaggcacgcaccacagcctcacgtgtggcttccacatccgtcacagcaccatcagtcagcagcaacagcatgaagtattgcgaggcagtccctgatgtgcagcctgggctgcaaacctggccacatggttgatgatgggtgcaaagttggtaggggcatanaggcgaacttggg

SEQ ID NO: 214072 - DNA, 762 bp, Homo Sapiens
ttttttttttttttttttgaatgtcaaatgaaacttagaatttattaatgtatttacataatttataatctttaagcaatggccccataaatatagactacaactttacatatgctaagcaatagatacttgcttttccccaccaaaatacttgggttaaaaaaaaattgacagcatttataccaccttcttcacttccactcttcttcctttttaaaccattgctagtcattttagaacatatgaaattcagtttattccgggcagcttctctaccatcaccatcttgatcatgagagcttatttaaaaaggtgccaataacgtgtttggtggcacacacatgacaaggtcagaagcaaacccaggatgagctaggcatctgctgctatcattgttaatttactgtacgtatcctaggctaacatgttcaatgaaaagtgctttagagatggcagagatgaaatcatttccatcagtcctataaataacccattttagcttcagacaataattgtcctccctacacttaaactatcctactatatgttaaatgatacaactccctctaacagtggtaacagaaaccaaggaaattataatctccacaaggtctgtttcttttcccttaagaaccacaaaagtgctaattttccctttacaaatgttacataaaatcttgattacaaaactactcaacaacttaatcctaccatccatacaattatatgttccttttcagcaagggtcaaagcaacgatgta

SEQ ID NO: 214073 - DNA, 744 bp, Homo Sapiens
  misc_feature (681)..(681): n is a, c, g, or t
ttttttttttttttttttcatttttgtcatttattaacctggaagcaaatatgacaaaacagtcatactagtaagtcatctgaattttttaaatctcttaataaaacaaccaaatcccacgcaaatcagtccacaagggaggcccccgcctccacagtgcagggtgactgagtgtacaactacgggccaacccccgcctctcaaccggaagggagggcactcaaaagaggaatttagagaaaaggcggagagggcggacctcgggaaagggtctgggcgggagccccacctggctccccacccctcccgaaaccaggggaaaagcctgtggcgtggcgctgctgtctcccattagcagttacagggccgaggcttcccgctgattggtggaaattccgatcttctgatccctgatttgcatagagactggggcctgcacccccgccccccaccagcagcaatcggccaacgccaacggtgctgcgccaggagcgttctgggctcggcgccgcccagtcctcctggtcatctcggaagctgttttcttccagctgcttgggacagcttttgtgaatgcctcccttagggatgttcgaaagaggagtggcccgacactgctagaaactggtcctttccttcccacctgtggtaaggatagtttctgctacggcaagcactcanactcaggctggtttgaagctaaaggattcagacgacttccaagtatcaagaatgaaagaaaaa

SEQ ID NO: 214074 - DNA, 703 bp, Homo Sapiens
ttttttttttttttttttaattagaaaaatgtacaatttattaatataaatgtataaagcaaatagaacacattcatttaagctagacagacgtcgacacaaactttcaaattggattgtcagtttcatcaaatttggaataaacagaaaaatacagtatttacagattttagtaaaactaaacagaaatggtacaagaaggaaatttatttttcacagaacaaaaatgacaattttgactcaggtacccacataggagcaggtgaagttctcaaaggacaactttttttgttgttgtttttttggtaagcaaatgaaaaccaagacatatttttctgctcttttatttatattgatgaaacctcaaagtctgtactcaaatacttattaaaatatatccatacatatatgatttcttgtcaaaatgcatcattcttcttcaaatacaaaaacaaaaatattttcactttcctaaaaccatcactttttcttagatcacacttttatctttcttctgagtatagccctggaaaagcagtttgaatgcaaagccccttgacaaaatatctgctttttaaaaatgttaatttaatacacaagaaaaaaaaagcctctgggagaagaggataaagaagttaggatttctaactcctaggctaaaaaacagcatatcagaaagccattcaatttcctttacaatgct

SEQ ID NO: 214075 - DNA, 712 bp, Homo Sapiens
tttttttttttttttattagcaaaattactttattctaacaaatagtttaacacaaaaatacgaactagccctccagggatctttggggtctacgcttcccatcgcctcagtgtccggtgcatgaggaaggtgtcctctgaagggcggggccggagttgaagtcggagagggggcagaccgtccagggtcaggtgtggagattcataaaatagcgtttctgggtcacacaagatggtcatgtctggcccaggcccaggtggctcctttgggtgcggggctcgagcctgtggcggcaggagagccaatttctccctgagcgcggcattcagaacctgttcctccggcacctgcaggctcaccaggtcccggaagagccgcttggagcgcggcacgttcagcccctcggacacgctctcctccaggccgcagcggatctggaacgactttctcagctgttcctccacggccttcgcagcatcaaagtggctcccggctgcggcccgcagctccaggcccaaggccaggctgctcttcagcacgggcatctccagctcctgcggcaccgcaggctgcggctcggaccgcccggggagggcggcgtcaggcggaagcggacctgccgccgctgccgagccgcgccccgccgctccgcccgccccttccgccgcccggggctgccgtgccgcggctgagggctgtcgggccgcgggc

SEQ ID NO: 214076 - DNA, 695 bp, Homo Sapiens
tttttttttttttttattattaagcaacatgtttattggcgttgatgcagagacttacacaagtcttcttttttaagagaaaaattacaaggtattcaagttacgatttttagataatctctacatttgagacatcaaattataaaaggtcagtgttaccccatatgacatttgttttaaaagtttaaaggttaccagatttgcagcttttaaagatatgaatgtcctgggccttacccctttggtgtctgagctagcagctgcagagaggccctctgaatacacagtatattttgctatcccttcaagttattaaataccagaaacacaaaaggttttccataagaaattgtgtgattggactacaggaattaaaaccgaacaacctcagtcttgggagaatgtattcaaacgtgcaatctctgaagtccctgtctactgtccaggtgtaaagcatggatttttataaattaataatgcccagacctctgccaatgactgtggcgtcaggcagcaggttggctcaggcttgtggggtggcttttgggacaagtgaattatgagtcagtaggcctgcatgaagagggcagcagaaaggtgagtcacatctgggaacactcaacaggctatggagacaagaaccgctattacaagcccggtaataagtagcacaggccagttagagcatgttcaat

SEQ ID NO: 214077 - DNA, 759 bp, Homo Sapiens
  misc_feature (640)..(640): n is a, c, g, or t
  misc_feature (733)..(733): n is a, c, g, or t
  misc_feature (748)..(748): n is a, c, g, or t
gcggccgcggctgtaggcttttgaaagatacaaatatgcacagaacacttgtatctttcaaaagtcacacttaagacatagtaaaagcatgttgtatgaaccatgtattcttaaggattgagcaaactgcaggctgcttgctgccttttaggtttgctagtccctgatctacttgaaacagatgttgcttgccccaacactagtttaattataagggcagcctgtgagaaagtttcaatagacatttttctcacctatattgcacgtttttctgaagcccttgtgcaagtgtgtgtgccatgtgtagttctatttacatataaacgctactttaaaagtttatcaaaatcatgagtttttacaaaagtttttaatgctcttctgcattatatgcagcattgcaaatctgcaaagtagtaaaactataaagcacctttaggtttgcaccagttattacagaaatggggatttgtgaaaaggatgtaatttgatgtagaagggcaaagtcctttaatgactggcattcaagaggattacttaaaacaatttgtaagttcatgctaacctcttccctatatttatactactgggacctggggaaggatccatgacatggaagtatcttgagtgtgccttttanatttgagcattactgctaagaatgttctgtaaaggtgcaaagcagctatcccttaactcttggagaaatagccatagggaaacaatcatttangtaggagaacatggngaaaaaatcag

SEQ ID NO: 214078 - DNA, 642 bp, Homo Sapiens
ttttttttttttttttttgcagagaaacagatatttttatttttaaattatcaagtgcattcacaagacagaaaaaaacaagcttgtacaagagtgactcaagctggctgggcccagctgtacctgacacacagacttatacatccagaacaatgaaaactcagtgccatcagaacagacttttgggcggatggctgtaggcttcaccagttatcagtgccactcaacactttcaaaaatgccttttttttaaagttctacacagcgggacatgtttaccaatttttatgcctctacatgtgcagggataagagccaaatatatttttattagaagatatttcacactgggtatacatctgggcaaaatttacacctcaatgcccaacattgtttttctcacttcttattttaatggaattgactgtctaatttggataggtctttctaattttatattagttttcactttcttggggttaaatattttatcagcagaccttatcacacacttgagaaaggagtcaagaaaagaacaaaaaatgaatatcccattataatatcaaacttcaaaacatatagtctataataatgacactattattctggaacttagaaaaaaaaaagcctacagccctcgtgc

SEQ ID NO: 214079 - DNA, 673 bp, Homo Sapiens; identical to SEQ ID NO: 55078

SEQ ID NO: 214080 - DNA, 711 bp, Homo Sapiens; identical to SEQ ID NO: 46919

SEQ ID NO: 214081 - DNA, 627 bp, Homo Sapiens; identical to SEQ ID NO: 42199
  misc_feature (607)..(607): n is a, c, g, or t

SEQ ID NO: 214082 - DNA, 618 bp, Homo Sapiens
ttttttttttttttttttggctgaaccaacagaaatttatttctcacagtctgggggctggaagtcgaagacataggtgccagcagggtgggggggggggttcattgtgaggcttctcctcttggcttgtaggtggctgccatctctctgtgtgctcccatgccctcttgtttgtgtgcacagggaggaagggaacaagctctctggggtctctccctataaggacaccagtcttagcagatcagattctccactgtgacttcgtgtaaccttaattacttccttagcagccccagctccacagtgaaggttggggcttcaacatgggaatttaggggtgaggatgggacacaaacattcagtccataacaatggcccaccaaactatgaaagcaaatagaaaaaaaaatcacagttcaagaatgacataaaacttaagtagttatgctatagagtaatgcatacagctacgctgagatgttacaatgtaacaacataaactcactgcattttttttcttcttcttctttttgagacagtctcactctgttgcccaggctggagtacagtgacatgatctcagctcactgcaacctctgcctggggaacaagagcgag

SEQ ID NO: 214083 - DNA, 714 bp, Homo Sapiens
ttttttttttttttttttgggtcgatcaaatgcttgagtttattaacatgtctcccaagtcttttttactgggagtttcagggtggtctctgaaatccattgctgttgagctccaactccaggccccatggggttgcaccaagctgctcaacctcacctgtttcttgaaattttgctgccttccactaggcagatgggtccagcaggagacattggagcaccaaatggaaaagctcttccttccttcccctcttcctgtacatcagaaagaatgcattagaaactcaaggagtgagcatttgggcttcctaagggtgagacagtgtggggctcctgtggggagatgggtactcctgtacccagtgtggcctcctgctcccaccgctttccagctgtggggcttttccttgtggaaattactgtccaagtttgatttttccatctgtaaaaggaggcaagtaagggttggtatgaggatcaaatgaattaacaattatcagactgacacaaacattccacttaaacagccaaattgacttaaaagggcaacatagatgtctgaagccagactgcctggtgggcaagctggagaaagcaacttctatgcaagaactgtgtcctttcagaagctccagccagagcgtacgtggttggagagagcctgaagacaggccttgccccacacaaacacagaacaaattgttctccaccccc

SEQ ID NO: 214084 - DNA, 745 bp, Homo Sapiens
  misc_feature (732)..(732): n is a, c, g, or t
ttttttttttttttttttggggatttcccaatgattttattgaggtaacttttcccaattttatacatatatgcatttatatatacttaggaaagctaaacaatgttctaaggcacttggaattgtgcacagcaaagtatcctctaatattatacaactaaatagagcagaattttgctttttaaataacacaaataccagtacggaattaaaaaagggaatacatagtctttctttcaggttacaatagtggaatacaagtacatatgtgtgtatacttgtagatatttatacccacatactataatacagtacagataagaacaacaaaagagaaactgtcatgttaatcagtgtacagttccagttatttacactcacagatattacacctgtgtaatacgtagaactagatcactcactggaaatcagaaagcattcagtcagtctgataatgatcacagtttaccattgttatcactttaactgaagtgtgaaataacaaaagaatgcatatagtccgttatttaaaaatccctgttacacagaaaaaaaaaaaaaaaaaaagaaacttgtttgaatttttaataggtcctaaatctggtgaaattggtgtaaatgttttgaacacactggcacatttctaagccacagaagaaatgttttttttaaaaaaaagaaaaagaaatattagtccctatattttaagggatgaaagtggtttgacccttngatcattctgatt

SEQ ID NO: 214085 - DNA, 738 bp, Homo Sapiens
  misc_feature (701)..(701): n is a, c, g, or t
ttttttttttttttttttggctactcaatgtcttttatttctgcctgttttttggccccagaaaatgcaatattttgacacagaaaaaaacattaggatgagtgtgaaatcaaatacgattctggtttttgagctgacatttagtcatttggagccacatggctgtcccagggcctggtccccaggtcatgtgcttaaagcttccaggcggttctcatcatgatgatgaagtacacatcagtgtcaatggatgcgctcacacctgcatagtagttcatgaactcctcaggggtcaccaatccatctttgtcatagggtgaatcaaagttatccagaaatttcctaaatacttgttcctcactccattccccattctggtactttgggtggtgttttgcattatatacttcacgaaggtcttcgattgttataacaccatctccagtcttgtctaactttctaaaagcttgcatgattacctcttttctggctctggacattggaggtcttaatgtgagaagaaattcattgaagtctattgttccatttccatctttatcaaacctctggaaaagttcttccacctcttctttttccatgaccacagcataatcatttaaccctttcataaattctttaaaatcaagggttcgattattatcgtcatccataattctaaacactctgccaagtcctttgantccagcagagcccctggccaggcactgcagtcggagt

SEQ ID NO: 214086 - DNA, 726 bp, Homo Sapiens
ttttttttttttttttttaccaagacaaaggtaacatttttattgtgttaaaaaaatccttaaacataagtagatgtaatacagtttcttatacagtaaggcttatgaaatatggatactgatcaaacagccctaataatttaagcttactgatgaaaaactcatccacttgccttagtgaataaccaaagaccaatactttctttttccttgtgggtaagtaaagcagtttgttcaggtttgttagttataaccaatactatttatcaagtacttcttaccaagaacattatataccagtctataaccctcaatagttctacatcagagggctaaaactgagattaaaactcagatgtctggctctttccaagatagtacattgccttttaatctggtatcttttattaaacatgccacttacaggtgtccttcataatgaagttaaagtgagtatactgtggagaggacttccaaatgtggttacctcagctatatcactgcccaacatcagaaaacctgacggctatgattactatgccttttctaaaggtaaggtattaactaacagtttcccaaggaggtgatatcatttgtgaaaacatgaagataaagtaaaaatgctggctgcaatgatgactgaatgtgagaagttacactacggtacttattctaattgctgtggaaaagagttagacttttgctttaatttcaattaaaatgatg

SEQ ID NO: 214087 - DNA, 730 bp, Homo Sapiens
  misc_feature (667)..(667): n is a, c, g, or t
  misc_feature (678)..(678): n is a, c, g, or t
  misc_feature (708)..(708): n is a, c, g, or t
ttttttttttttttttttgaggtcacaacgcctatttattccccacacgtcacgccctgcaccccgggtgggcttggcacacacctcaccgccatgagcggctgcagggccgcggcggcccccgttcctactgctacctacgatacacggtactgcgcctacctcacagacggccaggagccagggagccccaggatgctccgactgacaaccctgctgctgggaccacggcgccgtgggctcgtctgccacccccaggcctcaggaacccagacaggctgcctgctgtccggctctccggctgctttcctggtggctgttttagggccaaggtgggtggcacctgaggtgtcccgtggcctccacccagcacaggaggggtaagcttccctggggggccccgggcccatgaaacatccaggacagaaggacagcaggatgggacacagacagaaacggcccagctgccttccctgtgcccggggctaaggcggccgggacagaaggtcatgatgtcgcccctggctctcagtcgcgaggaccagaaaatgagggtgggaggaggggaaacatgtctgtcaacatgcccaactggagaaaagtcacagaaactggtcctatgcacccaggacggctcctgagccgcggaggcgtggggtgaccgcanccgtctcttangtgtctgccactaaagagttcctcatgcanacacacatggcccgcggtgccc

SEQ ID NO: 214088 - DNA, 659 bp, Homo Sapiens
ttttttttttttttgtttaactagtatttatttctcaatacacatcaacttacacaaattttgcataaaacatttaattccttgggtataatgacaaattctctggaattttacaatgactgcaaaaattttataaattcaggtttctaataatatattttcttaaatcagagtacttctttaggattcaccatttgaaaatcccaaatcaagaccttcaagatatcttgcacatgaaatgatgaaataaagctttctaattttaaaagtctacaagtattcatatattcatatgtgtgcatatgtaggtatatgtgtatatttacatgtatatatgttatctgggcattccaaaccctagtttccaaattgtaagggaaaaaatatatgtgtcaaaaataatttgaggaaaaaatttttaatgcaaaatgaaaatacctttgcaagtcttctacaatcaaatccaacacagttctcataatcagaagtgcagttggtgaggcaaggtcacacaattgaacacaaatacgccgtaacatatgttgaatgggctggcaggttgtgccagagaaagagcgaactatttcttggagcaactttgcttgaacatgaaggtgcatgctccacaattttcgggtgttgagtgccactgatatatc

SEQ ID NO: 214089 - DNA, 647 bp, Homo Sapiens
  misc_feature (613)..(613): n is a, c, g, or t
ttttttttttttttttttcctggccggcctattattttttatttagagacgtggtcttgctatattgaccaggctggtctttaactcttggcctcaatcaatcctcctacctcagcctcccaaagtgctgggattacaggcgtgagccacagcgcctgtccacccttggcattttgtagacagcagcaatttccctcaaccccagaatatttggaatgttccagaagtcctcatttacagtcgatcccacctgtaccctataagtggtggtcctgggcttgaacttggacctgtctgaactctgagctcttaacccctgaggtgagaacctggggtgagctcttaacccatgggaccaacccctctagagtgaggagacacgtcatcatttttccttgcagtattacatctggaaaccgtgccgtgatgatctctctgcacccctcacaggcggctaacaacatcacaaacaaatcagccagaaccatcactcccgggtggggccccaagtaagccagttccccagggcccagggccctccagggtgaggtctccagcaggtgagattcagtgtggcaaggtctctgggagcaggtcccagcaggtaaagtcnccgaccgccgacatcctcagtaggtgcagcctcc

SEQ ID NO: 214090 - DNA, 760 bp, Homo Sapiens
  misc_feature (672)..(672): n is a, c, g, or t
  misc_feature (721)..(721): n is a, c, g, or t
ttttttttttttttttttcatactgatgttgcaatttatattagaagtactttcaccacatcttgctttatgctcccagtgaaccctatggggtgggtgggtttatacaaagggcaaatgcagtcagtcccagctcccaagtgaggaagctaagttctaaagggcttctgttccttggttaaggccacacacgatattcacggtgttggtattatgacatcaagttcagagcttttctgaaaatatccaggcagcattccacagggattgctcatctatttgtattttacagatactctcaagactaactctagcagaactttccacagtaatgtatcccccttgtaatgttcccatactatcctttctgtagctggagccatggacagacatggactctgtcttctttccacttgggttcctatgcaacagtgtaactggatcatctgtaacagtttgtgggtggccagacagtgctgccattgttcaatacattcctcattggaagctgtcttcagagagccaatcttcttcccagtaagaaaacccatctatgagtttagagctctgcttcatttttaaactaaaaatggcatcagcttgattgactcccttaatcatcagatttttagttgcttcattgtggccttctttagaggcctaactttacanatagagtatatccagatacacttgttgcaggctctgagggcacacccanagacattgcagaaagtccagtagcaatagccctctaaag

SEQ ID NO: 214091 - DNA, 759 bp, Homo Sapiens
  misc_feature (706)..(706): n is a, c, g, or t
ttttttttttttttttttcactttagactttttaatatttcatacagcgattatggtgcattcaggaacccaaccccccaaacccactaggagggctcccacccctgccctcccaccccatttcagggccccagggcttagggtggaggaaggggaggtaaccacccatccagggactgaccctggagactgtccctgccctgcctcaccctccccaggagatagggggcaacacctgggcacaacccctcacacccccctcccccaaccctgcttgtgcacatatgcacattatggctcctcgctgagctggtcagttcctggcagggcccctacccaacagcaccgagtgggatgggagcaaggggactgggctggggagaccctgagaaggaaggaggccccagctacgggactgcaggagagaaagagtggggccccccaccttgtccatttcccagagtctctggtagtccccagatccccctgcaactggggatggcgggcgggggtaggaaggcgagtggctgtggcatgctttcccatagccaatcccagggtctggtgatgatcagggttccaaataggggctgtgtccctgtctctgaaaggctgggagcagggcttcattgcacaaaatactgtgggagggccacacgcagggggtggggcccagccagtctgtatacagagatattgcatttanaaaaaacaaaatctcatttaaaataattaaaaaaaaaaaacaatgaatgaaac

SEQ ID NO: 214092 - DNA, 637 bp, Homo Sapiens
ttttttttttttttttttgaatttttaacagaaaattttatttcaataaatattttgccctccaagtgacaactacaatttcagggaggtaaaagtataacctagaagtaatttagaattattccacttttcaattttgcctgagtgaagaatacagtttgggcctgaagtctgctaagagactgcaccgcagtgacacgtgcagaaagtcaaaaggacacatggaaagcagtccatctttggtgcacgcacacagccatgtgcacgcacacgtgtgggtagaacgtatctgcacatacatgcgtaaaataatgggactcacgcaagtttcatttctctttcaacccttctgggctcccagaattctagcattaccaaggatttacacataaacttcatcatacattgaatcatttggtttacactttctttacaaagttatatcctaaatgggtagagcagcttgtcttaaataacaaggttagaattctgagacacaacgaaagttgtgcaagctttccgctgaaagaaatttgcaacgagacacaaataccactgcaggggctttgaatataggagacattgataaacagagttataagtcagtgttatcaactgcaaaatcatgactttacca

SEQ ID NO: 214093 - DNA, 699 bp, Homo Sapiens
ttttttttttttttttttcaaagtagacctctgtcttggattactatgtacctggacaggtgaactcttgtatgtttctgttttggggatttttaggggttttccatgtacattcatagagcctggtcagcagcgaggagtccttgttgcgtatggacggaaggctccctggcacccagatgtctcccttcgtcctggctgacacagagcatggtggtcatctgctcttcatgtccagcaggctcagaaagaactcggagttcccctcgcacccttgggccaagcttttcaagtccgagtgccaggactggatgagctggggtttgtgtgtctgctggcggcacagtgggtgtgcacaagaccaccatttgggtatctaacaaacacaggctcacaaaagggattttggcatatctgacaaagctttttgtctgagagttggattgagcttcctttcaacttcatcttatcgtaggtgtagattaagttttcggacctggccaggccgagagccacctgcatggtcctcctggcatggatgctgtccctcatggcccccatcaggaatgggcagaggagctgcactgaccaggtgtcaggcagcatctgcagcacctgggctgcatcaaattcggtggcgtggcggttcagcaggtccacggcagccacggccagctcgtgggcagtggggccagcacg

SEQ ID NO: 214094 - DNA, 725 bp, Homo Sapiens
  misc_feature (654)..(654): n is a, c, g, or t
ttttttttttttttttgtcggttaatttacactttatttttttaaaaaagttgatttaaaaaagaaacaacacaagtttagaatccataaaatgtcagcaatgctgatgtgcactggactgaaacatcttgatcatcttctgatagaagtaatattccatacaaaaagattcttagattccattttttgcttcattattgtttgtggcttgctttctttgagcaataaaggggtacatacacttgtccgctcctaggaaccgatacatgcacacaactgcttcaaatggtaggatgctcttcatgaaggtcacgatgtacatgaggcggggagtgcagatcatgggctggtcagtgaggatggccttcatggcctgcttcacacagtaatcaggcttcagaggtggcagaaaaggctcaatttctttcctgattcggcagcctctgaacatgccagtgtctacaagataagggcaaaccaaggttgttttaattccatccttttcagcagcctttagttcatggctcagggattcatgaaaacccacaactccaaatttactggcacagtaatcctcaactccggcagtactgaacaatcccaaggaacttgcaactgtcacaatatgaccatgattaatctccagcatcgtangaagaaaagccttagtggtccagaagtgtgcatggcaattgaccatcatggttctctcaatgagctcatca

SEQ ID NO: 214095 - DNA, 623 bp, Homo Sapiens
tttttttttttttgagtgaggtacgagtattaccaaatgatattttctgaagatgctttttggaaagctctgaatctatacctaatgctcttaattattggcttgtttcatttttttcctccagtttttaacaagatcacataactggcttatttttaacagctttgtcaaactacaatttacatgccgtaaaatgtacacactgtaattttataattcattgacttttagtaaatttctagcgttatgcatcgccacaatccagttttagaatatttccatgaccctaagaagtttcctcatgtctattaatattcccaatcctaggcaccactgagttgttttctgtctttataagtttttctttctacatcttatataaatggaatcataatacatgtagtattttgtgtctggcgtcttgcacttagcatggtgttcttgaggttcatctgttgtagtatgtattgatacttaatttttttattgccgaatactattccattgcatggaaaagacctattttatttctaggttcaccagttgagggacatttggattgttcccacttcttggctgttaggaataatgttgctctgaacatgtaaataaagcctcgtgcc

SEQ ID NO: 214096 - DNA, 809 bp, Homo Sapiens
  misc_feature (787)..(787): n is a, c, g, or t
ttttttttttttttttttcacagtgtcctttcttttaatacggctgaaatcttccacagcctcaggagagggacgtggacctgtctaaggaaaacaacaggctgtgcgaaatcagccctcagggtaacactgaacctggcgctcttccggcaccacacaggaggcgacgcccgggaaagaagactgagcggctcctgtctgaagacgtctccatcagtccagccacctggtgtcactggtatctgcgaacatttcctgattctccatattttgtgttaaaaaatgtattttgaggctgtgctgccggcaggccaagcgaaaggtttccagtgagggccgcccgtcgacgatctttgttcaaggttaatcccaattttagcttcaatacttcatcctgtagctctgtggcaatttccagatcctcggcagccttcctcatctcctccagtggggcctggccatggaatcttctttgctcacgcatttggaggacgtgctgttttatcttctcttctaaatttctctcctgcagggcactcatttctttacttgcttgtggcgatttctctttgcttggtttcatttttccaggcggattcagtggtactttcctgttatctatcagatctgtggcagagggaatctttgatgccaccatgctcctccgcggaggcaggagtttgctgagctcttccttcctcttccctcatctctgggctcgctctctccactcctgcagtgccttttctctcgtctctgctgctccatcagagcctgcttctcctgnagctctcggagcgccgcgctcg

SEQ ID NO: 214097 - DNA, 660 bp, Homo Sapiens
ttttttttttttttttttgagaagagcaaactgtttatttacaccttgggtctgtacagtacagctccccgggaggagcctgccaccaacagcctgttccttttggggcagaagcaggttggaggcaaagagctcagaccctggacagcctcagggcctcacccccactgtcccctccctggggcccacagggcaggtcccaccccagcactaaagctaagcctgtttccagacagagcctcctggggcaaaaaagtcaagttgaatcccacagagtcagaggccatctaacaaacccttgggcatgaggccacatgtgtagttcattccacgtaggcctcagaagacccagccaagaaagtgggaggagctggaagggagcccacagctgtgagtccttggcaatgcaccgtccgctccgtgacatcagttggtatttaatggcactctggtctgagcacctcagcagacaaggaagggctgggcaggtgttcacagcaggcaggggcagcagctagcacctcttccttctgcccaagtggggcccgcagctgttctagacaccagatgtggtggcctcaaggcaggcctgtggccgtgcaccaggaaccatggacagggcttcctctgggggcagagacagtgcacggagcggctgcg

SEQ ID NO: 214098 - DNA, 723 bp, Homo Sapiens
  misc_feature (661)..(661): n is a, c, g, or t
ttttttttttttttttatctttatagtaagtttattgtatttttatttcagctcaggggagcaggggtggagagtgggcacaaatgcaaagtaagcaaatggggagccccagcagcaataggggggtcttcctggaagaggcaggctttaaagacaggaggagaaggaaatagggaaaaggagttgggactgagggaagtggtgaggaagggtaggaagagaggggatcctgagagaagtggatcaagaagatttgtaaccctgatttccctgtgtcctgaatggtctggaggagggtaagggagggtgtggggcaggcgcagagcctggcacaatcacctttgaggtcccttagagggttccctctcaggctagctaccccctctcccagcaaagctcgcttccaggaggttctgcacagggtcagtgactggtcactgggcattctctcctgcagtgcctgtgctcccagcttgcgctctgattagaagagccaaaggctttgtcctctggtaacagattctgccaccagcgggggatgaaggagggattttagacagggaggccttcatccctgctcgtaaattctctgagatggacccttcccatgggtgctgtgcttctgtgaacccaaaagtacacattgagtacccaccactanccactggtgagagccgtgtggcatttgtccctgcattcaagaggcagcagtggaacttggga

SEQ ID NO: 214099 - DNA, 774 bp, Homo Sapiens
ttttttttttttttttgtcagtcattcagctttatttcagtgctggtttttggttccctaagagctgcatgagtgctaggcttcaccacgtgactgggggccccttgggaactgggtactatgggcaggatgcccctgaaaagaactgaagacagaggaatcatacttctctttaatacctctggggaaggcccaggctaaggatgagggcagggaccagtcccagtgccccctggggagagaagagggagaagcttgggcacaaactcccagtggccctgcaaggctatcatccctggatcttgctggagtggacagtcttctgggccagggttgttctagcttgtttctcactgtacctaatcagggggcctaactgcattaacaggcagccagaacctacctaccaaaaagcctgtaacctagactgctcctcagattttggccaagagagggccccggcttgggagctgcttggccctgagagtgagcagaggctcagagaatacacagcacaagggttacagtccctggcctcttcccatcgctggagacaatttaagactgaagggaagatgagaggaggggccagccctctaccctggctcatctgcttctggctatgttcctacaagggaagtgataacagcctgaaacccgtggtaccagggcctaccctatgtccacaatccttggtgagcccttctgtccacccatcacccgctcagccagcctgggcagacacagagcagaagcagcctgaagccctgaagc

SEQ ID NO: 214100 - DNA, 808 bp, Homo Sapiens
ttttttttttttttttttaacagtacaaagtttgaaaattttattggaaaataagtacagtctattgatccgtgatgcatgctgtacatgaatttggtgctttaatatacaaaaaatttggcttctgctgcaaaattatataaacaggttaaaaaaaactccttcatcaactagtacaaacataatttatcaaaaatgtcatttaaaaaatggctcaataccttttattgcaaataagaaaggcaagagagggaaaatataaattgtgctaaaccagttttaacaaccggtaattaaatattttgttgcatttgcaaactcttcttcaacacttagggcatctttaaaaaaatgccataaaaaaactgcaagaaaatctaattaatgtggaaggcattaaaagttttttgttttgttttagtggggacaataagtcaaaggaagttcacggggaactaggaatgtgtcttcttcctccagaattcaacccttggaagatggggaataactttgcacttttctgtttggatcttcctccacccacgcttatccattgattcttgtccctccttaaattccagctgccattctacttgtaattcttggtcatcatcacccccactctctggccaattttgtcactaacctaagtttccaaattggcttgctttcttagcactatgcatgctgacacattttctggatgacagactaaaataatctgcaaaattaaatttgtaaaacatctaataagcttttcaagacgtgacatccctgctccatgggcttctggctgtagtctgtgtgt

SEQ ID NO: 214101 - DNA, 796 bp, Homo Sapiens
ttttttttttttttttttaaaatgtactatttttaatgggtgtgcatgtcaggattttctttagaaatacactggtctggtctaatttatttaagcaggagcactttaaagtatcccaccctaccccattccacccccagtggacagaaaggaaattgactgacttgaggggatgcagacatctgggttattccaacagaccagtggttaggaggagggggtgggtagcattatggcctcgggcaggcccccccaccctgagcctctgaaagctgactttatctgtaagagggaggtcaggctcgccttctcaatagcgtgtatttggatgagatgagtttcttctggagtacacttaggcagagcagggctggcttagggctggagcctcagcgtttcacaacttctcaccttctcttccatgtcagtcagaatggcatccagctttgccaccacctgccgtgcattgtccaggctgaagcacattgggggcttaaacttcaggatgttcctcccagggccatcagtgctcagcaaaacgtagttctccttcagccttgataccaagtaggcagcctcttcagttgctggtgtccttgtggcctcatctttgatcagatccacaccaatgaagagcccaacacccctgacatccccgacgatgggatgtttgattttttgctgcccgaggagctgcatcaggaagctgcctacactggtggcatgatcctggagctgctccttctccaagacattcaggacggccagcccacagcgcaggacactgggctgcccc

SEQ ID NO: 214102 - DNA, 802 bp, Homo Sapiens
  misc_feature (673)..(673): n is a, c, g, or t
  misc_feature (770)..(771): n is a, c, g, or t
ttttttttttttttctttgatcaagtttttaataagcttttttcttacatgtacagtcatcttaaaaagacaaatattaactattataagttaaatactatacaatttatgagaaatgtaattttgtgaatttgaaaagtaaaagggaggtaactactaaacggattaaagaagaaaattctactttttaagacattttaaccagacagaaagtgagaaattactaatttaagtaaacactaaaaacttttactgaagctggagaccttatactattttagatcaagccttcatctacacagctttaaataaactttaaaaaatcttttctagtacatataagactgctaaaaagagtgcatgactgggggaaaaaaggcatatgctagaatgtgaactcctgaagaacagaaatacatttcattcatctttatccctggattcctaacacaatgcctggttcaaactaaaatgcttaaacaacgtttgctgctttgaagtgaactggggcaaatacatctttccacctctggtccagttttcactccatattaagcacatctgaagtacctgagctgctcctggctgttggcttttgactttaaattgagtaaggtaagccaatatgcatacattttttacatcagctttctcacatcagcctcagaaccanatcatcactgggctgggaatattctcacgtactccgatacttatttgttggacaacagttaatatcaatgtgcaaaagtaatgcattttcaatgcanngataatatgctcttatgaatatgaatggaat

SEQ ID NO: 214103 - DNA, 799 bp, Homo Sapiens
  misc_feature (765)..(765): n is a, c, g, or t
ttttttttttttttttttaaatgtttacaaaactttatttaacaggtgcaattattatactgcgaaaatgaaaatattgcatactaaacagtacctagggtatgatctcaatgtaaaagagggaaaaatgtcaaactattgatagaggctatctctgaatgaaagtagttaatttttcctgcttccttacattttcagtaatatccaaatgttataatgaattggtcacagtgaaacacagggctgacaacccatccaggagaggcaagggaacaggctcctggggctgccagccagtgagagcagagtctgtcccctcacccccatggccagtgacatgctccaagttaggcctggagccttcccctgcctcttccgacctgcatctcagcagccaccctacccagtgaccaggagtccttaggctacctggatgcaagtcttgcgggggtgacgggccacccccttccttcttctcccatccaatcccactggttcctggatcccaggccctcagctctgccctaaaggaactctgagcaatccatgatgagtgtgtgctacacacatcctttctctcttccaaataagggacttcccctttaaaagtggtccaggacaagcaggggcaagggtgatggcaggcagggtgtgcagccagccgcctggagcccaggaaagctactgaggctgctgtcactggaggaagaaccccaacgtttccagtagtctggaaatagactattggtaagaacgccatttgangactggcgtctcagctctcctagctagctggtca

SEQ ID NO: 214104 - DNA, 772 bp, Homo Sapiens
ttttttttttttttttgtggaaatactttgcagagtttatttggacaggttcaaaaatagtccttcgacaatacaatcagatcgaaccacgacaagtaaaatgcaattatgggttggttacatttttaaaaaatgtaaacaggtttgggaaaactaaaagcaaaactacatcgtcatctcctccattcccaacccctgcatttcttacaagcaggacttcaagacggcatctgcaatcttttgaaatggatgagaggatgacactcactaaaggagacagctcaacagtgtgttctgaggccatttctcagaacaaaggcatacttctgcataaggcaaatgcagcctgataaagcttcccctagtgggtacatggaatgccaaagtcattcacctaaatgagctcaaaatacatattgttctgggccaaattatacagtgtcaagctcagactgtatgtatttatgtatgttggcagagcaggccacttttggggcgccacagctttatcctagcatcctgtgccctgctgggttcccatcgctgtctccccaaacccatgaatttccttggatttggttccagaaaggcagacaagaaacaaagtcagttgcacaagcccacaagggaacagggccccagaggacttgaatttctaatgaaacttaagagtaacacagaatgtgtgcctttgccaacaagccgggactttctgaaggttgatctgagatgggggcagggagtggggacaagatcaagtgtgctttgggcc

SEQ ID NO: 214105 - DNA, 753 bp, Homo Sapiens
ttttttttttttttttttcaatccaaatggttatttattctaaaactggaagctactttgcctacattttcgccagaatggtgtaatgagaacaggggaggaaaaagttacagatgtaaacaatgacacagttacattttttttttaaatggtaaaacccctttttactggccacttccaagaatgctttacaggttgtgcaaaaacatttacaggctccatgtggtgtttttctcacaagctttcctgtctacaactacaacagacgtctgataaaacactaaacaagtcttctaaggaaaacaaggctagggattcctctggttaccataatccacattttcccccttaacatagtttttcataataaaaagacagaaacaaaacccggacatctactgttgttgcaaatgatctcttggactaaaccaacaaggatgtggcagtttcactttccacccacctagaaaaacagttttgtaaaaaagattactttctagtgtcaaatatcaacagcgagtacctcccctaacccctgctggaaaaaaactcaacttgatttagtttagtccccttgcccctaagggccctagcatccccatccatgtcacagactacaagaaagatgctatttgcaggactaaacatctgaaaaggggtggcagccactgcctcaggaaattcaattttctattataacataatcttgccctaagggaattctttgggctcagtttttactccttgcttgac

SEQ ID NO: 214106 - DNA, 717 bp, Homo Sapiens
  misc_feature (639)..(639): n is a, c, g, or t
  misc_feature (654)..(654): n is a, c, g, or t
ttttttttttttttttttagggagtcttcatctttattttcacgggttaaagaaaacaaaattgtatcatttttatatgcctatttggaaaagcaatactttatcaacaagattagtagattttatgacagaaattacttatcatcatcaagtacacgttttagttattcagataaagaaagcaacattcagtttcatgttcacatgtttcaataagtacaactttgtttatacaaccttgggaaagacagagtaggagtcgcattgctgtgtattccagctagcacaacaggcctgagtagttctagatgccacttaaaaatcactcaatttgccaagtaacccacaactaaatccaggaaaagtagaaaagctatgtgggccatggacagggacactgtgtacaattacccagtttgtgcattttaagtgggttcccagcacaggggtaggcaaagatatgtcctactgtggttccagcccagtaaaaaacagcatctttgcatagttaattggtccaggtaggatgtctttttctcacttacacaaaggcatcatggttagcaaaaagactggtgctaaaagaagagactttctccaagaagagacccataatacattatctcacattcacagaanaagaagacccagcanagttttcatgttcttactgggcagaatatcagtgttatgaaaagtatactggttgtcaatttt

SEQ ID NO: 214107 - DNA, 700 bp, Homo Sapiens
  misc_feature (672)..(672): n is a, c, g, or t
ttttttttttttttttttgagccttctagaaatttttatttgaaaaaatcagtagatgtaacaataaccacagttaaatgaaagttaatcaaatcagttctattgaccaccaagtatctaggagcccattctcacctcaatggggggagggagagttatctaattgctattaatagtaatggaactaaaatatatctacatattatccagtgatttttttggtcttattatgtatttcctgaaataattaacttccatataagttgttttagctaaataataaagcactttaattgagcgcaacaatcagattctggtcaaccactgaacatggagaacttctgcagattttctggactgtaatgaacaaggaatattcaaaatcataataataatgggtaaactttgcctgaagcgtggacagccttcctcaaagaagtcttgggaaattctgttatgtcagaatacacatatcagacggaggaacttccagagatgttcatttagttatcataccccatggcctcctcttctcttagaaagggagggcagcggtaggtcaccacaaatccctccctcctcctgttttaataagggtgattcatttatatgggaaaatgcaacaaagatttttactgaggaacactgcctacaagatggaatgtttttctntttacacagagtattaaaaattcactcc

SEQ ID NO: 214108 - DNA, 790 bp, Homo Sapiens
  misc_feature (752)..(752): n is a, c, g, or t
  misc_feature (778)..(778): n is a, c, g, or t
ttttttttttttttttttcaaagtacatattttatttatatagattagtgcaagctgaacaagaatatggtttgtaatccaatttatacagcatcacgtagtggctgactgtcctgaccatgggtggaagcagggatgactggccttggtaaaggaaatgacacacattcccccaatttggaagcaatcttaattagccagggagtgatttttttccttcagcaatgtagtccccaaagtacagacagcttctctcttccttataggccgagtcgtaggagtagcaagcttctaaattttggctgtgcctctgagcttttggcctaagtcccaccagccccgaagtttccatgacaacaaaacaaggatcaacgtgcctctgacactcccttcagccccaaattgttctcttactcccattttcttcctacctcccaagtatcactgggatacaagcagaacagggctggggtgctgaactcacccttggggaggactcattatagcatccctgctttttctccattatcgtccaactgcctaggcccaatttaataacatgctgcttgtctccctggaaccgcctgcccactctatacatggttagcacttccctccctcctttggtcaatgtgcagcttccaggcacgtgaggtttaacacacacccgccaccccattagcctgtcttcagcttgtggtgaccacgtcaccagcccccaggtgagagacgaactcttagggcccttctcnacattctccttcctttctgggagtcnctgattgatccc

SEQ ID NO: 214109 - DNA, 860 bp, Homo Sapiens
tttttttttttttttcttggttgcagctgttttatttccagcatgttcccaacctggtgaccctccacagtccagcagtagagagatgggtaaggggttagatcggcccacacctccacctgtccctaaggttacctcagttgctgaaagctaaaaccttgcgcgcaagggcgaccttccccaggagggaggagagacgctggaagagcagccaagcctccaagccagggccggccgggatcagcagaggtgcaaagtcccactcagacggacccagcccttcccctcccaacactcatcccttccctgctgggggccggggctggggctgggctcagtggcccaggaggcgcagcatctcctgaggatccaccagcttctccctgggcttccccgtgccctggccccgggccacctcctcggcatccagcttctcccagtctgagaaagagactggccggacccctcggctgctgagcagggcctggatggctgcgtagccaggcctggggccagaggggagcaacccagccttcaggtcctgcagcagcatctggccggtgaggaagctgtcagtcatggttgtggctatgacacctgtaggtcctctcttcacccagccgctgcagtagaggcctggcacatccataacccggccctccacattggggatgaccccaagcttggagtcaaagggcacgcttgggtcgacagggcggctcttatacccaatgctgctgagcacagcccacaagggaggtcttccatgtctcccgtgggcactgcacgggtgggctcatcgacaccctccagtctagtgactgctaggcggacacctgctgcccgccgcccatctggtg

SEQ ID NO: 214110 - DNA, 795 bp, Homo Sapiens
  misc_feature (702)..(702): n is a, c, g, or t
ttttttttttttttttttaaagatcagaaatctttatttgacaaaggtatacatggtgaaaatgggcagtcatcttaccatgcaatccaaatctaccaataccaagaaatgcttattgttaagaaaaaaaatcattagtgagcatggccaaccaatttttagagagaggaataaaagaataagattagtttcaaaaggaagaacttcactgtaaatatctgtgtttataaattatcttagaatacacaaaaccaaggcagaggctgtgtaacaggcaactgagccaagcacacataaaagagggatgaggaacagaaaagtgtaggaaatcctgcagcgatgcagaaatagatatttttaaaattatcataatcaatgaccgtattttcatcaaagaaagaataagcattccaaagcagcacaggctatttcatcaatttaaaaaactagcaagagaaagtatttttaaagtgcacttttcctgaaaaattcatttttatatgtaatacacagtcacatacagagataattatttctaaaattctgtaacagtttatctgaccttgtaacaagttccagataccattcctaatagtttgtgtggatattaaatcattgatactgaaaatatttcagtgtaatctatgctacatttttacttgaatgtttttcagcctaagaactgggaacttttgagtaaanactgaacaccggaggtatgacggcataacaggaaatgttgggattttccaacatgttctattttaattatacttctgattacttgatatctca

SEQ ID NO: 214111 - DNA, 581 bp, Homo Sapiens; identical to SEQ ID NO: 40998

SEQ ID NO: 214112 - DNA, 781 bp, Homo Sapiens
  misc_feature (702)..(702): n is a, c, g, or t
  misc_feature (728)..(728): n is a, c, g, or t
  misc_feature (747)..(747): n is a, c, g, or t
gcggccgcccaacatcagaatggtaacattttttttttttttttttcttcttttaagttttttatttctaaatctttgcttgctgttagtggaccatcaacagttgaatactgcagagcttggacagtctgtgttgactcttgaagttttctactgagttcaagtttttcttgctcaaggcgcttaattcttctttcataagcttcagttgctaagttgttgtctagagtcctctgaacattaacatcaagatccagtgaggtgggaccagccgtaactcttaaacagctccgatcagaaagtacacagctactagtatatgtaaaaccaacaaatggcagatggtggccagaaaatgcagtatgtgttggtgggggcatcgtttcagaattttttaaacaatcatcatctacatcaaaattcgatgtatctgttgggctactaacttctggaatataaggtgcttcacagttccgaatattatcccaatcaattccactgaaaaatgggtgtttcttaaagtcttctattccattttgaccaagtcgatgttctctgctacaaatgagccttcgaataagatccttagcattttcagacacatcagtcacttgggctggaaactgaaacctctctttgtggttcatgatttttccgtatgtctccaccagcgattctgcataaaatggtgtttctccgtanagcatttcatacatacagacccccanagacaccagtcacattcanggtcatatctcccttttccatcttccatggcttg

SEQ ID NO: 214113 - DNA, 745 bp, Homo Sapiens
  misc_feature (623)..(623): n is a, c, g, or t
  misc_feature (703)..(703): n is a, c, g, or t
ttttttttttttttttctaatgtaaacactgatttatttaaaaaatactacagaggacagatttggattcaaaaaaaaccacagagaatcatatacagaaacaaaatgcactggaccccgagaagcagagggggagccaccacaggcccccgagggggcagggcaggacgctatgcacacgccacttagaaaagagcgtctataaaagatgcataccaagagatacgtgtaaaatatagtggcacatcacgttaacaaaaggaagggaccagtacctcatggagacaggcagtcgggggacctgggtgggcgctttgctctgtcttcaaggccgctgtcggtgactagtgcctccctccggctgcgtcacagccgtcgggggcaaagaggtgatgtgctgtaagaaccgcataaaacgatccagaggaaaccatttctatcagaaaaataaagtacaagtttaggtgatgagcgtaaagctagggcctgtgcgaggctgctggcacgaggcggtatgaaggggtgggaaggtggcttctcccggcgtgaagcctcaggggcggccacctgcccactgctctcggagttagctgctctgtcaaggtccaggagaccccgggtcnctgcccagagtcacagcccccgtatctgggctccggcctggggcagcctcggggagaagatggcaggcgtgctctgtganatacgtgaggctttcaggggctccgtttgtggttttcctaac

SEQ ID NO: 214114 - DNA, 656 bp, Homo Sapiens
ttttttttttttttttttagggggttaaatgtttattaaatcaagcttttaaattatatatccacctacagtctataaacaaatatagtacacatgtatgtaaaaggctagcagataagaaccagtggaaaaactaaagttccctttgcacaccggcacctcatcacaacaccctcttggtgtggatgccatggggccatgctgtagtcaaaagttaaatgaaaaaccacaagtttagtttgactccgtctcctagggtggatttcattcagatatttgttccatattataggagggtggatcctagcaaggcaacagtgtagtttttacattcacagattggctgaagtagtacaaattgagctgctaatctaggtgtctccctccctgttaccatacttcataagaaatgtgaattaaaatgaacaatggaccacaggtggttataaaaatagataactcgcagagtcataaatatctacagttagtagagcagaaacttctaaaatttacctttttccataatgtgcagaatatcctaagtatgttcaagagacacagtcagcagacttcagagtggtaattacaagggcatttgtaaagaaatacactcgagtacaacccagagtaagaagctgaatgcagatgaaaatacg

SEQ ID NO: 214115 - DNA, 726 bp, Homo Sapiens
  misc_feature (670)..(670): n is a, c, g, or t
  misc_feature (683)..(683): n is a, c, g, or t
ttttttttttttttttttgaggcactttctgttttattcttaaccttcatgtaaatgacatacctcaccctctagacacctggaacatcattttgaagagaaggaataacactgaagtccacacgtttataatatgcctcctctctttctctgtaacagtgtatgatctcaaaacaggtttgatacaaagaaaaacaaaaagctgagacaaaatctacaacaatcacttgcgactactctcttctcccctcccattgaataatctgaaccaagagcaagagtcctgtagcagtgtctgatttcttctcttctatgaccttgaactccatcaggggttcccaagaaagtgaaaatgcggttaagcaaatctaaacagaaatagtccttcttcgccttctcttctggagccggtttacttgctccacctttacacttcccactgagcctctccctgggatggctcctgatgacagtgactcttccataaacgagggcagttctccagaaaccaaggcgtcggtcagaccgtgaatcaagagttagatgcacacagcgatgtagcttcaatccaagatgggagactgtggtcacacagcaggccccagcccaaacctgccccctggaacccaaagcagctctgcctccatgcctgccttggggagctacctgngcagacagctggnaaaagcaagaggagacccaggctctagttccaggccagcatgc

SEQ ID NO: 214116 - DNA, 709 bp, Homo Sapiens
ttttttttttttttttttcacacagtctgggggcccccgaagccccctcatctttattccagttcctcagatgtggcagttcccccagcttccctggaaacaagtatcagacaaaggtggtggcagacacaggacagggccctgggtggggcttgctggcgctaaaaggatttctcagcaggctcagggtctcccgccccgaatgacccttctggccacttcaagctactcctctgctgcccggcttccctctgcctctggttcccctggctgagcagggccttcctgggcttgaccctggcccccttcagcagttgtctcagactgttcccgaatgtccctggggctggctttgaccccagcatccccatctccctggcacccttgctcctcccctctgcttcttgcctctgactgcccactgccctcctcctctgtcacagccccctgggtctcaggccactctgcccggcggtagacgaggtagccagtggtgggcagcctgtgggccagggccccagggggcaggcggtggtagccctgctccttgtacaggaagaggccaaaagtgttgggctgggtcactcggaacttggtggcacagagctggttcagggtggcaatcgaggcctctgggggcacggccagggtcttggaggtgcagccactgctgggatcctgataggctactcggaggaggtgctggaag

SEQ ID NO: 214117 - DNA, 626 bp, Homo Sapiens; identical to SEQ ID NO: 41040

SEQ ID NO: 214118 - DNA, 761 bp, Homo Sapiens
  misc_feature (637)..(637): n is a, c, g, or t
  misc_feature (667)..(667): n is a, c, g, or t
ttttttttttttttttttaaagtgcacggctgataggcttttattacagactgggggcggtaacggctggacagagaacggaaaaggaacatctgagaccaggctcaaagctagggggttacacaacctccaataacacaaggtgagtgcagcacttctagacacacacacagacacacatcacttactcataaacggcacagcctacggtacaagaaaaagggcaaggtaggtaagggcacccaacaccctcctgcctgcagggggccacagggttaatgtgccttcctgcacgcaggcttaagagggataaacaaggagagggctgcccttggagaaggcctgcggataatagtgactgaggcacaggtccatgcaggggaaggaagcacagttcacagagtggcaagctcagtgccagccagtgcaagcaacaggcagttctttgatcctggcttagtcacagcaaacatttacccagcctggctcttctccatagccagcaggttgcttgctcatccagtctgtccctggtcagcgggcatgtgctcaaggagaacaaacacagttcagcacaggactcagctgagggtcactaaaggatcatagactgtgagggtgggaggtcttggtttanaggttgagtctagtgcagctgatcacctgnggtctagtgaaaatgcagggtcagattcagtgggtctggggtctgaatctctaaggcgctgccaagtgatgctgatgctcctggcttgtggaca

SEQ ID NO: 214119 - DNA, 695 bp, Homo Sapiens
  misc_feature (603)..(603): n is a, c, g, or t
ttttttttttttttttttaatattaaaaatactgatttttaatattgaaaataaaagcatttaatatctcttaaagggcatccacatctgctttatccctagcggaagagtgagggggcttcacacgtgcactcacactgtggagagagttggatttcccagacccctgagggcacctgtcagggtcatccccattggtgctgcttgaggctactggggactgtggcactggacgtggctggagcaggtggtgtcacctgagtacattctttgctagcagacagtggatgaggccccttcctcttcctcaccaagcctggggctgtgccagcctgtcttaggccagggccttgcagaaggcgctccaggcgtggaagcagcgggtaaaggcgtgctgctcattgcccttgcggaccaggcgcagccggcgcggccgctcatgttccttggaccgcatgtgctggatatatacctggcaaggggacagcgagccttgggtgatgaccctgccctgcccacaggcccacctcggccctccctccacccagattacctggcaggccttcaggctcagcttgatctccacctggctagtctgggtcnccacccacatgtagacctgtgggggcagcaggggagatacggttgcatgggtgcctgggaacaccccttgctcctggcccgagaatcccatt

SEQ ID NO: 214120 - DNA, 656 bp, Homo Sapiens
ttttttttttttttttttaactacaaaaataagcactttactaacaacaggattctcagggaatgggggctttcagaggtgtcactgggctgcactgttgaggctgtgtgcatcagtggagatgtgagaccgaaagaaattatccaggacttgctggcccatgcggggctttttccgactgcacggagaggacacctgggaccttttggaacccatacaggtccctggctgttggccctgatacacacggaaaacctttttcatggcggtggaaacagctgcggtgtgaaattcctcctgcgtcagccagcgagcacctggtggtacggtggtcactggggtctgcccttccaaggccagcccatatacttgatatgtcagcttgatgtgagagaaggtgtggacaacctccccaaggtgccggaggtgcgtggctgggaggggcccagcccaacgctgtagttcctgcagcagggccttgcgctgaagctgctctgagggctcccaggtcacggacgggaactcccacagtcctgccagcagacctgagttgggcctctgcaccagcagaatttgggccccaagggccccaggctgttccagaacacaggtggcagagctctcctccctggggggcttgcggctggcctttctgg

SEQ ID NO: 214121 - DNA, 777 bp, Homo Sapiens
  misc_feature (715)..(715): n is a, c, g, or t
  misc_feature (725)..(725): n is a, c, g, or t
  misc_feature (769)..(769): n is a, c, g, or t
ttttttttttttttttttccctcaaaccaaaaacaatctttattttcacatagttgaattaagtatttctggggccagtgtgggggaaagatggtatggaatgggagaatccatccttcctgcaagaggagaaagccagggactactctgtctatatttttacaaggaaattcttcctttgtttctagtaaacaaactcagaggcactgatgttgggctggaacaaggactttctggtggggagggcagctggactgcatagacttgaggttccatttttgaggttcaccttgccttggggtctgtccttggttaccaccactgatgtctaccatgctggactttggagaactttgcttccacttcagcacaccttggtaccttcagtcaagcttttattaaagacttaaggtagagccaggctgtggtgagattaggaaatcttcccggtcatgttgttcatcttttcacctactctccccctagctacaatcttcttttctttctttctttccttctttccttctttctttctttctttctttctttctttttttctttccttctttctttctctttttttttagagagatgggggtctcaatatgttgtccaggctggactcaaactcctgggctcaaggaatctgaatagttaggactacaggtgctgggctctggattcttgatactgtcttctactctttacctcctcncaaccattcncattgtatactgagaaaccagttcccttagatcttcagttgcanggaatgga

SEQ ID NO: 214122 - DNA, 728 bp, Homo Sapiens
  misc_feature (691)..(691): n is a, c, g, or t
  misc_feature (696)..(696): n is a, c, g, or t
ttttttttttttttttttcagggagtcaaagcttttattacctgatagtccctagtgtggtgccagagataccgctctggtcctattactccccatgatatcagtggtggggatgggggaggggaccagggagagaggggagggatatttacagtgcatggtggtacggggacaaccactttcctcgagagctctgagaactttgtgctttttttcttagttggtgccgagctacctggaatggattttgtgtttatcttctttagggaaagatgtattaaccaaagcacaatccagcccaatttctcggctgaggatttcacgatatcaatccaaacatcacactatttaattccccaataaaacattggaaaaaggactatcagtgctaacacatttacatataaaatttccacctaataggtaatagaagcctatgtaccaatttctaaaacagttataagatatatacacaatttggggtatattaacaaaacagaatattacaaaatattaaaggcaatcctcctggtccacggacccttgttgccgcttacttgaagttggcataatctgagaatgcatcaatatactcctgcaccaccttgtagcagaactcatactgttccagtgtctggaccatgtgtggcctctgtagccgcaggctcttgacagtctggaagacatccanaatcncctctgctttcacacgctccaggacggtgctc

SEQ ID NO: 214123 - DNA, 661 bp, Homo Sapiens
ttttttttttttttttttccagaagagaaatttaatctaatttacatacttctaggtacatcgataaccaaaatgtggccactgaaaaaagttaaaaggtcaatcagctcctggcttctagctggcccaggattgcaaaataaaaagatccacgttccttattctctacacaaaacgcgtttttaaaaaagtgaaaggtctagggagctatacatagaaagcaacagtgaaaagggagagggagcaggagtgggggaggagagtcccaccccccaaccccaccctccagggccccagagcccctgaggctctttggggggccttgacatggcaggaggcagctgtcagctctgagctcttcccagctgggaaggcccctctcgggggcagccaacaaggatttccgtggcattgtgggctcagtggggggctcccaggccccagcaggccccacagagggagcgtggcttcccctgagcaagcaccgtggcatgatgtggtcgttcaacccaggaactgggggtccggggcaggtcccgggtctcacgaggtgcgtgttgtgtgtgttcgcatgtacatgtgtgtgagaggatttcatgggggagagagggaaccagaacaggggtctttggggtctttgcaaatggccacggatggcaga

SEQ ID NO: 214124 - DNA, 728 bp, Homo Sapiens
  misc_feature (710)..(710): n is a, c, g, or t
ttttttttttttttttttagatttttaaaaattttatttttaaaaacttttcattgtaaataactttcatgaaaaaggttaaattgccccacggggcaggagggtggatgtgggacgcagcccagggagtccgggtggagcaaggcacgccccacgcccccgaggagtgcaggcaggggcgtggggtaccccgcttcttggtcccagtagttccagcaagctcggcatccctcccagttaagcctcagctacagctacactcactacattagtctgtctgtcctgccccatacagcttggctgccccggcccccaaaccaccaaacccaaacttccagctgctctcagcctcaagtcgggcttaaagattagggatttacgtcccctccccgccccctagggatggggccaggcaaagaccccagaggccttagagaggatctccttgccccaccctgtgccaccacctcattttggtctcctctctctgccccctcccccagtccatcttctgccctgctccgccccatccacagcctgccccggccccagggaggctctgccaggagaagcctccagggggttaatttgctgtcatctaattagcatttgttgtacctggggactctctctggatagagacctggggaagcaggggggaagcggaggtgctctgggagggcccagttctgttcctccccagcctgacncgggctcctccaggcccc

SEQ ID NO: 214125 - DNA, 599 bp, Homo Sapiens; identical to SEQ ID NO: 50070

SEQ ID NO: 214126 - DNA, 804 bp, Homo Sapiens
ttttttttttttttttgtcgttatgctgcatttattatgagaatcaacagtcaacagttaatgattgactaactcttgttgttcactctggacattaacgaaaaagactggaatagggctacagcgctgcttttatgctacacgggttatgcttggactctgactcccagcagcaggtagattcaggaattcatggcagtgacattcaccatcatgggaaacaccttcccttttcttcaggattctctgtagtggaagagagcacccagtgttgggctgaaaacatctgaaagtagggagaagaacctaaaataatcagtatctcagagggctctaaggtgccaagaagtctcactggacatttaagtgccaacaaaggcatactttcggaatcgccaagtcaaaactttctaacttctgtctctctcagagacaagtgagactcaagagtctactgctttagtggcaactacagaaaactggtgttacccagaaaaacaggagcaattagaaatggttccaatatttcaaagctccgcaaacaggatgtgctttcctttgcccatttagggtttcttctctttcctttctctttgtttagtcttcgttctctttttcagtttccatcagatcttgcccccacacaccactggaatctcagaggttgcttctttctcctttccatctttactcctactttctggagtagccaatacagcatgtcacaatacggcactgttcaaaatgctcctctatcacaattctgagtctggtactggtggtctgctgaactgagtcagttcg

SEQ ID NO: 214127 - DNA, 630 bp, Homo Sapiens
gtggtaacaacgcagagtactttttttttttttttgagcaaataatgtttatttttatattgatgatacacttaatatatatgtggattcaaggtacaaaattcatgtacaagagttcacacctgatgaatgtagacacattcctagagaacatttatcaatgtgaaaatttctttaatacactgacaacaaaaatcaaatattctctaatctcgttattcaataaacatcaaaacaacgtttcagttttcatcctctagtactgaagtgccctcaaggtggtaggcactgtatagcaggagaaaacattggaaagcctactgaatccgctctgcagaatcacagtgtttactctgaaattcatttagtgaagtagtggaaggctatcttttatgacaaatcacatctcatacaagagtcaaaagtgatgaactcaagaaaataaaatgtttcaagaacttctcaatttctaaaatctatggagtattaaccataacagacaaagaagaaaaaggctgctggaaaggaagaaaaaaacatcctgtttaagagaacgtatggcttaagcaatttagaacacaactgacaagacttttacaataccacaaatgttcaagtcaaatgatagtg

SEQ ID NO: 214128 - DNA, 579 bp, Homo Sapiens; identical to SEQ ID NO: 44265

SEQ ID NO: 214129 - DNA, 467 bp, Homo Sapiens; identical to SEQ ID NO: 59505

SEQ ID NO: 214130 - DNA, 485 bp, Homo Sapiens
ttttttgtattttatctggcctgacttgttcctccttcagctaatcttgagatactgaggtgatggatccaagaagttctatagacttaacacttcaattctggtagcctgtgtttcagggcctgttagcaattttgtatttccttgacacaccttgtaagtcaattagaactttgaagtattactaataaaactgttcaaaatctatagagtgatgtgtagcagattcaagtctcacagtcaaccaaatgagacagcatctaccagcatctggcaaattgattagctggatataaaaattgaatcaactatctgcaaattccctgcagtacatgctattctgctcttgttggttcctattccattatcaatcatcacacagaatgttatccaactgaaaatgtgtcatacataccctgctacagagaatagctacaatttcccgactgcagcctagttcatgaactctacctcgtgccgaattc

SEQ ID NO: 214131 - DNA, 505 bp, Homo Sapiens
ttttttaagagatacaataacaaatacatacggcccaaaccaggccagaacaaagaaaaaggaagttatattttaggtggtggactctcatgtgactttctttacttctgttataactgtcatgctattttccattcagtatgtgaagcaattagaaaatataaaatcttggccaggtatagtggctcgtgcctgtaatcccagcgctttaggaggccgagatgggtgagcccaggagtttgacagcagcctggggaacacagcaaaaccctgtctccaccaaaaaaacaagacaaaacaaaaaacaaaaaacaaggtgggaggatcacttgaacccagaagttggaggccgcagtgagctataattgcaccattgcattctacaagaccctaccctaaaaacaaacaaacaaacaaaaaaaaaaaaccaagaaaacataaaatctctcttggaaagcaggtaaggttaaaggataacaacaaaatgaaaccaaagcccaggttg

SEQ ID NO: 214132 - DNA, 566 bp, Homo Sapiens
  misc_feature (566)..(566): n is a, c, g, or t
ggaagagagcagaggatctgtgtcgtctgatgaaggagaaacttgaagaggaagaaaacctcacccgggagctgaaatctgagattgagcggcttcagaaacgaatggctgaattagagaagctagaagaggccttcagcaggagtaagaatgactgtacccagctgtgtctgagcctgaatgaggagagaaatctgaccaagaaaatctcctctgagctggaaatgctcagagtcaaagtgaaagaactagaatcttctgaggaccgcctggataaaactgagcagagtttagcgtcagagttagaaaagctgaaatcattaactctgagctttgtaagtgagagaaaatacttgaatgaaaaggagaaagaaaatgagaaattgataaaagaactcactcaaaaactagagcagaacaaaaaaatgaaccgagattatacaaggaatgcttctaatctggaaagaaatgacctacggattgaggatggcatctcttccacactgccgtccaaagaatcaagaaggaagggtggtctggactacctaaagcaggtagagaataan

SEQ ID NO: 214133 - DNA, 558 bp, Homo Sapiens; identical to SEQ ID NO: 53306
  misc_feature (512)..(512): n is a, c, g, or t
  misc_feature (544)..(544): n is a, c, g, or t
  misc_feature (558)..(558): n is a, c, g, or t

SEQ ID NO: 214134 - DNA, 787 bp, Homo Sapiens; identical to SEQ ID NO: 45658

SEQ ID NO: 214135 - DNA, 859 bp, Homo Sapiens; identical to SEQ ID NO: 46925
  misc_feature (634)..(634): n is a, c, g, or t
  misc_feature (691)..(691): n is a, c, g, or t
  misc_feature (712)..(712): n is a, c, g, or t
  misc_feature (796)..(796): n is a, c, g, or t
  misc_feature (827)..(827): n is a, c, g, or t
  misc_feature (832)..(832): n is a, c, g, or t
  misc_feature (838)..(838): n is a, c, g, or t

SEQ ID NO: 214136 - DNA, 693 bp, Homo Sapiens
  misc_feature (647)..(647): n is a, c, g, or t
  misc_feature (690)..(690): n is a, c, g, or t
  misc_feature (693)..(693): n is a, c, g, or t
ggcagaccccagaaaaggtgttggttgatatagacagctggttgaagaatgggcaaactctgtgaagaagcaaaaagtagaagtatacctgcccaggttcacagtggaacaggaaattgatttaaaagatgttttgaaggctcttggaataactgaaattttcatcaaagatgcaaatttgacaggcctctctgataataaggagatttttctttccaaagcaattcacaagtccttcctagaggttaatgaagaaggctcagaagctgctgctgtctcaggaatgattgcaattagtaggatggctgtgctgtatcctcaagttattgtcgaccatccatttttctttcttatcagaaacaggagaactggtacaattctattcatgggacgagtcatgcatcctgaaacaatgaacacaagtggacatgatttcgaagaactttaagttactttatttgaataacaaggaaaacagtaactaagcacattatgtttgcaactggtatatatttaggatttgtgttttacagtatatcttaagataatatttaaaatagttccagataaaaacaatatatgtaaattataagtaacttgtcaaggaatgttatcagtattaagctaatggtcctgttatgtcattngtgtttgtgtgctgttgttttaaataaaagtacctattgaacntgn

SEQ ID NO: 214137 - DNA, 822 bp, Homo Sapiens; identical to SEQ ID NO: 40049
  misc_feature (806)..(806): n is a, c, g, or t

SEQ ID NO: 214138 - DNA, 673 bp, Homo Sapiens; identical to SEQ ID NO: 42654
  misc_feature (673)..(673): n is a, c, g, or t

SEQ ID NO: 214139 - DNA, 640 bp, Homo Sapiens; identical to SEQ ID NO: 40898
  misc_feature (637)..(637): n is a, c, g, or t
  misc_feature (640)..(640): n is a, c, g, or t

SEQ ID NO: 214140 - DNA, 560 bp, Homo Sapiens
  misc_feature (546)..(547): n is a, c, g, or t
  misc_feature (553)..(553): n is a, c, g, or t
  misc_feature (557)..(557): n is a, c, g, or t
  misc_feature (560)..(560): n is a, c, g, or t
gggatctcttgagacttcacttcagcttcactgacttcttgactctcctcttgagtaaaaggactcagccaactatgaagttttttgtctttgctttagtcttggctctcatgatttccatgattagcgctgattcacatgaaaagagacatcatgggtatagaagaaaattccatgaaaagcatcattcacatcgagaatttccattttatggggactatggatcaaattatctatatgacaattgatatccttagtaatcatggggcatgattatagaggtttgactggcaaattcactttttactcatttattctcattcatcataccgcatcacactaccactgctttttgaagaattatcataaggcaatggagaataaaagaaagaccatgatttagtgaattctgtgtttcatgatacttcccttcctaattatcatttgattagatacttgcaatttaaatgttaagctgttttcactgctgtttctgagtaatagaaattcattcctctccaaaagcaataaaattcaagcacaaannaaaaanaaanaan

SEQ ID NO: 214141 - DNA, 772 bp, Homo Sapiens
tctagcgaggtgacagcgtagaaccagagagccaccgggctggggaccggggagcggaggctgaaatccccagacgccggttttctgggctgggctttctgccttactcactccttctccctctttctggattttaccgaccgttcgcgaaacagctttccacacaatggagcttcatgtcctcgtgcaggaagtactcatcgactgatgtggcagactttgctccctggcaaaactaaagaactctcctattcatggaggcgaacactgaggatgctttccacatgaaccctgaagtgaacttctgatacatttcctgcagcaagagaaggcagccaacatgaaggaaaatgtggcatctgcaaccgttttcactctgctactttttctcaacacctgccttctgaatggacagttacctcctggaaaacctgagatctttaaatgtcgttctcccaataaggaaacattcacctgctggtggaggcctgggacagatggaggacttcctaccaattattcactgacttaccacagggaaggagagacactcatgcatgaatgtccagactacataaccggtggccccaactcctgccactttggcaagcagtacacctccatgtggaggacatacatcatgatggtcaatgccactaaccagatgggaagcagtttctcggatgaactttatgtggacgtgacttacatagttcagccagaccctcctttggagcaggctggtggaagtaaaaaaaccagcacgacagat

SEQ ID NO: 214142 - DNA, 748 bp, Homo Sapiens
  misc_feature (584)..(584): n is a, c, g, or t
  misc_feature (601)..(601): n is a, c, g, or t
  misc_feature (685)..(685): n is a, c, g, or t
ggtattttttctttctttcatagctgtgtctcagaaaggacccatttgtggctctttttcacctcaaaataagatcgatggtatcttgtaaaatgagggtagtgccacttcttagtatttttgaaagctgttttagattttttttttttttccttttctagccatctaaattgactcttccaatataggtctcagaaatccaatatttggagtacaatttcttttaatccagattacacctgccttacaaagcaccccctccttgttcccctctgtttcctctactcagttgggggagaaactcacagctcctccgggatacatatgtgccctcagcagcagctcccaggtgaagttaccagacccctgggcttctccccagctttttctgagttgagtcagacatgtagagtttgggtcacacaggcaagaggaattttccctcggccttactgacaaggacaccaacctagggtgcaaacagatggactatggttcaaggacactggaattgaggagctgatcaaggctctcttcagccttgctctgtccctgcctcttatcagagcacaggtagacacacngggcatagccagcccanctcctactgtcacaggcgccccaccattcaacccttccggggaggtcaggggaccttctatatgaaggcgagtggggtcctcangtctgccttgaaatgggtgatgaagaattctggctgggaatcctcagccacggcctggcaggg

SEQ ID NO: 214143 - DNA, 595 bp, Homo Sapiens
ggactatacagaagactccttgaggttcataacatctgtgccagggactacggtgtattaacttgtgagagctcaatcaagagtcactgaatgaatgaatgtctttggctgcccccacgccatgacttgtgattctcttggctgtctactgaactcatctgtgcttcgtggctaacagctgagggtctcccattcatgcattgcacagtgtggtcccaggattttaaaggtgatggcttaacccagctctcaggaccacggtggctgctgggaagagatgggctggtcagggaggtcctggctacactgtaggttatggtatccaaactgtagtacctgatagtactggccagggatggcgctgtgtcctattcattctcctagggctgtttcagtaccgagaaactcagcatttagttggaggtctgcgtagccccttgaggtggagaaaaggactccaggctaggaagcccaattcctgcctctacttcaccttatgactttgggcaaataacctgttatcttaatatgttaactctaagatattaaatatttgattaagtttgtacaaaaaaaaaaaaaaaaaaaacatgtc

SEQ ID NO: 214144 - DNA, 792 bp, Homo Sapiens; identical to SEQ ID NO: 49625

SEQ ID NO: 214145 - DNA, 728 bp, Homo Sapiens
ggcatctattctgtaagtttcagttgtgatatttcttaaagattcaaagatggatcctgggaatttgatttagcctccatttcatctgggagttaatcctcacagcaaccctgtgagataggttaataattaaaccctcctattcacacatatttcattaatccttacagcaacctgagagatagtttaataattaaacctactccacagatgaggaaactgaggcccaagaggttcagtgattcgcccaaggttataacagcaagaattggtggcgaaacaagaattcaaatccagattggtcttaatagtgagctctcatgtgtgatagaaattagataccactttgaggactttgggagccagtggtgaatgtacttactttaggctctaaatactctgtgtaatttcttggtcattttgttcttagagaggtggtgatcttaataaagttttgactttattaagtaattaaaagtttttacttatgttacaactaaaacaattctttaaaactttcataacttgaagttttaaatcctaaaattagttgaaaaagatgtaattgccagtgtatcataaatactggtattttaaaaataaagctgctttatcactttttaggaaagcccttgtaatttaatgcattgtaataagtgtattggagctgattgtccaccatgattccatgtaaacctaggtggaactatgcaaattacaagtttttc

SEQ ID NO: 214146 - DNA, 569 bp, Homo Sapiens
  misc_feature (569)..(569): n is a, c, g, or t
ggtatagtagtcctgtcacttttggccaggggaccaaactggagatcaaacgaactgtggctgcaccatctgtcttcatcttcccgccatctgatgagcagttgaaatctggaactgcctctgttgtgtgcctgctgaataacttctatcccagagaggccaaagtacagtggaaggtggataacgccctccaatcgggtaactcccaggagagtgtcacagagcaggacagcaaggacagcacctacagcctcagcagcaccctgacgctgagcaaagcagactacgagaaacacaaagtctacgcctgcgaagtcacccatcagggcctgagctcgcccgtcacaaagagcttcaacaggggagagtgttagagggagaagtgcccccacctgctcctcagttccagcctgaccccctcccatcctttggcctctgaccctttttccacaggggacctacccctattgcggtcctccagctcatctttcacctcacccccctcctcctccttggctttaattatgctaatgttggaggagaatgaataaataaagtgaatctttacn

SEQ ID NO: 214147 - DNA, 756 bp, Homo Sapiens
gggggcacacaatgctattgaaattactgaaaacaaaatatctgacatcttatttacttgtagaaatctgtaattctattgtgcctatgataaattcacataggcaatatctttaataggttaatatcaatgaagatttttaattacaataatgagttcactacagacgattaacacaccacactggcgaaccatctcaatgtaagggtggtttggcaacacctccttgctttgctgtttggtgtaggtaaatctagtttacttcctaaatttcagtaggctttatgctgtgtttatgcccccaatttattttaacaaaagaagattaaaaagtaaaagaaccacgagtaagatattatttaaatgttgaaatcttaaaaacctgcctccaagatttcagaagccaagtttttctaacagtatttgtacaaatactgcctagtgtattcaacagaaggactgtggtcatgtaacacgtaaccaccattttcaggtttctttaaaaacagcttgtaactaactcaggatttttatcttgagatttccctgaataaaaatttatcctaagaagctttccagtttcaaattaatatttggaacattctggaaattgcaacaactttttggtctttttcctaaaacttaccgtcattttaaaaaaaggtccttcaaaaatcttacctttttcccaaatttctttttggccccccatttttatttttttgcatttttcccccaacagttggattaaaaata

SEQ ID NO: 214148 - DNA, 750 bp, Homo Sapiens
ggcatataggtagaggtagatgggtagatgtgttctatctatgttcctgtatgtatgagatgtatgtatatttaacacagatgataggttaatttaattgaatttatttaaaaaatattagtgttccatgactccatagtgatcatctaaaatacgagcaggggctacttacagaagaatgcagctaataaggaatgcataatagaattagaaaatcatcattttgtcactcctaatacaattgttgactcagttgaaagaaaggttgtggaggaaccggctatttacatggtctcaaagtatcaccctacagataacaaaggcaaagatttaacattacagtaaagcattctggtggtcaccatcttatccaaacttgatcaaacttagtatcacccatacaggtacaatctctgcctcctgaggtgtagtattcttgaccgaaaatgttttttttttttcttttgaagcagggccttgctctgttgctgcaacctcgatttcctgggctcaagcaatcctcccaacacctcagccttctgaatagctaggactacagggccatgccaccacacctagctaggtttttattttaatttttttgagacatgggtcctccctctggttgcccaggcctgggatttgcagtggtgccatccatgggctcaaatgccacccgccaaaccccatggggctcctttttgaacccgtcccagctccgtcctccctggggtagccttgaaacctacc

SEQ ID NO: 214149 - DNA, 853 bp, Homo Sapiens; identical to SEQ ID NO: 44580
  misc_feature (825)..(825): n is a, c, g, or t

SEQ ID NO: 214150 - DNA, 740 bp, Homo Sapiens; identical to SEQ ID NO: 54965

SEQ ID NO: 214151 - DNA, 656 bp, Homo Sapiens; identical to SEQ ID NO: 53164
  misc_feature (656)..(656): n is a, c, g, or t

SEQ ID NO: 214152 - DNA, 853 bp, Homo Sapiens
tctagcgaggtgacagcgtagaaccaggaacatagaacagatgggaaatggattccaggatcttcaagatgacagcagtgaggagcaaagtgacattgttcaagaagaagacaggccagtctgaagaagaggatggtccatggttgtcttgctctgaaagcttggagagctacattgaagacgagctcttcattcagctttgactccacctgcacccctggcgggggcttgcactaacaatgtttgggtctcagcaaaaaacaaaaccaagcacacacatctttccttccatgtattgaaaaacattggtttgatttgctctaagttttcccaatgatgtttaaaagctttgagaaggaaagctgctttggtgtctgaggtgccacttctgctgtgaatcctggctttatccaggttgatctactgtgatagatgctgatttagagggaacagaggtcagggaagcactgggtcttggtgccttttgccgctttttatttttcatcttcttttttttgaaacagagtctccctctattgcccaggctgggagggaatgggcgcgatcttggctcaccacaactttctgccctcccaggttttaagcgattcttcctgccccagcccacggggacccttgccaaatattaacctccccttggaaaaagggtggaagttctcccgggtacccaattgcccaattccacaagggaaagggcaggtttttggggttccagggcgcttttgtggaggtttttagaaaaaacaccccctggaaaagattttgaaaattctcgggggggccccctgggtttgggcgcctatccccccctttccattattcccagaggggc

SEQ ID NO: 214153 - DNA, 789 bp, Homo Sapiens
  misc_feature (723)..(723): n is a, c, g, or t
tctagcgaggtgacagcgtagaaccaggaatgtgaagagctctcggctgtgcagtggtaccgtcggggcctgggccgcgaaggatcttctgccacagctgcaacatgggcggcaagaacaagaaacacaaggctccagcggccgcggtggtccgggccgccgtgtctgcttccagagccaaatctgccgaggctggaattgccggggaggcccaaagcaagaagccagtgtccaggccggccaccgctgccgctgccgctgccggctccagggagccccgtgtcaagcaaggtccaaaaatttatagttttaattctacaaatgattctagtggtcctgcaaatctggataaatctattttgaaagtggtaattaataacaaactagagcaaagaattattggagtgatcaatgagcataaaaagcaaaataatgacaaaggaatgatttctggaagacttactgccaaaaaattgcaggatttatacatggctttacaagcattttcatttaagacaaaggacattgaagatgccatgaccaatacactcttatatggaggtgaccttcattctgccttggattggctctgtttaaaacctttcagatgatgcacttcctgaaagattcagtcaggaatttgaagagcagcaacctaaaagtaggcctaaatttcagtctcctcaaatacaagccactatttcacctccattgcaacctaanacaaaaacatatggaagaggaccctaagagtaaagccaaaaaaggaagaaaaaaaatatggaagtt

SEQ ID NO: 214154 - DNA, 773 bp, Homo Sapiens
tctagcgaggtgacagcgtagaaccaggcgcagggatcgcgcctagtctctccgcctgcggagccgtggggtcccggcagcccgcaggagtgctaagtaagggtccttcagggcgggaaccagattcgaggcagggacgcaggctacgttcgaataaaagtaccgaaggtcataaggccccagttcagatgggacttccccgcgtgacagcacagagataacggccagccctgggcgaaggtaggagagcgggcgtgccaggttggaggggtcatttcgtggagcgagtttagggggagcccccagaagcccagagcagtcaggtcacacgacgggcaggaaggagtaccagcaaatactttttattgagcatacaggtattacgctgggtctttacatatctcctccaaataagtgagtccaaatggcaggtaactcgaaaggtgagaaattcaagtcagctttgaaagacacattgcatttaaaggaaaaacggtattcgcagatgataatacaggatggagtggatcagaaaacacactgaggctactgatcattcccatttgccaactcactgcagttggcaagaaaactctgtgactccatgagatgggaaattacaccagcagtcaaggtagcaaggtaatagtttcggctaagttttgctgcataacaaactgcctcaaaatagtggtttatatctctaacgtggggcaaaggtgggtgaattcttctggctagttttctccctggggcatatttcaatgttgggc

SEQ ID NO: 214155 - DNA, 781 bp, Homo Sapiens
tctagcgaggtgacagcgtagaaccagacatagggaggctttaaaaccttgaggtgattcatcttccaggctctccttccatcaagtctctcctccctagcgctctgggtccttaatggcagcagccgccgctaccaagatccttctgtgcctcccgcttctgctcctgctgtccggctggtcccgggctgggcgagccgaccctcactctctttgctatgacatcaccgtcatccctaagttcagacctggaccacggtggtgtgcggttcaaggccaggtggatgaaaagacttttcttcactatgactgtggcaacaagacagtcacacctgtcagtcccctggggaagaaactaaatgtcacaacggcctggaaagcacagaacccagtactgagagaggtggtggacatacttacagagcaactgcgtgacattcagctggagaattacacacccaaggaacccctcaccctgcaggcaaggatgtcttgtgagcagaaagctgaaggacacagcagtggatcttggcagttcagtttcgatgggcagatcttcctcctctttgactcagagaagagaatgtggacaacggttcatcctggagccagaaagatgaaagaaaagtgggagaatgacaaggttgtggccatgtccttccattacttctcaatgggagactgtataggatggcttgaggacttcttgatgggcatggacagcaccctggagccaagtgcaggaggtaacaggaggaaaaagaaacgggggatctcaaat

SEQ ID NO: 214156 - DNA, 575 bp, Homo Sapiens
tctagcgaggtgacggcgtagaaccagaggaggcgcggccgccgccgcctcagtcatggctcctcgccgtggccgatgtttttgtacctccatctgcggaggccgcggcgcccggccccagctgccccggacgtgcggcgacggcacgcagcactgcggcagggggaagccagccctcgctgcggccgaggaatggccatgagatgtgagtagaagccccctggacagcctccaaaagagaactgtgagaaaaggttcttcaatcctaaaaatgatggaggaaaaaacagtccctcttcctcagacagtgacacctcaaactgctacagtcacctttgcagcaagcctgaagatgccaccaacatcaaagggaatagagagttggtccttggtgatagcattaagccactgtatcaaccaatcctgacaatttgtatgacttctggatttccagccacattacaacaatgtaacaataaacatttattaattgcttaagccaatttgagttaggttccttatataataaatgaagtcaaaaaacgaaaaaaaaaaaaaaaactctcccccgtttg

SEQ ID NO: 214157 - DNA, 860 bp, Homo Sapiens; identical to SEQ ID NO: 50581
  misc_feature (765)..(765): n is a, c, g, or t

SEQ ID NO: 214158 - DNA, 848 bp, Homo Sapiens; identical to SEQ ID NO: 51769

SEQ ID NO: 214159 - DNA, 660 bp, Homo Sapiens; identical to SEQ ID NO: 48165

SEQ ID NO: 214160 - DNA, 828 bp, Homo Sapiens; identical to SEQ ID NO: 47932

SEQ ID NO: 214161 - DNA, 596 bp, Homo Sapiens; identical to SEQ ID NO: 48537
  misc_feature (596)..(596): n is a, c, g, or t

SEQ ID NO: 214162 - DNA, 864 bp, Homo Sapiens
  misc_feature (796)..(796): n is a, c, g, or t
  misc_feature (830)..(830): n is a, c, g, or t
tctagcgaggtgacagcgtagaaccagacatgcttcttgtttttgtctgttataaatgaaactgctatatttgaatgcagttgttcatgtaggtatgtttcactatggtaatatggtggtgtgcagtgcctgagtcacgtgatagattaaagtacaactcttttttgagacagagtctcactctgtcacccaggcgggagttaggtggcatgatttcggctcactgcaacctctgcctcccaagttcaactgattcttctgcctcagcctcccgagtagcagggattaccggtgtgcaccaccatgcctggataacttttttttttatttctattagcaatggggtttcaccatgctggccaggcttgttatgaactgacctcaagtgatctgcctgcctcagcttctcaggtgtgacctactgtgcttggcctaatgtacaactttttaagcaatgccaaactatgacttaagaatgaaattattgctcatttgtatatctatctaccatcagtgtccaagaatttctgttctatcttaccaagagggagtatggttagtatttgaaattgtttattattttaataagtggttataacttttgagtcagtggtttatgttttgcattttttttgttttagacaaagtctcgctctgtctcccaggctagagtacgtggcacaatctcaagtcattgcaacctctgcttctgggctcaacactctgcccactcagcctcagagtactggaatacaatggagtcagctctgtctctaactacgtggagggcatgatntcgccctgcaactcactccggtcacgatctctcnccctatactggaaagctgtgcttactgcattatt

SEQ ID NO: 214163 - DNA, 853 bp, Homo Sapiens; identical to SEQ ID NO: 48894

SEQ ID NO: 214164 - DNA, 757 bp, Homo Sapiens; identical to SEQ ID NO: 55473

SEQ ID NO: 214165 - DNA, 660 bp, Homo Sapiens; identical to SEQ ID NO: 55824

SEQ ID NO: 214166 - DNA, 750 bp, Homo Sapiens
ggatctcttgacctcgtgatcctcctgcctcagcctcccagactgctgagattacaggcgtgagccaccgcacggatatgttttaagtaactgaatgtattaaaatttgactttggcaccagcaggctattgtgaataatgttgctttgagcatcgtgtgcaaaaatatcctggacccttgttctcagcacttttggatatatatgcaaaagtggaatggctgggtcacatgataattctgtctgatgttttgagaaaccactgtcctgttttccagagctgctgcaccattttgtattcccatgagcaggtgcacaaggttccaactttaccacatccagccaacagttacctcctatttaatggctaagagccatcaccaccggggtaatgtgatctcactgtggcttttgttttcatttccctaatgtttagttatgttgatcatcttttcatgttcttattggccatctgttatcttctttattataagtccttttctgaattaaattggttttgttgttattcttgagttataggagttcttaataaactgaatattaatcctaaaaaagaggaaatttcgtaataaaaataaacatggtcggcccgccctcggccctccgaaaagctttccaagaccctttccgtttgggcgccgcggggccccattagggtaatggaaacatgggtcaaagcctggtttccctaaggaaaaaccctgggccaatgaactaagggctttgggac

SEQ ID NO: 214167 - DNA, 859 bp, Homo Sapiens; identical to SEQ ID NO: 43459

SEQ ID NO: 214168 - DNA, 854 bp, Homo Sapiens; identical to SEQ ID NO: 41665

SEQ ID NO: 214169 - DNA, 873 bp, Homo Sapiens; identical to SEQ ID NO: 41682

SEQ ID NO: 214170 - DNA, 912 bp, Homo Sapiens
  misc_feature (801)..(801): n is a, c, g, or t
  misc_feature (803)..(803): n is a, c, g, or t
  misc_feature (807)..(807): n is a, c, g, or t
  misc_feature (836)..(836): n is a, c, g, or t
  misc_feature (853)..(853): n is a, c, g, or t
  misc_feature (867)..(867): n is a, c, g, or t
  misc_feature (898)..(898): n is a, c, g, or t
tgtgggacctacacctgaccggccaatgggtgccagggtctggtcacccctctctcctcctggggctggggcccagatcctggggacctgcaggagctggatcaggatggctgcagtgccagcctggggcagcaggtactgcctgaggaatttgcaagttcgtgtggggaggctggaaaaggatctccctagcagaactcgtggttcaggacaatgctgagagctaaaagagccagcctaatatcagactggagccagaagtagacatctccccacctctaccctatcaggactttcaaaacccccctggaaggtgatggtgctcagcttcttgacacccccccacccacttcccctaccaggtggaagagtctgactccatgtgttatgcctaggaccaatggcagtgctgggttcacccactcctcccctttttcatctgcacaaagttgagggaaacgggagaatctgtgctgagaagactcagacccaggagcccctttcacaggcccctagttgggaagactggatgagagtggagcctccgtttcttttccctcttctatccttgttacttgaacaatctcagtctctaagtggtgggtggggacatgaagaggtgtgggtccaggttaggcaggagagagaacttctttggtctcggagtttggggtctcaagaattcaagtagccccatctctctctcgggcaagcccaaagctcaggtcccatacgctacccttagatcctatccccagggctagggtgaaccatgccaaagggaggggccagcttctctgngngggngtgaagcctgtctcctagcctgcctatgnctttctctgctatatgnttctggcctgctgnctgccaaaggctacagagagaggccctaagnagctgttgagggtg

SEQ ID NO: 214171 - DNA, 931 bp, Homo Sapiens
aaaactatattttaaagggcttttggtcttaacttaaaaatgaaactccccccccgcatttcagacttcgaatggtcacaggtgtctcatgcagtggcactctctggtgcctcatctctggggttgctgtcactccgctgcagagccctcagtggggctcttacacagaatgtgttccacccacagaactacccatagctggtccaggtgcctcgggtgtccaggcttccctgaagtcacgtcattttgtcagtgcgtctgggcacacctaactgagtcctgaggaaatggatcagcttggtctctgtgaggaatgctgtcccgagagttgctcccagacagaaggcccccacagcaatgtgtgccagtctggctggccagccctgctcacagcagaggaatacctccgaaacagcagtaaccccaccactgagggcaaatgtcccgagcaggactggcgataggtgcaggccagccaggggcctgtgggggctccttcggtagtagcggtggatgaagcaaaggctctgcgtgatccgaatgcccatgttaaagcagttggccaagatgaagcccacgctgccacaccaacgggtcaagagatagggatacaccaggaatgaggaggacagggccagcattacaaaatttgacctgtcgacctcctctttgctcatggcagcaaaatgtgaaacacttctgccactccattgatgggcaggcagggagaaacttagagacagtgtgaaccgccgccaaaccaggaccgggatcctggagcttagcattgggccccttccgtgatattcccagaacccggttggtaaaaaggcaaaagccacaaacaagggatgtgccaggcccgctccctatgggccccgtttagccgagggacttcaagaagtgagggaccccaacaaacgtccttttt

SEQ ID NO: 214172 - DNA, 977 bp, Homo Sapiens
ctttaaagaaaaaaagttaaatgccaataataattatgtttaacacttggtacacatataaatagacaaaaggctgcggagaacactggatttaaataaaggtgttatgggtataattaactataatttattttatgaataaataagaaaaaagtccctggctataaaggatagtggaggtttatttcccaatattcttccatttggactgaacccctgccaactaagcagacatcccactattacaccaaaaagactgctctccctgcgagcaattacaatacatgacaccactaggcccaatggctcagagggaagagtggcctgtggctcttcaatctttatccaaacctggttctagcttcaggagcctttggtcacctgagactttttatttattaatttttatgagacggagtattgctatgtygcccaggctgattctgaactcctgggctcaagcagttctcccgcctggscctcccagaatgttgggattacaggcatgagccaccacacgcagccacctgagactttttaaacagcaccagcacttctggctggtttgaaccttaaatgccaccacccaccagagaggaggctctcactagattctaaatctgttatttaattacttttcaattgaaaaacaaaacagacagaagaaacttattagaataaggccacctaggaatgttcttaacttttccattcagcttttggctgatatatgaaaatacaaataaatacatcctttccccaggtgcaaggbtaaaccagcagctccaagggcttggtctacagtgctcagaaagacacactgccttaaaagtcaggctagtgccctagctccggtggcctctgcaaatgaggccttgacagtcgtcagtggacagacacatagtatccagcaccaggtcttgggcttcctgcttcccagagtttcacaggtaggacgcatgtkaggggagmgtccg

SEQ ID NO: 214173 - DNA, 923 bp, Homo Sapiens; identical to SEQ ID NO: 55764
  misc_feature (804)..(805): n is a, c, g, or t
  misc_feature (821)..(821): n is a, c, g, or t
  misc_feature (851)..(851): n is a, c, g, or t
  misc_feature (878)..(878): n is a, c, g, or t
  misc_feature (923)..(923): n is a, c, g, or t

SEQ ID NO: 214174 - DNA, 941 bp, Homo Sapiens; identical to SEQ ID NO: 50463

SEQ ID NO: 214175 - DNA, 1000 bp, Homo Sapiens
tcccgaagaacattcacatgagggcattacggggagacggcaagtcggcggctcggggggcgcgctcagccgggagcgctgtagtcacagtcccgggaggaagagcgcggtgtggcggggcctcgccaagagagaaggaggaggggcgtatgacgaggcggcgtttaggggcttctgtggcgctgccctttctctctcacttaagttactagacgaaaagctgacacctgcagctcccactgacccacatgggcgagggaaaaggcctcaggagatggcctaggttcaaagtccctgtcttttctctcctcttccctctcccaccccctactccggtaaagcgagggccagaggtaggggcagatagaccaccagtcaggaggagaaagacaggggtacatacggagggaccaggacacagagtacaagagactggcaggagagaagagaggagaaacagagaaggagagagaaagggagagacagaaggagagaatgaacggtggcaagctagaaatctagaaggaaagcaatacaaggagagggagaaagacaaaaagcagaaaaaagaaaagagaaggdrgggaaagggagaggaaagggggaaaaggcaagacaagagagggtaaaaggawgagacagagggagagagagaatgacagtggtgtataatttattcccttctgtggttcaagactcagtctccagccccaaaaggatcctaaaagtaacttgttgaaaataaatcccaaacaagaaccaacatagacagctatctgccctacccggctgttctacccgctcagcctgcgggtctttcagtacctggtggggccgcaggggcgggggcgcccttggacaccgccactccacgtccccagtgtcaagtcacaaaaggcaagctcatcaaggcaaatgggttctaggagccmaggtccacgaggttggctgacatggggttgaggatggagtctgcaggccatggtggtgttgcagtggg

SEQ ID NO: 214176 - DNA, 901 bp, Homo Sapiens
  misc_feature (785)..(785): n is a, c, g, or t
  misc_feature (848)..(848): n is a, c, g, or t
  misc_feature (891)..(891): n is a, c, g, or t
gagaaatacccaacagctggaaaagctgtctattctcaactagctctgaccattttgtacataccaaacaaaacacttgccaggtcacaggcttaataagacatccttacatgaaggtgtaaaaaattaacttttttttttgcataaatgccacgatactttattgctcagtgttcctttgaaaataagttagcatgattccatgttattcttttatcaatcatattattgactaaagcatatcactgattaacataaggtaaaaataatatccactcatattcttgaagagaagtgcttgcagtattttatgaaaacatttgtgcacatttttacttgatttaatggacaatttcatatttttctttaaaatctacaaatgtcttaattcttaccattaaaacaactaaaaacaaaacccaaaaccaatcccaaaattaaaccccaacaaagcacattaattttaatacagaacatatattaagtcactgagtaaagctcttttttatgaacacttttggaaagcttgcattcagttctagcacagctctgttatcaatctgcgaacagaaggacacatcaagtaaagaaagatctttacaagattccaggagttttcttaaggatgccggacttaccattcttgttcctaatatgtccagctgctgtaacctggtacaattacatgccaattcatcaatgtctgtgtcacacacagatctattagctgtaagaaagagtttttgcaagtttgggagctggtgtgccagtctggtgaagcaccncgtgctgctctgcagagtttggcaccagccaaggtcaagctcctccagtagtggacacccagnaacccagtctgctatttcattctcagtaatattctaacatctncacagatccg

SEQ ID NO: 214177 - DNA, 936 bp, Homo Sapiens
  misc_feature (936)..(936): n is a, c, g, or t
aggatggtgaagccacctttaatgcgccaccctcagacggggcagcaggagtgtcttaagcacagggccgttctaccccctgggagctgcctggggccagcccctcagttctggctgtggcaggttccccatcctagctccccggatctccatagggagtgtccagggaccctcaatctccagggccacttctgcaggagctcgggttcgaggttccacgtggccagaagagctcaggtctctgagggctggtgtgcccgggtacccatccgcatcactgctctcctcctgtccggctacgcccagggctgagtgacggtggtggcaagtgcttgtcctcagggcagcgaggtcttctgttctgacagcagcagggactccttcatggccaccagtaaccccagtgggcggaggcgctcctgggctcggagccaggacaaaaggaggagggtggcggtgaccaggcttgcactgagcaccgcagcagctgcaataaccccataggcagttgggcttccagactggtctccggcagaggaggatgtggcattcccgacagaggggacactctccagggtcacagggggccccatggttgtgggattcctgagagaggtgacactctccagggtcacagggggccccattgttgtggcatccccttccgggaggatctatttggttccacagccgagctcgccgctggagtcgggacagtcctggtgggccgtcgcaacgccacgtgagtggaatgcaggaatcgctcagggggcaacggagctcgcctgcttagggaagccaagcggttgcagttggccaattttttggtaagttcccccaaaacagtcactgacgccggcgcagggctcgggggaggccctgtgggccgtgggcatttgcccctttttggggtcacgggcttaaaacctgcacttn

SEQ ID NO: 214178 - DNA, 891 bp, Homo Sapiens
  misc_feature (671)..(671): n is a, c, g, or t
  misc_feature (728)..(728): n is a, c, g, or t
  misc_feature (760)..(760): n is a, c, g, or t
  misc_feature (774)..(774): n is a, c, g, or t
  misc_feature (813)..(813): n is a, c, g, or t
  misc_feature (844)..(844): n is a, c, g, or t
  misc_feature (872)..(872): n is a, c, g, or t
  misc_feature (891)..(891): n is a, c, g, or t
ggatatattgggattattaattataataattccggaacgcttgtttccttaaatacacagctgcttctggctcacgctcatcctgagggagtagatgttggtaaaccagcctcatgtgcagagggtctcctgctggatccccaactggagccatccctgggcctagacttctgtctccctcacttctaaatgagtgctcagtgatgtgaagcacacaggagtccctcagggcaaaagtggctatgcctggtgctaccctccccatgaccccaaaaacgagagccatgagacaatgccaccttagccatttcccttgagagaaatgaaggaggaacagacataaggcagagccacctgaggtttttagaatctatatctcacatactgaactagtgtttaatggctctgagaataaaaccaaaccaaatcttccttccacttgagtttccaacataaggacaccttactctctgcacttctccttgaccaggaggcagcactcggggaagcagcaccaaggcaggcatcgtcattctgcatatgcaggccttgactggcagcagagctcactgtcctgatgggtacgtcagtagcacacagaaggtaaggctcaccgagcacaggccatgaatctcctctgctcgactggatgttctcatactcttggctgngaacatgacctctgcctcgagaccaaccctcgtcagggctaaggggcagggtgtggngtgggcccactgtggccatggggaggccttgnagggtgaagccagncaggcggccgaggaacagtggtctttattggtcctttangagcaggcatcacgggaccagggcccacttnctcacccctccagaaagaagggggccgnaccagctctggcgttcaan

SEQ ID NO: 214179 - DNA, 861 bp, Homo Sapiens
tgagacgagtctcctctgttgcccggctggagtgcagtggcataatttcggctcactgcaacctccacctcccgaattcaagcgattctcgtgcctcaggcccccaagtagctgggactataggcatgcaccatcatgcccagctaatttttgtattttagtagagacagggtttcaccatattggccaggatggtctcgatcttttgacctatgatccacctgcctcggcctcccaaagtgctgggattacaggcgtgagccaccatgcccggccccaggatattcttctgtgcaaagtttaggaaactccatgcacttctcaaaacatcagatgctggggactggcttatacaagaaatatggagaacacatataatagattttagccatgggctagattttcagattttaacagagacagataagtggtgaagaactccatgaaagttgtatttaagtcagaagattctctttcgtgtgtgtgcgtttctattatatagatgaactatttcatatgtgctgtcagaggggacaatcccaccatcccatagcatgttactttaaggtcaattagggcttctagctttcaaccaaatgggaactcctataaaccatcccgtttctcttgtctttcaggctatactgactttcttgcttgaagctgtaacagattaattagaactcaaaagtcctttctgtcaccttcacattggtctttagacaaccttggatgggcctttcactatacaagctaattccaggagggactcagggatccttctgcccgaagtcagaactagaaggtgggggcttgggaagtaaggaatgtaaagcaaatgggactatcattagagttttt

SEQ ID NO: 214180 - DNA, 903 bp, Homo Sapiens; identical to SEQ ID NO: 47792
  misc_feature (714)..(714): n is a, c, g, or t
  misc_feature (756)..(756): n is a, c, g, or t
  misc_feature (796)..(797): n is a, c, g, or t
  misc_feature (903)..(903): n is a, c, g, or t

SEQ ID NO: 214181 - DNA, 913 bp, Homo Sapiens
  misc_feature (754)..(754): n is a, c, g, or t
  misc_feature (769)..(770): n is a, c, g, or t
  misc_feature (778)..(778): n is a, c, g, or t
  misc_feature (784)..(784): n is a, c, g, or t
  misc_feature (816)..(816): n is a, c, g, or t
  misc_feature (828)..(828): n is a, c, g, or t
  misc_feature (888)..(888): n is a, c, g, or t
  misc_feature (894)..(894): n is a, c, g, or t
gagccccggtttccctttatgagacgaggtggagcagtacctctagtttttggctgctcatggcctcagagttgctgtttggaaaggaaaaagagcagcagaggcagcaaagaaaagtactagggcagcacctttaggttagaaatagattccacagttaaaagcacaagtataatatgcattaaacagagaagggcctcaatagaatggtcacaatatgcaagtgtgtcccactcatttacaatattaggattccaggagctgccagaaataagtcatctcattaacatacctacctgcagttctgatgtctggctattagtaaacaaggcctacgtttgtttctctaaaatttagaatcttaaactaaatcctttatttcaaaaacaaacataaaataatttcccaggcagagaaaaggtttgagatggaagcgttcttgttagcagtcccttcctgcataaatggggttggagagagaggagagagggaatggccaagggtatggaaagctttcacaatgcatgccgagtgtgaagtgacacccccagcagatggggtttatcatctttacttagtcacacaacatcaaggactggttagttccagggaagggctccatttcattacctgggtcagttctcttcccccgcatgctccacaatgcagtagaaccaaacaacacattcatttacaatagaatgtttaaataacacctgtccaataactgcccttacttctttgtgctgtcggngaaaagaaaaacagnnaagcatanacccanaccctttgggcagccagccggtgcctattctnctggggcatttntagtggaacttcggctgggccttgcccttctcccatatcagtgaggaaaagtgcagcggnacaggnttggtcatctgcagtggag

SEQ ID NO: 214182 - DNA, 1000 bp, Homo Sapiens
agactatgggctatttccattaaacacagaggtgctgcccttctccactccaaacagaacaggaaaaaggcaaggggactgggccacagtgcataagggaggacagggtctctcggcttctctaccccagagggaaaggttaggttagaaaaacaatgcccaactctttcccctcagagcccagggctgaagcctgggggaatgcttcattttgctccttttctctttgccttttccaaatggtcacattcttgaggtagaggagtggagctggggaggggcccagagtcctgtcagaaatcctcaatatccagctctgtagaatctaagaggtccagcccgcgctcactggtggaagagtagctacttgcttgcatgtctgtatcctgccgttcttcatttgactcatcctggatttctaactcttcttcctcgtcctcttccataaggctgagtcgcatcagctggttgcccaggccaggacctgaagggttgtgtggagtctggaaatattgtggacccaagaaccttgacctctcggtgcctgcgacgggctgactgccctgggcaaaatccaactctgagccatcttcttcctccacctctttcaacccccacaggggctgcctgctcttcacagctgtggaggtgagggtgggcgtgggcgggatgctgttcagctgcagactttcttcctgggacgaggagacgtcctctctgttaggcttggcaggcccttcaacgcgcctcctcttggagctgggggaggacctgagggctggtctctgctgtgttctccacagggctgagggagtggcagtaggtggtgactgggccccagggatggccaggtgcctgggagacatgctgcaggcacttttctagataggacagtaaaagctgcttgtcctgatggaagagtcggggggaaaactctgaaaggagctmcmagwatgcaagattggargctgattggaggagcagctggaggaacycagam

SEQ ID NO: 214183 - DNA, 931 bp, Homo Sapiens
caagtaacaaaataaataagaatattttattaaattaatgcaggtacaaaaagtgacaatcaaatgcagaattaggtatcatctctgcctatgccatttacgatgaaacatgagacaaaagggataaagtgccttacaaatccaacaccacaaggaggagttaggacttaggaatagactgagtagactatgtgccttgctcagccacaattcttgcctgtaattcacacaaagaacactgtcacaccaattactgtacaaatgcacatgtacaaacagataacacaaggagctctgttggagacactgtttcttcagccttgacatgtggcaaagccaaggtactccttgtcattgacaccagaatatggccaagagggaaaggaaactctgggatctcccagggcatctgaatctcgaaacctccaggaagcctcttaggagggctgtgtagtgatgacagctggtggcattcaagggttcaagcacaacgaatgaggcttttctggcacagggtagctagcagtcaaggtacactgccggaatttccagaaagaaaatgtgattttgcaagtacagcatcaaagtgaagtttatacttgacagaaagcagaaaacaaaagttccagacatgattctgtcatacagagttaataataagattgctttttaggactagattgactcagtgcaccctggagagcccatgggtttccttttgagcaaactaaacaaatccaaactctgtcttaaagcaaatacttaacaaatggtggttgtctaaatgtatattgtagacatatttaacatatactgcattcattgaaagatatggaaagcttatggaaaagataactttagaaacaagtaggcatggatcctctagccctgggaacctaaaaataatttctattggctttataagaaaacc

SEQ ID NO: 214184 - DNA, 844 bp, Homo Sapiens
ttcttaatgttcgatgctttatttcctgtgattcagaacatacacaactagctcactgacccttgatttcggcagtaatataaatttgccttttagaaataatttggtttacaaagacatgaactgattttaaaaaaaatgattaaggaatcgggggaggaagagatgcagcagaaagacctgggcagaaacccgtgaagatggtgctgggaatgaccgggctttgggggcttgggcctgcggcagagcaccagcccctctctgtgcattcctggcccacgggcccccacccctgtgctcccacacacccaggtctccaccatcatcccagccttggggagccctaccttttccagaacatgctgggctgctccaccccttggcctttgcatgtgctcttcccactctccagatggcacaggttgtctccaagatattttgcaggactgttagtcatttatgttttttacattcaaagttttaatccatctgaagttgatttggatctctaagacgagtgcaattttattttatcccagatggatattcagttgtggctggtaccacttacttcacagtctgcccttctcccaccgaatcaaaatactacctttggcatatatctcattctcatatatcctgaaacttatttttgtattctccattcctttccattgtctagtcctctgccaatgccatattgatctgattacagtgactttgcagtatggtcttatttccaggaaggcaaaacccccacagcagtcttttttccagtcttccctgggaatttttggggcatttattctgctgcataatctttcagatcattttatctagtttt

SEQ ID NO: 214185 - DNA, 909 bp, Homo Sapiens
  misc_feature (24)..(24): n is a, c, g, or t
atttggttggatttaatttctttntaaagtttgtacatttacatgtatcatatacatattttaaatccttcactattttgcgtgatttctattacataaaaaccatttaaatgcaataaattttgttgccgtaaaacaacaaaatatccccaacttataaaaacacaggaacaattatattcataaacatttacacaataaatgtactctatatatcacagcttctatacatatcagatgactcacttgtctacaaggtttagatttacttgaacaacagtgaaatagggtaatatttatatacaactattttaataaaaaataaagcaattgtaaaatgtaaacttaattgtcaaaatattctttaaacactttaacaatatccacacaaattactgttcctttcaaaagaagaccaccacaaacgccatcgttttctagaagacggcatttccagaatctggtaggtggtgatgaggaacaggtttccagtacgtgttatagtaccgccagcttacccaaaactgctaatgccgacagtttcgccattgaaaaggagcaggctgctattttgtcactaattactttcacaatttgcaggggacatatggcaccaggactgcaatagaactgaaatgattggtggagaaaactttgaaggtaaagaaatgttccacaatgccaattagtttgagccacagtgaatataactcagttattataataggctggaaaagttaaaagcttcttttatattaaaagatacaaattatccgctttttgcctgtcctatggtaatcaaggctgacaatataaattctccggtagggtacatttaagaatgggttccttaaagcttgagatatatagagactgcagggaagggggttaggccttttacttaacagt

SEQ ID NO: 214186 - DNA, 891 bp, Homo Sapiens
  misc_feature (679)..(679): n is a, c, g, or t
  misc_feature (714)..(714): n is a, c, g, or t
  misc_feature (717)..(717): n is a, c, g, or t
  misc_feature (820)..(820): n is a, c, g, or t
  misc_feature (842)..(842): n is a, c, g, or t
  misc_feature (864)..(864): n is a, c, g, or t
gtacaggtggggattatacgaatatcagagagggtcctcgcccaaacaacaggatgccccaaactgaaggcttgtcatttatctctgaaagaggcaagtcaacaccttaatcctcatcatagcatagtcctcggtcctcagtggcaagggtgacttgaaagtggggcctttcatagctccagagccaaggaggccttgacaattaggcagagagaagacctggatgtccatcccatctgataccctgacttcccaagagaacaacccattcttctcagatttctcccaagtccctcattgctgggcctggaggctcgctttggctcctgtggtctctggaggatgcaggcatgaagcctgacctgacttgtactgaccctgtcccaggccttttgtgtctcgcctacctggctactcctcgtggccctacctatccaacagactgtgtgcaggtgggcaaggccaggctgtcttccaggagtcagtcccaacactcatcagcaaaaaggggtccgtgtctaggtgtctgggactggtttaagtaagaagagagtgccaagacccctctctctcttccagggagtgaactgatttctgacttgagttgtttaaattgggaagaggcctcatcagcaatcagagaggtctagatctctggaatctggccacggagtgattntcccatcagcctctgtctcggtgactgaggatctncgngcttcttcttttgcctctgacccaaggcccctcacacacttcttccagtaagcccagcagtgatgggcaaaggaagcggatctcttcacttcgtagagcatanatgacaggggtgaccatgagantgatgagcccaacatggagcanaaagcaaaggcctctttgacctttccc

SEQ ID NO: 214187 - DNA, 899 bp, Homo Sapiens
cctttatatacttatatattttacatagcttcgtttctacaatacaatcctgaggtaaacaggcagggtgcaatcattctctttttagagggagaacaaggaacttagggaaatcaaaatggggatacgaacaggatttctgtggaaatttaaatgagaatttgtggtaaatttttttatcctaaaacaactcaccttggccgaaaaatgggatgttacccaaggtcccctactaggccggaggagaaaaggacctacctcctacaggggcacaaacaagggagactaggactcaatggtcgcccaaggcccaagggtctccagtgagtgcttgagactggcctaaggtataggaagagccgtgaagagaagaaaatagacaagcaggggagggaagaattattaaacatggtcaaggagcactctacaaagcctcaggatttcttcaagggatactgctgtgccaggtctcgagggcagaaggatacaagtgtgagacaccagggccaccaagttgatggggttactgagcctctggatcagcaccctctgataggaagcaaggaagcacactacaaaggctgcaatcccagaggctgagacagtcaagagggagtagaagggcctctgctgctctcggaaggttcttatagggcaaataagctattactgtgcctaagagaatggaagagggaggcaaggcaggtgtcatggccttcagaactttcttgaggttcatatctattgacatttgacctagaatccttggcatggggtaggcacaacccctgggccccgggtaggaaaaaaagaatcttactttctcctcaattccatctgttaatccaccaccccaattcctcccacccccacctggaatcccaagaaagattaaatgt

SEQ ID NO: 214188 - DNA, 875 bp, Homo Sapiens
  misc_feature (784)..(784): n is a, c, g, or t
  misc_feature (791)..(791): n is a, c, g, or t
ttttttgaacaggggacgtttttataaagatgaactctactcggagcatagagtttaaaaagagttctacacaacaccctagggatgaggaagaatgcctcagggaagaaagcacagaaaaggaggtgccctcccgaggctgggactgagacctcctcgctggagaaggtgtgggaggcccctgagggtgaagttccccgggttgctcgagccagagtctgcacagtcacagggcaagcagaaaattctttcgagagggtgggcgctcacagggaatcgggaagcagagcccacctgcctacacctgaaaggccacagccagtgctgggacctctctgaggtctgcagactccaggcagagcactcctggcagctgtgcagcaggagcaggaaggaaacgacatgaaagcccctttctccccagtgtcccagttcaacaccgtgcacgctaccaaggagaaacggcgcacgggccccacccacgactgcagagcaggcaggggagggggatctagagctgaaaggcaatacatggataacgcgcacgccccactcccacttttatttagcaagagtaaatgcagcctaatgacagggcgtgggaagacctcctgctcaccagtgtgggcagagtgtagcgtggcctgggctcctaatacaggtaaattgtctccaaaggactagtaaaggtgactgggtcatcctcctgccccagggacactgattagagaaaatccgtctgtgctggcaatacggcagtgctggacactcgggattcccttgnaggcaanagccaaggaacagagcgtgattaggtactggacacctgccaagtgctgggctttctccagtttacagatgagaactgaggctcc

SEQ ID NO: 214189 - DNA, 906 bp, Homo Sapiens
  misc_feature (19)..(19): n is a, c, g, or t
  misc_feature (688)..(688): n is a, c, g, or t
  misc_feature (742)..(742): n is a, c, g, or t
  misc_feature (890)..(890): n is a, c, g, or t
  misc_feature (906)..(906): n is a, c, g, or t
agttcccagaactgatttntattagccatacataccaaagacgggtggaaaagaagtattatttttgtagttttctttataatggaagccttatgctattacagactgcagttttccagtcttttgattaagccttgccagttgtgtgccgctgcagcaccaaagaaactgttttgcagcctgtcacctcctctggcaggcagccatcctggtctcggagagtggggtcagcaccagactggagcagcagctctacaatatccagaaactcacaggcagaggcataatgtagagctgtttggccttcattgtcctgacagttaatgtcagctctatgttgcagcaacactgtgactagttccttatgtcctcgatcacaggcccagtgaagtagagccctaccctcttcatctttcacattcacatccacatttttcgatttgatggctttggttatatggtcaatgttgttttccctgcagtaatcaaatatatttttgtcttcttccctgatggtttcttcatgatatagagaactaataactggcccaccaaaacctgtatttgcttcttttcctttcttctctggtatctgaggattccaacctggatctagttttttaactactgcgatatattcctgcattgcttggctggggcttgaatcaccaagtgctttccaagcttnccatttttgctttccttcaaaatcaaagaagcttggtttaggagtattacaatntccaactttgacctgtttgtacctggcatacaggtacaagagctgctccctgctgcccacctgatcagccttgcagtgcgcgcagccttctcaacagcttggcaggcactggctcctcgatctaggctatggggaactcacctcccgngtcgcccctgagctan

SEQ ID NO: 214190 - DNA, 918 bp, Homo Sapiens
  misc_feature (628)..(628): n is a, c, g, or t
tcccgtgtgcttattttagatgctttctgtgtgggagctggggagacaggtcagtaggaccccacgcctgtgcctgaggggccccagtctgggcaagtggtcccagcccttcacaaggctgcacacactccctgtgcactcgcagaggcttctctgaggaggaggctgtgaaggaggccacgaatgcaaggacatttccaggcaggcatcctaggtgcagggacctgccgcccaaagccagagaggtgaggtcacagcatcagtagctcccagggcagcctcttcctcatgtgtccagtggcgcgttcctcattcagccctgggagaggtgttggggtagtgtcacaagtgctcggtctgattgggcgtgcacacgggacccctacatctggacccccaggtgtgatctggggcctacgtggtccagcttgggaggacgccggggccagcttctggagaaggccaggctcccatgaggcctgacataatgaacagggggtgatgatggcctggctgagagggcacagcaggtgtggccgggagacaggtcaataattttgagcagagaggatgcccgccaggagccttaggatgctggcagggaatggggtgagggatgaggatcggnggtgcagctgccaggctgccaaggcccggacagccccagggtcctgccaggcctgaggtgaaacccaggagggcggctatgggaccaccaattttgggcccccccaagaaactcaagaaagccggggccattcggggccaggaagcaggcccaaggtttggccatggggccattctccaaggggcttgtaaagaaaaaaccttgacgggaaaacaaaggggtttgggtctttcccccctctgcccacatagagtgggcggtcgcccgaaaaaggttactgggcggggggg

SEQ ID NO: 214191 - DNA, 344 bp, Homo Sapiens
  misc_feature (12)..(13): n is a, c, g, or t
ttcgcggccgtnncgactaaaccccagatgcccattttggccctactcaccagcaacccaagcaggtggctaggcgagttcatatgtgtttagaaggaaaggacccgtctgggctaggaaggtggggaaatggggttcctccccacacctccccgggatagaccctctctcctggctcccaggatgtgtgagaggctgggaggggccctatatcatctggctgcatcttttatggttcctcattgcccttcattcggaaatgaaacgcctttgatcttttctcaggctgtaaagaaaaatgctgggagaccaagcagatggggccccagatatttaatgacggg

SEQ ID NO: 214192 - DNA, 454 bp, Homo Sapiens
tttgtgtaattccatttttatgaaagatccagaataggcaaacccataaacaggaagtccactggtggttgctagggacagggaggagggaggaaacggggagctcttgtttaatggctacagggtttcattttgggatgataaaaaaatgttttggaactagacagaggcaatggttacacaacactgtggatgttcagtaccaaatgccactgaattgttccctttaaaatggttaactttatgttatgtgaatttcacctaaatacaaataaataataaatacattgcaaggaaaaaatgtggaaagaggcatatcgaacaaaaaagttttaatgaaaaagaaaagacattaaaaagttctgcaaacaggaaggtttgggcatggagctggctgattttaaaaatcctatcccattcgttcacatcaagctgtccaaacctagtaactgga

SEQ ID NO: 214193 - DNA, 533 bp, Homo Sapiens
tttttgtagagacagggtctcattatattgcctaggctagtctcaaacttctggcctcaagtaatcctccagcttcaactcccaaaagccctggaattacagggataacccattatgcctggcctaaaaaaaagtcttttaaaagttttttcaaaggacactattttaggcactaactgtatttggaaacacttcccagctcactcatttcttggtctggtattttcatttgctacacattctttctttgcacatataggccatttattgagggtccattgtgtagatgacaagatgccaagtgctgagggaaatgaaaaaagacagaaagtcctatgcaagttatctttgcatggtgccaccacagcaccatttgcaattagatatattacaaacattctaggaaataatgggtcttatgtatttgtcaaattagaccttttgaaagaatgtgagccattgaatctgctaataagggcatactgtatgttcacattgtaggtatgagcctggtgagtagattgtaaacaaag

SEQ ID NO: 214194 - DNA, 376 bp, Homo Sapiens
ttttgcaagaaagaaattgtttttattgcattgaggacttttccagaagcctggtggacccacgtctccctccagccccaaaggcagtgcaagcctctactgatcccccacttcaaggtgggtctcccctcctgcagggcccatggaggaggggtagggtgggctgtagggggcccagaagggaggcctgagcgcacatggagcccgtccacgttctggctgaccaggaagcggaggaggcccacgcgctccagctgcaccagcgccatgtgggtctgcgtgggccgcgcgctctcaaaggtggtgtcgaacttgggggccagacctcgctcctccatggtccagactccgtggggacccctgaaggtggcaggcc

SEQ ID NO: 214195 - DNA, 558 bp, Homo Sapiens
aagattgtaagtcccagtgagtttgagatacaaataaagagatacaaaaacgccggttatagtagaaaaaggcacttgccaaatgtacccaaggggaaaaacaaaatacagtaaatatttttgctgtgtactgattacgcacagatttgcattttgggtaagaaagcagtatttaagaacaatggtccaatcccttgttcctgcctcacaaatagaaaatcttacctacttctgactgccactccaactcacctgcctaaaaatggctttgatctttgtgatcatgccctcaatgactgaaagtgcaggatattaagatgccctcttttcttgagcctcagattcttttaggaatcacatgaaaatattaaaccgcatccctagaaaatgcatatacagacacaatattttgcacacaatttcaggaggtttggagatctcctagagtccatctacgacccaggtaaggaagttcaagcttgggaagggcacgcatggtggtcatgctataatactagcattggagggtaaggtgggggatacttgagccaagagttt

SEQ ID NO: 214196 - DNA, 1000 bp, Homo Sapiens
tcagtgaacaaaatggttcttagaaaacatggtcttgtggtgccaggtgcccagggcagctcttccctgcacaaggatcccgcgcastcggccagcccgtccagaactgcagccacgccccccgctttcctcaggcacagtctccttcactgtttttcacatctctgcttctctctctggacttctcggtggccccagacgtcaagctgtcagtcttcttctgtaactctttcatggcgtcatctatccgcttcagctcctcgtagcgatctcgggattcccaaagtggctgcagcatgatctcctcaaccatggggaagagcttggtcactgtttcaaacattgggatcaggacaaacttgatgaacccaatctgggctgtggccttggtcactttgtctcggtccatgaacggtgccacaggaaggccttctgacttctcacggtcgctctgcataaaatattcctctaataaacagtccacccaaggctctgcgacttccattggacggacctcgttagagatatcacagcattttatcaaaatcatcttcagcagggtcatgtgctcctcgttgctgtagtcaaaattctccattttctctttgaaagaatccataatttctgcatgtcttgccatgtcagtggccaagattaatgtgatcattccctgtcggatctgcttgaacccatcaggtgggatgttggagaagatgttgcactcaggctcggcgaggatctgggaaggccacggcgcagtggtggttctccagcggtgagatgtcattgtagcggaccgccagctctgtgcgggcattgatctggtacgtgttgttgtagccgggatggtccagatcgtggcagatggccgctgtcattaggatcaggatatccgtttgtgagamttctcctggagactgcagagccagacatgctgtacatcwctgggccagcagaagcagtgccggaagttgtggaaggggtgtttctgtagtktygt

SEQ ID NO: 214197 - DNA, 916 bp, Homo Sapiens; identical to SEQ ID NO: 54174
  misc_feature (26)..(26): n is a, c, g, or t
  misc_feature (652)..(652): n is a, c, g, or t
  misc_feature (771)..(771): n is a, c, g, or t

SEQ ID NO: 214198 - DNA, 913 bp, Homo Sapiens
gaccctgtctaaaaaaaaaaaaaaagatactacctgatttctaaaattaccaaagtgcccccttttccccccattatttaaaaaatattgttctagctctgcgcttaaggtctggacctttcttttttaaaatgttatatttttataacatcttattattaccaccaccaaaaaaggactcagtttctcccactttacactatatctctgtccccaaagtaaataactgaagcaattatctgcaatttttttaaaatgtgggtatttcagggtaaagaatttggactgcctaaattactcaggtgattgcctgaattattacatatgtcccatcattctttgtacaagaagtcttgatttatagaaaatttcagacaatgttcaaagaaggaaatatgctacccaaacaatctacttaagacttcaggttggcaaccctccctctttcattttttaaaaacaaaattttttgctatttaattaatacacttagaactcactgtctggatcacgttgttatataatacttagtctgattattctattttggtgtgactatgtgtcaaggccattggagtgggttttgtctctgcttctaatatgaacttgcaagtatgaaggaaaaccagtgaataatgctttcaaaatgtgcagtgcacagaatccacacttggaatctaatctttgtaaagcttaaaaatttacatgggaatgtgaccatgatttaaaaaaacaacttttttaaaaataggacatcttgacatacaatacaatttatttttttaatagccccgtttgaatttaaaaaaaaatgcctttaaaaatattcctaaaattataaaatattacctacactctttttttttctcacatgaaaatttaaacttttttttacaagaccccaaaaataacg

SEQ ID NO: 214199 - DNA, 919 bp, Homo Sapiens
  misc_feature (622)..(622): n is a, c, g, or t
  misc_feature (786)..(786): n is a, c, g, or t
  misc_feature (861)..(861): n is a, c, g, or t
tattaaagatttattgttccattttttattgaattccaaatgtagcaaaatcattaaaacaaattataaaagggacagaaaaattaagaatcaaacatcattctggaccatgggaaccttgaaaaggcatggcagtggagaccagtaactagtatacagcttgcctgagaaggcttagtaacaaatgaattcaagtcgtattagatattctaaaccttccttaatataagatgaagtgtcatatgttaggaggtaaaaacgtaacacaaaattctgggaataagaataaagtctggaccctgagctcagaatgatccatagcatctactgtgcaaatatattacagcagacattatagcatattacctcctgctgtacacacatgcacaggcctgaaactctccaagagcaccataagaatgattccctttacctcatctagataaaggctgaaaaaaatgtattctgttgcagatgggagggaaaaaaatagacaattacgttgaaaatttattaaaacagaccagcttgaagtgagtttattcttgtctgtataatcaccaatgttatttccaaatgtccgcgaaattatctataatcctatctccttgcttgctttggnaggagtatagctaacactatagcccatcttttgccctcagtaagggctatcagcagctccaagttctgtgagattattttgtgcctttcttttattcaacctctagttgaataaagtttactttccaatttgaaagcctttagaagaaccccccctaaaccggnttggaaagattgtttccctcagacagttaaaaacacaagggcaagcctctaatgcccattttaaacctcaatttntggccaatttataatagggtgacactgcctccggaaaatcccaaagaccagggtcctt

SEQ ID NO: 214200 - DNA, 904 bp, Homo Sapiens; identical to SEQ ID NO: 52054
  misc_feature (90)..(90): n is a, c, g, or t
  misc_feature (800)..(800): n is a, c, g, or t

SEQ ID NO: 214201 - DNA, 955 bp, Homo Sapiens
ggtcagaaggagaaacagcaaaaaccgggagtaagtcccaggctcctgccccaaaccccttgaggaaaagagaaacaggtgttgggcaggaagaacagcaccaacagggaggagagagaggggattgggtcccggctctaccacggaccagtcactttccccaggactcagttttgtcacctgtataatgggggaagcacaatccttgcctgactccttccaagagcctcaattaggcttcggtgagagagtgggtatggaagagctttgcaaactgtaaagtgcagtacacacatgcaggctagctgtggccctggggcccaggcccagcggggctctgcggagtgggtacagtaagtgttggcaatgaaaacactgcttgaggctgagcctggccctttgagcaccctcaggtcctccacatctgttcctcctctcaggtgcccacaacttccctggcaccttttaccctgggtggctgaggcctgggaagatgaggcgctcctggcctgggctggccctgcctcccactctgaaccctctggtcacctctgctcctgatgatgatgaacaaatgcagacctggtggtggggagcagccgtgccctgcaccctcttttccctagtcatcaccctttccatgaggtcttgtgcgagtyacccccattcctgggtgagggttagaatgaccggtgtgtgtatttcttccccgcagcactccaagtggatgaagagcagctcctgcccgctgctggcagcctcaggcccaggggcctccaccccgcagaggcctgagccaagctcgccattcgccctgggctggatctcagctccggaagagacgtcgagaagaggctgccaaagagctggagggscacttcagagcagcscttgaagagaaggagagggagctcacaggaagtccagggcaggagargtatgaggcgcggcactc

SEQ ID NO: 214202 - DNA, 904 bp, Homo Sapiens
  misc_feature (773)..(773): n is a, c, g, or t
  misc_feature (776)..(777): n is a, c, g, or t
  misc_feature (785)..(785): n is a, c, g, or t
  misc_feature (812)..(813): n is a, c, g, or t
  misc_feature (857)..(857): n is a, c, g, or t
ataatgatctatttttttcctttttctttttatatattactggatccaactaattcattcatataaaattatttatgaagccatatagtataaatcaaaatgtttgtgtaaccaaaacaagcaccacattggatgtttggcaggcaaaaaaataaattaatttgattaaattatatgtaatctgataatatttggtctgaaaaacatgctagtgtgtgtgtttataaataatgtaattgcaaagagctgtgatccagccagcctgctagaggtcaactcttctgctgcagcttttgggcatagaagtccctgcatgtttcacagcagcgctgataccaccgcatgtcctgacataggttcttttcacgtatcactcggcagtacactggccactgatctcccaggcacttgaaagtcagagcagccagtctgggtgatgttatggtatttacattaattttctcattgcagggttgaagatggcatggcctgtatgctgcaggtttttctgaggaaaaacattcatttccatgtcttcctgtgatcttatgcatgcattggattacacgggactgcattcctttgccacaggtaattgagcacttagaccagtcacccattcgccacacatagcattttgaataatcctcacagtcttcagcctccctgggtctggtagagaggacacacttctttcttgggttggtacatctaaacgtccgatgacgtatgcctttgccacacttgactgaacacttagaccacactttcgnctnncacacgtnatgcagtcctggccctcacacgctggnncagagcggcttgggcccatgcagtcctctctcggctctatcagngtccattgctcagtgttgggacaggccactgctgctctgatcctttc

SEQ ID NO: 214203 - DNA, 919 bp, Homo Sapiens; identical to SEQ ID NO: 53411
  misc_feature (39)..(39): n is a, c, g, or t
  misc_feature (597)..(597): n is a, c, g, or t
  misc_feature (679)..(679): n is a, c, g, or t
  misc_feature (701)..(701): n is a, c, g, or t
  misc_feature (750)..(750): n is a, c, g, or t
  misc_feature (764)..(764): n is a, c, g, or t
  misc_feature (769)..(769): n is a, c, g, or t
  misc_feature (771)..(771): n is a, c, g, or t
  misc_feature (822)..(822): n is a, c, g, or t
  misc_feature (871)..(872): n is a, c, g, or t
  misc_feature (894)..(894): n is a, c, g, or t
  misc_feature (918)..(918): n is a, c, g, or t

SEQ ID NO: 214204 - DNA, 907 bp, Homo Sapiens
ttgaggaaatattatttataagttaaaataattatagctataaaacatgaaactaattttactgttaaaattgtaaaagtactaaatatgaagaagctatacaaaataaatatatttgtaacacatacaacagacaaaatattggtttctagaatatgtttcaaaaccactacaaattaataaaatcaacagaaacattaactgaaattcatgagaaaattaacaggaatattcagtaaacatatgaaaacatattcaacctcagtaataatcagaaaaatttaaattactaccaagtaaattagtattttttacatattgattttaaaataaaatgtgtgataagactaagtgttggcaggttatgtagccacagacatcattacatacggccagagcgagtctaccctggtaatctccaccttagacaaataattataatctagcattgcaaaaaagaaataacacatatctaccagagatatacacaacaatttcataccagcattgttagtaattagaagaattataagcaatctatgttgcaacagtaggaaaatggataaatgagctgtagtatatgtataaaagagtcaaaacagagaaaatgaatgaactagaactacatctttaacatatatgaatacttttcaaaagaaaaaattttgcttgagatatttacaatatttttctatttattcaaggtttataccagcgaaacaatttctttattggtgccatggattcctgttgttgctaggatttttttctcatatagtttaaagggctttatttgtcgttccaacagttctataatatttaaagctcttccattagttttcgaagggttgagtttatagctagtgtttttatttgtgtgtgaataaggctaaatacgcgtgcaaat

SEQ ID NO: 214205 - DNA, 967 bp, Homo Sapiens; identical to SEQ ID NO: 51097
  misc_feature (16)..(16): n is a, c, g, or t

SEQ ID NO: 214206 - DNA, 1000 bp, Homo Sapiens
attattgttccttcagtaaaatttaaatattcccacagttctcaatcaaatatgctttttcagttttccaacagctgttatttttcttcttttggtctattcagtagaaagtgaactatctgaagtagaacatcatcattaaaacctttcacatcattatcctcaattgtttcataaagaggcttactttgtgtaccccaacatatatttttacgagggttattttgatcagcttgtgtagtcagtgccaaagtatttagctggtagcagaaaaaggaaaagtattttccatctgtgatcacagcctgggagacaaaaggtcgagtaacatctgcttcactccagaatccttgatacatagcttgtgctccagtccaagcaaaaaggcttgcaatagcattagctctaaaaacaacttctatctgatcagcacagttttgtctcaaaagcctttcccttcttaatttgtcaggtaacagatgaaactgggtgtgaccgtaacagcaaggatctgcagtttttgagccaacaaatatgtggttttcatactgccgtttgaataatggaagtttgtctggtttacattttatagtggggatttctataggaacagaataatccaatggcacaaactctgcgagttgcttggatattcgaatctggttgtttggtttatcatctatctggtatcgcaagtbatcaattcgacctcttcgatgaccacgaggaataatttcttcaccacgcacccagtaaaaatgaactgggcatctataatcgagggcggcasggccagggccgggttgtgtgggctgaggaggccacgagggttgacaccagctgatccaggaagggcaaagatatgactcgctctcctcgtaacggtgcacgcgccgcctgcgccgcagtaagaagtgctcctgcagcaggcagtcgcaggcgaccgcacgcagcgccgcgaggtcmagcgcaggttcaggttcgggttcgggstcgggct

SEQ ID NO: 214207 - DNA, 898 bp, Homo Sapiens
  misc_feature (709)..(709): n is a, c, g, or t
  misc_feature (717)..(717): n is a, c, g, or t
  misc_feature (728)..(728): n is a, c, g, or t
  misc_feature (898)..(898): n is a, c, g, or t
gagttgttttttcttgacttaatatttttgcacttttttattttttgttcatttctttctatgtatttcaacccttccaactgcagctgatccagcttttcatttcgactttcatctagaggtatgttttcacacattacaggattgaatctaaaataggtgtcaggaggtaacaggccatcaagcattatatggacttcttctgtatctgtagcactgttgataacattagaaagtttagttttcaagcttgtgtatgttaccgtgtttctcacatcactctcataacgtccagtgcccagggatactatgcactctaacggcacatctggccaaagacatttacactcatgcatagctaatgccgaagggttattcagaagcaaacctccatcttgatgaagatcatttcccaatgcatattctgcaaagtagcctggagcagcagatgaggctctaatggcctgccacattttatactgacagcctcccaaataatgagagttgattccaggaaaatgaccatagtttctgaacacaaaagctttgggtgttatccctctatttactatggtacttacagcagctaccttaggacatgtggggtttcttgctgtttcatcatcagtgcagatcccatcctatccttaagaatgttttcccatgtttgactgtcataaaatgcatggctccaactcatttttactgntccaacantgacattttgntgaaataccatctgatcctaattttcgaataagttcctcacattcatccaagggcatatgaaacaacccccacatgaaagctatatgggacctgggctaaccacaaaggtatcaaagagctgatgaacggcttttgataaggtcactattttggagggtttgaaagcacn

SEQ ID NO: 214208 - DNA, 917 bp, Homo Sapiens; identical to SEQ ID NO: 44350
  misc_feature (728)..(728): n is a, c, g, or t
  misc_feature (762)..(762): n is a, c, g, or t
  misc_feature (845)..(845): n is a, c, g, or t
  misc_feature (859)..(859): n is a, c, g, or t
  misc_feature (865)..(865): n is a, c, g, or t

SEQ ID NO: 214209 - DNA, 544 bp, Homo Sapiens
gtaatgacagggtcttgctgtgttgcccaggctggtcttgaattcctggtctcaagggatccaaggaatcctcccacttcggcctaccaaagtgctgagatttcaggcgtgactactgcacccagccagtcacttacaagtgtgtctgatttccacatatttgtgagtttcccaacttttcattgttttctaacttcatcccatgtggtcagagggcatgctttgcatgatttcagtctacttatatttattaaggcttgttttatgctttaacttatgacctattttggagatgtttcatatgcactcgagaagaatatgtattctgatgttgggtggaaagttctatagatgtcttttaggtcaatttgccttataatgttgttcaagtcttctatttcctggtttatcttctgtctaggtgctctattattgaaaaaggggtattgaatattccaactctttttatggacttatctgtttctcctttcctttcagtttttgcttcatgtatttagggctctactgttagatgcatatatat

SEQ ID NO: 214210 - DNA, 533 bp, Homo Sapiens; identical to SEQ ID NO: 61981

SEQ ID NO: 214211 - DNA, 943 bp, Homo Sapiens
  misc_feature (869)..(869): n is a, c, g, or t
cgaccgacgaagatagaatttttttctcctggttttgggacagcggcaatcatggcgccacccgtgagatactgcatccccggcgaacgtctgtgtaacttggaggagggcagcccgggcagcggcacctacacccgccacggctacatcttttcgtcgcttgccggctgtctgatgaagagcagcgagaatggcgcgcttccagtggtgtctgtagtgagagaaacagagtcccagttactgccagatgtgggagctattgtaacctgtaaggtctctagcatcaattcacgctttgccaaagtacacatcctgtatgtggggtccatgcctcttaagaactcttttcgaggaactatccgcaaggaagatgtccgagcaactgaaaaagacaaggttgaaatttataagagtttccgcccaggtgacattgtcttggccaaagtgatctccttaggtgatgcacagtccaactacctgctaaccaccgccgagaacgagctgggagtggtggtagcccacagtgagtcaggtatccagatggttcccatcagctggtgtgagatgcagtgccctaagacccacactaaagaattccggaaagtagcccgagtacaacccgaattcttgcagacctaagaagccactttttaccctatggaagggggtaagctgttcctgagtataacaccaagatgctgctgtctttattcaaacacctggcgtcggccaacagccacttccagaaaaatcttccagtttacgctgtagatggaacatgtttctgtgaacctatcagtggatttcattctcttgagtaataaatcttatcttttcaaggcaaaaaaaaaaaaaaaacccagctttcnttgtacaaagtgggaatttttaaagaaaagcatgcgtttatacaaatttggttgcaaccgaaaaaggttcacct

SEQ ID NO: 214212 - DNA, 488 bp, Homo Sapiens; identical to SEQ ID NO: 61301

SEQ ID NO: 214213 - DNA, 499 bp, Homo Sapiens
aaaaggtctctttttacagtaacaaagtcactccagtcaatccctttgactcacctacatgaaaaatttggatgtctgtaaaagtcttatgctaacactagtgagaaaaactcgtgcatctcttaaatttgtgtagccttcttaggacagattttgtttgttggttggttggtttgttggtttcaaatgaacaggtcctaatcatcaacagatctgcacagagtattgaacattacatagataattcaaagatatgctaatgagaaagagggaaactaaaagtacttatttcttcatgaaaccaaataaaacttaatacatattctggatggtgaaagtagatggcatttggggaaatattcaggggatcagtgttactcagcttgaacaaatttccatttcagataaggtaatttattgattgatacgatgagttaacagatgtaaaagtagtctgaaaattttaaagcagaatatacaatgttatcgcctgtgttac

SEQ ID NO: 214214 - DNA, 416 bp, Homo Sapiens
tttttgcattatgcaaaataaagtttattgtattgtattcccagccaaacaacatgtaatctacagtaataaaaaatatatctcattttgggctcaaagcattaatccagttactgaaaagagaatacaagtggagcaaacaagagatgaagatcttgatacagactcattggactgaatttcccccttccccccattgatggaagaatgttccagattctaaattgaggacttcattattaatggcattactgtgttatgattaacaaatttcctgtaaggtacacactacatactaaggtcggccatcattcctgtttttttttttttttttttttttaaccaagcttaaaatgaagctttgtgtttgaaagtaataacaagcccagacgaagatgggggttgtacattattca

SEQ ID NO: 214215 - DNA, 471 bp, Homo Sapiens; identical to SEQ ID NO: 60252

SEQ ID NO: 214216 - DNA, 919 bp, Homo Sapiens
  misc_feature (610)..(610): n is a, c, g, or t
tatttatgcctatctgattttttaaaaaaataagggattgtgccagcctctaatatcacaatccttacttaaaatctaattgaataatcactatcattctgcaatcttaatttagttaaagactttcaaaacacagcagcatgacttacagatgtctttgagtcatttatttaatcagtggtaaaattgattcaaaggttgaacccaagaatactataagaatgaagttctgtgctgcatagtaacaattttaacgtgattatcttaatgcagttaactgtatttatattttcttgcttggtgcaagttaaatgctttttttttattgctggaaattttagatatattcagtctgtctcaaaaagtgaaagacaggtgcatttagggattcaagtatgtgaaaaaatgccagggtctttttatgtttaatgccactggagatgaaaagctaaaaggaaaatcccttaaatactgtacaatctttttagacaacagttaggctagcctttaatacctctgttaaaaatcacacacacacatccccaaaaaagagctgccagacacaatcttagttgtaaccacagaatataccaaagttttcatatagcanaatgttactatatgactaccgaaatttttttaaaaaggaattattaccactactttctactgcattaactaccttctctttttgataatgtactgcatattatataaacttcttatattgcacccccaaactttttattaaaaagaaaatcttgcagaatatcattttctgtgattccattaaccccctgatcctacaccataagcagtacagaaagccaaacactaatttctttaaatatagaaaatgttgtgcccatgcaaattagagattgtatcaaaatatcagctatcctaaaaaaaagaaaga

SEQ ID NO: 214217 - DNA, 900 bp, Homo Sapiens
ttttaacggctaaaaaatttaatgtgcatagaaaaactaccattcccaagtaaactcagtctttcagatattattcaggattaaacaaggccgccccgaggttaatccacttacacagaccacgtgtgagttacagccggggtattcaggcatgtccgtgaatattcccaacttgtagtaacagaaccttcaaatacgtcctctcaagcatggacagtagcctgggtgtcaccatgcctcttctgcgggatggatgggaaggtgaatatggattacgtgtatggattctcacgctgcatttgtatgcaccttgcaggaagattcgggaattcaagctgctgcctggaagcaagatctaagcattgcttcttacctagcggggcactccaatgccacagacagggcagaacacgacttttaccccctccttctgcagcatgattttaagagacaaaacttataaggctgtttaaaatggtaaatcatgttagagacgttctttttctttccttggctctgtgaagagatgagtagttaccccgcctcacacctgaagcgtactggcttctgtgggtagcagtcttacttgtctactattcgttctgaggagtcttgtctttctggatgaagcttttaatctggtgatcacatacatgattggaactggctgtgcaaatgaactgataggaattttgcatacatgagcgaaaaatgtatccttacgaggcaccttacatcagtattgcccctggagctgggaagggtgcttcctcgcatgctgagtttgtttagaacaaaattcagaaaaaatcaggtttcactttaccttaacacgctcttaaactttctggacattaaagagagatttttgaaggccttgaaaaacattttaatttttct

SEQ ID NO: 214218 - DNA, 873 bp, Homo Sapiens
  misc_feature (862)..(862): n is a, c, g, or t
aagatactttttacaattaaaaacacatttctaaaaaaatgatttttgtctaatacatttggaattggaatttgcttctatcacagaccagtcaccagtcctcagtccataaaatcagcacttccagaggaaggttccaggcatcacagtgcacatcgagaaatatcagactttaaagtgctctgaaaatgaattgattcaaagaaataatatggaatatattaactgctgaattctactggtgacagaatgagttgaggctactataatttagaataaccttaaaaacagatacattttaaaaagtgttccaaaagaaaaatactgtacttgaaggtattctcgcagtgctgaaggctcacactagtgtatttccagaggtgacagttttaatagtcatattggagacgcttagtgacctgtgagccatgggttgctcccctaagctacactgcaataaactctaagctcctctagaagtaatatctatttacatgtgaagatttcaaattctcaggtatacatgagtgcactgtcagaagatgattaggcccagactctgagggtatgatcccatgatccagagcagaaagcagtcccatcgggggaaactcgtagagtgctaacgcggttttcatgtccaaacaggatggagacccgggaccctttgagaacatcccagacgttgatagtgtaatcattgtatccagcaaacagcaggcgaccactgagggagaagtccacgctggatgctccaaatatgatgctttctttggaatagatggcaacttccctatctgcccgcaggtcatagaggcgacacgtagcgtcatctgaccctgaagcaaagcatctccactgnggtagtaccgc

SEQ ID NO: 214219 - DNA, 1000 bp, Homo Sapiens
cagtgaagacagaaacccctcccaaagatgccaccaatttagcaaactaggaatcatttctcttacggaactaaaactaaacaccaccagagggcaccaagtgcaagtttgtatcagaagtagatccaagtagaaacctagaaattctctgaaaccaccaaactgttccatccactctcaaaattctcccctccacttgagagagtatttctgggctgcttgtctcaccctgccctccaaggtgccacatctagtgcatgagagtttttgcagccaactctccatttctcaagacccctggtccactccaggtgggatccccagagggaggctgtgcaggtgtgcaagaacaataaattaacacaacagcctgtcaggctccctttgggcacccacctggccttgtgaggacagcacggtgaagacacacatgaggcctcacttggtccctgcccccgtttccccaggcaggtctcaggaagtgcagatgggtttctgggctccgtgtcttacagagcaagagcagcatgaggcctcagtagatgtggcttgccacgtggcctccaccagcttgtctgatgcaggtacctcctagaacctgctcactgtggttcatttaccctcttcctcctgtcccccatatctctgggccatctgaccaccaaaagctggaggaatgttccagaacacacacatcaaactcagattggccagagtgaaaattaactatgaatgtttctactcaaaatccctcaaagcatctatccactgacttcattttagagacaaataaatctaactcccaggctgaggttcagacatgagagggctgtctagggtgggcaagaggagggtctatgtaccttccccaaccaccccactaaactcagccagattttgtttgatttttgctttagttttagttttttttttttttgggagggkatctgatcaaaagccmtcctctctctgatttggkggayaaaamtcygtgcccaag

SEQ ID NO: 214220 - DNA, 920 bp, Homo Sapiens; identical to SEQ ID NO: 49762
  misc_feature (12)..(12): n is a, c, g, or t
  misc_feature (710)..(710): n is a, c, g, or t

SEQ ID NO: 214221 - DNA, 913 bp, Homo Sapiens
acaaagaacacctttattcccttgacagtttctgtacagcgacaccaggctgtgcaaagcccagtgtcgtcttcactgagcacattccccaggacgcctggtgcagccctcctctgccccaggccccaactagccacccctgtgcccactagcaggccctgtgccttcacagggatgaagccctggcactgagaatgcctgggaggcaccgtttgctggggagcagagggactgacctttggcttctttgtggctggaggtgttccaggcctggtgagggggtcccatactgttctctgctgagccctctgcacactttgggggatcctggctggcggtggtaggtgggccggagactcagttgtccgtcagctggccatgtccccattttatggacaggcagcctgaggcccagaggcggaaggatttctccttgccacagctgcatcacacttgaactgtccagacctccaccgctggcctgtttgctccccaccctagtcccgcaggctgatatggtgcctccagcagactccatggcttcccggagggtgcagggtccccagttcaccctccagcaggagtggcagcagctggggtacccctagcagtggcatgttgagaagctggggtatgcagaagatccagttctgggacaccaggaggcacaccaaggtttcctctgtccctaacacagaccagagggggtggcccaccacccccccgggttggaggatgtgtggagttaaaaagccccttggggggccccttggttggccctaagagaccccgcgtgaccaaccctggaggcacggaacccaatgaccggggccgggaaccccaaaaggggccgggggaggtctgccctacatttctcggaaataaagcggcgatatggccctcaccccgggcc

SEQ ID NO: 214222 - DNA, 906 bp, Homo Sapiens
  misc_feature (641)..(641): n is a, c, g, or t
agcataccaacaatatctttattaccctgtaatatacttaaagagcaggggtccccagttggttaaacattgaaaacagtgggagagcttcagaatagagaaaaatgactgtgcctcacccctcacttactgagtcagaatctgcagagagggaagtgctgagagatgtctttttaaaaagctctccaactctccaggtgcttctgtccaccagccagatttgggcaccggtgctgcccagcatgccccaggcttcagggtatgggagtcgccctgggcttgggtcaggctggggctctctcattcaccaggtgtggggaggggcttgagcctgcatttccagcaaattcccaggtggggctgaggttgctgatctgcagtgctccatctctgggtgtgtacctacacacccgtcacctttgttgtactgggctcaggtataagttgcagggtgcaccgtgtacccccgtagccctgccctactccatgctgcccccagtctcaagtggtgcttgaacttgccttcaccaaggcagttctcgtctcagagttgaaccctccctgagggcccccaacagccctctccaggccttgtatcagtaggaaatgaaaatgcattaattgggaggggtttatctggnggtcaaaggctcagggagatcattctttttattgccaaggaccaagaaacaaagtgtagaaatgctatacacaatggtcatgagctacaaggtaagaaatggggtgcaaggggagacggtggtaacccacagcactatttttgaacgaaactcaggttttccattctaacactttgaaccaagggaaagaacgccagccctttttcactagagcctggaacagaaatggcaaaggggacctgtgttttatcagccccccacaggg

SEQ ID NO: 214223 - DNA, 919 bp, Homo Sapiens
  misc_feature (578)..(578): n is a, c, g, or t
  misc_feature (870)..(870): n is a, c, g, or t
  misc_feature (878)..(878): n is a, c, g, or t
tcatataaatatttattgagcacctattagcaaggcactgtgtgagatacaaagacctgtaagtcacacctccaagtgcttacaatctagttgagaggataatacatatacataaattataaaacaaacaaaccatcgagcataatggtaaagagaatagattttgaaggtggacctgtcttcaagacctggcatcaccttttaccagctggttcaccttgggcaagtgatttaatctctctaaacctcagggtgctcatctggagatgcagatggtaacagtgcctacttcatatggttggtgacaggatcaattaatctacttcctgtaaaacccttagctgagtctttacctcattgcaggtgctcagtaagtgctagctactagcagtggaagtaagaggtctaaaagctgggacacaagagaacaagattagtgccccaaaatgctccaagagagggggactaacagccatcaaaacaaatgttctgaaaaaaaaaaatagtactgctgtgatatcattctgcctttccctcctgttgcagcctccagtttcttaaagtgcagtgatacctgnggcctaggttctcagacaagaggtgtgtctcctcctaacatctatcctattgtctgacaaacctcttcaaaattttgtatctttagagtcatttccatggcctcccctacagttctgtaacacagcaggaagggagtgcttattaaacactctggcgcagaagcaggacaggacaacggcagccagagtgggtagaatgagcaaatggcagctttaagacaggcgagatctatctcaaatttgtatgggaagtccttgtcctaccccagcttttgcccaactcagtctattnccctgttngcgtaacgccgttgatgttgaataacagaaagatttggaat

SEQ ID NO: 214224 - DNA, 907 bp, Homo Sapiens
  misc_feature (705)..(705): n is a, c, g, or t
  misc_feature (735)..(735): n is a, c, g, or t
  misc_feature (771)..(771): n is a, c, g, or t
  misc_feature (840)..(840): n is a, c, g, or t
  misc_feature (857)..(857): n is a, c, g, or t
  misc_feature (895)..(895): n is a, c, g, or t
gattttataccaagggctccatcctacaaataaacaaaatcctatcctcttctttcatattttttttcttacatttcttatacaaataacagaatgcttcattttattcacttcaataggacaaagtccttaaagaaagactgaaaagagctgataatcaaaatcccaaattttatgcttatttttgttttagtgctatcaattttctgacatattaacataggcaggaaaacattctcagtaaattgagcatttgagtctacaaatgtcttgaagcactctggcaagttacatgtatcccatgttgcttttggtttcccatctcttctttgcttcaaacccccatgcaagtttcttcttttttcgggcagcctgtgaattttcaacctcctttttggcttttacaaagttgtggcaggcaactgctttggcaatttttacaccaagctctcgagtagctagctggttgctgagttcctcagccttctcaatattccactcctccacagcctggtctatcctcttttcaaggcctgacttctcaacttttttccttttaacaggcgggtcaaatctatcattgactccaaaatactgagtaagctctttccactgggtttcatttgaggacggttcactatgtaattctttttcattcttcaatttatcttttctggagcgttttcttcttttccctctgaatcnttgaggtgtgcttttctgttcagaatgttntttatgcaattcttgaaatttattccacatatctantgggaattccagaaggacactcttcataggcatttacatttgactctgtttcagtttttggttcatctngtgagaatctatgattnctgtttttctgaagctctcatcctctttatcttcctgnaagttaaagcca

SEQ ID NO: 214225 - DNA, 926 bp, Homo Sapiens
  misc_feature (853)..(853): n is a, c, g, or t
ttttacaaacttttattacaaacctcgcgtagagccaactctaacccgactaacagcaaaaacagcattgctaacaagatcaaggatggaggtgcagacccaataaagaccgtctcttaaaaaaaggactgggaaaaatatatatatatatatctgcatgagtacttcttaaaaaactaaaactttccagtgttgcaggaaaaaatatcccaaagtgatttcagtcggttaaaaaaaacagtacttggcagtctgtgctgccttaaaaaccccaactggacataaccctaggagaaaatcaccccaccccataaagacaaaattcccttttctcctcttccttgttcaaattccactgcttattccaccaacacccaaggaataacaagacccagcttacttctctcggtctcttatctgataaagctcacagcaatcttaacctctactacaatcaggaaattgagccctaatttctgggccagattctggaaagttgcaaaacatccttatgctgcgaggggcctgaggactccttcaaagatcaagggggcagtggaactggcagagactggcatgcctgccctgcaaggctgagacaaggggacctttctaagcaaaaacaccccaacatctgtcactgaaagtctaaccaggcaaaaccaaggagcagcaggcgccaaactagggctgtgcctgaaaggtgcacatctcccctgtttcaccataaaggcaagggagataaagagagccaactgagtatttgacctcatctgtcttctgcatattttaggcccaagccatgttgcagagaaagacatttggtcaaagggtagccctttgtggttggggntgggaacagctgcctttcctggacagccttgttcatggttgctttctgaaagcttttccccctttagccgagt

SEQ ID NO: 214226 - DNA, 939 bp, Homo Sapiens
  misc_feature (32)..(32): n is a, c, g, or t
  misc_feature (595)..(595): n is a, c, g, or t
  misc_feature (663)..(663): n is a, c, g, or t
atacaacggtttttaatggaataaggatatanttaaggaatttattattctaaacaaacaatttaaataaattttggtatttactaacttaagtattcaagaacctggtttgaagagtccaacagactgaaagtctgcttttcaagagaactatgatcgtctatcaatggagagattttcgtatttctatattctaatagttcacgatccttgcttgatgtcagtaattcattatcgactataccaatagttgcatcttccaccagaatatttgcttgatatgctccaatcggaatttcaggcaatccaatgtagtcatgatctgccactactgaaccttgcaagagataaagactttcttgttcactggattctcttatgtagggcttaaggtgggacattttgataggtcttttcagtctaaccccagtgttgtctctcaggacagcacatccactttctgtaatatagtctatgacacaaggaccaacccattcagactgaaaacgaccatccttccaccaatttttcctttgtcttaaaacttcatgacccatttttaaatgaaatggatttacttgtttgggtttctttntaacaatgatcttgcttttatttagttcatccaaattgttgttctccatcttggcccagtgaaggtgncttattctccattattttatcagcttctttatttgcatctagaatgttggcaaacatactgggattattacccatccactttcatgaaagactttctggaaggcctcaaggcatattaaggatttccgacttaaccatttggaaaatattgggggtttttttaggtgggttcccagcggagtttcctttggagggccatgtgaaccagcttgataggggaatcattccccattggttcgggctggctcaccaccaattgtttcggaaacagaaaag

SEQ ID NO: 214227 - DNA, 889 bp, Homo Sapiens
  misc_feature (58)..(58): n is a, c, g, or t
ttwagctkggsttggscataagktgtgckctgaagtkaaaagaagcagtaagagaatnaaagtctcctcttggcatacggakcagagctggagtgacagggaggctattccacttagagggagttctggagtcccccttattactcatggtaatgtctttttgccttctggaagaaatcaaaaaggttgcccaggaacttacaaaggaaagggtagaaaaaatgaatacttgtatgggctttactctttaattaaaaacatgtatcacttttgtcgcatgaagatgtcttcgaacttttaaaaacacgctgggcttcatcagatctttcaggtatatggattttttctcttttcttggtctgttcactctcttccctctccattgtgttggttccacatttataagagttgcgaggccgcttcttcttcttccatttccatagaattagacagaaaaccatcacacatataataactgttggaagtacagctgtaatccaaggaatgtggtctgggggaggctgagggtcctcaagctctatagagaaatgtgaagataawwgthkcgtcttgtcagtgtccagaatacagaagatggtcatattgctcgtaacatcagggaatgaaacagacaagctgatggaaacgtcgtacagttctgtgacattatcttgagatttctgcataataccatcatactcgatagtagaattcttggttcttagcaaaacactcatcttcttaggttctgggtaaccgtgtatagatgagcaggtcaaatttatgtacacattttctgttatattagaaattggtactatttcaggttgactgaagtkagcaagcactgacagttcagaattcatctggtggatgcgaattattyctg

SEQ ID NO: 214228 - DNA, 926 bp, Homo Sapiens; identical to SEQ ID NO: 39943
  misc_feature (690)..(690): n is a, c, g, or t

SEQ ID NO: 214229 - DNA, 901 bp, Homo Sapiens
gctgcactgtttattccagatagaggttggaaacccaactgtatatagactgaaagcaaaacaaatacacaactgaacacaatatatgcagttatccagcaagacaggcaacgcaacacaatatatgcagttattgacaagacaggtgcacaggcacagcacacagagtgagatgaaggcagcctagcgagcagaggctctgcagcacggagggctgggaaggccatcgctcgagttaatccaatcccagtgcttcaggacaccttgggccacgttgacatctctcttttcctgggaggagccctagggtacagctgcatggttccatggagtttcaggcgtctgccagctctgtttcactgtttgtggttaaactgctttctccttttttaaaaaaaattttttgccaggtgcagtggctcacgcctataatcccagcattttgggaggctgaggtggttggatcacctgaggtcagaaattccagcctgaccggcccgatcaacatggcgaaacccgtctcaactaagaatacaattagccaggcgcggtggcgcgcgcctgtaatcccagctactccagaggctgaggcaggagaatcgcttgaacccaggaggcggaggttgctgtgagccgagatcacgccactgaactccagcctgggtgacaaagtgagactctgtctcaaaaaaaaaaaaaaaatttgtagagacagagtctcccatgtagaaactcctggactccagcattcctcccaccttggcctcccagtgtgcttgggatttaggggcacgagccaccgtgcctggcctttcttttctttttaagggcaagctcatgccccacagtgccagtgccataatggaagagggcctccattaccctgggacacaaagggtct

SEQ ID NO: 214230 - DNA, 941 bp, Homo Sapiens
  misc_feature (15)..(15): n is a, c, g, or t
  misc_feature (31)..(31): n is a, c, g, or t
  misc_feature (44)..(44): n is a, c, g, or t
ctgcgcagacacttncctcttaatgttctanacaaatacacatnctccaggtcacggggtctagggagaaaacacacacacacacacacacacacacacacacacacacacacacggattccccatcaaggggacatttgcagtttccaaaccttgaagatactgaagggaccagaaagttcctttgagtggctggtcacccaaagctcccggtcctccacccactgccctttggagggactcaaaccttgggaggagaaggctgagcttcctgtgggcccctcccacccacacctgagccagagagaagactgcagcaaagacatccaaagccaacggcaagggaagcgtcagcgggggcagaggagccagccctgtccttggctcacccagcttccaccatacaggaacccaagaccccagccttgcttccacagagaactggcaggggtcccctggcctggccatcacagggactcacatgggagccttttaaaactccagatggtggctgagcacagtgattcatgcctgtcatcccagcactttgggaggccgaggccggtggatcacttgaggccaggagttcgagaccctcctgggcaacatggtgaacccgtctctactaaaaatacaaaaattagctgggtatggtgatacgcgcctgtaatcccagctactcaggaggctgaggcgggagaatcgcttgaaccccggaggcgaggctgcagtgagccaaattggtccacttcactccagcttgggcaacaaaacaagactttgtctttggaaaaaaaaaaatacagatggcccggctttgcctcttgaattggtctggcccagatattcttggggtcagtcttaaaaagtctgcattcttaaacccgggttttcaaaataactatttggtttgggaaaattttaaaaaaaagattcccctt

SEQ ID NO: 214231 - DNA, 893 bp, Homo Sapiens
taaaagattttttatatttaatttctgaggtaaaatacttttttctttcaacttccataacaaaatacagagctatcagatacccctggaaaaaatatgtatattatacatatatttctataacattacatcatatatatataatatatatgcaaaaatttgaagactttatagaaagcggaacatctaaaaggcactgcacaatggagttaagattacttacattttatgtacatatacacactttactctgctcaagcaggtaactagtgaagtcacctttcacatgtaaatgtctcattcacaaatccctgcatcacaattctataactcaaagaatgcttaaatatctcaaaacaaattaactggtaactttttatccccctaagaagaaaccaagaatggaacagttcttgaaagattgaatcaaagttgtcttctaaacaaaataaaaatgtacgttccattactgtttacaaaacaaaaagcacaaacataattatggaataaataaaaaacaagggacaaacagccaactgactctacccacttggtgagaagtgatatacttcaactatttttttaatgcttctgaaagtttcttggcccacagaggactagggtgcaatcattccctgtgttagtgagttgggtttaatgcagcttcaaaattagggtaaagggacttggctgaaatgtttacatataacatttcactcctacccattcttcaggataaaaggtgagcctcacacggttggatgccattaaaagattcttactgtttttttttttctatagactaaaaaagcaacattttacaccgaataacactcttgactaaaggcaatttcaataggttccattatttatcaaaattttaaaacatttgt

SEQ ID NO: 214232 - DNA, 880 bp, Homo Sapiens
ttaaggtgaaataccctatgtttttattataaaaaacatgtgacacttataataaacccagtaaggagcacatacaatttgccctgggttcccattttctgagcgatctgtgtttgcttggggtggaggcaccgggaggtgtggccacgtggcttcataaagctcagctgcggttctccgtggccacagtgactctgctccgggtacccagtccccgactccttggcctcccaggggccatcccgggggtctcggaaggcacagcctcggttagctttgacttcttggtgtggctgaaactcagcctgtacaggagagctgccattgctgccgcggggcctgcccaggtgtgagcacacaagctcacccgggcccaccctgtgccctggagggcggctctggcggctgcacccatgtccaagtgacaggcatcacctccttgtgccccagagtttcctctaagtccggccaggccaccgtcccttctgatccggataaccagcgaatactctaattccgttaggctaaaaaaaacctcactctggtcagcttggctcccacaagtctaagggctcagggtgtctgtccgcccctgcccttcctcctgtgcacctgaaggtgcccccccatgtggccaaagcccccttgcctgaccaggcctgacacccaccgtgtcctgagccaccctctggaggaggcggcatgcagtttcatatgcgtctaacggcctccatccaacaggacaggccgggagaacggcggacggccctggccgtgtggcaagggcctgcttccctcattttaaacgcgcctaccgggtcactatagcaaacaaaatttaggaagaaagggggcccgggccacgctttccgggggtctt

SEQ ID NO: 214233 - DNA, 991 bp, Homo Sapiens
  misc_feature (35)..(35): n is a, c, g, or t
tttattaaaacartccttacaacatatttaaaatngcatgttccacagtcaaatatttaagaaaaaaaatctatatacaattattggcacacaaatttaagaacataattaaaaccaagccagatatctctctgtatttatatatctatatacatatagatatatatccatacagatagatatatcttcaaattcatgtcagtgacctggaatacctgagatttcaagttgttggttttccagatgggtacaaaacatttttcatccactttataaggacacggcagatccagaaagaataactttggttaataaatgctgtctcccaaagatcaaacagaagtcctcaatgggattaaggtttatcttcagaggcttcttccaagtgaaggttggtctgtgatgtaaggaatgattcccacgtagcaaggcactgttcataataatggatattctcctcagccatatctgtaaatgctaacttgatatcattttgcatattttgtttccatctctcccaatctgctttcagggcattattagcacattccactttatcttcaagttttccaatctcctctggaagcagatcagtatctgcctttttataggtcaaaacttcaactttggaatccagttctgcttgtatttggtctcttcttttcataacacccattaacatttcactataaagcacgtactcatgtacaacaggaagcagggcctctgagagtccagacatccgcttttcagtggccttacagcatctgtcaatgcagctggcaacatcctttagagtatcaaccagatcctcttctgacgctgaccacagaatatgaattgggccatattctttcatttcatcaaaatattccctttcttccttataaattctctgagatattttatctatcaaatttattttctggctaaatagttcaataaagttattcattttcatgaactcctctgggcggtttttaactcctct

SEQ ID NO: 214234 - DNA, 900 bp, Homo Sapiens
agataaatttaaatttaatattgttaaagagcactgttcaagataaactttcatgtatatcacagtatagcattatacaatgattttacgtaaaaatatttagaagcacagtgatgattttaagaagccataaaacattttaatgaaatataagaaagtcatgaatatttatgtggatatgtatgttgcaaatttaaggtaaatcaacataggataaacacagaagattacatacaaaccctacatattttatttctggtgaaacatataaacactttcctactatagtacaaaatcaattagttcctctaccagcactaaagacttgtcatctaaatatattcattttaggggagaaaaaaatgcttcacatttttctaaaataaagactgcaataaattagtgctttaaaaaatatatatatataggatatagatcctaagaaaataaaactaaagtataaaaaatgaatagcatttcttttcctgccatcatatcctttcttatctcattcctacatagaatgaatgataagctaaattatttagacatgtatggtgactgaaagcaatgtcttcaaggaaacagcttcttgtttagcctcttactctaccatacttagagtaaaaatcaaaggatattttagaaatatcttgtaactattgttgtagcaataatctgtcttgttagaacaacacaataaaaatgacctagagaattccatgaacaatgatacttggattacaagagagctaaaaatcagaggctattcctgtgtgcaaactatttttaccagtctaaatactatatggtttaccactgaacacccagtttgactgaagtgaacatttgctactatcagtaaaaactccctctcttacaggatggcagaaatataga

SEQ ID NO: 214235 - DNA, 423 bp, Homo Sapiens
ttttttgtttgcttcctctttattgaattgcttcaaggcagggttggagacagggtatgggtccaatctcaggatctgggcattgagaatgacattcttggccgcttcctcagacatcatcagatgatgtttccttagtcttcatgtccttgaccttattccttatctgtgaggagtggttcaggctctcggagaggggctgatctcgcgtttccggcagcagggaggagagggaaaaggccacgatggctaagacgcagcagagaaagatgggcaggagggagggggtctggctgatgattgtcagggacaagatggctccagcaccgaggccagagacaccagccccagacctgtcgccctgagcacagtggggaggagctcagcgttgtagaggaagaacacagtgacagtggcggccag

SEQ ID NO: 214236 - DNA, 512 bp, Homo Sapiens
acaactcacacaactttccaaattaaaatcagaaataattttcctctcacacttactatgatactaaggaagttcagctacacttgttaggtaggtaacccaaacctcacagtagtggcaataaaatcttcctcattttttctgttaacatttagactttaacactgataaagcgatatccgttcatgggagagaggcacacctactaccattaaggggactaagacgaaaattatcaatgcatttgtgatccaaaaggagaagtatttggctaagaagaaaaggagtattttatatagactttccagagtagctacctgcaactggagtcgggcaaaaaaactaagagtgcggcaaaaaatttatcttcttaaatattacaggtatggtatgaggtcttttgaggtacaaattgctgatagaaaaaaaaaatagccaaaaccttctaatacagacaaaatgtagtagagctctggcctgttgttatgggttctgactttggaaagtcactt

SEQ ID NO: 214237 - DNA, 549 bp, Homo Sapiens; identical to SEQ ID NO: 61922

SEQ ID NO: 214238 - DNA, 549 bp, Homo Sapiens
ttttttttcttttaaaaatttttttatttttaacaatggtaatatgcaaataacataactgaataatctttttgaatggaagttcttgatctcgatactaagcagattttccttagcatgtctacaggaatttagtgtcaggtcagagttatggtttcaaaaaattaggatttctgtaaacaaaggcctgcacttaaaccttaaaatttattgactgacatgagtggtataactagtgtatatatcaagagttaacatttttaaattggtgtgcaagaagcctgattcaaagtagctcacatggtaacatttattgtaatactttgagatatttagtaataaatattacaaatgtataagtcttctaagacccaaaatgtataccttaagaaacattttggctaggcatggtggctcacacccataatcccagcacttctggaggccaaggtgggaggatcacttgaattcagcagttcaggaccagcccgggcaacatggcaagagcctgtctctttagggacttttttgaacagcagaaatcatatc

SEQ ID NO: 214239 - DNA, 792 bp, Homo Sapiens; identical to SEQ ID NO: 46383
  misc_feature (585)..(585): n is a, c, g, or t
  misc_feature (641)..(641): n is a, c, g, or t

SEQ ID NO: 214240 - DNA, 787 bp, Homo Sapiens; identical to SEQ ID NO: 42873

SEQ ID NO: 214241 - DNA, 769 bp, Homo Sapiens; identical to SEQ ID NO: 43655
  misc_feature (613)..(613): n is a, c, g, or t

SEQ ID NO: 214242 - DNA, 742 bp, Homo Sapiens; identical to SEQ ID NO: 53513
  misc_feature (663)..(663): n is a, c, g, or t

SEQ ID NO: 214243 - DNA, 573 bp, Homo Sapiens
  misc_feature (573)..(573): n is a, c, g, or t
gggatataagacaagattgcatcattctgattaagttgcagcattttagttttatctgataggcctgtattgagtaatcagtagctatgtgcaaatattaagtcaacttaattaccagacccagaaggccagaggtaatcaaagagtactttcggaagatgaaatatttataatgagttatggaaacaatgttttagaaatgtttttcttggtgtaatttaatgcagatttttacctcaattttgttaaaaaacttgataatttgatccctccatctatttaatatttaatattttcagattctagagtatttaaaatttaaacacaattataaaattaattataattcctacttatgttagctatgatttagggccaaaactaccctggttttgtcttgcaacttgaaacattgtgtattttaaactatataatttgggaacattattttatagactgtggataaccaaatataagatttgtgatttttaatgcttcatttgtgtaaaaatcatttgtatattctatttatagtatgcattttctagctcattaaagtacagaaaaacctcn

SEQ ID NO: 214244 - DNA, 736 bp, Homo Sapiens; identical to SEQ ID NO: 41739
  misc_feature (734)..(734): n is a, c, g, or t
  misc_feature (736)..(736): n is a, c, g, or t

SEQ ID NO: 214245 - DNA, 762 bp, Homo Sapiens; identical to SEQ ID NO: 51055

SEQ ID NO: 214246 - DNA, 567 bp, Homo Sapiens; identical to SEQ ID NO: 54904
  misc_feature (567)..(567): n is a, c, g, or t

SEQ ID NO: 214247 - DNA, 746 bp, Homo Sapiens; identical to SEQ ID NO: 40588

SEQ ID NO: 214248 - DNA, 746 bp, Homo Sapiens
ggctctcaagctatagtttgttttcaaaaaggaaaaacaaaatagttttttactggattaaaaatgcttattttagaatcctcccctttttgaggctttttggtaataattgcttttttccagcccaggtgtggttttgtttgtttttttctatgtttgtgggttctttttcatctgtacaagaaattttgttatgcactactactttttgtattctagacagttttcaaaagttggcagatttttttttttgtttttaaggaaaaaggcatgctttctgactgacatgatcttttgcaatacctcaattttgaaatataggaaagaaaatgatattttctaagtaagtttattcagaaaaatatatattaatttaattctgcaagaaaatgatttaacagatgggtaactttatttttttcatgcttatttgtgttttttgaaaatgaagaagttagagctttataactataatattaaagatcatatctaacctacagaaatctacctaattatgtgaaagaagcaaaactttttgaagaagcacccctctttcatgtattaaaataacactgagatttttttaaaagctggaagattgtacagcataaagctaaagtgaaggcaaaaaacattgtcctgaagaataggttacaaaaaataaactccatttggtgctgaaagttgtgaatagatgggtggaaactactttcccttaatttggaaatttctaatcaagtgttgat

SEQ ID NO: 214249 - DNA, 843 bp, Homo Sapiens; identical to SEQ ID NO: 50111

SEQ ID NO: 214250 - DNA, 387 bp, Homo Sapiens; identical to SEQ ID NO: 147589

SEQ ID NO: 214251 - DNA, 813 bp, Homo Sapiens; identical to SEQ ID NO: 46736

SEQ ID NO: 214252 - DNA, 831 bp, Homo Sapiens
ctggaccggtccggattcccgggatccagccacattaggaaacatactcagctctttgattggataccccagaatgatcttcttggacatcccaaaaccaaagcttttatcactcatggtggaactaatgggatctacgaagctatttaccacggagtccctatggtgggagttcccatgtttgctgatcagcctgataacattgctcacatgaaggccaaaggagcagctgtggaagtgaacctaaacacaatgacaagtgtggatttgcttagcgctttgagaacagtcattaatgaaccttcttataaagagaatgctatgaggttatcaagaattcaccatgatcaacctgtaaagcccctggatcgagcagtcttctggatcgagtttgtcatgcgccacaaaggagccaagcaccttcgggttgcagcccatgacctcacctggttccagtaccactctttggatgtaattgggttcttgctggtctgtgtgacaacggctatatttttggtcatacaatgttgtttgttttcctgtcaaaaatttggtaagataggaaagaagaaaaaaagagaataggtcaagaaaaagaggaaatatatatatttttaagtttggcaaaatcctgagtagtgtagtcctattaattccagacaaaaggagtttaacaaaaacacgtctcccatcctgtttccaaattttctatttctctacctgcgataagcctactgataaagcctagattttggcatgattattattaacttgtgagttatagtcttctatttttcctttgtctctccctgctgactataccctcttcct

SEQ ID NO: 214253 - DNA, 983 bp, Homo Sapiens
gctggtaccgggtccgggaattccttcggatcaaaggatgagttgcacattgttgaagcagaggcaatgaattacgaaggcagtccaattaaagtaacactggcaactttgaaaatgtctgtacagccaacggtttcccttgggggctttgaaataacaccaccagtggtcttaaggttgaagtgtggttcagggccagtgcatattagtggacagcacttagtagctgtggaggaagatgcagagtcagaagatgaagaggaggaggatgtgaaactcttaagtatatctggaaagcggtctgcccctggaggtggtagcaaggttccacagaaaaaagtaaaacttgctgctgatgaagatgatgacgatgatgatgaagaggatgatgatgaagatgatgatgatgatgattttgatgatgaggaagctgaagaaaaagcgccagtgaagaaatctatacgagatactccagccaaaaatgcacaaaagtcaaatcagaatggaaaagactcaaaaccatcatcaacaccaagatcaaaaggacaagaatccttcaagaaacaggaaaaaactcctaaaacaccaaaaggacctagttctgtagaagacattaaagcaaaaatgcaagcaagtatagaaaaagcgcattgaacagtcctgggcactacatgtaaattaagcccaaagatggggaggaaggaaaaggagagacaaatatagtccatactgagtgtcatcaaacaatccagactgaagtccttcaatttaatctcaatcccccttttctgaatttgcaaccaatggcctcttcaaggttgggaaaaaattctcttgggttcccctaaagcaactttctttctggactgcctgtggaattccatggaaccccttggcccctttggcttttccaaataaacctgggggcaaattttgcccctcacctgggaaaaatggttttttaaaaaaaccgcccctttgtg

SEQ ID NO: 214254 - DNA, 823 bp, Homo Sapiens; identical to SEQ ID NO: 46784

SEQ ID NO: 214255 - DNA, 581 bp, Homo Sapiens; identical to SEQ ID NO: 41160
  misc_feature (581)..(581): n is a, c, g, or t

SEQ ID NO: 214256 - DNA, 875 bp, Homo Sapiens; identical to SEQ ID NO: 45202

SEQ ID NO: 214257 - DNA, 902 bp, Homo Sapiens; identical to SEQ ID NO: 51457

SEQ ID NO: 214258 - DNA, 727 bp, Homo Sapiens; identical to SEQ ID NO: 51586
  misc_feature (721)..(721): n is a, c, g, or t
  misc_feature (723)..(723): n is a, c, g, or t
  misc_feature (725)..(725): n is a, c, g, or t
  misc_feature (727)..(727): n is a, c, g, or t

SEQ ID NO: 214259 - DNA, 927 bp, Homo Sapiens; identical to SEQ ID NO: 49150

SEQ ID NO: 214260 - DNA, 826 bp, Homo Sapiens; identical to SEQ ID NO: 47065

SEQ ID NO: 214261 - DNA, 889 bp, Homo Sapiens; identical to SEQ ID NO: 50268
  misc_feature (869)..(869): n is a, c, g, or t
  misc_feature (872)..(873): n is a, c, g, or t

SEQ ID NO: 214262 - DNA, 597 bp, Homo Sapiens; identical to SEQ ID NO: 45714
  misc_feature (561)..(562): n is a, c, g, or t
  misc_feature (586)..(586): n is a, c, g, or t

SEQ ID NO: 214263 - DNA, 950 bp, Homo Sapiens
  misc_feature (501)..(501): n is a, c, g, or t
  misc_feature (558)..(558): n is a, c, g, or t
  misc_feature (565)..(569): n is a, c, g, or t
  misc_feature (574)..(574): n is a, c, g, or t
  misc_feature (579)..(579): n is a, c, g, or t
  misc_feature (582)..(582): n is a, c, g, or t
  misc_feature (586)..(587): n is a, c, g, or t
  misc_feature (590)..(592): n is a, c, g, or t
  misc_feature (596)..(596): n is a, c, g, or t
  misc_feature (608)..(608): n is a, c, g, or t
  misc_feature (617)..(617): n is a, c, g, or t
  misc_feature (668)..(668): n is a, c, g, or t
ctggaccggtccggattcccgggatggaaaagtgagggaggcttcacggaggaggtgtcataggagctcagcctcaacggctgctcggaaccctccgagtccacaagatgggaagcaagtccacaagatgggaagcgtgctctatacagaagggagggcctgtgcacaggctcaggtgtcagtaagccagaaatccagggacagagtcaggatggctggagcatggactgcggggggaacagagaagggggtggagcaaaaggttgggaccatgtgaccagggaagatgctggatggaggattctgaacctcatttgtggacggtcaggagtcaacaaagggaggagagaggactcactggtcaagagtgtcggctgtgacacaagggccatcatccctgaatgcccaccatgtgccccgcactgtgctgatgatgataataataactacgtccattgagcactctccagaaaaaaaaaaaaaaaaaaaaaaaaaaaaaanaaaaaaaaaaaaaaaaaaaaaaaaaaaaaaaaaaaaaaaaaaaaaaaaaaaaaaaanaaaaaannnnnaaaanaaaanaanaaannaannnaaanaaaaaaaaaaanaaaaaaaanggggggggccgccccaaaaatctcccccggggggggcccaaattttcgcgnccccccctttttttttgtaaaaagggcgccccccctgggggggggttttttttaaaaccgggcccccgcggccggtttttttttcaaacgcccgccgaggggaaaaaaaaaccgccccgcgtggggggtttttttttgaaaaaagaaacccccttctctttggggggggggggggaccaaattatgggggaacaaacccacctccccccaaaaaattttatttaaccgcccccgagagagaagaaaataaaaaaaaaatctttttttttggaggggggggga

SEQ ID NO: 214264 - DNA, 448 bp, Homo Sapiens
ttttcttggcaatgatattttttaatatgacccaaatcacttctcagccttttggtcaagatcaattatgggtatgtccccaaatgacaagcaacaaaagcaaaattggacaactgggattacatcaaactacaaagcttctgcataactacaaaaataatgaacagagtaaggagacaacctgcagaatgagaaaatatatttgcaaaccaaacatctgacaaggggttaatatccaaaatatataaggaattgaaacaactcaatagtaagaaagcaaataacctaattaaaaactggtcagacgacttgaatagaatttctcaaatgaagacatacaaatggctagtaggtatatgaaaaaaatattcaacatcacaaatcatcagggaaatgcaaattaaaaccacaatgagatatcacttcatgcctattagaatgactacta

SEQ ID NO: 214265 - DNA, 886 bp, Homo Sapiens
  misc_feature (39)..(39): n is a, c, g, or t
ccggggcaaggctttatcttcctgctgccagaacacganttcttcacacaaaagtcagcaatcagcggtttacaagacttccctcccctccccccacccacagacagacacacagaacagatccagcacatgctctgcggcccggccccgccccacccgtgcccgctgctgagagggcggcgccatccagatccgggagaaccccggtctgacaggtgaggctgactgttgagggacccctctccgggacatggatgctcccagaggagccagcaggggttggggtggaagagggacacacagcacgcggatgggctgtggccttagtgtgggaggaccacaatcgtcctgtcttagcttaaggatgggtgtgccatcagcaatgggtggtacagggggagtactggcagaagagggaattttggaaaggggtggcctggctggagacagatggtcaatctgtcaagacatcaaagaccccagggttgccacttcagcctcatgccatgctcagcacacgacaaggggctcagggcgcccactaggcagggctggagagctcctctggccccaccccaccctgctgactggctcctaggaagccctctcagccatccatcctaagttgacaggctggccacactgatgaaatttccccctccctgttgctatctttcctcaggatggcaagaacccaaggctttagcttcctcccatgacttgatctggggccacactgatcggccttgccacaggcctcggggacccagcatctttctgaggctccggggccaaagccctggtgggctggccaggagagcccacttcctcccccaggggctcctggtgaataagacactctcacaagtttcagggtggggaccag

SEQ ID NO: 214266 - DNA, 899 bp, Homo Sapiens
tgtgactattacgacatctatttgcttagaaaagctggcaaaaaaaaaaaaaaaaagcacattacatgaatatgcttcatttaagtacatgctttcgagctgatttaaaaagaaaagttgaattatggtttccagagctttaggagtccatcttcactgtaggtagcaatcaggttctgatgagggtgatgtgcaataccaatcacatccttctcgtgcactgtcaaagttctctccagtttgccagtgactgtactgaaacagtagagcacaaagtcctcccctacacagtagatccattcaccacggggagagagggcacagcaaacaaagtccccaccttctcttttaccagaactgaagcttctgacaatctgcccctgcatgttcatgatgaccaccgtgtttgatctgttgcacaccacaaagtgctcagggtttttaggaagtagaatcacactgttgacggtaatatctgtccctgcggtgctgcccagggatttaaaggtatttgaacattctgtggtcttcatattccagatctttacagtgccatcagaggatgcactaataatgtaatgtccatcttgtgtaaatgttgcttcgttaacaaaggaggaatggccacgaaattccttcagggttttcccagattttaaaccatgaattctaattgcctggtcaaaagaagcactaaggatctgactgctatccttagaaagcttagacaggtgacacccttactgtgtgccctctcaaatctccttaaacattggccactctgaatcttccacaccttgatttttccatcttgggccccagttgttaacatttttggatctttgctgaaaccatgccgaggccaggttcatccttcatattaaaagttatctggagcc

SEQ ID NO: 214267 - DNA, 469 bp, Homo Sapiens
aattcataggggccaccaaggcatgaggggatgaccgaccctggttaatccaaaccacaggacagacaaaagattaattccagtcgccagatgattaactctggtcattgggtcacaaccttgcctgtcagtaacttactcctaaactccttcaggaaaataaggaaacttgaacacgccacttttaaagtcaaactcagtgccattatgaaagaccctgtattctgtgcaaggtttcttggaggaatctgatttccagcttttgttcaattagtttcgtatcagtcaatccttgtttaaaaacatgtcataagtctctgtggtttgtgcacgcttcaattacctccgattattacatcaagattcacaaacgagataccagagtcactcctatttactgggaaatgctattgaagcaaactgaaattcaatttcagaaaagattgcaataacccgtcaaaacatccaa

SEQ ID NO: 214268 - DNA, 893 bp, Homo Sapiens
  misc_feature (850)..(850): n is a, c, g, or t
agtgagacactaagttgtcgctgattttaataactagcaacaatgtgttgctacacaaacaccattcataaacctgagtcacaggtttcagatgggagctggggacgtgtataaatagcctgtgtatgttaaacagtagaaaagaaaagaagtttggggaataaggtcaaaatcattgtgcccaatttaaacatcataaaaatctcagccttgtcattatttacaacccccagcataactcccacccaaaagagaatgccaaacggaaaattctaaataagatgatgtcctcacgtcgacctaaacagtacaaatgatgcagcatcataaaacaaagttataattatgttgtctcacttcctggctgccggatgcccacggtacagagcagccactccacaggattttctgagctctgagctgtctggggtttttgtaagaacatagctttgactagcattgaccaattgatttgcatttaaagactctgtgatggtttgaggtggcaaaagaagaatacaacttgtgtggtggagaactaacaccttgatcatgttgcaaacgtttcaaaaatgcatttttcctatattcacccctcctcagctgaaaatagcccagcaggctcaaggctggttgcagctgaagacaaatcccacacaccctccagcccctgccatttgagaaaaagggcatggccatggccttggaagaaaggcaacaagagtcttggggcagccaaagacatttttcggagcttttcaacagggtccttgcagacttgggcctctgactctggggccattcttggttccttaacaaggcaactttgggggcctttccagcctttcgngttccaaggaaactttatttggaaactttgccaggggcttgtt

SEQ ID NO: 214269 - DNA, 900 bp, Homo Sapiens
ttcagtttggctttaatattttattaaaaatttttgtatttgtaaatattaaaacactgaaacttgctactgacacaagaacgacaatgcactaacaataaaatcaaagtagaagctaaactattcagaagcagtagcaactccatgattccaaggtaatttaaacaggcaatttcagagtgcttcaagatgaaggcgcaaagcagcctctcagcctgcagtgatgctacgacaccggcagatggcgctgcaaagcttctcaaatgcagcgggaagtccatttaccaacggctgttgcgatctcttaattagcttgaactgagtttgtattagaatttataatttttactgcatattgcagttactcgtatattactgacactggaacagacatgttttaacaaactggttgagccgtatcagtgcgaaccagctgaatgtcagcgctgttccctcctgtgacagaagccaccggcgcctgcctgagggcactcccctcactgggactctcagtaccacgcccacctgtccccaaggtttgtttcatcactaagccccaccttccagcattttcacctttctccttcacttgatccttcttcctaacatcgtgttaacacactccaaactaaaaaagttcctcaactgcatatactctgctccctccatttttttctttcattgcaatcactgccaaacattttgaaaattctctcctcacctccactgcctttacgcttttcctcccaaatattccttacccctctgacatttggggcttttgattccacctctccaaaaaatgctcccaaccagaccatggtaggcccctcttcgtggctggtggatactcgtttctttttcccccgcccaccacccattatgcagcggtttcacgcg

SEQ ID NO: 214270 - DNA, 896 bp, Homo Sapiens
agataaagaaatggaatgcttacttataaaacttataaaataattaaatattacacatatattttgacttttctctataatccatggttttattcaacattttatctcaaaatattacttagagaagcaagtgagaacacataataggctattaattaataaattaattttccataaaataataaaatgataattatataaagaaataacttgctgtttttcagaaggcaacggggttgtagtagagaaaatttttttttttcctgttgataaaatggccacttctctaggccaagccaagcagattgagagaagttcctaagcattatttctctgggattcaagaactcatgactttaattagaatgggaacgaagtatgctgctaaatttaacaaaccactgtctagttgattatgctgagctggctaatccagcttgaattgagactttttaaagaagtaaaattgggttacattcatcaaagaagttgaggaataaagtagaatttatgtaaatatgccctttataaccacttctcaaaaaattacaggaggacacagtattataattactttggttttggcaaaatagtgtgatgttttttcaattgagaacaattttaaactcattaatgcctaccaacagctggcttctgatgactgaaaatactcttattcagtgagggtcttgtcatattatgatttattaatattaacatagcaagaagacagatggatttttttattaccactgtttcctcctttctttctctatatttaatattttttttaggggcggtagctcatccctagggcaaatttaaacgtatcaattggccggaaaaagcccaaattggcctttaaatttacaagcacctttggaagtttgtacaag

SEQ ID NO: 214271 - DNA, 916 bp, Homo Sapiens
  misc_feature (661)..(661): n is a, c, g, or t
  misc_feature (667)..(667): n is a, c, g, or t
  misc_feature (725)..(725): n is a, c, g, or t
  misc_feature (739)..(739): n is a, c, g, or t
  misc_feature (746)..(746): n is a, c, g, or t
  misc_feature (786)..(786): n is a, c, g, or t
  misc_feature (798)..(798): n is a, c, g, or t
  misc_feature (805)..(805): n is a, c, g, or t
  misc_feature (821)..(823): n is a, c, g, or t
  misc_feature (832)..(835): n is a, c, g, or t
  misc_feature (842)..(843): n is a, c, g, or t
  misc_feature (848)..(854): n is a, c, g, or t
  misc_feature (859)..(862): n is a, c, g, or t
  misc_feature (867)..(868): n is a, c, g, or t
  misc_feature (870)..(870): n is a, c, g, or t
  misc_feature (875)..(875): n is a, c, g, or t
  misc_feature (877)..(878): n is a, c, g, or t
  misc_feature (888)..(888): n is a, c, g, or t
  misc_feature (892)..(892): n is a, c, g, or t
  misc_feature (898)..(906): n is a, c, g, or t
  misc_feature (914)..(914): n is a, c, g, or t
  misc_feature (916)..(916): n is a, c, g, or t
gaggagggtcctctgggtctccgtggtctattcagccgggatttgtcctgcttactgtcactccgctccccatcatctgtgccgctcaccttgaccaagcagaggacattctggaagctcttcttgaagttgtcagacaagaaggcatataggatagggttggcacagctgttagcataggtgaggaccaccacaaagtcaaacatgcctttaagggctggggtggggctgatggccatggagacggaagaaacgttgaatatgtagaagggaagccagcagaagatgaagacagccaccacgatggacaccattcgggtgaccttcttctcagacttcttcctcttagaggagcccactcggattccagaggacttcaccttgatgataatgaacaggtagcaaagacagatgatggtgaggggtaccaggaaccccagaatgaaagtgtagatgatgaaccctgtgtaccaagccccagattcacctggccagttgatggtgcagctgcttctcccccactggttgctccggagcccagcatatatcatgatgggcaagatgaccagcagagagactccccacacagccatggtgatcatcttggccgtccggggtctcctccacttggccgacttgatggggtggaccacagccaggnatcggncgatgctcatgactgtcaggcagaagatgctggtgaactgattgatgccatccacagncatgaccacccggnaaatggncttgccaaaggggcagtggaccagagcccacctgcatagncaagaaagcacnacccagnatgaagagctcatctnnnatgggcagnnnnaggatgnnaatgnnnnnnnatggnnnnatttnngnatagngnnagatgacatnatgnacaagnnnnnnnnnccaccacncn

SEQ ID NO: 214272 - DNA, 916 bp, Homo Sapiens
atattcactcacaaacatttattgagtacctgattggcgccagcaatctggaatacaggacttatcctataaatctcggaaaaaatggtttttctgcatcatgaactttgggcaacctgcttctaactccaaaggactggagttaggaactggggacttggtggtgaataagcccaagtctctgtcctcatgaagttcatgttctagcaggagagaaagacaagaaatagtcaatatgtattgttctgtataaaaatgtgtgtaattttcatgacacattagatgtgattaaacatccctccctaggagcaagtcaacttcccctcctccaccacacacacttagagactgcagagcatttttccattcatgagtaagaattgcttttccttagaaagtagaagagacggtgaactgatctccagatttagttttgaataatttatggctgtaccccatatatatatgtacatgtatatatatatgtatatatatatacacctactattagtatatacccacaaattttaaatttaaaaaagcagacaataacaagtattggcaaggatgtgaaaattggaacccttacacattacttggaaaacagtctagcaatttctcaaaagatttaccaatacagttaccatatgactagccactctactagatatttacccaagagaaatggaaacacttggacatgaaggttcatagccatattagtcataggggccaaaagatggaaatcacccaaatttctaccaccattttattggtttgaaaaaatttggtggaatttttattctggcctaacaaaagaaatccagttttgatacctggctacaacctgggttgcccctttaaaacccttcccctctaagttaaaacactctcgccccaaagggaacactttatt

SEQ ID NO: 214273 - DNA, 910 bp, Homo Sapiens
  misc_feature (910)..(910): n is a, c, g, or t
caatggggaccacgctttattgaggcaataccatccacatttggttgtttgcaatgattggcaaacggatgagttaaaaaagccttctgcttccacactgttccgtctacattcagaaagcagtaaaaatatattgtgcaatgaacactttccaccttaagcgtatcatgacagttcacaaatttgccaacagacaatgcaaaacaatatttacaagatagaccctttgtaagttccaaatttagatacttgtggtgtaattctaaaactaacatcgcatgtttttccaggtaaggaagaccagtcattataaaaatactttatataaattcaaagtcagaactaaaaacatccaagcctataaaaatatcttttcctaataaaagtatcaattcctggataaatgttccttatcaacaacagttatataaattttcagaaagtacccactttgtcagagagtccacttaaaaggaacctgtcaaagtgactgcaatgctcctttgtcaagcagtctcttgttttcagagatggaccacatatttgattacgttgtgtatgaatggagcaagtatcctacaaaaagttaactcaagcgtctatctattatgaaaggcatttacaaactctttaggctacagaaggaactttcagggtggtattgccttttggagaagaaaaagtcttcttatgacccagctacattttaccttgaaaggtttaccttgggaaaccttgttatgcatttttaccactatctgaaataagttcattaatttcattttggtacatcttctttaaggcaatattgggggtgaattttttggggggtagggtcgcttttggaactcccaaaaacaacatttctgtataggttaaaccgaattctggactcgttaagcaataatgn

SEQ ID NO: 214274 - DNA, 905 bp, Homo Sapiens
gctctgaggaagattatttgctctgaggctctgcatcccccagccatccccccagagcctctccctgtggggaacacaggacacaggcagagtcctccccacagcttgcatctgtcccctgaacagggcaacctggacgccaggctggatggaggggagaaggcgatgcagccgcaatggtagtctccatggtgtgtgaggagccggcacctgctctcacacgatgccatcaaagccctgcaggccacacttcttgccggccacctggcacccgaatctcagtgcttcctgcacgctcctcccctgggagaggctgaagatgacggaggcattgaaggtgtctccagctcccagtgtatccaccacgcggggtggcgggaaagcatccgagtggagcaatttgccatcagggcccagggcgtcggcgccctcctcagcccaggcacagacaagcacagcccctttcctcacacgaccatacaagcccctcaaggcttcctctgctgactggaaccccaagtgcttggccacatctttgctgacaaacaccacgtctccgtagccaaacagctggaagagctcctttcgtggcttctccacctccacggacacccggatcttctgctctggaggctgcctggtgttgtgtgcgtttattcgttgcagcatcttcacctgctccgaagcgttccggcccctaatgtggatccatttgacctgggtcagatcaaccttttcaaagcttgtaacaaacaccttttggcaggcctcctggcattagttataggatgggtgccggttcccactggccccttgttgaagaatgaaccgggccgattgggacccggaccctgttggtctttaaaagactgggttagcgttggtcccccacaataatgccggcg

SEQ ID NO: 214275 - DNA, 925 bp, Homo Sapiens
atttaacaattttattctttctttacaactaaacacaccttgaggctgaggaacatgtgatttgccatatgatttccaaccttttcttatccattatgttttaacacttgttttccctacttttagtcatttttacaaactgaaggtaaagatacagtaactacatgagtagtgagtacatgaatttttctatataaagaaagtgtgactctactaaaattgaagttttgactcacagacactgctacaatgagataacttgagatattgtctttggtatataatgggcaattatggggtattaatttatgaaactgaatatagaaaagtaaagaattgcctacttttctatattccatttcacatactgataccccttaattgagtagagctgaaagaaaattcagaaatcattaaatcaaaacttaattcctacatataaagaatgcggcacagacttggctaaaatcacacttctcatagatgcttcagcaagaatcagagtttggggccaataattccaggtcaattattccttacactatacactactcattatttggaaatttctctcccaacaaatctttgttacaattattaaaagaaaaatgttcacattctgttttctaatctctcttcctagttcatgttctgttgaataaaacagttacacttcagaagtacaaaaggttgggatcaaataaatagacaatttaaagtagataaaatcaagatctgatcatagtccttccctctattcctgaaattcactgatttcaatactgattcttaaaaattttgccacctaccttttcggacttgtaagacaatgctgtggcaaacagatctcaagatgtagattttaaatgccaaagtttatgggtccattttgagcacctttgccctttaatggttatctgaaaat

SEQ ID NO: 214276 - DNA, 700 bp, Homo Sapiens
caaagtaacactgatttttaaatggaaatatattaatatgacctgtataaattatgagattcaaaacagtggcgccactatactgctaaacctatgcatgaaggtagtgactaggatggaaatctgtcagtgctacaaaaatatgtatgaacaaaataattttcaccctttgataaagctacaagatataaaatttagaatacttatataatttcatactagatatgtgaaaaatatgccatgctagaaccatcttgttccaaagtttgaaacatattctgtcaaaaatactcttcgtacaatgtatgaacttatcaataactttctgggtataaagttgtttttatgtcatagtcagatgaagatccttctgaattatatgttgattagaattttgtttcaactggcacctcatatacccgattacgtaatcctccatttgtatttatggtaaaatcaatttttccatctttttcctgactgggattaaactttgaagtactgtaatctttcttcatcaaaatatgcaaaacagcatcatggattgttaagaaaaatattgagcttttcacttcaccatcaaaaaaattcatacccggtaaggcttctcaatgaaagtcatcatcgtttcaacgatataaacatctaccctgatcctgataaattcttgcaaaatcgatttaaggcccctcactgaaga

SEQ ID NO: 214277 - DNA, 893 bp, Homo Sapiens
  misc_feature (622)..(622): n is a, c, g, or t
  misc_feature (838)..(838): n is a, c, g, or t
aggcaaacatttatttttatttgcaaatgcagtttctgccatagttagtgctcacaaaaccttttaagctacagtaacttttggtaaactcaatgaatactttaaaaaatacccgatggtaagaaaattacagaaaaatttccattacactgtcgaaaatgtttggaatccaaaatccactattttctgcaatagtttttaatgtttattctggtttaaaaaagattttctttttcttttctttctacttctacatagtcctggttaaattaatacaatctgtctcatgaacatttaggactgccattttctggatttagattgtttttattctcacatatttatattaatactttaatattttacataaaacattgatttgctgttttatgaagcaaaatcatagatcatatttatggaggcatttccagtttgaaagaaaactgaaaatctaatcagtagaaggtcattttatgccttttttcctttttagcagtgataaataattagcaacctattaattacaaaaattcttaattatgcttagagcaaccagagcgctatcacaaatttaaattcatatttgttacagtatgtgaaatagttaagaaaagcctctgtnttcccagtttggtaacaaatggcttttgtctgatgcataattaatagaaactaatgatgactatgtagctcttccagagttttaaagcaaatctattttggcctacagttaacatgcaaattcatccaacaaagcaacgcaaaatgtattgtagtagtcattcatttttatcaacatttaaggaagatctagacagcagcacgactcttctatggncgaaacaccatattacatgggcacaactgaagtcagatcatacctgggtaaaaac

SEQ ID NO: 214278 - DNA, 877 bp, Homo Sapiens
aatgctcarcacattaactcaaactggaatgacaaacgttaggatgacagtsttgggcaaaggctgtgcttgcttttttaaaaaatgggtacatcaatgctcattttaacaactggcataaaatcccactaattggctaataaaaacagatacaaatacagaacatttaaagtaataacaattcaagtgctgggctttttacaacaagggggtgataaggaaagaaatgaaaattcactgcaaaccagtctgctgaacgcatctgttaaggtttactgtttaaaaaaagaaaagaagaaaacagaagaaaaaataaactgaaatagggctgccaattgctaccaacagagtgggtttggctattacatttatttagctctactgaacaccttacaagggcggagaagccactatgtgttacaggcaattcacagagaagccacttaccagacaagctgtctcagaaaaagaaggcttctttttatgtcattatttcaaacttttccagaactttcaattttatttaaaagctcatagctagcaaaatatacaagaaaattaaaactaaaaagtgtaaattaaaaraattcaagtttaaaaragcaaaaraaaaacgatccttttgcactgttaaataaaagctttaggagaraagaaaagaaagaaaaatgaagcagaaacaaagagggaactcttccatgaactcmtccactggggtgcwgatggatgtgcwggttgcwggcwcaagtwgcrcatgacaggcaaatgcagcmaagttaccgtccttgccgtaaggttacaggtttggatgcaagatgcwcwgggaagtgcacgcrgatatggggggrgaaagcwgcacagcwgccccacagcmwgc

SEQ ID NO: 214279 - DNA, 916 bp, Homo Sapiens; identical to SEQ ID NO: 40082
  misc_feature (902)..(903): n is a, c, g, or t

SEQ ID NO: 214280 - DNA, 863 bp, Homo Sapiens
tagaaattatccgactagttaatctattacagtagaggatctggacaataaaaatagttatttaagctttttattttccctgacctagtagctttcatgtctcttaaaattccctaaattttatttctcaaatcccatatcgtgattggttaaacagacagccaagaatctgagtctattttttgagaatctcaatcacatttctgggaaatgtgacttattgagtacatatttattttctcatttccattcagataaatgacacagctttgctgggaggactgacatcggcctcctacctgctggcatcctatttctctacctcacctccctcaaactaaaggatctgtaaccacatataaagacccacacccaagatggcagataggaacacaagtcaatgtcattgactcagcattccattgtcctcttcactggcttcctcctgcgctttccacctccctcaatcaccctagaaataagatgtctgatttatcgtagaaaattgtgactctcttacatctggagtattcatgaaatttttttgactggataaattttgatgaaaattaatgtagaattgcctaaattgttagaaggatttaaataaaacaatctaactgataagcctaaatactgccttaatttttttttaagacacagggtcttgctctatcacccgggctggattgcggtggaagctcactgtagccttgaactcctgggcttaagtgatcctcctgctttagcctccagagtatcttggactacaggcttactccaccatccctgctaattttttaaccctttgtttgtatagaggagtctcactacattgcccaagcctggtctttaaccttctg

SEQ ID NO: 214281 - DNA, 978 bp, Homo Sapiens
gaattctagatgcctttttaattgttcctgagcactgaaggcttttccacaatctacacagtcaaagggtttctcctcactgtgaattctctggtgccgagttagttttgtatgaaaattgaaggcttgtccacatactttacaagaataaggcttttcccctgtgtgaatacgctgatgttggcttagatgggaagtccttccaaagcttttgccacactcattacactcatagggtttctctccagtgtggattttctgatgccgaagtaagggtgaattaccaacaaaagctttgccacactcattacactcatacggtttctccccagtgtggattctctgatgtataacaaactcggaactactggtgaaactattcccacactctgtacagtaatagggtctgtccccactgtggattctctgatgcctgatcagatttgcattatcattaaaggctcgcccacactcctcacagtgatagggtctctctccagtgtgaatcctctggtgccgaattaacgaagaattaccattagaaggcttttccacactcactacactcaaaaggtttctccccagtgtggattctctggtgtctagcatagtaagaaaagtagctgaaggatttcccacactcctcacatatgaaaggtttccttgcacaggggattcttgagacctttccttggatattttccactggggggatgacctgggggcttttcacattacgtgtttttgggaagtcagttcttggagggcactctttaggtggccatgtgccatatcccatttttttcttaaaaaatccctggataatgggcccccctggccagtgtgggctaacaattttcagacctttttggaccttttggtgggggaaaatctggggtaacaggcccaagccttggccctctttcaaaggggaaacagtgcgtgtgttgaatggttcccccggaaacagaaaatatg

SEQ ID NO: 214282 - DNA, 914 bp, Homo Sapiens
ttatttcactcaacaatctttattgtttgtgtgcaggcactgtgttaggtgccaagagcagaaggaagaagatacaaatatgaatgggcatattctgccctccaggaacatacaatctaagagtgattaattgcatacaaataattgtaataccagatagaatgtggtaagtgccatgggagatactactataggaagctttcttagctcttaacttcaaagaccaggtcaggttttgtcctactgtagtctgtggcaggcatgaaaaggcagctgaggggacctgctaggctttgatgaactgagctgcatcttggatttcgcttcctcttctttctcagccgaggttacggtgattagcaagggcagttgctaccactgaaaggatagaaggaaaaaggcaagggaaaatgatacgtactaagatgcacataggagcactcgatagtagtctatggaccgggccctgggtactgccattatagagggaaggggaagaggagtggtaagggagagagaacactggactaagcctcagcattcagatgttcccagttacaacaccctgaacgatctctaggcctcagcattcagatgttcccagttacaacaccctgaacgatctttaggcctcagcatttagatgttcccagttacaacacccttgacgatctctaggcctcagcattcagatgttcccaggtacaacaccctgaacgatctctaggcctcagcattcagatgtttccaagtacacaaccctggacgaacttttaagcctcaagaattcaaatgttcccagtttcaaaaacccttgaacgatcttttagcccccaagtattcaaaagtttcccaatttcaataaccccggaaaccattcttttaggcctcaagaatttacaaattgttccccc

SEQ ID NO: 214283 - DNA, 896 bp, Homo Sapiens
  misc_feature (843)..(843): n is a, c, g, or t
cctttaatttcttcacgttttaatttcttctgttgcacactgtttatcttaacaccacaccctccgcccgacaaaaaaactttttgcaatgatttccagttagcattggtccatgcctatcaacggaaaattgtgcagtctctgggataaacagctcgactttgtcaagggaaccgtgtatttttactagaagtcagattcacgtccggcctccaggccagaatgcaggaaatgccagacactggcgtctcaaaagcagctttcaaagttatccactcacacagccggcctctaagcaaatactcttgagagcacttgttgttttctccaaatatccaaacagaatataaactcaaagctgtttcagtacagttggttaaaaccacgcatttatagtagtgatcagcattatatattgttttaaggagcataaatccatagtttataaggattgatatggttgtgaaggaaaatgtatatagttcagcctgagatgtcagtgttaacctataaaaggcccagcacattaagtgttctttctaatcttcatgtttactctgacaatacttatctccattttacagatgataaaactaaacatttgctctatattaaatcctgttgctccagctgggtgcggtggctcacgcccgtaatcccagcattttgggaagctgaggcaggtggatcacctgaaggtcaggagttcgagaccagcctggccaacatggtgaagccctgtctctacttaaaatataaaaaattacccgggcatggtggcaggtgcctgtaatcccagctactcgggaggctgaagccagaagatctctttgaccagaggcngaagttgcattgagcccgatatcgaccatttcactccaggcccaggcaccaga

SEQ ID NO: 214284 - DNA, 910 bp, Homo Sapiens
gaacaactagcaaaaaaaattcctgtttattgttggacacattgtttcacacatacatcaaacaggccaaaaaaaataaacagcaacttcatagacaaaaaaggaaaaaaaaagaaaccttttatctttggcctttttaaccatctcatacaaaccaactacttatagtacagctaagtacatacacaaaaaagttactggaatgctcggaataagattgtttttctgttgtcatttttgctttttttacaaggtttttttctcctttgagattataatgaacatggtcacaccacaagtaaagtcagaagtaggacagagaacgctccgaaggctggtttggtcatccgagatcattaaaaatggctgaccctaacaatatgtacaaaaatataaaatgtaaataaaaaatacaaacaaatttcctttttaaagtacttttaagaaaaaaagcagggccttggaagttttggttcttttttcctcccctgttgcaaattctcatggtttgggttgggtggtggagagcgcgtgtcatctgcgggtggcactgcccacggtgggcgggcgggcctctctactcgaaggtgaccacgtttagattctgagacggaaagtggagggtgaataggtaacggcggcctttttttttttagtttaacttttccttttttgctggcaagacatcctccgtgggtcttctgctttttgggcgtcgcattagtaatcccttataattttcagctgccccctttgcccggaatttgcctaaatttccttaatcttaattttccatcctctttcttcacataaaaccttctttttactgactacttttccctcccaacccttgttactctttttttcgtttacccccaatggcagggcctcgggcttctctattttgccg

SEQ ID NO: 214285 - DNA, 924 bp, Homo Sapiens
acctcggcctcccaagtgctgggatacaggtgtgagccactgtgcccagctgagattttattaaaaggaaatttttttttctttttttataaacatgctgttgttattttctaacaggactgtcattccatttttattatttttcctatcagtggacctagttatttccagttttttgctataagtatttttacttgtgtttctttatggacatatgtgaagtttgtaaaatattaatatttacctaggtgtaaaattatgaggtcttcttagagtattggatccatacgctgataggtaataacaaactttccacaagatgattctatcaatttagccttccaaggagtatatgagtttctgttattccatatcttgaccaataattggcattgtgagactttatatttttgcctaaatgtaccttgttgtggttttatttatttgtttgtttttgagacagggtctcactctgtcacccaggctggagtacagtggcacaatcatgtctccagtctcaatctcctgggctcaagtgatcctcccgcctcagcccccaagtaattgggacttcaggcatgtgctttcacagccagctaagtttgtaattttttgtagagatgggggttttgccgtgttgcctaagctgccctaaaattctggggctaagttgctcaccccgtttggcccttaaaaggtgtaggattttagcagtagcctccatgtctggcccttgtgggggtttaaaatcgattttgccttattacaaaattgggtcaaaattggggtggaaattacaaaaaatccttttttgggctatttaatgtcctttttctcgtggaaaccccttttattggtctttccccccttttattttttggggtggtaaataacccaacaaaatatattgcgggcccccttaaa

SEQ ID NO: 214286 - DNA, 896 bp, Homo Sapiens
ttggataaaaaactttaatttctggttacagcatcatatatgcattataaaaggctatggaaacaaaagagaaggatgatgagacagagaattacagcagtagaaaggaaaacagaaaccagggcacacagttccaacaccagaacagagaatttgggaagataattgctctgaaacagaactggcctccctgtgtctattagaaaacatttccaaagctcacggagggaggccaacttcccctatgggaaacccattcactcgccaaagggcagaaggcatcataaatcacccattgatacattggtggggggctccctgtccccctggtgaccactccaaggtgatttgatctgtgcttcctctgttgggtcagagacgaaacgggctattattaggtcaaacattacagaaatcaactgagactcttaactagtagttgatacaccacagggctttactttactgcacaattactaacagttgattgcacccttaagtattgattatgcaaaaaacaaaatcatctcgcatcagttttaaagcatgacagggtttgaacagtgatcttgaacctaagtattgttatcacgagaagggtacagtatttggcatctgcaatgtcacaaaataaatatattattctctcaatagtgtggaactacccaaatgtcaaagtgcttaagaaattgtcgcatgtgaagaaaataaagaaaggaggattttttttttttataatttctataccagaatcttcagatgatggggacccagcccattttagaaatcaagtgggatatggctgtccgatatgttaaacttgaaatctttgcaggccttttcaacaactgccttagcttagacttttcttttaccggggttttcttacaaaaagg

SEQ ID NO: 214287 - DNA, 847 bp, Homo Sapiens
  misc_feature (791)..(791): n is a, c, g, or t
ttttaaaatgtgagtttttaaacttgaaggatttcattcttaactctcaattatataattacaaaaaaaatccaagtttcaggaaaacatacttaatcctaacataaaattcatgtcacttatcacaaagacagtcaagtgtataaaggagaaacaaaacagaagcagtatttacaaatttaaactacatgagatgttgtgaacaatcttttgttaataaacagcacgttacatacttttacatactacatttcaaaaatgcatctgtgaataatatgataaagcgcatagtgttgaagactttaaattaaatccaaggtcatcatgttgaagacctgaaattaaattcaaggttgtagtgatgaaaaatttaaagtcaaggtcttagcgataaagactttaaattcaaagacagattgtctaaggacaaaccactagcgttcaagttgtttagtcaattagttctctgtgagtacaaaatattaggaatcactaaatggattagcctaattacaaattttgatcatttctaaataactcacaactgcaagaagtcttttcacagaatgagtcacatagtttctctctatccttgtgcaggtattttaaatccttattcaaaacagttccctctccatttctagatttttgtaagtataaaatattttaaaacaaaggtatgtccattccttagctagagaactattctttcactgactcctggaagagaaaaaaagattcccatttcttcctctacctcaaaacacaaagaaaacccaaacatccaattnctaatgtagtgtcacatagaaccaagggcctgaaaacataatttaatgctagtttt

SEQ ID NO: 214288 - DNA, 908 bp, Homo Sapiens
  misc_feature (18)..(18): n is a, c, g, or t
gagcaacaggggctgttntatttacctgggtgcaggcaggccgtgagtctgaaaaaggagtcagtgaagggagacaggggtggggctgttttataggatttgggtgggtagtggacaattacagtcaaagggggttgttctctggtgggcagggacgggggtcacaaggtgctcagcgggggagcttctgagccaggagaaggaatttcacaaggtaatgtcaccagttaaggcaggaactggccattttcacttcttttgtgattcttcagttatttcaggccatctggatgtatacatgcaggcttgggcccagaggcctgacaagtatgagtatgataataaataatttatagaaatcaagaaaataattcaatttaccctaatatcaaaaagaatgaaattgtaggaataaatttaaccaggtaagtgaaagatctgcacaatgaaaactataaaacattgatgaaagaaattgaagaagacacaagtgaatggaaagatatttcatgttcatggattgggagaattaatagtgttaaaacatccatactatccaaagcaatatatagattcatcacaacccctatcaaaatgtcaatggcattttttacagaattagcaaaaacatttttggaattcatatgaaacccccaaaggaccttgcatgggcacaatttattaattcacttcattaaatttttagagcaaaaaacaaagtctttgcgtttacccattcctgtttcctaattctttaccaaggcttttgtaatttaaaccctgggcgccctggtctggaaacgttgatttttcatgctttcacccctgtttgtgcccagaaaataaccccaagttacataaagtcaacctattttttgccaagggtattctggataacccgcgggggg

SEQ ID NO: 214289 - DNA, 1000 bp, Homo Sapiens
tcttttcccaggagacttatgcacttcatttcttttcttgttatagtgtgagaatggcagtgagtgactgtgccaatactggagtctgctgagaatgggtggatggraaggtttttactggcaagggtgaaatgatactatcttttctatcttgacaagataacaagcgaaggtgtctagcaaaccttccctctcactttccacttgtcctcttgaccatggatttcatgcccaatcaggatgaatggatttgtagatctcaagttacaagctatgtttattgtaaagaattcccataarrrcctatccagggctggccccccagccatttatacatccacagataggaatagaataaaacgggttagtgattacttgtctgcggctgagtgagatccgctactagaccaggcaatggggccgtttcagtcttgagacgtctgtactccgtttgcccctgattcaacaagcatttcgttgatcagcagttggcgcccaggtgaagagccataatttattgcagtatcaagtcttgaaacctttccaagtgcggagacmmatmtttcaagtaaatractatggttagtaatgacctaacttcaggagcgtctgtgagacatgtcaggagacgagacacacggcatcgtcattagtgaagtagacttggtttctgctacagataaragtcacatgggggcgaacgggtctcagtctttattgttgagtgtttctttctttttccaagttgaaaragggacccaagcagtgtctcttgaaccagttccccagggagaaggcaaattctttcctgtctctkggaggggvaagatwaaggrtataaramgmwamaaaamgggggktaatgaaggraargtammkraaawattatggkaatgatgttggtaagtgmamtthggvaatkraaaagggggtwtasttttakattttttttgaattgctgmgtaaatggggattyttgtaaagkttaggggagaagaar

SEQ ID NO: 214290 - DNA, 877 bp, Homo Sapiens
  misc_feature (837)..(837): n is a, c, g, or t
tcatcagggagcggaaggcagccctgcaggatgagaaggtgcggaagaagatccagaaccggaggcacctggacttcctggacattctcctgggtgcccgggatgaagatgacatcaaactgtcagatgcagacctccgggctgaagtggacacattcatgtttgaaggccatgacaccaccaccagtggtatctcctggtttctctactgcatggccctgtaccctgagcaccagcatcgttgtagagaggaggtccgcgagatcctaggggaccaggacttcttccagtgggatgatctgggcaaaatgacttatctgaccatgtgcatcaaggagagcttccgcctctacccacctgtgccccaggtgtaccgccagctcagcaagcctgtcacctttgtggatggccggtctctacctgcaggaagcctgatctctatgcatatctatgccctccataggaacagtgctgtatggcccgaccctgaggtctttgactctctgcgcttttccactgagaatgcatccaaacgccatccctttgcctttatgcccttctctgctgggcccaggaactgcattgggcagcagtttgccatgagtgagatgaaggtggtcacagccatgtgcttgctccgctttgagttctctctggacccctcacggctgcccatcaagatgccccagcttgtcctgcgctccaagaatggctttcacctccacctgaagccactggggccctgggtctggggaagtagctctgaatgagaatggggtccccagaatggctcaaggctgtgaacctcccctggggccaccaccccttcccccaagnccttgggttgttggaaggaaattttggggggcccccccct

SEQ ID NO: 214291 - DNA, 945 bp, Homo Sapiens; identical to SEQ ID NO: 44008

SEQ ID NO: 214292 - DNA, 879 bp, Homo Sapiens; identical to SEQ ID NO: 50067

SEQ ID NO: 214293 - DNA, 447 bp, Homo Sapiens; identical to SEQ ID NO: 60582

SEQ ID NO: 214294 - DNA, 751 bp, Homo Sapiens
  misc_feature (747)..(751): n is a, c, g, or t
gaccggaccgaaggagtagaaagacgtatgagcagccagacctggagggcttgggtaaaaatggttgaatatttagcttcgatattcgggactgagaaggacaaggttaactgctctttttactttaagatcggggtctgccggcacggggaccggtgctcccggcttcacaacaagccgacattcagccaggaggtgttcacagaactgcaggagaagtatggggagattgaagagatgaatgtgtgcgacaaccttggggaccacctcgtgggcaacgtctatgtcaagttccggagggaggaggatggagagcgggccgtggctgaactcagtaaccgctggttcaacgggcaggctgtgcacgggaatgtacccgaggtggcttctgcaacttcatgcatctgcggcccatttcccagaacctccagaggcagctctatgggcggggacccaggcgcaggtcacccccgaggttccatactggccaccatccccgagagaggaaccatcggtgttcccctgatcactggcatggccgcttctgaggccctggcccccttacccttcacccccaacagggacagatgttcctggcaggacctctcctcaaagcccccttcactctcctgccccatccttcccaggctcccgggctccataatgtaatctgttcagcatggagaccttcttctaccgcccctgtcttaataaagctgcgtgtttcacttcggcaaaaaaaaaaannnnn

SEQ ID NO: 214295 - DNA, 847 bp, Homo Sapiens; identical to SEQ ID NO: 53108

SEQ ID NO: 214296 - DNA, 470 bp, Homo Sapiens
agacacatgaatggtctgttcctgagcgtcagggaaggcatgttgtgtcacatagttgaagtcagtggtcacagacggatgcctcaagagcccataggaatgagatgttttgcttgcggtgaggtcatcttgctgcttcaacacaaatgccaggctccccgagctaggccaacttgtggataagcccagccagagcacagaatcgagtttaaatccagccttccaccccatgcccacaagtggtgtactttagaaatagttacttcccagtagcaccaacatacttcccagtagcaccaacatgaaaatcaggcaaactgttgttgtttagtcccagacacacctggtagtgtttctcttctctgtggatctcctttcctcaaagccctggttcttcacctctcatctctcccgcccaggctgtgcctgccctcccaaagtgctgggattacaggcatgagcaccgcacc

SEQ ID NO: 214297 - DNA, 414 bp, Homo Sapiens
aagttgttgtagtctccacttcagtcagaaactgatgtttcagctaggcacagtggtacatgcctgtaatcccagctacttgggaggctgaggtgggaggatcacttgaactcaggagtttgagagcagccagggcaacacagcgagaccctgtctcaaaaaaaaaaaaaaaaaaaaaaaaaaaaaagccctggtgttccaaactcagtctttcctgaagaagaggatctgagttatcttctgaaacagcgttctcccttcccagttgtatcactcttataaaaagactgtccagtctatgtcatgccctaggagacaaactgttcctcccagccccctttgagtattgagcagaagaatcaaattattaaatacgtatgtttgtacagaatggtatttgtgtatgtgtgtggg

SEQ ID NO: 214298 - DNA, 393 bp, Homo Sapiens
tagggacagagtctatgttgcccagtggggctatccacaggtgtaatcatagctcactgcagcctcgaactcctgacctcaagtgatcctgcctcctcagcctcccgagtagctgggaccacaggtgcatgccactgttcatgagttttacagacttttacattttaacttttgactcttttgtaattaacacaacacaaatacattgtacagctgcataaaaattattttctttatactcattctgtaagcttttttctattaatttttcttttaaaacttttttttcccttaaacactaagacagaaacacacacattagcctaggcctactcaggatcttcaatatcactgtcttcccttctacatcttgtcccactggaaggccttcag

SEQ ID NO: 214299 - DNA, 703 bp, Homo Sapiens
aatgatggccttactattaagagaggggcggggggaaacctacttcatgttctgtcatttttgccatttcgggaaactgccaaacctgcttatttgaagttcatccatattctttttcatcccaagcacccagaataccaaatcaaaatgtgaggaaagcaggatggtactagaaggtggggggaaatatgggggccttcaaagctcatataattaatcaaatcgacaataaaaaatacaactagaatttcagctttatcataatggacatgaaaatgggagaatatagcctttgtgtttttcctagatgcattctaaattgtactgttaaagaaatttctgaacttttacatacaagtttttagttggtcattgtgctcataaaaatacttttagaaaacaagtgaaacttaggagtgctaatttagtaaaatggctgtcaagatctggcagactgccttacatcatggctcatgcctgtaatcccagctttttgggaggccgaggtttgcttgcttaagcccaggaattcaagaccagcttggatgacatagtgagacctccatctccacaaaaaataaaaaattagctgggcatgttggcacacctgtagtcccagctactcgggaggctgaggtaggaggatcaatcaagcccgggaggttgagactgcagtgagttgtgattgcactgctgccctcag

SEQ ID NO: 214300 - DNA, 697 bp, Homo Sapiens; identical to SEQ ID NO: 55782

SEQ ID NO: 214301 - DNA, 716 bp, Homo Sapiens
tagatcatttggattgatttttatacacatagattttcaggactttaccttttgttttgtttttttccttttagccatcttttgttcttgtaatcccaaccagataggctttatgctcacatcattgtcccatacccacccctttctcatccccatttgcaggggctaaaggtctagatgagacttggaaggcaaggagcatcgaaatttgagatacccaggaccctttcaagcaagaatggccaaaaagccttgtgctgtctttgctcttcaaattattttcagcctccttgtcatataatcatttcaggcaaactgaggcaacactaacagctaatgacccagatggctctatttgggtaatttacctacaacttattccaccagcctttactcctctgcccttttgtcaattttaccttataatcctttattaaatgatgggaggtggtgatcaggacaaaagtgttaggttcccatgatttctcatttcatttattaatagtttatgctgaatttttttttaaagtttcctctggctctatttatgttactttttgcgataagaacactttacataggtattctctcctcttggcaatttttttttttttcctgggttgcccaggctgactttcaactcctgtgcccaggcaattcttgtctaagcctgccaggtgtttaggactccaggcgttaaccactggccctgcaag

SEQ ID NO: 214302 - DNA, 744 bp, Homo Sapiens
ccagaggtttcatttcagtgggaaatacggttaagtttgttacaaggtatttacatgagtatgtacagaagtgtattcatttatgcattaattcaacacatactatatgtaatgacgtcttaaagtgagaattaaaaatctctctgaatttctgagtttttaaacccagaatcaatttcattcacattgttctttcttgagcaaaatgtcattttaaagtgagaattaaaaatcccactgaatttctgagtttttaaacccagaatcaatttcattcatcttgttctttctttagcaaacttttcttctgtagagttccccatatgtagaccatgggaggaataggcactgtgggaacatagtggtttatgtgactggcttcctatccttaagagtaatttttttctgtttttttttttctttcccttttctccctccctctctttcattctttcattcttatttcttaagaatcatgcagtggagatacgtgaatataattcaaggtaataaaagaattaatgtcctactactgatggtggcaaagtggtatgcggcttcagagaatagagtgattaattccaatttcggggactggagatagtttcactaggagatgaatggattttgataaacacccatgtgagggaaggctcttgcagcctgaagccgtaagacatgtaaagggtttttaatgaacctggcagttgaggggataaaatatagtagtataagaatctgaga

SEQ ID NO: 214303 - DNA, 629 bp, Homo Sapiens; identical to SEQ ID NO: 45411
  misc_feature (604)..(606): n is a, c, g, or t
  misc_feature (610)..(618): n is a, c, g, or t

SEQ ID NO: 214304 - DNA, 890 bp, Homo Sapiens
ggctggaccggtccggattcccgggatcacacctggctagttttttccctttttctagaggcaaggtcttgctatgttgcccaggccggtcttgaactcctgagctcaagcaatcttcccgtcttagcatgggagtaatcccaaagtgctgggattacaggtgtgagtcactctacccagcctcaactgttttttgtgactccactttttctcccccttggaaatgagtagtctttgagggaatgtcttttttgtctcaatctctggtttctttgctcagtgcacctgtgtctggcgctttgttgatctccaggcctttttcagcagctttgtccctggagagcaggatggcagctgatggcttctcagcattttttaactcagtttaagatgactatcaacaacatctagtcagcatctgttgctctcggcagctgggactctatttcctttctctttctccacctctctaacctctttaagactctggctttgtcatgggtacagcatcacctgtgtggcccttaggctctcttacttacatgtgatctgcgtattatgtctggcttctcaaccagggtgtgattttgctccccagagaacatgtgcccatgtctggagagttttggttgttgcagctggaggaggtggtgctactggcatctaatgggtagaggccacggatgctgctaaacatcctacaatgcccccggaccacaagacaaagtaatgatcccgccccaaatgtcaatagtgctgaaagtgagagaccctgattccatcttagagctttagagatcatcccaagccacatttggccaaattggtttttgccactgtcccctggaagaaaagaccgactcctgacggatgggcaaacctcgatgggt

SEQ ID NO: 214305 - DNA, 881 bp, Homo Sapiens; identical to SEQ ID NO: 55467

SEQ ID NO: 214306 - DNA, 883 bp, Homo Sapiens
ggctggaccggtccggaattcctgcgatgtcccttccacattaagaactaatgctcaaagagaagtataagactaggtctttatatttgtaagttacttacactctagatatcaaacgaaatgtaactcacatgaagtgcttcaatgttgaataggttggtacaaactcaagtgcgtgaggaacgcacagcggaaacatattcttgcagcccatcagatcatccacagttacacggaaagcatggttcaaaagaaattaactgagggagagcaagatgaggcctcaaatgctgccatgttacttgagaaagaaactcaaaatgagaacaacagctaagattgtgatttttttgtaaaagaagctgtacgaatcatcataaataattccaatagtctgcacttctcccaaggtgtgcactgctcataaacttgccagtgtgtgattcatgagaaaggagatttattttccttaaacatccaataatttaaaatgattttcaataataataatcaaatgaaaaagcttcattctcttcagtgtcttctagatgccctacttaaagagaacattttcttatgtctcatttcaatattttgttaactatgaggatgtgctggtttgttgaatcaaacaaaaggaaatgttgtggaatatttttccaagtagttttggttcactattcacaggacattggcattatctactaaggctgaaaatgtgcatattccatgactcagggattttatctcctagatatatattcaacagaaatgcatgaatatgtgcaccaaccgggctgaaaaaaaatatttataggtagtggtggttcacaaatagtcccaaactgggaaaacccaagtggtccatcctccatgggaacaa

SEQ ID NO: 214307 - DNA, 842 bp, Homo Sapiens; identical to SEQ ID NO: 48355

SEQ ID NO: 214308 - DNA, 847 bp, Homo Sapiens; identical to SEQ ID NO: 50914
  misc_feature (793)..(793): n is a, c, g, or t

SEQ ID NO: 214309 - DNA, 914 bp, Homo Sapiens
ctggaccggtccggaattctccggatcttttagaggaggtgatgtgtaatttgaatcttcaagaacggatggataggaactctccactttgctaaggcaggggcatatcatgtgcaaagaactgaagattgagagatattaagaaaaatgctgaattatcaaggtctccagcgagtgaaaatcatagcaagtgataatctctgggagtccatctctgcatccatgctccttgatgccgaactcttcaaggtggttgatgttataggggctcattatcctggaacccattcagcaaaagatgcaaagttgactgggaagaagctttggtcttctgaagactttagcactttaaatagtgacatgggtgcaggctgctggggtcgcattttaaatcagaattatatcaatggctatatgacttccacaatcgcatggaatttagtggctagttactatgaacagttgccttatgggagatgcgggttgatgacggcccaggagccatggagtgggcactacgtggtagaatctcctgtctgggtatcagctcataccactcagtttactcaacctggctggtattacctgaagacagttggccatttagagaaaggaggaagctacgtagctctgactgatggcttagggaacctcaccatcatcattgaaaccatgagtcataaacattctaagtgcatacggccatttcttccttatttcaatgtgtcacaacaatttgccaccttttgttcttaaagggatctttttagtgaaataccagaagcctacagggtatggtaatacccaaaacttgggaaaaaaacatcccgaaaaagaattttctcttttttacgaccaggcttgggaatttcttcctaatggggcctccccttttgaaccagtttgaaattggc

SEQ ID NO: 214310 - DNA, 922 bp, Homo Sapiens
ggatcagactttgtgtttttatccactaagctgtattctgtctttacagatctgcactacatatgcttgaatattaatagtatatgacaaatgctctgacttaaagaagttacaaatgaagccagggactgtggctcacacctattatcccagcactttgggaggccaaggtgggcagatcatctgaggtcaggagtttgagaccagcctggccaacatggtgaaaccccatctctactaaaaatacaaaaattagttgagtgtggtggcacatgcctgtaatcccagctactcaggaggctgaggcaggagaatctcttgaacccaggaggcagaggttgcagtgagccgagatcacaccattgcactccagcctgggcaacagagtaagactctatctcaaaaaaaaaaaaaagagagagaatttacaagtgagcacataacacttagatatttcgaaagagtattcaccaaagtattgactgttacctctgatgggtgcaattattaggcagtttttattttcctttttatactttatttggtacttttaaacataaaatatgtaatttatagtcataaaaaggcttccttttggaaagtagatattcatatactttgtctcagtaattctgtttctaggaatttactcctaaggaaataaagctttctgtacaaaggatgttcattacaacattacttataattgatataaactaaatgtcaggaagtaaaagaattgttaaacaggccggggcatggtgggctcacacctggtaatcccagcacttttggggaggcccgaagcaggtgggatcaccaaggtcaaggagataaaagcaccatccctggcccaaccctggttgaaaacccctggcctttacgtaaaaaataccaaaaaattggcctggggttgtgggtg

SEQ ID NO: 214311 - DNA, 878 bp, Homo Sapiens; identical to SEQ ID NO: 48652

SEQ ID NO: 214312 - DNA, 893 bp, Homo Sapiens; identical to SEQ ID NO: 42261
  misc_feature (853)..(853): n is a, c, g, or t
  misc_feature (877)..(877): n is a, c, g, or t

SEQ ID NO: 214313 - DNA, 877 bp, Homo Sapiens
gcggccgcactcgagctatgcattattttcacatcttaatttttctttctgagccttggtctctttaggtgaggcaaaagtctcagtgacctttgagcggaatgcttttgagaggtgatagtacaggataggatcaaagcacaggttcgacacagccaggagcagtgtagcctctttggctttgaagagtgaaatcctggttgagcaatcagttatgacttctgtctggctgagggtatacgggattcggacaatgtggtaaggaacaaagcatatgatgtagcccgtggtcactaaaagtatgttgatgagagcctttttcacatttgggtaattttcattatctttgtttctgtagagctgtcgaattacaaggcaattggatattaaaatgatggctgagaaatttaaaaatattgctacacatatgaaatttgtcagcaaatgccaatttcttccaaattcctttttaaactccatacaacccacatttgacttttccttgatgtctttgatgggaatcatcatatttggcaccattataagaaggaccattagccacacaacggttgatatcattttggccaatccgggttcttggattcggtagatcctggcgctgtgtgtcagctgaagacagcggtccatgctggacaatgctaagaagataattgaataaatccatattgggatatagaataagggcaggcttgttaacttgggcaaggggaaaaattctttcagccttcccaaggggggccccacaccccaaagtccaaacaacaaaattttttcacccgggggtaaatggccccgagaagttcaagcccaggggaaaaaacccgggccctggtttaaagccccaaaattttttata

SEQ ID NO: 214314 - DNA, 895 bp, Homo Sapiens; identical to SEQ ID NO: 41885
  misc_feature (825)..(828): n is a, c, g, or t
  misc_feature (832)..(833): n is a, c, g, or t
  misc_feature (835)..(890): n is a, c, g, or t
  misc_feature (893)..(894): n is a, c, g, or t

SEQ ID NO: 214315 - DNA, 380 bp, Homo Sapiens
gacacgaccgaaagagtagaaactttcagctcctgcaggttccgggaggtcaggttgtattcctggcgggtcgtctggctgggtgggccccggaggtcgtggctcgggagcagggaggcgtaggggggccggcctgctgtgatgacattccaattaaagcacgtgttagactgctgacgcgggtgatgcgaactggagtctgagcctgcccgagcggagctgggagggggctggcgggcgggcgcgcgcacacccgctgatctatcactctcgttcttgtagctcccagccgaggacgtcggatgtcatcgtccttgctgctttgccaccccattcccgtcaataaagtggtttgaacccaaaaaaaaaaaaaaaaaccc

SEQ ID NO: 214316 - DNA, 773 bp, Homo Sapiens
  misc_feature (624)..(625): n is a, c, g, or t
  misc_feature (673)..(673): n is a, c, g, or t
  misc_feature (683)..(683): n is a, c, g, or t
  misc_feature (685)..(685): n is a, c, g, or t
ggggacaactcggtggtggccactgcgcagaccaggcttcgctcgtactcgtgcgcctcgcttcgcttttcctccgcaaccatgtctgacaaacccgatatggctgagatcgagaaattcgataagtcgaaactgaagaagacagagacgcaatagaaaaatccactgccttccaaagaaacgattgaacaggagaagcaagcaggcgaatcgtaatgaggcgtgcgccgccaatatgcactgtacattccacaagcattgccttcttattttacttcttttagctgtttaactttgtaagatgcaaagaggttggatcaagtttaaatgactgtgctgcccctttcacatcaaagaactactgacaacgaaggccgcgcctgcctttcccatctgtctatctatctggctggcagggaaggaaagaacttgcatgttggtgaaggaagaagtggggtgggacgacagtgaaatctagagtaaaaccaagctggcccaaggtgtcctgcaggctgtaatgcagtttaatcagagtgccatttttttttttgttcaaaatgattttaattattggaatgcacaattttttttatatgcaaataaaaaagtttaaaaaatttaaannacaaacaaaaaccaacccaaaaaacacccaacacacacaacacaaacnaaataaaaananccccaacaacccacctaccccattttacaagcacacacattcaaccccaataatttttttatgtgggggcgcctctcgggcccctgaa

SEQ ID NO: 214317 - DNA, 925 bp, Homo Sapiens
aggctggaccggtccggattcccgggatgctttagcgtaattgctcagagtagagagcccccacaaagttatttaaaagatgccctagcagcaatccaccagtttttctaagctagaacctttgagtcccccaaactgcctgaagacttaagttttgtgggcactggaagtcactttgatagatggattgaaactgttcctatttgccctgggacggtttctatctatcaaaggaaggttttcacctgtagaaagccccctgcctccagccaaatagtcccatgctgactttctatcttcctttctcaaactgtcttaggaaggaccttcagtgcagatcaggtgcagtaatggctttcttgtcccttaattattcaccagacccagaagttgtacgcatttaatgctgtttgtaaccatgcatctgttttcattctttgctgtaccttttgctgcccatcctgttacttttgagtttctttcattgtggttgttcttgggttcttttgtcttgtcagagctcttctataacctcgctctaatggcttaacagttgttctgggtggaaacgtcccctcatttgaatgctcctctaaaaaaaaaaagaaaagaaaactgtattcattccctttaaaatgaaacattcctggtttatttgtccatgcctctagcctgggtgagtgaagctggctgtgttggcctgggtgattgttcaggttgtagaatgcgcattttacattgtttatgataattgaagggtacttctgtctgctccaatttccattcctttggtatactcagtatgtcctaataaaggaaagcttttccactctactggctcctttaagaagcaaaagtaggtttaaattttatacttcactgaactagggtctttctctcttcccctgttcttgaaaggaagtaa

SEQ ID NO: 214318 - DNA, 757 bp, Homo Sapiens; identical to SEQ ID NO: 52334
  misc_feature (757)..(757): n is a, c, g, or t

SEQ ID NO: 214319 - DNA, 1000 bp, Homo Sapiens
  misc_feature (679)..(683): n is a, c, g, or t
  misc_feature (685)..(685): n is a, c, g, or t
  misc_feature (687)..(687): n is a, c, g, or t
  misc_feature (689)..(689): n is a, c, g, or t
  misc_feature (691)..(692): n is a, c, g, or t
  misc_feature (698)..(698): n is a, c, g, or t
agaggctggtccggtccggattctcgggattgaaatttgcttttggcatcttcttcagtagcccaaaactgtcctgccgttttccaagaacactttccgtccataatgaggcaaggggaataaattgatacaaattcatgatttgagaagtggattgtttccctctcttctacgagtttggatccctgatcagtagacagacacataagacaactttctactgtgcaaattaaataaggattctgccagcaggccttcctttccattaccgcctatttccatttttcaagacaagtaaaaataatagtggaacaatatcttcaaaaaaattactagagcaacataatgcatgatatacaatatataaaataggacagcagaatccactacagaaataaaacatgggacttgggacagattgcattatgctctgaaaagtgaagtaactaagggtaaccgtaaagcttcgtatttatagactgcctttcccctgaggatctcagagtggttaatgttccaggagcgagggtgcttatggacttctgcaccattacttaagcaacttcattttttggcagaggtgccagcttgatatgaaaccacatgctgtgcaaggaccatttatataattaactccatttttgtaacacacctgcttctaagtggaaatcaactaccnnnnnanananannatattnaataaaacaaaaattttctcaattaataatcccaataaattcaattatatgttttcacttgcggcatcagtattatcgcatcgccattggtgtccggcctccgattactcgcccttagcctccctccacatcatatattctgggggggggcgcccctttcataaaaaaaccccgcggagggggggggggattaattatagcgcctcacccaccctttttttttttttaaaaaaaaagggcgccccccatagtgagagggggtgctttttatatataataaatccgaagccttgcgattcctt

SEQ ID NO: 214320 - DNA, 446 bp, Homo Sapiens
  misc_feature (446)..(446): n is a, c, g, or t
ttgggtctgaacgcgaaataaagaaatcctctcagcccgcctttgccagcgtcgtccctcccaccccacccagaccacgtccaacagcctgggactttcgggaccctggggtcggggcaccgtgtggagtgagacaggcgtgaaagacagcggctgcggccacccagggcaccagccacatcctcttcctcgtccccgcccctcagcctccctcctctggctcctggctggtgggtctgggggcaaggcagaggcgctccaggtggaggggggcgggccggggtgcccacgctggggtgacgcaagaagaaaactcccgggcctcagagtcggcgccggaaacctaggtctgggtttccctcgtggtggttgtgtactgaggacctggaagtgatcatattttggatatattcggttaaataaaatcagcggttaggattcaaaan

SEQ ID NO: 214321 - DNA, 763 bp, Homo Sapiens
ttatcttgctggtcctaggaggggtacactaccccaagaatcaagacatctgagttctagttctagttctagctctgccactgaagagccaccttacctggggcaagttagccattgtctcccagtcatgtttaccacccatgaaaggactcgtcggtttgatgtttccattaagctcaatgagtaactctaatagttactcttgaatctggattgaaaaacaccatgcatctgatgagataattcataaatgttgccccttttttaaatgatacaaccctaaaagtgactgaattgcccaagtgcttgaacatggcagaggtagttactcctattttgcagtttgtgcacttaaaaattcctacagtgattgttactttactggggaaaaaagatgaggtgaaacttcctcccaaggaattaaaatatctgtagaagccatggcttgcttttataatgtggaaatcatttgatttgctgtaattcacgcagatccctccttttgtcagggggaaatgatttgcatcatgttcttttttcataatgcttttacttcctgtttggatcagttgtatgtaaatgtacatttttgttactttggctgtgcccgttagaatttatcttccataaagtatttctcccattgagtctaatgatgtatactttgcctaggtctttccaaattaaatttatgtaaaaggccattttatataaaatatgattaaaaatagtatgtctggtttcaaaaaaaaaaaaaaaaaag

SEQ ID NO: 214322 - DNA, 808 bp, Homo Sapiens; identical to SEQ ID NO: 49506
  misc_feature (787)..(793): n is a, c, g, or t
  misc_feature (795)..(796): n is a, c, g, or t
  misc_feature (798)..(808): n is a, c, g, or t

SEQ ID NO: 214323 - DNA, 793 bp, Homo Sapiens; identical to SEQ ID NO: 44893
  misc_feature (780)..(781): n is a, c, g, or t
  misc_feature (793)..(793): n is a, c, g, or t

SEQ ID NO: 214324 - DNA, 849 bp, Homo Sapiens
ttttactgagatataaattagaatggcatgtgctgcaaggcagaatgtatgggagccaatcatttggctagtaaaggagcccagccaactggccagcagcttcagctcatcacagctttgttgttctcaacttgttgaatatcatgcattcattcattaattcaaccagtatttgttgagcacctaatatgtgccaggcactgccactgcaatcttataaatggagttttaaatttgcaaatgtattttatttgtaattgttatttttatgtgtggaaaacagaatggattgctagtgttggtgagtaaaaacaaaaaaaaacaaatgacaaagaatgtgatagctcatattttagaaatggctttataaatcaccttggttccctatcagtagagctagtaaggcagcaccaatctctaaatatagaagaaatttccccaaaatgtaaaatgccagacatgtcccagcccgaactcccccaccccatggcctggaggtttctagatggaattggccacatttgctttagtctctctatccagctaaataggcttggggaaagctgtggtgctacagaaagtaccctagacttagaagcagtaatactggtttctagttctatttctgacactgcctccctgtgtggtcttgagcaagtcacttcacttttctgtgctttggcttcctctactctaaaaatgggataacagtatctatctgatctactgtgtaatgcttctctctgtgcctcaacttcctgatctgcaaaattggttttaataataatgccctactcacagggttgtttgtgaggatttgcccttaatatatatgtacagtgccctggc

SEQ ID NO: 214325 - DNA, 553 bp, Homo Sapiens; identical to SEQ ID NO: 45538
  misc_feature (549)..(550): n is a, c, g, or t
  misc_feature (553)..(553): n is a, c, g, or t

SEQ ID NO: 214326 - DNA, 895 bp, Homo Sapiens
ctggaccggtccggaattctccggatcaagttgccacaccagcattaaacctttctgttcgcttcccaatacctgatcttcgatctgatcaagaaagaggaccatggtttaagaagtcacttcagaaggagatcctttatttagccttcacagatctagaatttaagactgaatttataggaggatcaaccccagaacaaattaaattggaacttacctttagagaactaattggatcgttccaggaagagaaaggagatccatctattaagtttttccatgtgtctagtggagtagatggagatacaacatcgtcagatgactttgactggccacgaattgaactgaaaataaatccaccagccatgcattccattttggagagaattgcagctgaagaagaagaggagaatgatggtcactaccaggaggaagaggaaggaggtgctcattccttgaaagatgtttgtgatctaagaagaccagccccatctcctttttcttctcgtagagtaatgtttgaaaatgaacagatggtgatgccaggagaccctgtagaaatgacagaatttcaggataaagcaatcagcaattctcactatgtgcctggaacttacgttaccaaatatttatgtaacactacctaataagagcttttatgagaagctttataataggatctttaatgacttgctactgtgggaaaccaacagcttctttaccagtggaagacatttcgagaatatttccctatggccattgggcttttcagttagcccggtccgctcatttaatacctttccaaaaaaagaaagtttttagtggccatttaaaaatctgcaggttccccaatgaatgaaggaaaagtggaatcttggaggaaggaaaacttttg

SEQ ID NO: 214327 - DNA, 888 bp, Homo Sapiens
  misc_feature (558)..(558): n is a, c, g, or t
gtgttctagctccaatgtctattaaaaggttggaaaacaggccagtgtagggacctgactcctgcaaagggcctaccgcagccctctgcactcaagcagcagccccatccagaccaggagtgtgttctgttctcctggcaggcagggctgataggtgtaggatggcgtctgtttcctttgcagtgtgggctggtcagaggagaaacagcaacttcctgctccttctcactgtgtcgttggctcaccatagaccacgtcctgcattccctctgattctctcatggggagagccctggaccttctggtggtgtcccagctgggtgggttcaaggctgctaccccgcttggggcagctggcctgcagggaagggccagacggcacctctcagtggagactgaatcttccttccttcaggaggctgcctccagggaagacctggggtccttcctgcgctcagcgctggctggctgtcctgttcatgcagtggaagacattacagaagaattcatacgagaagaacatgaagcctgtggagagggcagccttcagcaagctgngggacaggcccttgaagaagcccagggcgccttccttttgtagcacctgcttggcacagtccatgaggcccttgtatctccgtacctggccaaaggcagctctggcatgctcaaacccttcaacctgtagccgcttcttgaagaggcccagcggatttgtcagggtcttggtgatgacaccagctcccctgccacaaagcatggtttgggaggttctcatttttctttccctccggctggcatgcgcccacttgcccaggcgcttcaggaagcctttaccaagagtacctgtaccccggcgtaaggggaagaatgcgcaacacaggtggg

SEQ ID NO: 214328 - DNA, 898 bp, Homo Sapiens
agaatgccctgcaaggcatcaactggaatgtgtttattaccaaacaagacagaagagaaccagggcctgacttggcagtggccccaggctgcatgggctcaggtaggctcagaccggccccaggagtgggagagcccagagaagagggaaaaagagtagcggccaggaggggtctggctgggacatgccactctgggccatcagcttctggatccactcaaagtggtggctgatattggtgtagacaccgggccgattgggccgaccacagcccactccccagctcacgactccaatctgataccacagtccattcttgttacaggccaagggtccacctgagtcaccgaagcaggcatccttcccgccttgggcattgccagcacaaaccatgtctccaaagatgtccttgcggaaactgtacttgaggaagaggtggttgcacatagagttgtttatgatggcgacctgaacttcctggagggtgtggggagatggcagtgcctcatcctctttgatgtacccccagccagtcacccagcagtctgtccggttctcaaactcaaatgtggaggcctggagacagatgggctggatgtgtttagtgtaggtgacaggtgcagacagcttcaccaaggcaatgtcataggggtgaattccccaggtagcgagggctcagatagatattcgatacgaaagaacgggtgtagtaaggcctgcaggctcccagaagatggcatggaagtcagctgcccaaactggaccatccacccggagggatcacttaggtcactataggtttcaaagcaaggcggccgccgggagtgccccaacggggcctgagcaagcctcacttcgcatacggggggaaatcccaaaggcgccgggtttccctgcc

SEQ ID NO: 214329 - DNA, 933 bp, Homo Sapiens
  misc_feature (18)..(18): n is a, c, g, or t
tttttccgattttttttntattcgtacagatgcaaagtagtagctcagaggctctgggtaatagcattcctgagattgatgacatccattacctcactagtccaacttctccagactaacgcagacttttctcttcccttggcctttcctctcctcgccattgggccaattccttcgatttctcatttcccttgaagttagggccattcacagtttcatggtcaaagccagttccaggttcaatagtctgtgatttatccaggctctgaggtatgcaccgcttctgttttgctcgttcctccaagagctagtttggccagaaaggggatgctttataccatagaacacatccaccttctagaacctgctctagaaggccaggccctcagattccacatggttggagttctggccaagtctggagctttcttcacactcggctctcagagctctgggttcagaaaaaactgagcatggtgagagaagacagtgtcagaccgaggccccctggaggacctttggaacctctgatagtctgtcataccagagcatgattttctctaatgttcagacctggcttcactgaggaatagttcaggcgatcagggcctagagacaagactcccaactgcctttattcccttctgttttcctggcaaccccactacttcctccaaagggttcggttgccaaagttgctaggcctgctggctgacctccggagcattaatgaggcctacgggttcccaaattcaccacattccagggccttgtctgcccatgaggccgcttgcttccaggaaaatctgcaggcttgagggccatgcctaactttcctttcccaagctaaccttggaacaccccttggaaacactgggagtgggaaaacagcccgcagccccacaaaatggggcgcgggttcccaacgggact

SEQ ID NO: 214330 - DNA, 961 bp, Homo Sapiens; identical to SEQ ID NO: 41753
  misc_feature (825)..(825): n is a, c, g, or t
  misc_feature (917)..(917): n is a, c, g, or t

SEQ ID NO: 214331 - DNA, 919 bp, Homo Sapiens
  misc_feature (24)..(25): n is a, c, g, or t
  misc_feature (690)..(690): n is a, c, g, or t
  misc_feature (731)..(731): n is a, c, g, or t
atggtataacacgacttttaatanntttatttatgtttagggttgcaatacaagaacatgaaaaacagtatcaaatgaagtgatcattttcagtgaaagggaaggtagaacacaatacaaagaaaacacggtatctttagtttacaattacacaatataagatgaagaaactttttcaaaaatactatgttatattaacacctcagtggtaaacaataacatcattatgattaaatttataggccactatatgtcacatacacaaggtctcagttgaatcaaatgtggtcttttcacattagatgtatgctaatctttttcaagcagtcaaacttcaaaatacactgttttatttactataagtactggatttctatagcaaactaatgaaggcacagctagtgcaagcagatttaaacccttagtcttatgggctggaaaaaagaaaaaaataaaacacttgcattggtacttcatgaactttttttttcaagcaaatatttgtttcagttaacaattctgacagtttcacagctacagtctaacagaaacatgaccaaaggacatcacaaaaatcaacactgtgtagcaccaaactaacatgctttagataattgacaacagcttacatattttgaagaatattatactacaacagcctagatagaataaactggcacttagacactntttaggactatttttaaatatagactaccaagaaaccacanaaacttgactattaggaataatagtgttcaggttacaggtcagggttttacttttttcaagcctgtatgaatctgcttcacttcttgagatttaagattcttgaaaaacttttagaatgaactatttcctggatttcttgttccataagggttgccaaatggttagtaggaccattgactttttcagt

SEQ ID NO: 214332 - DNA, 900 bp, Homo Sapiens
tttaaaccttttattttgcctaaagcaagagaaaacaagcttaaccaggtaacacatgcttcaaagcctcgacagccaggatttcagagatgctagatctcgcggccccccaaagagaagcacggtggcttcacacagaccgccacatgctgcacacgtccaggtgccacacccatgtgcccacacccgtgaaaatgctagtgtgttgtctgccaacccactctctgtcaggcatctgccgtctaccctcgtgtaaatacacgttgttcagtcttgtggaaaacattagctttctcccttagacgggtataaaatattcatcaccaaatgcaaaaatcaaaagcacaatgtgtgatcaactatcagcccacacaggacaccactcggatgccagctgctcatttggaacaagcacacagcattcctgtctctgccaagcatattttcccatctccaggctaggaaaacgccttcactggcctgccgctgaggcagacgcggggatgagcttgggcttggcttgctggggcggggccatgtccgggatcttctccccgtgtttgtacacgctcactgtcacgtcgatcttctccccgccatacttattcttgatgttgatgctgtacttgcccgagtccttggaggtcacgcctttgatggtcatgctgacgtacttggcctgctccaccttcaccgagaagtgctcgctgagctggatgccctggtcgttcttgaaccaaaacacttcggggtcagggttttccaaaaccccgtgccaggtaagattcaaggttcttccctttccatgagggtcaccaagtcaagcgaggccgcccgttcaacctggccacgtatttgttcggaacgggtcaaggggaagcgttgatgggttgtctttgg

SEQ ID NO: 214333 - DNA, 911 bp, Homo Sapiens
  misc_feature (636)..(636): n is a, c, g, or t
  misc_feature (870)..(870): n is a, c, g, or t
aggtggataaatttattgcaccttgaaaactaaatataactcagatgagtcagacaaaaaaaatcattgacattaaaattattattatttgaccaggtttgtcttttgaagatttctctcacaggcacttctgcaacaaatttgtataatttaatataaatattttgtgattattcttaaaggccaagcaatgggcatttatgatggctaatcataaatacacaataatatatattacatagtatatattaattgacaggttgcattttttctttgagcttatacacttttggaaaaagtctaccttttataaatatcaagttggatattcttgtctgttgcatttgctaaataagagtcaatagttaagaatctgtttcttttatatatgtcggattgtatccatttggaatacagaatcccctgcataaaactagcatgttttgctgaagtacttgttaacttggctctaaaatattttttattttcctaatatatagcatttatttttaaaagattaatcccttcacccatttctgcaaggctcttttgtagctcaaaaaattaccataaagggaaagaaagtcctccagctccctactacaattactttagaattgaggtcagaaaactttntctgtaaaggatctgctgcatctattcaactctgcagttgtagtgcaaaaccagcttagacaatagcaaatgaatgggtgtggccatgtttgactcatggttgtaagttgcctacctttgctttagtgcatctaaattaacactgttcatattaaatatccagcaagataaacaataatttggtgctaaaagaaagttaccgaatctttttcttttagagtcttttaggaaagnatcatgtattgcttggaaaggattctctatttaaatatatt

SEQ ID NO: 214334 - DNA, 889 bp, Homo Sapiens
gtagacagcaacttttagtttttacaagtacagaaaacgcaaattttcatagcatcaattttagaaaagaaagattaaggttcccatctgcggtgctttttccaatctgcccatcacccgtccctctgaagaagcacgcacactccagatgtctccttcattgatccatttctctctggctgtctctattcctaagtcagagttactcttgctgctgctgctgctgctgctgctgctacggtggtggcggcggcggtggtggcggtggctgccgaggcctcatggttgtcagctccatgcctcctgaacttcactccactgaaatctggttgggtatgagacagactccggtggaatgaaggacaagagaagcacatggattgtctgaggatctttttctcagagggtggggatgcatgtcaacctcagcctgtagacactgcattacctggccaaaggcctttggcatcccggaatcacacatttgggagatgtcaaggacctgaatactcctacccctcccataggatcacatcctccaaggaggctgcagagagctagttcaacacgtccttgcacctgctgcacagacagacagtgctgagttggggaggtgggtctgtggggccagggactcttgactgtttctcgttttcaaacagccacccagataagtccatgtggaacctcctctgtgtttacctagttgggatgtcgggcaccctctccctttgtctaggtcccactgggtgtgccctaactgagctcgccgtggtggtcccttctagaggaacaaagaaaaaccgggggcctgaattggcttaaaaaaaacacgctactctgggcttggctaccaaggccttggaaatgcggggccatgggcctttct

SEQ ID NO: 214335 - DNA, 926 bp, Homo Sapiens
gagtgcataaaattctttatttagaacataaagtatatgtatatatcatgtaattttaaattcaaacctgtataaaaaagggttgggacatacacctattttaaaaagtacacatacagtatatacacatacacatcacattttacaaccttttttatttaattaaatttcagtcataatagaactatttagaatagtgtcgacatacatttacattattatatgcaaactccaatctatgactgaactgagggtatatctgcgcatccatctaaattaatacttttcaagtccattgatttaaaaaaatggtggcaagtggacactataatcacatattaacccttagaatatagaatagaatattttgattggaaaattatatttagtgagtattgtagctcagagatcaagtactggaaaacggtgtggtttttagtttaacagttgttttaattttattgttaaaaacatcataaggatgtagttggagatggcagttataaataaatttacaatgcttagtaaacatttcaggatcacaaatatccattttagcatggattatttcttgaaaaaacaccttgttataaaatgaaagtaccattatttttatttttacaaacaaaggcattttaagactagttaatggaaagcagcaactttttgaattgtgtgatcaaactccacaaatgggctaattggaatttcaatccgaaagggttttattttaaagtccaattcaaaaatacttttgtttttaaagataaagctgggttaattttagaatttttttttcccacttttcaagttttaaaggggcattaaaggaattcaccccctttttaaattggattttaaaatattcttttcggcaattcaaaaccttttatgggagcatttgacattgtttcggcccttagagt

SEQ ID NO: 214336 - DNA, 904 bp, Homo Sapiens
gaggcccaaacttactttattaagttgaaacagttttgttatttactcaatgtgtcttacaaaaatgaccattatctatgcatgacagtttgggaagcactgctgtctctgtctgtagaagacacagtgaaggcacagacattcccaaaccctcggagaacgtggtggaaatacagactgtgacccaccaccatgcacaagcacccagtgataagatgcagacaccaccgcataccgtggagaagaacatggtgaaggtgtagactgcagcttccagcacatatcgactccgaatggccaggaccacaggtggcagaaacatgaggttgctcaggcagagcaggagtgtggacagcagctggaatccataggtgagcgcatctgcactgtcggtgcagccccagcctctccacccggccttgcactcgcaggctgcgtacagataattgtgtgtgcgcagcagcttgcactggccgtagggcccgcagtcgtccacgcatggggacaggaaggtgcgcatccgcacctcggccgtcgcgttgcggcaccgcacgaaccgaggccccaccccgcacagggagcggagggccaggaaccaggtccccgtctgcgggaatgggattcgcagcctggcaaccctggtggtggcactgacagagaggaggaagccggccagggactctttggaacaggtcactgctgcatcccccaggctaaaggcacctcgtgagtcaagcatccaaacaccgtcacgttttcctggcgcacggagctcgcattgagctggagctccaggctgaaggacccttcactggtccagcactggcaacagccttaatggcgaacacggctgggcgctcagggggaaagggccaccttggggccaagaagatgtaaaaagggg

SEQ ID NO: 214337 - DNA, 902 bp, Homo Sapiens
  misc_feature (770)..(770): n is a, c, g, or t
ttatactttactttgacacaatacggaaaccattctgagaaaaggtagaggccgccttgaagcgaagcctggctccctcctccaccccgggctcggcggcaccatgcaggctcaggctggcactcatcccaggaaactgtcccagttctcagcggtcctggctgtggacggtatctgaaatggtcgctgcggcttgccctgcaccagggcctaccttgttgccaggaagccgcactgctggaggctacctgggcgctgggttttattgctggtgaacttggttacccaccttccagtcacatggtccaggatggtggtgtgatcagaaatggctctggcagtgcccattttgctgagatgaaaggaatcgaaatgtataaactacactgaattctgtgatgctggcaggttgcccctgctcgtcttcagccccaacatgggagctccctggagaagacaggtggagattcactgctgtccacccaggtaaggcaagtcagaactgatgcgccgggatccacagcagcctgagctccaagcccaaccagcgcccccattcctgggccatggtccttttaaggccctcaaagacactccccttctcaggtagaaaaagcctccgctcccctcaccttctaaaatcgtttgtcttgtgctgaatgaaataagcgcttggcagacacaggttcagaagcatggaccagcattacacaggcatggattctggaaagatgaacccctggcaaccaaaccacccttttgtccatcgnttgactgcttacaggaacaaaaatagtcacagaaaggatgcttttgcttccaccaattgtcggagcccccagatgtaagccccgaggtgcccggtttactccttaagacttgatgctgcaaaaatccctcgg

SEQ ID NO: 214338 - DNA, 883 bp, Homo Sapiens
  misc_feature (867)..(867): n is a, c, g, or t
ctgtcctaggtgttctttaatgacgttaaggggccaattaaacagcaaacagcttggcaaggccctggggtgtggtgtgggcacgagtgccttgtgccagtctggccccagcacagcccctttctccagtgactcctggtatggtcaacagcttctggcccaggcctgggccccgagaaggctggagtcctctgctgggtgtacagctgccctgcaggctctgtgaagcgtctatgagcccagcccaggcctggctctaaaagaagtccgaagctttgcgccgggcagggagctgcagcaggttgtccgtgatggaggccgggtcctgtgtgagaggggtgcgtgtggcagagccaggcgccggtgtgcttgtgggggtctgcagcccactggccggggtcttgaggtgggtggagcgtgctggggatggtgtgtagctggcccgcagggcccggtctgtgtacttgctggccgtcctgctcacaaggcgctgtagggctggcgacatggctgggctcaggcctttgggggtgaggctggccagattctccgtcactctccgcaaggcttcctgcttcttggcccggttcttggcagcggcctcgttggccatcttcagacccagccgctccctgcggcctggctccaggatcttaaaagctgggccgggtgtcctgtccacgtagggcgtttccgacccttcaactctcaagggtgtgttctcaacctccccccaggtcatcattcggggactcgttcacaccttgccctgtttgtgctggaacaagcagagaggctggcatcagggggacccgcagccacgctcgaaagcttggccgggggcaaacaccgtgggaacatgctggnaacacttccttttctt

SEQ ID NO: 214339 - DNA, 953 bp, Homo Sapiens
atttattttaatgctgaatttactcccgtgcctaagtttttgtttcttcagtttcttctgggatatctggggaaagaaaaatgtgttaagtttcttagagaaaaccacagtacatcttggaggacttcagcttattctggaggcaggaaacctagtcgttaaggactaagggggaaaaatacttaaatggtagaaatcaacagaacttaagttcattagatgtaaaaagaagtgtacagaatcactcaggttcttgacttaaaagaactaaatgtgatcaattactgaaaacaagcttcttagatttggggagagggcccattttgaagtggctatgtacatctaagtggggccatcagcagataatcatacgggcctgaggtactgaatataaaactaccagttttttttttttttgagacagcgtctcgctctgtcacccaggctggagtgcagtggcgcgatctcggctcactcctagttcctcctcccgggttcatgccattctcctgcctcagcctcctgagtagctgggactacagatacccgccaccacgcccagctaatttttttttgcatttttagtagagacggggtttcactgtgttagccaggatggtctcgatcttctgaccttgtgatccacccaccttagcctcccaaagtgctgggattacagaaaacttaccatttattattagtccaagaaacaaacttaccacatgccaaaattaggacagggttgaaagggtttgcttaagaaataatcttcctttcataggttatttccaaaaggtggttctaaggaatggctctaccagccaccccccaatttttttctttacttttccacatacataataccggggccatcaatctttattttcccttgtttcttttttgggccaaccctcctccttttgtggttataggaaacaaatccgtgacccttt

SEQ ID NO: 214340 - DNA, 934 bp, Homo Sapiens; identical to SEQ ID NO: 52335
  misc_feature (874)..(874): n is a, c, g, or t
  misc_feature (899)..(899): n is a, c, g, or t
  misc_feature (934)..(934): n is a, c, g, or t

SEQ ID NO: 214341 - DNA, 873 bp, Homo Sapiens
atgaatacattttatttcacattcttcaaaatttatacgtaatatgttgtttccaaaatgtaagtcaccctttatataatagttttattatttcatctttctttgatagttttttttttcatcttttctttatggttcttcagtagaagccagaatcttgagttgcccagttaggagcctctgacctgctattctgattaagtttcttctcaatattcatggccaacatctggcttctaaaggaaaggcttttggtcttttcaatcacttgctgatagggtgagactgcattgttacccataaccacatgacctaatttagaatcaatcttggcatccagtcttgcatttctaatcaaatttacaatccacctttcagcttcttctggagtcatgttcaatttatctgccaacatgttaatgctgatacactggtggatgcgacagaaagtctcaaatatgaagagacgggcattttcaatgaaatcctcaagacaagccaccaagaagaagtcattcacaagcactgattcacattccctcagctttttctgagccccatcaaagtcaaagttaacatataaacattcaacaaattctgtaattgggtctttatatgtgtaagactcctgttgaataactttaactagatcttttagaacctgccgacgttttcgaacatccttgtttgttatgactgctgtagtcaaatagcgaagaatgtgtggacacattgtctgaattgcattaagatattgtggctgataaaggaagaggtcaataatattatcgcgacctttgggggtgattgaaagaaaccaacagagaccagtgaatgagccatgttctctgctgaagagactgaagtgaagat

SEQ ID NO: 214342 - DNA, 931 bp, Homo Sapiens; identical to SEQ ID NO: 54580
  misc_feature (820)..(820): n is a, c, g, or t

SEQ ID NO: 214343 - DNA, 923 bp, Homo Sapiens
  misc_feature (20)..(20): n is a, c, g, or t
  misc_feature (25)..(25): n is a, c, g, or t
  misc_feature (28)..(28): n is a, c, g, or t
  misc_feature (215)..(215): n is a, c, g, or t
ggctttagatgccagtttanatttnacngtagaaaaaaagcagagcagagagcgttttccatccatggcctgtgccctgtaatgacgcagcagtatcctagtacattgacgggtttttcctgtcctgccactgtccgctgggcagttataggtcccatgtgttgcgtcttcctgcgaggccttcacaaagatgattttgtcattcgctgaaagtngaagtgaatcaacggcctcctcttgctccgcagcactttattcacactgtgtaaccacactgttttttatgccactttgtgcacagctcatcaaggtcagtctgttcatcttctggcccctgtagcacatggtacagttcaatggtgcggcacagaggcctgasgcagggaggctcccgctgccctcgcaggccctggctgdscctcccctgcccgcccaccttcccatgcccctgcagctccctggttgcacctggcctaggctcctttccatctgcccctctgcccggccctctcaccagggaggcacaacatggcccagtacagttaccttgaaaggaggtgaaggtgacaacagaagccaaatttacagcaggagtgaagccactcagacacagagtgatacagacattagggcatgtgctagcatctgcgctttctctggggactttacaaaacagactcaacaactcagctgtgagaggcagtgcgcccgcctcccagggagaacgaggaaccgccaggagacaggtctacctgcaccaccggcaaaccagagggcccaaggccagggccgtaagccctgggagtacactcccttaaagagtgcagggacaacagtctgtgtgtgaaggtttggagctaaatataaccaaagcatcctgtacataaaggggaatacttcagtggctgagaagagtgaaccgg

SEQ ID NO: 214344 - DNA, 912 bp, Homo Sapiens
  misc_feature (912)..(912): n is a, c, g, or t
tctagtaaaaggcattctccttctggaatattttattagaaaaaaaacacaaaaagataaggcagaaacaaaaatcccagtcatttgcagtatctgttggctttcaatttggtcctcttgtttaaacaaagaaaaatagtaaaattaatctatgtaaaacatgccatatatattcaactgctactaaatataaaaagctataaaactgtgtgttcaattttggttactgtattatcacaacacttatattaaaatatgtatacttttaaatttggtttctataaaaaatggattctaatcccataaaagttatttcctaatattcaataaatgttgcctaagggttttttctatccaaatagcaattttattccggaatttaagggtgctctaaatttccatttaacagggtgagaatgctgtattattacaagtgagaaaagttacaggacatagagtttattccgttttagagtccacatcctgattatattttttatcctcttcttgatttcttacaactagatacatattcacttactcagctggaaaaaatttgtaacattatttactgactttacgtatgtactctaccagctagttaacaggaaatatgtaattaaacattgcctttatcaagtaatgtaaaaaagggtaagagtaactttgcaacataggacttgaatgaacaactggtgatgatcaaaatctggcacttaattgatttatacttgtacactcacagctaaacgtctctacctgtttttctatggtataaatctaggacattacttatctacataggaagaataataaattttaataatgtgcctatgataaaacatcctgcaactctttccaaatctttacaataaaattggcttccagtttccacttggttaagcttttaan

SEQ ID NO: 214345 - DNA, 963 bp, Homo Sapiens
tttttaatcagarctmacarggagagaggagttaaaaaaccaagttggmatttwmtgtagagcagcaggcatcaatttcgcatcacgatagagaatcaacactgagtccactctcaggctgttgcccagcccacccttcagcgctggggtatggggccagctgcacacttgggcccctcatctgtcaccagtgcccacatggtccacatctggkgggggctgaggcggtgaaccagcaggtgccccctatacaggcaggggtctaaggggtccaggggccgccggattccaaatgtcttgaagccagcatggtgcatagggctcagccccagcctcctcaggcacatacccacaaagacatcatcaatggggaagagttcagcatcttccatgatagcctggaggcgccgcactgtggctctggacatgacatatcctcccccaccagcatagggtgggtagtgggtggccctgtacattgagggtgggatgaagtatttgaccttagtgttcctgttgggcagggcttggcggatgacatctcccaccaggaggtcctgggctgggtcccagccatccaggaactctaacacgttggggacgtggacaaagacatcgtcatctccctttagcatgaaatgggcctgggggcaggcagccaccacccagcgctgcaggtgcagctccttgagcgtcaggttgaagaagtcctcagtgaagtcccactggaggatgtcatcaaactccctactctcataggccagcagctgggctggggggagcggatcctgccacccctaggaggaacaccagcttcagctgccggcccctagcccatccccccaccctgccccacgtgctgcggatagccgcacgtcgctccacgtgaccaggctgtgacttgatggccaggagcaagaaggtatccttggaacagcctgaaggctccagcaagatagagaa

SEQ ID NO: 214346 - DNA, 1000 bp, Homo Sapiens
agcacaaaactccaaatacaagtctaccaagactgaaatcacaaagggcatggacaagagacagggttggggtctggctggctcttctctgctaggagctggctgacctctggcctgcccgtcccatcccgcctgactgcagctcaccctgggctgaggacccacggacaccggagagaggtgagggtccaaaggctgctggggaaggggtaggggggtggggtcctcagggaggaagggccttgtkggagggggcgccaagtggaactggagagccctgcttccgtttagaggaggtatttttcagagttcctaccccggctttctggagggcagccccagcttcctgcccctcactttagcaaggggccagaagactgcccagggctgcccactcctgtcttggagaggagctgactcagaggacagtctaagtcagggtgaggatgggagttctgcttcctgccaggggtgcccggcagagggacaggggcgaggttcacacagagcaaagttgcctccactcaacagaagccacgggatctggagaacccaggccctggaaaatgcacctgggccaccatccatctcattaccctaagagccttttgcccctgggtaaaaagtctcctaaattcagccctttagataaataagaaggaccacgccctataagagaatgaagagaggaaaccactgaagagtgtgtgtgagctgggaggtgacagcccaagggaggctctgatggccccaagagagaagtatcagaggtggctggagaggcagccgtgcatgcggagacggaagcgtgctgcagacacggtcaccctcacggaaacagctgtgtgtaacamcctccatgcacgctgcctgttgggcctgagccaagcagcascagggacagaraggcaggtgttgcagggaamcaagsacacgatkgtgcagchggaggtkccagggsggcccacarggactgcccttactsctccctatgtaggta

SEQ ID NO: 214347 - DNA, 743 bp, Homo Sapiens; identical to SEQ ID NO: 50011

SEQ ID NO: 214348 - DNA, 884 bp, Homo Sapiens; identical to SEQ ID NO: 43476

SEQ ID NO: 214349 - DNA, 826 bp, Homo Sapiens
cagatgatctgatcctggtttcgtgactgttggggaccaggatgctggcaggtcaactcgaggccagggaccccaaagagggcacccacccagaggacccgtgcccaggaactggggctgtcatggagaagacagctgtggcagccgaggttctcacggaggactgcaacactggggagatgccaccattacagcagcagatcatcagactccaccaagagcttgggagacagaagtctctgtgggctgatgttcatggaaaactccggagtcatatagatgctttgagggagcagaacatggagctccgagaaaagctgagagctctgcagctgcagcggtggaaagccaggaagaaatctgcagcgtccccacacgcggggcaagaatcgcacactctggcattggaacctgcttttggaaaaatttcacctctgtcagctgatgaagagacaatacccaaatacgctggccacaagaatcagagtgccactctcctgggacaaagatcgtcatctaacaattcagctcctccaaagccaatgagtttaaagatagaaagaattagctcgtggaaaacaccaccacaggaaaatagagataaaaatctttccaggagacgtcaagacagaagagcaacacctactggaaggccaactccctgtgcagagagacgggggggtgtctgaagatggaaaggtggcctcggacacctgtgtcactctacactggccccttggaaaattcaaattcagaataaagttccacttagggtctaataaaagtactccatttggttattcaccatcatataaaattgaaatta

SEQ ID NO: 214350 - DNA, 877 bp, Homo Sapiens
tccggaattctccggattgagttgcgccggggcggcgtcccctccccgcctttggcggctgcgcccgggggcccggcggtccctctcagcttatggaagaagaaccagtgtcagatttcgcagttcaggaatgactttagacaatatcagtcgggcagctgtggatcgaataatccgggtggatcatgcaggcgaatatggagcaaaccgcatctatgccgggcagatggctgtcctgggtcggaccagcgtcgggccagtcattcagaaaatgtgggatcaagaaaaggaccatttgaaaaagttcaatgagttgatggttatgttcagggtccggccaacagttctgatgcccttgtggaacgtgctggggtttgcactgggggcggggaccgccttgctcgggaaggaaggtgccatggcctgcaccgtggcggtggaagagagcatagcacatcactacaacaaccagatcaggacgctgatggaggaggaccctgaaaaatacgaggaacttcttcagctgataaagaaatttcgggatgaagagcttgagcaccatgacataggcctcgaccatgatgcagaattggctccagcctatgccgtcctgaagagcattatccaggccggatgcagagtggcgatatatttatcagaaagattataaagtgtgtccagttttgcctgtctataaaagatgatagtaatttaccaagtgacatttgcagagaaaacagtgtacagttatccgttgctacttttggtacaatgtggaaatttttgtttaataaaatttataaagggttttggtttttttttttttttttttaaaacttccggccagcggggtttgaaatttatttcctcccggggc

SEQ ID NO: 214351 - DNA, 527 bp, Homo Sapiens; identical to SEQ ID NO: 59753

SEQ ID NO: 214352 - DNA, 494 bp, Homo Sapiens
ttttattttccctttaatcaagcaaatctatcacacacattgagtaccttgtcaagaactgtcttatttttatttcatgcattccctgactttatgtgacaagctaatcaagggcagggtcacctcttaaataattcttgatattttctgtgataaccacctataatgctatgcacttagtagcttttaaatagttattactttgaaactgggcttcaaatgcatcttcattttgatctagagattgccattcatctttgtcatcagaaatatcaggaagtgtaggagcctgaaacatattcatgatgaaaccttaaagaacaaaaagaataattgtaaacaggttgcaaaagagctttcattaacttgtcatcaggtgctaagcactcagataaaatactttaactaatggctcttttgtgtgcacggtgggtgatggctgcactttggatggcgttgcctgaaccttccagtgatgtgtttggagttgtgtg

SEQ ID NO: 214353 - DNA, 360 bp, Homo Sapiens
ggggaacaatttatctgcacgaataccccgtgctaccagaatggctgtctcagtacttcgcctgacagttgtcctgggactgcttgtcttattcctgacctgctatgcagacgacaaaccagacaagccagacgacaagccagacgactcgggcaaagacccaaagccagacttccccaaattcctaagcctcctgggcacagagatcattgagaatgcagtcgagttcatcctccgctccatgtccaggagcacgtaagcactgagaaaaacgttgctttttgtccaattctctgttgataatgaccacacaatgacctcatggcattaaaatacatgagaaacaaaaaaaaacatgtc

SEQ ID NO: 214354 - DNA, 711 bp, Homo Sapiens
gggaatccataacatggcatagaacttgaatgtatggatttgagaaaaaatatttacattaacttaattatatgatgatggatgctaattgataagcagtaggttgaaattcactgttacataattcactattatgtcatggttgctggttgcccttaactgaatgattttgaaggaaagctgataactattttgagttaaatttttacaagtggttccttatatggtgcaatgccgctgcaacaaacagtaggaattttgtagcaaaaagtcttaatagtatccatttaaataactgctgcttatttaatgcccatcagtgctaggcccccatctaaatgtgattgttacagtcattaattttcacaattctacaatggctttagaaagaggaaacaaaaatttaggttaaacgacttacctaacatgatttctctagtaagagataaaactgtgattcaaatctatgttagacatgtatctactgtaaccctgtattatttttttttaaccacatagttatcctttttttttttttaatttgggggtttttccaaggttaaaaaaagaaattccaggtgaaagagttgattccatcctttaagggaacctttaattttttaaaggttataagggaagttgaatttatcagggaaagtttaaatgaaagaaattcttttagaaggcccatttaaaaaattccgggttttt

SEQ ID NO: 214355 - DNA, 921 bp, Homo Sapiens; identical to SEQ ID NO: 43404
  misc_feature (585)..(585): n is a, c, g, or t
  misc_feature (860)..(860): n is a, c, g, or t
  misc_feature (921)..(921): n is a, c, g, or t

SEQ ID NO: 214356 - DNA, 854 bp, Homo Sapiens; identical to SEQ ID NO: 53227
  misc_feature (10)..(10): n is a, c, g, or t
  misc_feature (848)..(848): n is a, c, g, or t

SEQ ID NO: 214357 - DNA, 1000 bp, Homo Sapiens
ccgggataaaaattcaacaaaagtccatttgtcctgctactcctttggtgacacacaggtagtgtcaactggaacatcagtaggtatttgatataacctttttgttagcagaaaattagtcactgcttaggttttaagtctgccaaactgggactaagtatgctttaaataggtatagattcttcggtttcttagaattctagatccatgatgtactttaattttttaatgactgtatatttagttttaaccactacttaaagtaatctaagcaaagaattcctattgctctccatcagttcaagataaaaaaacaaaaacaaaacaaaacgaaacctatgttaaaatttgacccgtcaaaattactcagtattgagctgcctaaagccgttttccagaaagagacttgcctgactatagaagaattcccctttgatcatagggtcagtgaataatcaggaaagtaaaagataagaccaaaaaaaaaaaaaaagctttttatttcaatttcaatttagagtttctgttcttattataaattagctacaagtaagactataatggtcatttgaatatggggcaacaggggggcactccagagacagaaagtaccatggcctttaaagcggggtaaaaaacctttccagccaaattttccttgaattcccttaagttggcacgtttttaggtttttttaaaatataaccaaattgggaagcccaaacagggaaaataatttttttttttctccggcccaatttatggaaattggtgtaaccggacatttaaaattgtggaaaattgggggacctttcggatttctaattccgcgcggagaaagacaaatcttatattcttccaaaattttctctcaaaacattgaacttttgaggaaaaagataaacggtgaactgcccagctcttgaggtacccaaggtgcatccccaatcccgtgaaaatttttcggagggtagttcggcgggaaatttttcgcccaaaa

SEQ ID NO: 214358 - DNA, 892 bp, Homo Sapiens
ggctggtaaaccggtccggaattcctgcggatatccccaggaggcagtctgaaatggctcaggaaaaaaaaaaacagcaggtgaaatttgtgcagggggatctcacctgaacaaggatcagaaagacaaggggttgtccccaaacctacccaccctcctagtggcagctggaccctggaccccctcaccaccaccagcctaccccatgctatccatcaccggccagctcatgtcctaaacatctctgcatccctcctctctctccatccacgctgctgcctcactggtcctggccaccacggctctctcagctaggctgcagtcacttccaggctggattccccacccctgcccttgacctcctcctgtcctctactccacaaggcagccagaagaatctgccaatgtatccagtcttctcttgggctagagccttctggtggcttccaatctgcacccatccaagccctttgtgtcaggcaccatctcatcttcataaatcctgtttctattgcctggaggactcccccagccctaacttcccctgttcctaaatgacatttcaccacccttcagatctcaatgtcacttttgacagaaaccttagccaggcatggtagcacacacctgtggtcccagctactctgaaaactgaggagaaaatgatctcttgaagtcaggagttgggggttgcagtgagctaggatttgcaccccttgccactccaacctgggacaaccagagcaagaacccttgttctctagggccagggtgccagtgggcctcacacccctgtaaattcccagccaatttttgggggaaggccttaagggcaagaacaagaatccccccttgaagggtccagaaaagtttccgaagaacccagccccct

SEQ ID NO: 214359 - DNA, 784 bp, Homo Sapiens
  misc_feature (695)..(695): n is a, c, g, or t
  misc_feature (710)..(710): n is a, c, g, or t
ttttttttttttttttgtggaaaataactttattcatgactgtgtttatcacactatcttatggagaagagatgatcaataaatatttgctgaataaatgaatagcagttacaaaacacttgattcatatggaattaatgttggttctcaaagtgaaaaattacaaacagcactgatattcagccagtatacaagtctggtcacagcagttgtataatactgaaataccccctgccactgacctttggcccccagatgcctcccactgccactgctctccccactgggaacccctgaagttcccacaggctcataactaaagggctaatgtcttgcacagcagcgagcacccaggaccgagcagccacatggccgggtctgctggtgaaagcatccattctgactgatcaggacctgaggggcctcatggttacatattttgataatatccctaattataaataaggctcagttatatagtttgaaaacaatgcttctcctcattgcaaaatctcttagaagactccgtagatccaggaacggaaatggaaaatgacagcgtgtcaatctctgaaggttttgggcatttccattagcactccatcttcatgtaaaccagaagatatgcagtttcctgccagtggtagttaggatttccgtaggtacactggatgtcttcccaggacaccaagcanatattggagtcattngagcagaacattttccatccacagcattccggatgtagacacagtaatgaccggagtctgtgaattcctgatgg

SEQ ID NO: 214360 - DNA, 681 bp, Homo Sapiens
  misc_feature (1)..(1): n is a, c, g, or t
  misc_feature (558)..(558): n is a, c, g, or t
  misc_feature (644)..(644): n is a, c, g, or t
ntttttttttttttttttcattttaaaaacgaagttcttgaatttatttaaattactgtcttgcagtgagttggccaagaggaccgcatttccttgttaatatatatgtagacccatgagataaatgggaaaagtgtgattacaatggcaatagccaattgaattcttccaccaactggattctttgaggaactgtggcacaggataatccatgctgtaataatcaccagaccagacagctccctgccttcttcctcatgtaagatgttctgttgtgtacgatgcaagaggtaggacgccaagccaacagcccacaccgtacaaaagagtatgtgtattgcagagatacttttccaaataacattacctgtgacttcagggttaagtccaacaagcagggtcagtactgcagggattgtgtacaccaccacccacacctctgcatctgggtcatttacctgcaccaaggccgccagcgcgaagaaggcggccatgagtccgttgcaggcccgccacagcgctggcgccatggctcggaaaacgcggcgcggggcggtnagtcctgccacgtgcggggcggtgagtcctgccacgtacggtccgcctccctccttgcgcggagggaccgagaccccgcctcggtntcggtgccttggggacactgccgcctcgtgccgaatc

SEQ ID NO: 214361 - DNA, 692 bp, Homo Sapiens
  misc_feature (676)..(676): n is a, c, g, or t
ttttttttttttttttttcctttaacaagcatttattgagtgcctactgtgggcttacaatgcagggcttgggatccggggctccattgagctaggtgacagggtggctgccttgtcacagctcatagtgcagaggtgggaaggcagtgtcctcgtcgtcaccctcacagctcagctctagcaccaacacccgctgcccaggagcaggtgcctggcctgtcagctgctgaaccagttctgtcaccctgaggggcaggtgctgggcctgcttttcaggtgaccatccggccgcatagagcagggctgagccgtgcagcaggatcctcaccctcaacccgtgctgctcctgaagatgagccagcagcgactccagggtcctctcaggctgcccagctggtaccttcagacggtcccaagaggtccacttcaggtgatggaacgtctggatggctggggcaaaaggcatatagcggatgaggtagttttcagccagatgtaggtagctgtggcgaaaggcactacgaggccgtggcccactcaccaccttatacagctccaggcccaacaggcctgccacagctgctgtagtggtggcaatggctgggataatctggcccacaattcgcttgctctgggcacggttgaccggtggaatcccgtagttctgacatctcangctagctgccgctacc

SEQ ID NO: 214362 - DNA, 764 bp, Homo Sapiens
  misc_feature (628)..(628): n is a, c, g, or t
  misc_feature (710)..(710): n is a, c, g, or t
  misc_feature (749)..(749): n is a, c, g, or t
ttttttttttttttttttgatggctacttataatttatttataaaacattttaccagtgagtgatgtctcaagtgagaggtggtaacagatacacaaagcagtttatagcatgcaatatttcaatgcctctgagaggtagaaacagcttgtgctctcagacggccctcagtccttccccttgtcatctttctgtcctagactgtgtcctaactgctcacaagggttcagcggcatgcaaacagtctttaattggttttcttcaaagaggcattgttgactggaaagactggcttgtatttaaactctgctctttttgcaaatgacagactttctcaacagtatttcagaggaaattttgttctgaacagttaactgaatctgaccagattacagacagcaccacccatattactcaatgctaagacacagcatctttgattttctgtatgtcataacattctgaagcttgagttaccgatggagccatttttgcaactacacatcctccttatagttcttgctttcctttcaagcagatcacagggcccagggcaagatgatttccttgaggagaagtagcctgagccttagaaatgcaatttgtataactgaccagcctggctttcnccctcctttaggaatctgattcttcttcctcttcctcctcctcctcttccgtcacatgactctttgtgctcagctccagggntgtttggttgattgatgcttcattgtctacatgcaccancatatcatgtgactg

SEQ ID NO: 214363 - DNA, 652 bp, Homo Sapiens
ttttttttttttttttttcaggaaactgtcataataaactgattttattagaaaaaggcactttaatgccaactgctggaaacacgcatagtaaatacatttgcacaaccaaacacagtgccctccagggggcagggagaagaagagtaggagagggtgatagttgttggcttaacaaagaagagaagagcgagagcgcggccaggggaggtagttaggtcaagtggatggttctgtaccaaggacacagcaaaggtcctcaggcactgattcacattacccaaagtcaccagataatagagttgtttccgtggctgacatttcttagccttgccctcaaacttggcaggagggaggcaagctcgtttaaagaagggagaggggaggagatccaggcaattggcctaggggttggctttgagagagaataggttgacccttcctcggaaagagggaagggggaagcagggagccacgaagagagagaggtgccacgggaactcctggctgccgactcccgtcttcttggtgaaggagtcagggttaggtgtgaaagtgggagatgaggggcattggtacacccaaggaggtctgctgcagtcatcacagaggcaggctggtccgccttcgaggtgagttgcaggcaggctga

SEQ ID NO: 214364 - DNA, 726 bp, Homo Sapiens
ttttttttttttttttctcataaaatgtttattgatttggtcttggcttattgtgtaaaccatttaatagccaaaagtcagaatttaaacatctaaaatacactgaaaatgtgttcttttccaataacatggatgttcacaacagttggtgttacgttagagctaataattatactttagcacgttaacctcagaattctaaggctgagagtcaaacactgctaattcatagaaggcaatagcttgtaataatgaatcataaagctcttctactctttgtagttcagtagataaaaacatctgtctgtagtgaactattttatctgatgggaagaacacccgaggatccgccttcagtatagaatcgaagagaaactgcttcactagctcttttccactagtccgggagtcaccaatcatcagttcaaaatgcttccccactgcatttcgattcatgctcagcacctgatgctgcccatcctgggcaaaagttttatttaataaggcatacagcatggcttccatgatatgaaaatgtaacagtattggaaacagagatgagttctgaatggaaagtcctgttttttccagaacatagaaatctgctttaggcatctttgaaatgatcgaggaaatctcttctaaatagactgatgatgagtatattcctctcattaaactccaacggtcactttgctgccagtccagcactgtcaacttacgatc

SEQ ID NO: 214365 - DNA, 469 bp, Homo Sapiens
ttttttttttttttttttcccggcctgaaaacatttattacaacaaaacgtcagagctatgtgacagtaagttaccacaagctggtagggttgaaccggggcaggagtcgctggtacagggacctcactgcccaccccatgctcagctcctgcctggaggaacctctggctgacccagacacaggatggacagctgtcagaaaatctggacaacagctcggtagggcgattgggcagcctcctcctgtccatgcttctgcccaggctgagcctcggaggaggcctggttcctggtcatcttggggctgacgacaatgctgctgttggtgactcggggcccataccagcctgcccagtactgggtgtccctgcccccatgctggaagaggatgtaccggacaccccgggggtattctgagaaggtgtaggagacctctgtccatgtggcattgttccactgttggctggc

SEQ ID NO: 214366 - DNA, 656 bp, Homo Sapiens
ttttttttttttttgtttcaagtccaatttatttcacacaacacacaggctgctgagggaatccacctgcactgcactcagttgaacttccggcccagtgccgcgtcagagactaaaccatgggagaaagttcacaccctggcctgggccacccaccttcagctctctcctgtgcgtcaggacgcacgctggccccaagagcttcactcaacacggctgggtcctgggcggacgtgggcacagcacttgccaggcgcccctggcaggggctcttctcagtcctccgcaccgctctcctctccgctgtcttcgtcgtcgaccccaccctcggggccctcaacctcctcactgtcctcttccgagtccgtctcctccagccactcctgagtttctgggtccatctccaccaaggccttccacgcctccatcctgtgcaggtccaggcagtgcaggtcgctgagggtgacctggcggtcgccggcctcaaacatgcccccatagacgtagagcaccccatgcttcacagccagcatggcgttggagcgtggacacggcccaggtgcggggctgccggcctcctcaaggctgtcttcgtcctcagaccggggctgccccgccgagcctggcgcggtgagcacctgcttaatggtgacacg

SEQ ID NO: 214367 - DNA, 661 bp, Homo Sapiens
ttttttttttttttttttcaactaaaatggttttattgagatgttttggttggaggagatactttttctggcaacatttctgactcaaggtccctctgggccccagctcttcccatgagacagtcacaacactgtttaatcagctctgcagaggccagccctggagcagaggaggattcagggccatggaggggacctactctgccctgttctggtcactacttctctagactctcatgcactattgtctgtagcaagtgacatttccactggaagcacataaagatggcgacagcctcatttcttcctgagtgaactgaagcccaaagaaaggggaggtcccaccaaaggggaagagagccagggccccacccaacaaggatgctgaaataaactacatgtaatgctttctaggagacaacacagaaatctctactctgaaatccagaatgttaaatatggctccccctctataagttaactgtacaagcttatcaatcatttaaaaccccagcaaccaacaatagcaattaggaatccaaattcatagcacaaaagaacacagataccagtgttggacagtggttttgttatggggactgggtgacagcttatcctaaatcctgcgcatccgtccataccaggagccgggttacccttg

SEQ ID NO: 214368 - DNA, 733 bp, Homo Sapiens
ttttttttttttttttatcattctctgaagagcatattttattaatcttcaagttcctcagcatattaataataaaaacttgatatatattatcaacaagtctgactgttatgcccaaagaaaatccagattattttaaggtgagtttgcttctttttcatctgattcatcatccataacctgttctacgccttctacctccggaatataaaactgcagcatgttctgaattccatttttcagagtaatgattgaactagggcagctggtacaagaaccctggagtttcagctgtacaatgccatcttcaaagcctttgtagattacatcccctccatcttcctgcacagttggccgtattctagtatctaacaattccttaatcattgccacaacttcatcatcttcttcagatcctgcttctcctgaaggtgtttcctcagtaaccaggggtaagccagatgcaaagaagtccatgattgttgcataaatatctggtttcagtaaattccagtctaattcttcattttcctttgtgacagtgatgaaatctggtccaaagaagacactttttactccttcaatcctaaataactgcctagccagaggggagcgaaatgctgcagctggggtgggaaaatccatggtccttgtctcaagaactggttttcctggtaaaactttaagctgtttggatttggggtatcttgtgtttgaataaacatgtatctca

SEQ ID NO: 214369 - DNA, 725 bp, Homo Sapiens
  misc_feature (683)..(683): n is a, c, g, or t
ttttttttttttttttttaataaagcagaaatgtatttattaggcacccttgttcctcacagaggagcaagatccaggcctgagcgcctgggaagtctcttgaggttgcaggaatctccagagaaacataggcgctgcccagccaccaccccgagaacactatttggctggagtgtgaccgccgaggtgatcctggcaggaggctggggttggctcctcgactccacaaacactgaggagtgggtggggacacccatgacacccacccaaacactggcagagagggaggcccttccagatctggggcacatgttgctgggcctgccagggggaggaggagcctggagagtcccttgcccggggccaggtcctcagggccctccccaaatccgcccgcctctcctcgccaccgctgactcagtcccacacgtaggggtttctaaagacctgagagttcttgccgtctttcggcggtgtggccgcctggtggctctgggccgagtacatgtcttcagcccgcagggtcgagttggcactgcccatcacctggctgttggcggtggcccgtgggaggatgatgtcgtaagctccttcggacggaactttgtgcatcagggccatctcagtgggctggtaacactggtcagcagctgccattgtacccgctgtatggtgacaccggnctcttagctacaaggaaaagcaggaacagtttgaagatccca

SEQ ID NO: 214370 - DNA, 758 bp, Homo Sapiens
  misc_feature (727)..(727): n is a, c, g, or t
  misc_feature (751)..(751): n is a, c, g, or t
ttttttttttttttttctgacctgagagaattctttttattacgagtgaacagatgaactaaggtaagcgggtctcagccttccgctggtgcagcatctccacgcagggcctcagccccgtcctggccttgcctgaggactgcaccatgggtgttccttgggcatggaggaggcagcaggaaggggtgacaggagcaggagcaggtgcagggcacctcacaccacaggcctcccccacctctgagctgccaacagccaagactcctggcgaggccgggagaggaggggtgagagggaaggagggtctctgtgaaagcaagccccacccccagagcagagcagagacccaggtctgcaaatcacaccctccccccacgagttcctcctttgaggccagcagcacccgagggagggcaggggctgcacggagaccagagaaaggaaaaccccacagaagaaaactcaaagcatcagtcccatgcgtgtctgctgaacgagtgaatgggcccaaaggctcttctctacaaacggcacgcatccatccgacagggggccacaggacacggccggggccgtctgcgtctgtgcctgtgcagcccacaccagtgcagcccggggccctctcagacctcaccacacgcgtgcccagcacatgtgtgcacacgcagatgcaggagagaaacacaccaccgtctctttgcacacgtgtgcccctgtccggcccggngggctcatctctccttcacgtggntctgtgc

SEQ ID NO: 214371 - DNA, 703 bp, Homo Sapiens
  misc_feature (19)..(19): n is a, c, g, or t
ttttttttttttttttggnttttcccctaattttatgcattcacattaaatggcaaagacaattccctactccaggaagcatgagccttttctatctaaaattcagtactgtttctggacaattttcttctacttcttctaagtcatgtatctatcccataaatatacatcttgatactttacactaggccgagagctccacattttcaccctgaattaattttcaggtttttctcacagatactgcaaagtcaggcagtgttggtccctatgcagtcatctttggaaatttggagagaggccactgcaaagagatttcattccactgcctttccaaatcttgtctgagaaaactccatggtcacagtctttgcatgcggcagaacaggtttgcagcgaaggctcccggggggaaggatattatcctaatacacaggatttgggcctctgtcaaaatgagcattcttcacggctgcagagtgcccaggcatgttttgggaaaaagtcttgagagtggacagaagtgaagggaaggagtagagaactggttcagttgtgacaaccaagtgggtaaaatctgccctcacctgcctgctactgtccaggggagatgggcagaatcttctccataaaaagcagaacatcagtttaatcgcaatttcctctttttattcatttcagacattaacaaactaaatgcaga

SEQ ID NO: 214372 - DNA, 733 bp, Homo Sapiens
ttttttttttttttttgtgtttactacaaactgtttaattgtttcttatcccaataactttacaaatatagaaccacatgctagtctgggggtgctgtgcagtgagtcactacaaactcgctcaggcacagcttaatgccgctgagatccatctaggagcagtcccagcggtggcctcagccacgtgaggaagagggctttggaggagggctgccaagtgtggccaggggacccggcctcaggtctgtggaggtgcttcaacagcacgatgctcattctctgtccgtagtgtctccatatactttctcatcttctccaccatccaggagggtaggacaaaggatttcaattcctctagcttcagatccaggcatcctctgtaatcatcactggccgcaaggtcccggatgtcctcctcgatgaggaggtaggccatcttgccccctgttgcccgcatgtgatgctgctcagccagccagtgcttatcctgggggtcagctgcatacttaaagaggtgtgggtgcttgatgtagattcttcctctggtgccccccatccccagggctttgttggctcgagatcccaacacaaaggtggtagattcattcaggcgagctgggtcccacttggggccttcccggcgaattggttcacaggattttggtttccataccatgccggcggctgcccggtcgcttgacaggatgtgtccaggaggccgtcctttcctctt

SEQ ID NO: 214373 - DNA, 719 bp, Homo Sapiens
ttttttttttttttttttacagaaggagttcaaaatttatttataaatttgtgtaaaagaatataagacctttttcttttgtacatatttgtaccataaagaaagtagggattaaaatctaaaaagacccccaaagctttcaaaacctgatctgagaattagataagaatatgtcacttagaaagacaagcctgtagcacccatagctctgattaacctgaaagcatcaagtgactccctctttttctaccctaccaacatcactctaattatacttccaattagaaaaataatgtagcatttccctggcagtagagtttaaatatgagttcaggaatcagctcctccaaacatgcataaatgaggacaaggagaagccagtcactcctgactgcacggtcaagtgtgtgggcagttgaaattaaggtaaaaacagtgaggctgaacaaaatcacattaagaaaaagcatctcatgaggcttttcgaggtcagttgatgaaggccagataggagtcaatattttctcatataccccagctgttaccgctattcatattccaacagcctccagattgctcgaggccacctggttgacttttgccttggagtcggtccagaaaagcatatttaccctcctgtgttcagtctggtggattttggctctttcttgctcttgctgctgccgtttcagttccagtaatcactcttttgatgttgt

SEQ ID NO: 214374 - DNA, 807 bp, Homo Sapiens
ttttttttttttttttttaacttgaacagggaaagtttaatatagagaattactggctttaacagtgaactggaataatgagggcttcactggtaaaatgcttctgaattgactggaaatccatttggggtgctggggaacgttattcccagagaggtgcctcagtggaggcgctgtgtctcctacgcaacttctgagggctggagggtgccaagggcagctgctgaccgcctggtgcttcaggagctgggtgctggggaagccacatgcactgcggcgtccagaggcagaagcacaaccaacaagaaccacgaaggaggcgcctttcctcctataatgcctgtttggtgccctctactgacaaagcttatcccctttcaaaaaacagccaactgaaaaagctgaatttggaacataaagtcaataaatccataaccagcaatactatggggcctggggtgcgctggcctttagtgagtggagtggggcgaaggatgctgcatgtcctgcagtgggcacagcggccctgcacgggggagaaccatccctgtaaagtgtcagtagtagcccctgtgtcagtcagggtccctgcaagaaatggcagtgcactcacataaggacagtttgagaagagtctcctgacaaggtgagtgtggctctctgcggctactaacagcctgagcctttacctccccaggcctgaacaggggcatggaaagggctgcctgacagggtgacaggagctgtgacctttagccaagggcagccaggaataaatactgggaactcacgctctctcctgtgatt

SEQ ID NO: 214375 - DNA, 756 bp, Homo Sapiens
  misc_feature (664)..(664): n is a, c, g, or t
ttttttttttttttttttaaactaaaacatttgggaggtaaagaatgtttctccttttgctttaggaagtgactaggtttctagaaatgctgtttctttttttttttcctacctcaggacagcctttgtcactgaggatttctagggttagggcttcacaggaagcgtctccttgaacccagagtggttgggttgggcttctggcagtgccaccgagtactcagttgtggcaaaaagcagggtgtccagggtggtctcagtacacttggcgatgaagcgaatgaaaggcctcacgtcgccctcgttggcagcttccaacacgtggtagtagtcggaccgctgctccttgcggatggtgatgggcgggtagcccgcctgcatgaggatgaggttcatgagcagacgggaggtcctcccgttgccatcaatgaaagggtggatgtaaacgagtttataatgggctaaggctgcaaactccactgggtgcaggttcatggcttcctcggagttgagccactgtacaaactcctgcatctgcttttccacatcctgcggatggggagggatgtggtgtccgaccaggacctgtgttgtccgaaacctgccggcttccacggggtccacgtagcccagcacccgcctgtggatctccagcacgtcgctnatggtgacggagccgatgcgcgaaccagagtcgtgttgatgtacttcatggctgcatgcatgcctatgacctcgttctgctcctccaggctc

SEQ ID NO: 214376 - DNA, 692 bp, Homo Sapiens
  misc_feature (356)..(356): n is a, c, g, or t
  misc_feature (359)..(359): n is a, c, g, or t
ttttttttttttttttttctatcactggtagtttgccaaccaccaaactggctcccatgctcccactggtttatttcaaccccaaatattttccaacagaagtagaaaacagggcatattaaacaaacaacaaaccaaccaaccaacaaaactaaaagtgatactgacacagttcaggtgataagcaggaaaatgggattatcagacaccggctctttggcacacactgcgaagtcagcccctctgcccagtctggaaaagcaacggcgtaagtcaatgtgatgaagaggtccagcctctcgtcgggaacttggccgcaaaatgggtaatgcttttctgtaggatgtggagtgtanatngtgttgcaatggtgttttgctcagggctcggcacagacgtcctccggccttccactgcgatgttgctctttggtctcttaacaacatgtggacgaggtgggcgcacctgtccaaagtggactgtgattggccgccggtcttctcggagcttggggtccttggcctccaccagtggggacggtgcagtctttggcagctgctcttctggggtgggggcgcagcattctcggcaatgtccttttgcttcaagcggtttttcacctcttttattcccatttttgcatgatcttttgcgaacttgtagacagtcttcatggccggatttgctttggt

SEQ ID NO: 214377 - DNA, 550 bp, Homo Sapiens
ttttttttttttttttttacattgtaaacaccacatttatttgtctgaggcttgcaaacctctggtaagaagcacagaacgcagggctctccttcatgctgccctgggccccagctcgccaggcatgcaggacagagctggcagatgagtcagaaatctttgggagcagcgccagggaagcagcaggccctgctccttcccatgcccaatcccgccagcacgggcctggactgcagccaggaaggtgggccagccaggatccccaggtaacttcgccacagggacctcttcttggagctgccttcccttccctccccatccctctccaatccccgcagagcttagagcctgggccacatgcttggtccctcacacaaggaccaaaccagctgctgtcaggctgtttctgtgggtcctgtctctccagtcaggaagccagcagggcagggcaggcctggctctcctcctggaatcacaccgtgcacccagctcagcgctgggcactcagctggggaccgggatggacaaagcttgtccagagaaccactgt

SEQ ID NO: 214378 - DNA, 764 bp, Homo Sapiens
  misc_feature (749)..(750): n is a, c, g, or t
ttttttttttttttttttgcaaaaacaagacattttattgaaataatttaccaaacaatgaagtatgataggtataattcaattaacacaggcattttagaaattaaattatatgttaagacttaagagaattcacagattcataattgtattaaggagttcaatatctacatttagaaaacaaagtattgttctcaatcactgaaatgcttaaatgcttgattcttcaaggaatcttctcggctgtaaagacttgagaagcttgtctcctggcaagtttctcctctagagaaagagcaccctctactgccaatatctggtattgcttatgttttaaatttcccatagatttccgaagttgcttgagactgctagcctctatgtcttgctttaataatttctgcatttctcgagaaggacatccaggatcaagtattagtaagcataatgttcggttttttttctcttcaattccaataacagttcgactgtgaccttgatgctgaagatagataggaggtttagatgtacacactacctttggactcccttctccctctgaagaataatagttcaatatccattcaaataagcgagggtgtgtacccaaaggaccagttgatttgtgaaaatcaacaatatgacactttacccttagggaggtcaggagtatatatacttcacatgctccaatccaggcctttgttccctgtaacctgttattaagttgagaggcccctgaggatcannacttccttccatgc

SEQ ID NO: 214379 - DNA, 685 bp, Homo Sapiens
  misc_feature (554)..(554): n is a, c, g, or t
  misc_feature (563)..(563): n is a, c, g, or t
  misc_feature (607)..(607): n is a, c, g, or t
ttttttttttttttttttgaagcaagaggaggtgtttaatgagttctggttcaacacagaggccgccaacggggtctagctatgagtctgtcctgggacccgttcccaccaggccccttgtgggcagtggccaccatccctccctcaggctgtcctggccctcaaggaccccatggcagggccttttccaccatggcctccactgtgctgccatctcttgggaacagggggtcatcccatcctcccaagaaacacttcctcaggcctggccccgatgggctcaggcacacctggcgacatcagaaatggggccctggagtccagaccacaggccagtagttttggggggacagctcctccacctcctccaccggcctatctggggggctctgggtgcccaggggagccgggcaccagtacgtgggtgagtacgtgggcccagcacagggacaggggcggggacagaaaggtcccttcgctgtcatggggctgtcacggggctgagcctggctcgaggaaccccgaatttcagcatgttccagtcaaagacgtantcatagganaagccctgccggtggaagaggttgcggaagagctgacgtaggtnagagtagtcgggcttgtcgtcaaaccgcaaggagcggcagaagttgaggtatgttgagaatcggagggatagctttgc

SEQ ID NO: 214380 - DNA, 744 bp, Homo Sapiens
  misc_feature (453)..(453): n is a, c, g, or t
  misc_feature (633)..(633): n is a, c, g, or t
  misc_feature (678)..(678): n is a, c, g, or t
  misc_feature (723)..(723): n is a, c, g, or t
ttttttttttttttttttattcgtgaaagagacattagagttcatccactctaattcccttcatttaataaatgggaaaacttcatagacaacacagtttgatggaaaaagtaaaaataaaaataaatgagaactaaactaacccagaaaaattatagggtctcacagagagtaagtgataaaaccagagccaagtctatcagcctttttcactctgtggctcctttcactttctttagtcaccagtcctggtgtttagtctcaacctcattcctcttgttgcaatacaatcccatttctaccttgctgcgtctctaaacagataagaattgggtatacttgttccactctgaggctcaaaagacaactattctctccctgtcttttcctcttgtcctcatcccccacctttcccaggctccttctcattcctctccttttcagcttcaaacntgccccctacccctaggaggctctgcctcctcactcccctaaccccacaatcctttccaacaagctttgagtttgatagaaaccaaaaatgatgctttggcagtaggtgacggatggatgtgatctgcctcctacgggaatgctatttaaaggggcagcctcacaatcctctccttccanagtgacaagagaaaagtctgctcctcaatctctccagagctgcanactcagctcaagttaacttctgacttcctcaacctgcaacctggnctgctgctcctgcttcctatt

SEQ ID NO: 214381 - DNA, 671 bp, Homo Sapiens
  misc_feature (1)..(1): n is a, c, g, or t
ntttttttttttttttttctgtttgtgacagtgtcacttgccaagggcagcatctattttgctcactgatgtctcttcattctttcaacaactctttatggggcttttactaggggccaggctatggggagattaggtgaaccctggccttagagtcaggctagagttaaagacttcaatgacattattgcgctaactcaagcactgtgcaatgtggcaagattgcacagagaggcataggaggataaagcagattgcagcgagacctggaggacaggcagcgcacaccaggcagggagaggaagaaaagctgaatgagcggcgaagggcatgtgtgggctgtggcgggaggggcacggtggaccccagagactggcagctgtcagggtggctggagccgagaaggccagagaaagagcagagccagatcttcccagggtttggagtcctttcaagaagttctgcctttacctgtgtgtgttgggaagccactgaagagttggattctgtgtctgcggttcctggaacatggtggccctcaaaagtatttataagatggaaagatgtgtccttttcacctccgggcccctttcagatcccccagcaatctgagaagcaccaccaggcaccctgcgatctttagaagggcaccatagggcgatctgattcgt

SEQ ID NO: 214382 - DNA, 740 bp, Homo Sapiens
  misc_feature (20)..(20): n is a, c, g, or t
ttttttttttttttttttanatttccaccaaagtttatttctctgaaacaatcaccagttgctgtcctctatggcacactgagagccccaggagggtctttaactcccttcctcagattatattcatcccagaaatatagccttggacaataatttggttacagcatagtcccaggaatgaggtcccccaagttgctaagttttacataggggagactgggaaattcaaagaattggatggagaaaccataggatccaagataatgtcagggggttgaagatgttggagaggcatggtagcatcattgagtttgaatctccttctcacttggagtggaagttgtaggattctgcctctaggaaatgtgccatccttctgaataattggacccaggaagaggagtgtaactagagtggccagctctccgccagctgatcacaccaagagagaagatgatgaggcccaggcccagagtcactgcagacacagaaaccttcagggtctgcatgggggacagcccaggtgtccagtcccgaaggatgggctcaggagccccaatgtgctctaccacacaggtgtaagtgtccccgtaagagggggttaaggctaaatgggagagggtctggtatgtccagtctccattgggctgggcagtcttgtgcgcactgctgtgaggcatgacaagttcccgttcttcctccacgtgatagtcattctgctggatagaagcccaacatag

SEQ ID NO: 214383 - DNA, 667 bp, Homo Sapiens
  misc_feature (1)..(1): n is a, c, g, or t
ntttttttttttttttttatatacagaattaaatagcccatttattaatttataaaccataataaaaccagacagtcatttcccgtcaccagcagatcttgcattggaaaaggaaaataatatacaaatttcagcaacttcagagatttcaggaagcctgaatggaggtcgaattcattttggagttcaataatatgttcaaagaatcaggtactatatataatcatatagacaactcccgtaatatctccgcagtgcaaaattatccctgtttcttgtcattcaccagtgagaaaaatccaactgcagacttgactgccttcggtgaaggcacacggcaagttcttctgacaaataacaccctttgggattgactcttcacgttttacacagcaattgtctcagcttgggaccaaagtatttacaaagcaagcgaacaagagacgaagcaagagggacacttctgaggccggtggtgcggaaactcaccgccaaacagggtggggggccagtcacctcttcaggagtgtcccatgtgtcagctgacataacatcttaaatacagaattccaattgaaagaaaaacaaacaacaacaaaagaaacaccagtcaagcataagtgatgttacttcctctctgaacagggaaacatctcgctcgctggga

SEQ ID NO: 214384 - DNA, 637 bp, Homo Sapiens
ttttttttttttttttttgggtttttcaaaaaaccaagctttattattaattttttttggcaccttaattaacaattcatagaatgggtcacttcaggccactcaagagtaccagtgaacactcccccacaaacacaccctgccacaagacatttagcacagaggaacagatccatggccactgcctctgcagtatcaaagagaattagtctttccacaaaacaaattttaacagccaatctctggatttctgtagtggctttagtcaggcatatttatcatcatattagcagtgttcagttcctgcccaacatctttatttaatcccaattcaatgcttatggatgctcagctcatgtttaatgttgcaagccccatcttagcccatcttaattcaaacagaaaagaaacaaaacaaaacaaaaacaaaaaaggtacctgcctggttcatggatccctagccatccagggaccaaattccaaattaggatgacaaagagtttcccttagttcaaaatgacatgtgtttccagtcctaatcccagatgttaatctagccatagtgtcacctgagccttagtccatgtgtatatcacatacttcctctagctttagaatgacttcacaagctgagaaa

SEQ ID NO: 214385 - DNA, 719 bp, Homo Sapiens
  misc_feature (584)..(584): n is a, c, g, or t
ttttttttttttttttttccgccaccagcagcagcatgttttattgcaaccagaatccccggtcacgtggggaagggattggagctagggatgaggcaggacacatctggtccctgacaggacactccccgtccaggatgcaaagccaaaggcccggaacagcctgctcagtggctgagccctgtggccagctgtgccctgtctcttcccctgcccccagtcagggcatccaacggggcagaggcagaagggacgtgaaaaggggggtcggtttcagcaaagccttcacccagggacctgaaggaagaaggagtattgtgatggggtccaggtgccccaagatgctcagggcgcctgggctgacttcaggatgtgtccatgtggttatcagaggaaagcgatggggcctgccctgcccacgtggagagggagggagaggggaaacacggctcagaaggagaatcactggccagcgaccatacaggtgggatcttgggaccctgactccgccgccagggccgggtccacaccccacctcctggctgggccccacctgggaccccagcctaggcagcctcgtgtcnctatgtggggatctgcatgctgtccaggtcctgatccatgatctgcaggacatcatccaggatggaaggccccaggtccacgtgcagggacagcagggagctggcattggacaggaagggtcctcggccctgact

SEQ ID NO: 214386 - DNA, 764 bp, Homo Sapiens
  misc_feature (686)..(686): n is a, c, g, or t
ttttttttttttttttttcaagtcagtccttttattgttaaaaacatccatgcaagggaacatatcctacagtcagtgcccaagtgaaagagcagcaaataagggtggaaaacaaaattctcgcaagttttctcactataatctctcaggcccctcccttcttcacccataatctcttctaaagggacagaaacttcacaatggtcaacttcacaatgctgttaggaaatcaacattctaactgccccaattaaaatgcaatttgctcagggcaaaataataacttttaaaaagacaatcagctttttgttggggtccaggtcagtggtgtgagcagtaagctcagtttaatgggcatcattgagccctgcccatcagtcacacagatcatgcagcgttagcttcagctcattagaaagcaggcggtttcgctcaagttggctgtagagacgctcttccaggtcatcaattgtcttttccagcttggctaccgatctctcagcaaactcagcacgggtctctgcctccttgagtttatcagtaagaatcttgatttcttcctcatatttatcttctttttgagagtacttttcttcagcagcactcagacacttcaggttctggtccatcagtctaatctgctcatccatctctcggcaacgggactctgccagctcagctcgttnctctgtgcgttccaagtctccttcaatgatcaccaacttacgagccactcttcatacttcctatctgcctcttctgca

SEQ ID NO: 214387 - DNA, 720 bp, Homo Sapiens
  misc_feature (672)..(672): n is a, c, g, or t
ttttttttttttttttgtggaaataaacagtcatttattttaaacaattgtaaaatagtttatggaaaccagtggggtaatgcattcaaataaatgccaaaactggttgatggggatccagggtgctaaatcacactgcagaggaatttagctgtggggaacagacagtaaatccagagtgacagaatttcccgtgatggcaaaggtttctgacatccagtccagtactcaaaacccacagcagttcaaacccattttccttaacacagccttgacagccagtgaaattagtgaatttagtcacaagcacctgaaactttctgggatccttttcttcgcttcactgccttcagtaagatttccttcatggtaacctttgtgttgtccacctgaataagggagaatccatgagcagcatttattcgaacaaagagtgactctttggatgtcagaccaggagatgagtacttttcaaccagggccaaagtactgaagccaaacttatgaatgggctcattggaatccagcggggggaaatcggtgtccacctccccatcatcctcagcaatatgcaggcagtaggcactgacattgtcattgagcttcggctcccgtccttcgcttgtatactgccagcagatgagcccgatcaggtcctgcaccctggcgctnggcattgtcaccacggtcattggcagcagtctgtcctggctcgagtgc

SEQ ID NO: 214388 - DNA, 745 bp, Homo Sapiens
  misc_feature (579)..(579): n is a, c, g, or t
  misc_feature (733)..(733): n is a, c, g, or t
tttttttttttttattttaaaatatatgtattatgccacaaaatactcctcatcaccaggcaaagctctagtcaccagggaattaagtttcctggacacagacagcctccaccccaccacaccccaccccaccccacctctccaccccaccaaaagcacacagtgtccaaatctccatcgtgcttgcaactcaggaacagctatctggccgcacagctctagggaaactcaaagcaggaacagctctgggtcctggagacgcccctgagaagagggcccagtatccctggggcctcagtccatcagccgctgctgaaccaggcgggaatagaggtcctgtccctcctggagctgggcaagcttctgcagcttgccctcctggagcaccaggatctggtgggcgcgctgaactgcctgcagcctgtgagcaatcaccagcactgtgcgatccccacgggaattccagtcctgcagggcctgctcgcactgcacatctagggcactagtagcctcatccaggatgaggacccgcgggtctcgtacaagggcccgggcaatggccagacgttgtttctgtcncgcagccagctggctccccttctcgcctacatctgtgtatattccatgctccatttcctggatgaagtcatctgcgtgggcagcctgggcagccgccatcaccttatcatcttcgcagctctgcagcccataagcaatgttgttcctcacaganacggagaacagc

SEQ ID NO: 214389 - DNA, 753 bp, Homo Sapiens
ttttttttttttttttttgccgtcttctgctttattgacaggtaaattgttcaaaaatgttctcacaattcaataattaattacaaagactgagacttacattaaaaaagtaaaaaccagaaccccccaggtgcccatccagcagaaggcccaggagggcagtggggtggcagggctaggtggtgctgggccactcagtgccgacttggggaagtgcacgtcctgaacagccttgccaagcagccgaccggtgggaggacaggggaagcctggcccaagctgtggacaagctgtgtctgccgccacagttaatcacaagcctctgacgacacagggccacagagctggtcactcaacatctggtacaaagggtgaggtgaaatccacgcgcaggggattgctgtgccgtgggccggggccagtgtgcaggagtgtgttgggtgggtctacgtgatcatacgggctactaatcacgggggctccatgcgggggcaggactggtggggggggggggcgggcagggcggggcggggtggggtatcccagtggctgcttcgtggcgccctggggctctgacttccctcagcccagcaggccacagggcctgcctgcaccacgacactcgctggttttatggcaggaggcaaaagccgtggaagcgaatggaaaacagcacagctgacttcacagtagtagatactggtgacacttcatggctgcgacccagaatgaacttaacgcacacagggacgc

SEQ ID NO: 214390 - DNA, 730 bp, Homo Sapiens
ttttttttttttttttttccttagggcagaacttttatttcggcagagtgcagccaagggaagacagcataagcagcttttttgccagggcgaaggggccagaccccggcctggggatggggtgcaagtatggaccacacaggggctggcttggtcactcacggctgcgtcaggctgtcccggtaacggctgcgctggcagggcagtgctcggggccggctggtgtaggtgtaggtgctcggggcccgagaggtgcgatcagtcagcgctgaggccatgtccgggggctgactgcctcgctttcggtggagcttggctttgaagcaggtgggcgctaaggtgttgtgggacccggagagatgtaagtagtgccaagggcaaggattccgcgacgcgaggagaggcgacaacaagggaggcgggcgggacgggaggttaccagcgcaggaggtgggagctatactgggctcgctcccagcaccacagagaccagctgcgggggccgcatcggttgcccagcaacccagggttctgtctgggggcgggaactccgggcagttccggtccccaggtttcccgggaaggactgcggcacaagggacttccggctcttgactccgcccagccgcgccacccaggtaggtgcgcctgcgctttgcgaggttcctggctagggaggcggcttggctggcttgccgtcatccttgagctgcggggcacggtggctgtc

SEQ ID NO: 214391 - DNA, 748 bp, Homo Sapiens
  misc_feature (658)..(658): n is a, c, g, or t
  misc_feature (714)..(714): n is a, c, g, or t
ttttttttttttttttttcacatgttaatattttattaacgccagccagatcaggttacacccacaattccccaagttccctggcctccgggggtaactacctttttaactgatagggaagaatcttcctaagaaaacatatgtaggaggttaagtgttctgaaaaagttttcaatttcacagttgtctccaagacagtcacagtatcctcagtgatactttcaaataaatgaagcattccttcctcaagagggcggacataggacgcattttcatgaaggtattgtgagaacttctgattcaatggagatatagtgtcaatggcagaatcaacaggaaaaatttgaatcctctgttctgtgtaggtatgaaagtttagaagagccgtcacaagatcctgaacaaaagccagggcctgcccagcaatatctcgcatcttcagctggtgtctcctattgtggagtggaacgttcagagcgttgtactgactatattttgtatcattaaaaggtactttttcattgatgattgataaggattcctctaatctacctgacaaatcttcatgaagagtctttaactgtaattgacattcttccgttcgaagtcgacattccttggcttccttttctagagtctgagatttcacttctagttnagccttgtcgttctgcagcttctcaatggtttccatgtacttccggggtgagaccngtcaccacagcttggtgctgggctgcttctgtct

SEQ ID NO: 214392 - DNA, 726 bp, Homo Sapiens
  misc_feature (672)..(672): n is a, c, g, or t
  misc_feature (674)..(674): n is a, c, g, or t
ttttttttttttttttttggcaggtaaaagaaaagactttattaataatcagtgggtgggaggtgagggtgtgcaacgcactgcaagcgcccagttcctcggaggacggcgcgtggctcagtccaggctcatgtcctcctcttcgtccttcttgtccttcgtgtcgccctctttctgctcgggcttggcgttgttctgcatggctttggcaaacgcttccacatcgcccttgttggcggcctccacagcctctgcaggcagaccgaactggcacatgagggggcccagctgccccgaggccaaggctgcgctgaacatgcccagggcctgctggaactggggcgaggtcagggtattctggatctcatccgcggtctgcggcagcgactccccagatggcaagtagggaagcaggcgctcctggacatccgcgttggcgaggatgggagccattatctccggcgtcagcacactggccaggtccacttgctggccgcctgctggcccggctggtacgttcatcgtggccaggatgctctggaggtcgctcagctggatgggctgggtcgggctggctgctgtgctggctccattcccggaactgggcgcggggctcgggctagttgctgaggcagctgctggagcaaaaggggctggggtggcacgggtggnanaggtggtgggatgacgggggtgaccgctgccgactggctccgggagctggag

SEQ ID NO: 214393 - DNA, 685 bp, Homo Sapiens; identical to SEQ ID NO: 53111
  misc_feature (25)..(25): n is a, c, g, or t
  misc_feature (643)..(643): n is a, c, g, or t

SEQ ID NO: 214394 - DNA, 572 bp, Homo Sapiens
ttttttttttttttttttctgggtgcaagaggtttattttgggagccatcccaggaagcccaaggcgggggagtggggaagagagggaagggagagcccccgcaggaagtacatgaatgagtgggttactgctgcgggcaactgggactccatcctgctgggcatcctctgagagtttatgtagaatacacttcagaattgtcctgctcaaggacaatgaagctgaggtcctgctccttattgactcagggttgctgctcctggggacattaaccccccaacacttctagcttgcccagtgcactgactgagcacacagctgtggccaccagagaacctctttgggctgtgatacaggaaaccatcggtgtgcatggtaactctctagcagtgtccttcatgccgggacatggggacacgggcaggcactgctggcatctgctaaccccggaggcccatacttcagaaccggtcagctgggccaaggcctctctaaggcccagcggctctcatgggcaaatgtcaggtgacacagagtcagagaccctggccaaggactccccatccggaga

SEQ ID NO: 214395 - DNA, 715 bp, Homo Sapiens
ttttttttttttttttttcaggtttttattatttattattattgtttgttttgagatgcaatcttgctctgtcacgcaggttggtgtgcaatggtgcgatcttggctcactacaacctccgcctcacgggttcaagcaattctcctgcctcagcctcccaagtagctgggatgatgggcgtccgccgccgtgcctgggtaaatttctgcatttttagtccagatggggtttcaccatgttgggcaggctggtcttgaactcctgacctcaggtgatccgcctgccttggcctcccaaagtgctgggattacaggcgtgagccaccgcgcctggccccaaatgtcatgtttttaaataaaaacatagaaaatgatataaaggttcacagcatcatcaagaaaacagttcccccgtgtcgcggaggcggagatgtccatgccattcctacaccctctgggtctcaggtaatttccttcacggtcaagacctcttcgcggtagcctttcccttcctctggggtgaattcctcccagatgatctcgtcttccacctcatggttatcattcagtttgtctttgatctgtggaactggcgggaacagccgctgtatcctaaggaacctttttaagaggaagccgaggacgatgccacagacaagggttcccacgattaggagcacataaatgtacacagagccgaggttcccgtcgtcaga

SEQ ID NO: 214396 - DNA, 690 bp, Homo Sapiens
  misc_feature (608)..(608): n is a, c, g, or t
  misc_feature (662)..(662): n is a, c, g, or t
ttttttttttttttttttaacatttcatattcttttattctttcttgtttacattcataataaaagtcagtgttagcatccggcaatgtttttgtaattttttgaataaagtcacatttgtaagaggtctcctctacaaactgcaccatataacacaccaaaggttgaagtaagacacacacatgggcccgactgtttgacttcaatctttccactgctttggcatctaactttgcatcttcagaactagaagcctccgtaagcaaacttatttctggatcagcaggccagtatgaaattcggttaactccagcatttacaatcattttcaaacaagcagaacatggttttctgtcttttgtcagtagatactctggtcctctcttcattatctcctaagggtccatgctttccctcttcatttttctgagatttttgccgctgggcttctgctggaaagagctccatccagaggctgagcagagtgaaaaggttgactttagaaagccttggtatctgaccggtcatgctgccagtctgggtgctgactgaccgcccggccctcgcgctctccagattttgcatctgcccagcttctttcatcccanacctagcgtcctctgctgccaaggaaacctctcccagtcagacatgatctcggncctagcgcccccgcctctcctcgtgccg

SEQ ID NO: 214397 - DNA, 723 bp, Homo Sapiens
  misc_feature (628)..(628): n is a, c, g, or t
  misc_feature (713)..(713): n is a, c, g, or t
ttttttttttttttttaagtgttagaaacatttatttgtcaaaaaatttttttaaaaaagggaggagtggagtaaaacaagggtaaatttcagctaatgctgtaccacgatcacaggtcggacataaaaaacaaacaaaacaacaaaacccccaatggtcctagcaatttcagaagagtaacttaagtgttaagagtccagagctaacagaagagtaaaaggctgcttgccactacatggtcattttaaagggaaaggagatgctgcaggtaggcagggagaaggattcaactcctagggaaagcaagataagaggggttccactgcacaggaaaaaggggatgccagcataatccttacctagggctgctcagaggctgagaatataaggaacagagtgaaaggctacagagactagtttcaggaggaaagaaaagtcaacttagaagaattaagaaagaaaacatagttggtcacaaactccttttgtttactgaaacatgaagcaatggaaacatcccggcaaaggggaccgcgcggagcaagttctcatatatgaccgcagcccgagggttcagtccgcaattatcctaccttgaaactctgtgttgtcaaggcccctgatggnctccactgcatcctctgcccgctccatgtgtacgaaggcataatctttcacgatgtcacattcgatgaccggacatactcctcanacttggctcg

SEQ ID NO: 214398 - DNA, 728 bp, Homo Sapiens
  misc_feature (1)..(1): n is a, c, g, or t
ntttttttttttttttttacggtcaaacacaatgatttattaaaaataaaacgtaaaaatgatttttgtacatatgcttccaaatttcaggcatgggatccaagtagatttcatagaaaacgctgtagccaggttatcaagtccttacaacaaagtaaactaccccccaccccaacccccacccaggttttgctacagaatcagcaagttcactccctccctccccccaaaaaacacaaattaaaacaagacattttgctagtataaaaacgaccaaggtccaagtaataataaaaaaatagagtccatcaatgactgtaacacaaaaatgtgtatgtggggccgagtccatcttcagagggagagacaagagaggtggcaggcaaatagaggaacacccccaagggtaagcagccttagaagtggctcccccaagggcaaaacagggaaggcggtgtgtgtgagggggtggggcttaggagttgaccccacttgggctgttggaaagagctacccctatagccactcccaggcattttaaattttcttttagaaggagctgcctccatagccacccccaccgccatagccgcctctgtaaggtccactattactgcgaccgccccagctactgcctccaccgccgccgccgccgccgctcttcatgggcccataggaggactgatgctggctgtagctgccgaagccgccgaagcgttaccgtcctc

SEQ ID NO: 214399 - DNA, 638 bp, Homo Sapiens
  misc_feature (493)..(493): n is a, c, g, or t
  misc_feature (598)..(598): n is a, c, g, or t
  misc_feature (603)..(603): n is a, c, g, or t
tttttttttttttttattaaatgactattttatttacacaccctattcataaataattgaatcctctttttgactgcacaatgattccttgaagatagcctaatgattacactgagtgactacaagtagatcagtgggcttacccatctgtgtgtgaccaccttctcacatctgtactcacacacacactcacacagacacacatatacacaccagcggggcgggaaccccggggcctccgggactctcaaagcaccagcatttggctcccagcatcagtaggggggctcctgtgggaaaactttgccctgtacagaggtgtgaatttgagacagctggagaacaaagagatgtcagccagggagctcccgccccaccctaccccgcccctcggagctggtctgcctttgttcatcctggaaggcatctctttggatttgcaaatattttaatacacagaaactcaaggagagggtgggggtgggggctgggntggtgtgttgccgcccttctgtctttatccaggccttctccagcccccgtaagtggcaacagcattctagagacatgcagtggtgtgctagtaccatacacacancacanacgacacagccagcaacagtggctgggctggttgg

SEQ ID NO: 214400 - DNA, 705 bp, Homo Sapiens
  misc_feature (613)..(613): n is a, c, g, or t
tttttttttttttttccttcttttcctttggctttgttaacccaaacaggcgggtagaggcagaggtggacgcaggggcctggctctgcccttctggtcctttgtttgtctggctggttgaactcagtatgtgaaaaggccccttatctttgtgtgtccgagagatgctgttcctttttggggacactgaaagttctgagtccaatgaccctgatttggctatggaaggtgcagatggcgaggggggctcctcaggactggggaagaacgatgggatcctcatcagcttggtatgtggatgggaaacctgacacaggtcccgttctgtctgccgctggctgagccgctctgcctcccggcgcagctgctcctgttccctctcaagctgtttctgggcagcacgcagtcgctccaggtcatactggtatgtgcccttcttctgctggagctcctcccgctccttttccaggtcctgctgcccctgctgcacctcctcctcgcgctgggccaggagggcctcccgctcccgcagctccctctcacgagcttcccactcacgctcgcgcctgcgcttctcctcgaggtactgggcctgctgcttctgcaggttggncaggtcctggcgctgcttctccaggctgcgctgcttctcctgctcaatgagggagctcgggcgggaaagctgcgagtgagcgcctctcgctc

SEQ ID NO: 214401 - DNA, 750 bp, Homo Sapiens
  misc_feature (721)..(721): n is a, c, g, or t
  misc_feature (736)..(736): n is a, c, g, or t
ttttttttttttttttttacagaacaaacgtgttctttactgtgaagttcattatgaacctgaatccctgatcatttaaagcctattatccaacttatgcctcaagcagcaacatttttgtgttcaacaatttaacttactacacacaccttgtgcaaaatcacaaaccttctcatacatttatgagcttcagaatgtaactgggaagtgtagcacagccctttgtccctctgcattgcatggtgagaaacggctaaagcaaccatcgccgcattctgttttatgagcacaaaggaacacctattcttatctgggccacgcgccccggtccttaggaggatgccagatccccctgggatggcaatggcagaggctgcacagcttcctgaagatgtaggtaccacagcaccagccccgggcagggagccaggccaagggcaacgacagaatcttccggagacagcacagcaacccactcatttgtgtgcacccgcacccacaaccgtcttgcactgggtgcatgtcacgcccagggtgagggaagttgaggcctggcctcacagtgtggaccggctgcgggacaagaacacagtcaactttggctttgcttggaaagctgcttcagatacataactcccggcccctcctgaaaatgatcgttttcttagccggggccctgtgctttaggagaggtttactgtcagagcttgctgttcttttngaactgggccactangctgaggactgctc

SEQ ID NO: 214402 - DNA, 687 bp, Homo Sapiens
ttttttttttttttttttgaggttcagaaattaaaacatttattacatgaagaagaacggaatggggatggccaggttgccggcctgggtggggaggctgggggcgggcagggcagggggaatggggtccattcgacctccccgagggcaacgtccacagctgtagccgagaaaagggcaaatgcacgaggggccaggcccatgcccagctcggggtgaaggcggggcactcaggctggtggggcagggggcgccctctctctgccccttcccaacttaaataggcataaataaaaagcgtccagaccctcaggccaacagaggctgccctgcccagccccgttccgcaggctaacactagtgccggtcatcagtcggtgggccagccggccaggaagaggccaccccaggaagggggccggtcccaggccacggaggtagttggagtcagtgtccggggcggcctggccctcacagcacgatccacgtatatcgctcgctgtccgccagaaccttcagggagcaccctttgtgcagcgcctcattggtcatcctgttgacgtagcggccgctgctctccggcaccagccacttcatgaccatgtccacgcagctcttgcggtaggagctccagacactgccgctggtctgccctttgacctcagtcaggtcgcctacactgactgt

SEQ ID NO: 214403 - DNA, 648 bp, Homo Sapiens
ttttttttttttttttttgcttgtgtgtatttttatttcagggaaagaaatgagggatatgataagaaaaagtctattaaaattgtaaggcttactccagacaccattgcttaaatcactcccctcgcacacagagagaaaacccctggcaagtgcacaaaaacactactcataaaagcacggtgaccagtgaactattatgcaaggcacccccacgtgtcctttcctaaccaggaagcccgtcctctaaggagggggcatgggtcccatccctgcccagcctaggcgtgcttctgtgtccagctttaaggcctctgcgtgaggaaggccacagactcccagctgtcagcacgctgtcatgatgagacttggagcaggggagacgcaccttctcaatctacaaaatgagccatggcgcccattaaaatgtcaaatgtcaactctaaatagtctattgggtgctgtcttgcacggaaatctcagccagaaagaaaaactagagaaaagaaaaaaaagaaaaaagcaattctctcccaccacttcacttttcttggagactgtctatccctcgaattctctttgcctatgtagaaaataacggaaaaaaaaatcaagcaaataactaccaggtcctaagacaagagacaa

SEQ ID NO: 214404 - DNA, 742 bp, Homo Sapiens
ttttttttttttttttttcaccaacccaccaggggtttaattctctgaatcaaaagatcagttcagagaggagccctgctttgtcctcatgcaggggtgaagatgtgcagagcaccctgggaatgtccaagcccagaagagccaggggccagtccctgagcaagtggagaattgggtcctggagtctcaggctgcctcctcctcttcactctcctcctcactctcatgatactgtctgcggtttgtgttaacaaacaggtcagaatcatcttctgagctggactcctctcctgataactgtggctcagctgggagttctggttgagtttgtctgttcctgttgttgtgtttctcagccacttcagagaaggcctcaggccaaaacccctccttctgcagagagcgcacgtggtccttgcagagcacaaacgagatttcagccttcaccttttctccctcttcaatggggtcaacaatgagaaagtcccctctcttgatccagatgttcttgcggtatttggagggcatgctcaccaggaagcgctgcccttgggctgtctccacctcatgcagattgttccctggggtcctgagtaccctgacaatctgctgctggtcggagggcactatgtgctcccctagcacctccttcaccacatgcttcctcttggtggcctgagacatgctgaagtcgtccacactggttaggacgaagagatgtcactcctcctcctgagtcctt

SEQ ID NO: 214405 - DNA, 609 bp, Homo Sapiens
ttttttttttttttttttaccaagatataaaagaaaataataaaatataaaaatatattgcaaagggggtgatgggagggcagcatgggcacagtgcagccccagctcgctgactgccggtggaggtgcaacccactggggctcagcacaggctcatggattgcccggggatgggggccctcttggcacagggacctccaggtacggcacagggtccgagaaggggcctggtcgggcccagtagtccagggctcgaactcggtaggagccagagacagcacctgtgtctgggctgaacacaaagaggttgaaggtcgatggcttcctgctgaccggggtgtacgccttaccgtcctgagagaactggatctcgtatgtccacaggcacttggagcccacgtgttcatccgaccagaccagaaccagctgcccttgggtcaggggcatcgtagtagttcaggaagcctgggccgggggagcactgcgtctacacctgcccttgcatggtcatggagacgttgtcaaagtcgtggtggtctggctcattccacgtctcgaagttccacttggaaacatgcgccagtccgtacctacccctccgtgccgaat

SEQ ID NO: 214406 - DNA, 746 bp, Homo Sapiens
ttttttttttttttttttcaataaatatctgtctttgcctttatccacagtgacctgacacaatagccatagaaaaagtactcacaccaagccccagctggggactgggaatgctagcatatggtatctcaagttggctctcagaactaaacagggataagggcctagaatggaagagggaaccagccagaccctcagtccttcctgtcctggactgggagccacagatgtccctgtgatctgtcactgccctgatctgggtcttcagccattaaagctcagtgtcatcttcagtcaccaacgggggtcttggtgtccttccaaacccctttggccaggacagctgactgttttcctcactccacggtgatgggaacatcttccacatcgcgggggactgcactctgaagctcacgcctgatttcgggcgatagctgtggatggggctgcagccggagcagttctaagagggcctctttctggtctgtggccaagtcggccttgtagcgctggaccaaagtcaggaggcactggtgccacagcacaggcagttcacgcttctctgtccggaaccccaggaagtggaagactagggcatccagcacccggtaaggcagtgcatacttcttatccagcagcagtcgcaggaagatgctgttggcaccgctgtattcatctcagcaattttcagcatggccgcactggagtgcacacagggatggagcacttggtgatgatgctaccac

SEQ ID NO: 214407 - DNA, 712 bp, Homo Sapiens
tttttttttttttttgttaagcatatttgtatattttttactagttatttcatacttgccctgaaagaatacacattcaaaaagcttgaaattaggcaatgtcagtctcatcaaacaaaaccagcattggaagcgaatattaacaaatatcagaatgaaattacaaaatatacatctccagcctcataaaacatgaattttataagcactttcataaacataagaaaaatagctttgacaataactatttgaaaacattattattaataatcttgtatactgtacatgtgcacttaaatgtaatagcaccaacattcattatattatgaaggggatactttataagaattataaattatttttacatgattaaataattttggcagagtaagtccgcaggacttaaataaccagtcagccttagtatctacatctggaccaggaagcctttgtgttacagacacagattccctgtgaagttctccagggtgtaaagaaggccccagggaggtgccgacgggatgtgagggctgcctttcagctcaggcgagcctgcaagcaacagggcagtttgggaagggtcacaggcacaggaagggagcagtgggcaaccattgattacatcaaaccaggatggtttcttctttttaaagaaacttttgttgagtgtttaccacccccatcacacaaatatgctctctaggaaatgtga

SEQ ID NO: 214408 - DNA, 720 bp, Homo Sapiens
ttttttttttttttttttgggtaacatcttgatttaatttacaaataaaaagccaaaaccctcaatgcaaaggaaaactgcagtttacacttattctggagatcatttttaaccacagaaaatgtgcccctgtagcatgtttttaaatggcaagtgctatgattgcccagacatccataaactgcttgtatggagtaagaaattcataaatgaagaaagatttgttttctgtcttgtttctcctaggtcacgaacaggatatttcccacaaaatgttttgacctgaaaggaagtatgattccagtacttctggtcttaactcttctgaattacactgcaagctgaacttcgggtaacttcagccacattttcttttatcaccattttccatgtagtttggcttaaagccctcttgctgtcgcctcagttcctcctgttctctgtgtcggatcatttcttcctcacgccgccgatgctcctcttcatgtcttagttgtatttgcttccgtttttgcaactcttggtttctgagttcttccaagcgtctgagttcttcttgacgcctcattagatcttgcctcattagcattaattggtgttcatgcctagctgcttccatttctgcctccagtttctctttggcttctctgatgtttctatcaacctgctcacgctgctgcttttccatttcatcaagagccatccatcgagatgcatact

SEQ ID NO: 214409 - DNA, 392 bp, Homo Sapiens
tttttttttttttttgttgaaaaatattcatattagtcagttaaatgtgatgagattatgacattgttttatcttttttccccaagttttcaaacatgaaaatctttttaataatttttaaaatatgtttaagtaaaagaaagctctgcaggtactcaatcacttataaacaatatagtagaatacaataaaaagcttttttccagtgggttgtattacataagtaaggctctgattccacaagtaaaggactgaaattaagttgtttttaaaatactgaagagaaaggttcctggagtcagatgttgccttacaggaagtactttcacaactggggtattccccagtctctccccattacatgtttcccaaatttgttatttcctaaatca

SEQ ID NO: 214410 - DNA, 700 bp, Homo Sapiens
ttttttttttttttttttaaaaacttaaagcattgtcctcatgtattttataaaaacaaaatgaacaactttcttacattaaaattaagtgctgaaaagatacaaatgagtagagttattgagcaaataaaaacaggtctgagctactccttttcaacccagtaaggctcagcaatgtcgtatctttcaggttaccagcatcaggggacgtgagctcagctaacaagttttggcaacactgtcctctgctgaatattcccattggcatctgtcatctgcgccaaattagtcctcagtttggaagctgagctagaaggtggaggtaacttggatatagatgtgatagcaccggtgctctcagttatccttttcactgacgttttctccccggtgggaggctttggcaaccgcctcctcagccaggggtgccgcaaagcctggcctggggtcatgcgcactgcaggatcccactctaaacactgttttaagaagtcaaggaaaaggggatcatcacaccccttcagcgcgttaccccactctctgctctccggtgggcccctcagtttccccctccgggaacggcctccgtttaggaccacagagccatctgagagagtcgtgacagtgcagtaacggggatacccttggagctcacaaatttttggctcgtttggatgcatccagcagtttctgtgagggc

SEQ ID NO: 214411 - DNA, 674 bp, Homo Sapiens
ttttttttttttttttttaaatacttacagctttattaggagaaggctgtggtcacctcagcagccagctcccttgtatacacagtatacacagcccagccagcacccaggtccttccatccttctgcagtacatggagtgcaaaagaaccaaacacaacggcggggagggagggtctaccaatgagtgtcagtgtctagtgcttccgggagccaactgccaggctagggacactcaagtccctcaaactgtcatcagctcctgccagaccccactccagcatgtcgaggttcatatgagagtgtttgggccagactcctccaatcagtgcacgcgatgggcagaggaggctagggaatcctgagcccaaagctgtattggtccatccccctcaagaagttgttggagctttcagaacgttcctcttcttgtgtagacatgagataccgctgtaactttactccatcaccagaaacctgtgccttgagtctagtctctgctcagccctcgagagcatggttggattaaggaaatagtcaaaggcaagcaagacaaactccctaggttgtcttggtcatgcgtcttttaaaaagggaaagaagaaaaaccaccacaacagataaaagcaccgaggcctggcttgtgtcaggagccagagaggttgtccttccttg

SEQ ID NO: 214412 - DNA, 706 bp, Homo Sapiens
  misc_feature (663)..(664): n is a, c, g, or t
ttttttttttttttttttcataagagaattagctgtctttatttttatttgagaaggattagcataatatagaaagactatgtatatgagttccttaagacatggcaggacccttgccttttaatacatatttgaaaattataaccatgttgttcaaatcccaaaatactctgggaggagataggggccaaaaaaagaaaataaatcctttttcatggatggtagaattaggatgtttccagaaccagcactgtgcccatcgtagtaggcactgaatttttttttgtaaaagaacattaggatagctcctcaagagaggatgttgttttccataatgaacttcttctggtgctgctgtgagacctccaactccagtaggccactgatgtgtttgagctgttctgaatattctcttctccccagggagcagggggctcttttagcattgacagtgaggagtatgaagcgatgcctgtggaggtgaaactgctccccaggaagctgcagttcttctgtgatcctggagaaagtttgtccagaccgtggcttctagaaggacaggtagcagctccccaatctcctccatcatcactgtaagtgaagtcaggttcagcccccacaggctctgctcatggagtaggccaccattccttcctaccacannacacatttctcggactggaacttcttctgacttattcaggaa

SEQ ID NO: 214413 - DNA, 657 bp, Homo Sapiens
  misc_feature (21)..(21): n is a, c, g, or t
ttttttttttttttttttganaggctcagcagcatttattttctagttttaagaaaatttgattattcttgtatgaggtctaaagtgtgtatctatcagtccaatcaagcttttaaattttcggaaatactaaatttctaaatcataaagcgtcatttaaaaataattaattgtttcagtccaaaaatagcgtgggtcaaactggaattttcaaagtgacgtatctgtggatgatatgcttatggtaccaaaaagactctcaaaaaccaatactcccacgggcaagggaatagccaagtttgttgcggtttccaatgaatgacatcagccctgtgtaggtctcaatcaaaatgggttcagttaacaccatcagtttctttcctcttccagatccagttgaattcttgtgggcattctggatagctggaacaagcttagacatgaacccagacaacttgcaaatttcaaggaatttctcactggtgtatttcataggatgctcagtgaaagtagcataaggaacttcagtggaccatgggttccagcgggacagaagagactgctcctccggactcccccagtagatcctaaggccttctccttgtctcttgtccagggacatcccagggaaggtgaacttgcccaggcagatgcgat

SEQ ID NO: 214414 - DNA, 700 bp, Homo Sapiens
  misc_feature (639)..(639): n is a, c, g, or t
tttttttttttttttattgtacaaaattccccagtactgctttaatagtgaaaaaaacacacacacatacaaaagaagtttcaacacggctcgtcgttagaattcaaagtcttctcctgccatggcgagagcccaggcgaacctctcccgctgtgttttgctgtagatcttctccactggcaccctgaaccgcttgcaccaggcaatgctgatcctggggtccaggtagttgagcttggacgtgcccagggccacctgcttgttctcctccttgtccgtggcctgcacactcagctgcgccagctgctcctgcagcttctccaggagccacctcttcttctccaggacactcctggacttgccatccccttgggctttgtgctcagccctcgccctcctcagctctgccctggcctcagccacctgctccttctttgcctggatcttcgtctggagattctgcatcgacttctcgaacgtactgggggttgctcgctgatggttgcagagaatggccacgactcggttggctcggttgtaggataagatcttagctgctatgctgtcctcggcgcgcgtcagggcccgcagctgctcctgcagagtgatggaggcgttgtaggtccggaacaccttggncgtcagcccgtccatcagctcctggaggtgcttgttcaggctggtcgtggtcagcctgtcg

SEQ ID NO: 214415 - DNA, 672 bp, Homo Sapiens
ttttttttttttatttttgaaccttttaatatacattacaaatattttagaccaatcacattttgttgtaacatatttacaaaacaaaaaatatattacaataaatatgatgaaacagtgaatctgatcaacaacaagctttgtcacaaccagttatttaaaaggaatgcaaagacctgttggtctgcatatattaagagttttgagataaataggggtccagaattataatgtatccggaaaagagatgtgggggaaaatctccaaatttaagtaagattctttctcattgtaattacataatgtttaatgatgttttaaactgtgaacattgatgaattatccaaacatgatacaaagctaatgtagttctatcatttcaaaatacgtgacatccacagaatatccttttaattgttatcattatatactgtagttcacacaatatctacaaatgtgaatgagaaagaaaaacaggtcacagcaacatgtctcacattccaattttaaataagacaagcacatactggatcaaacattattttataatacgttaataaataacacctagttggttatggttaccttgaacagtttatgactgtatatttaaaaagagaaattttcttcgagtttcacattgtcagtaaaaggtaaaataaataatgaact

SEQ ID NO: 214416 - DNA, 729 bp, Homo Sapiens
ttttttttttttttttttgccaaaagaattcgagtatcagtgagatgttctggccagggtacaggagggatgagtgaggcagaaactatcaaagaaaactcatttccccacacccaagaaggagctggatgacccaggtacagatataattttgagatgggaaaattaagggattttaaagaaacagttccagcctcaacaagaagctagagaatgtggtgctcagtgaggggttatcctacttggaggcccagctggtctcccaggttcagccaaacacggaaatctcagatcctcggatgtcatgtggggtggggcagggaagtctcacatgtcttcagccctgcacaaggccaggagggctgactggcaatcccctttcactgcatcctggagagaagagtagagggacttcccaaatttcttcctgaactcagctctgatactcagaaggtcagtctcacatcgagagataaggatgcgaatcaggacttggtaattgggctcagtttcctggagggcttgatgaagtttgtcagcaaagtacagcggtgtgttcttgatcaccgaagctaggccgagcagagccacctgagcatctccatggaaacggttctggacagcctcctccagctcttgcccagtgctccgctggtactgatcaaacactcggatgaggtgttcaggatttcgctgggtgaagactgggaccatgtttcctctctgcta

SEQ ID NO: 214417 - DNA, 744 bp, Homo Sapiens
ttttttttttttttctttgaaaaatcattttaagaaggcaaagttccaaacagggttacacaggagtctactcagtttcctggccatacaggattaacgctgtgccttacgttagagcaacaaacttgactgtccgtgtatatataggtgagggacaaagggtttctgcagccaagcactgcactccattccgctgcctgggcgggccttgagcaggaaggtccctcttgcaccacctcctccacttcagttcagctctctcatgtcttccaccaagaggacatggtctttttccacacagatcacatgggatggtgaatcttcttactcatgaaaaacagcccaaggtactgctaatttgggacgttttatttattggaaaggttctttcaagggaacttttctgcaagaccaagcaatgtatgtatttttctttggtaaattacaatttacattggcacaaaaaacacatggtgactaatgtactttgctctaggacaattaaagaaaatgtattttatcctcacaaatccagtgaagccttcattttatttctaaaagtttaaggaaggtctagtctaccagttataaaaatgaaaaccagttcaactctaatataaacattatttacatttgtttataaaaatagatttgagtttaggaaaagttgaacaactagttatttttacttcagttattaggtacaatgaattccttgatttttcaaggctgaccctgtttccc

SEQ ID NO: 214418 - DNA, 793 bp, Homo Sapiens
  misc_feature (639)..(639): n is a, c, g, or t
  misc_feature (745)..(745): n is a, c, g, or t
  misc_feature (753)..(753): n is a, c, g, or t
ttttttttttttttttttaaggtagaaggccagaactttataccagtagcacatgatccagcataaaggcagtcttgaaatactgcattatccagggacagggcttcagcagctgatctgtcacacaccaggtgtcccacgtaggaatttcttaaaccacaggtaggatgtagctgcagagagtccataccaggtcacgatgtactgcagatgctcgttcctcagagtaactctggtttgccctccaatgggtcctccagggactgtgctctggaagttggcatcaatgaagatgggctctgcgcctgtgattctggccatagcttccaggtctcgataatgccagtggttcctttctggattgttctcagggacaaaaggctgcctggtttctgtcagcctcaccatcccaatgaggtccacttctccctcaatctggcctttctgccgggtttcaggattcactttcttcctgggaacgaaccctctatttaccaggatggtgactcccaggtcggtgcagtggaagggagtgaccacataggccccactctgagttgaggaggagatgaggccgccctcccgggcctcccggacagggtccaccatggtccggggcatcatatacagctccttggnatggtcaaagcaccccctgaccttcactggcctatactccagatttttcagttccattggggtcggctggcagagggacaggctcaaagcagactctggactccanctctgcantcaggttcagcttccacttccgacgctggacctgccatgt

SEQ ID NO: 214419 - DNA, 664 bp, Homo Sapiens
  misc_feature (527)..(527): n is a, c, g, or t
ttttttttttttttttttcaaacaaaaaccctgcgattttaatgagaattaaaggaggatgtaaattaaaaggcctgtttgtctgtacagcaatgcagatgcgcaggcccatcctggtggaggacccagatgcagggagcaaatattcgggttgtgttgctaagagtcgcaggaactactgctagtgatactaggcttgctgcaggaggatgtcacgctgagaaagggagatgactaggagcagaaaaagtactctcactgttccagcttccagcccaatcctagcagaatgaatgcattttaaaatcagtccacattcacatgtgctgagaaggttgttagtggtccctcatctgggcaaagcagacccaagatggtgctgagtgcagagtgcagagcattcttgtgctctcctctcatggctggaactatctgggctttgcgccctggtccagtgctacgtatcaaccccctcaacatgcctgtggctctgacacggggggatgaattaacttgcctctgttcanatatacagacttggtgaggctgtcttttgttagtactgatgcacagggacagaaaaagcctgcaactttcagttgggagaatcctataaaagctgtgagcagcaataatttgcagtattgatcataggaagggaaaa

SEQ ID NO: 214420 - DNA, 671 bp, Homo Sapiens
  misc_feature (529)..(529): n is a, c, g, or t
  misc_feature (628)..(628): n is a, c, g, or t
  misc_feature (667)..(667): n is a, c, g, or t
ttttttttttttttttttcagcctctaagaaatctttaatttcagcccgcacggagccctgcagaaggtgagggaataaatacaaaaggttaagatgcagcatgcccagcccccagcctgcaagggatggggggatgcttgtgggccgcgatttctctcgtccgcaaaccggggcaggacacgctgtgagccaccgagctctgaaagtgacagtgttttccagcggtctgttaccccttgcaaagggaagtccctgcacccctagtccacaggttcctggaaggcgttccttctcctgtccactagagtgcgccagagtccacgcccgaaggcgcctgaaggctctactagccccatcccagggtgtgcgtcacccacagagggtcccagaaccctgcccaggaggtgacacgcccggagatggggctcctgagagatgcccacccacccaagtcctcaatcccctgatttcttcaccttttcatccaccctggcatcccaaatggccgttttgctccttccctttcanaggagggaaactgagtcaagcaagggcaggagtaccctggggggcggctgtcctggtgagaggcagagaagagagcggccagcagcgggccgtccgtcncccgactcccttgcgtgtgggccgaggctggagagatanacca

SEQ ID NO: 214421 - DNA, 718 bp, Homo Sapiens
  misc_feature (672)..(672): n is a, c, g, or t
ttttttttttttttttttgaggactgaaataagagcatgatatttcacaatgaaaataaaaccaggccacgcaagaaccactgcggcctgcccgtgacttggcttcccctgcccagcatcctgtcctccctggtccatctctggtgaggacggctgggagtgggctctgtggctgctagcagggggcagggaggagctgggactgtgggtcgtcctggcccgtgggggctggcggggggtgttcgggccgggcgaggccccgcaggacccgcagggtggccagggccaggcccacgagcaggcgcagcaacaggaaggcgcagggcacggcgatctgcatgaggtggaagatgcccacactgaacctgctcagcaggcaggtggaggcgaaggccagcaggctggcacaggggtacagcgccagcttggcgaacatgagcacatgctcccggccgccaaaccacaccgagggctgcagcgtctccgcctggtgcagcagcgccgtggtccacatggccagctggaagatgctggccaggaagatgatggtgcagctgacacgcacgcgctccagctcatcgcggggctgccgggcgaaggccgaggtctgctggtaggctagtgggaggcacccacgaaggccagcgagagcgtgttcagcagccccatggnccgcgtggccttgcgcacatgcaggaagagtgagtggtgggcgaac

SEQ ID NO: 214422 - DNA, 670 bp, Homo Sapiens
  misc_feature (475)..(475): n is a, c, g, or t
  misc_feature (615)..(615): n is a, c, g, or t
  misc_feature (640)..(640): n is a, c, g, or t
ttttttttttttttttttaagcattcaataaatatttattataattaaaagaccgtagcaatacccccaccaccaagacccttcacccagaaatagagagattggaattgtaaacaccgtatccagttctgaccaccctgaaagccagggcatcatcgcgcccgttttgtcctaaatgaagggctcccggacaatgtcctgaaagtggcagatgacctcatcttccactgtccacagggcacagggcagaccggggtgctctatggggtcctggccgatgcctgggtccaggggtgttccccaggtggtcaggcaaggacacgcggtcattctgcctcctgcgtcttgtcctcgggcgcctgggaccctctctggttccacatgtggttgttcagccccagctgtaccatctgtgcgtggtggataatgaggggttgcagccctgggctctgagggggtgcgggtgaggccgtanggaaggctggggactgcgggaagggcagtgactgtggaaaggctgctggctgtggggagggcggtgggggggtgccagcctgccatgcgtgcaggggtggcggctgcgggcaccccggccaagtgggaaagggtggcggngctcccaggggcacctggcccccanagggcattcgagccccatagggcgccccag

SEQ ID NO: 214423 - DNA, 628 bp, Homo Sapiens
  misc_feature (184)..(184): n is a, c, g, or t
ttttttttttttttttttcaaaagggcttttattaaattctccccacacgatggctcctgcaatctgccacagctctggggcgtgtcctgtagggaaaggccctgttttccctgaggcggggctgggcttgtccatgggtccgcggagctggccgtgcttggcgccatggcgtgtgtctagctncttcttgccgggcacagagctgcggggtctgggggcaccgggagctaagagcaggctctggtgcaggggtggaggcctgtctcttaaccgacaccctgaggtgctcctgagatgctgggtccaccctgagtggcacggggagcagctgtggccggtgctccttcctaggccagtcctggggaaactaagctcgggcccttctttgcaaagaccgaggatggggtgggtgtgggggactcatggggaatggcctgaggagctacgtgtgaagagggcgccggtttgttggctgcagcggcctggagcgcctctctcctgagcctcagtttccctttccgtctaatgaagaacatgccgtctcggtgtctcagggctattaggacttgccctcaggaagtggccttggacgagcgtcatgttattttcacaactgtcctgcgacgt

SEQ ID NO: 214424 - DNA, 735 bp, Homo Sapiens
ttttttttttttttttttaacatcgcatggcagatgggtgttggaataattactttctccacaatctatcattttaatagtttataatagtgcagttcatggaaacatgccaagtccaacaaaagcacaacagattagattacagtcagattgagaagactggtgtgcgttggcagatagacgtgctggacatgctccacacgcgacctgcagacgggacatgactgggaaagaaaagccaacagtctctgttagcatgcaagcctcggtggggggcctgtgtctctgtgcacacccctggtctctagtgcatttaattttctaaatcaattgtgatcacagtgatttctagctttcaattggtagagatctttgccgtctcacaggttgaaagtttatactttacaagggcttaaaaataaatactatgacatagtataaactgaaggaaattaattacatttttagtgaaacgctaaagaaggtacattgaataaagcaattactgaagacgtctttctgtgcagaatgtggtctctacatgagtagactataacacttcaggcagcaatgcaggagacccttcttgaaattgtgtgtccttagctcagctgactgactcaggccaacatttctgggctgatgcccacatggccagggagggtggctctgcttctagccgtaggtggcagctccacattcctggctgacttctcaaagaagccgtgcccatca

SEQ ID NO: 214425 - DNA, 715 bp, Homo Sapiens
ttttttttttttttttttaaatggggacaaaaatatctgctttattattaccacttacttatagaggtgatttacagatttaatgagaatatatcaaagtactttataactcacaaaaatataaacttatataatgctgtttactttgtgttgagcatattctaaattctgggactagtactggaaactttacatatatagtgttagctcttaattctcaacagaaccccacagttgctataattacatttaatgtataaatgactttagagaaacacaaaaaagattgggtgatttgttaaaggtccagctagaaaggggcagtcagaattcaacccaatattacctccaaacagaggttttactttttcctttctactcagagctaacacaacagcattatttaacgttcttaagaatggtggggaggaatcactgaataacctgctttgacaaaacaccctgataaaatctatgcttgtattttagaacccctgggtttcacacattgtttttatagttttcacacatcaagtgtaaggtgaaaagtgatagattttaagaaccaagaatatggtatgcaccccacccaaacttataaacaaatcacaataacatgaaatagaaaaaaaccataaagacttcctttgcttttggaaaacagctgagaaacaacaaattcttttcagaagtacagacaaaatttgtttttgta

SEQ ID NO: 214426 - DNA, 710 bp, Homo Sapiens
tttttttttttttgttttgtggttatttttttttacaactttaaatacggaatataaataaattttacatttaaaaaataaaaggaaagcccccaaaaatataatcaccgactttacaaactgaaggaagcaggttttggaaggcgggaagggggaaagtgcagtaggtgggaagggaggtgggagctcagatcccaccccagggggtcttggggatcttttcccttctctcccccattcccagcccacgagctggtttcctaggaggagccaccagaggtggagctcagaaggatcaaagatggggaagtgtgcaagcagggaggggtgcgggcaagagggctgcaccctcccttggagaccttctcccaggtgtcccacacccacctggaagggcagttgctggagcagaggactttgggaaatggaggtcatgtggacagcagtgttgcctccctgcccctaccacagtctccctcctatttggccactccaagccacaggctgcatcaggggcacagccagtccacaaggagtctttgtgtgaattaggaaaaggatccttttcctctttacctacatctgccagaaattgtcataataaatatacaaatcagctttatctatgatgtgaacagtgctccctgcatacaatgtccttgtgcagtacacaccctgcacaaccttacatggcagtcgtggctgggttg

SEQ ID NO: 214427 - DNA, 802 bp, Homo Sapiens
  misc_feature (528)..(528): n is a, c, g, or t
  misc_feature (547)..(547): n is a, c, g, or t
  misc_feature (625)..(625): n is a, c, g, or t
  misc_feature (693)..(693): n is a, c, g, or t
ttttttttttttttttattaattacatattttattttctgttttacactgatatttcctgtttacacacaagcttctaaccctaaatccagcttcccccaacccaggtgccccataggagttcctggtcactgctcctgcagacaaccgctcccttcctgttggggatggctctcccgctgcgtggtcccctaaacagcccctcccccacctgccttccgctggaaattctcaagtgggaaatacaacgggttttcctttcaatgcaaaactgcttgattctgttttgcatgttataaaagcttagtctcagagttcatgttaagagtgtagaatacacacagtccatgattcagttttctttttggtttttttttgagataggatctcactctgtcacccacccaggctggagtgcagaggtacgatctcggctcactgcacccaccacctcccgagtccaagtgatcctcccgtctcagcctcccaagtagctgggattacaggcgcctgccacaacgcccagctnatttttttattattagtanagacagggtttcaccatgtgggtcaggctggcctagaactcctgacctcagagtgatccacccaccttggcctcccanagtgttgggattctaggtgtgagccaccgcgcccggcctgattcagaatttcctaacatcactttcanagctctgtggactcactggtagatcctccttagtcttcacagatcccccacgatctggacagcctgaaccctgcagctgcagttctggcatacgctgccggacgcctcg

SEQ ID NO: 214428 - DNA, 611 bp, Homo Sapiens
  misc_feature (602)..(602): n is a, c, g, or t
ttttttttttttatttttacacgtttttatttaaaagattccctttttaatctgttccaaagtgttggaagctgaactatacaagttcctgccacccatccttccagtacagttttctgaggacatactttttaaatggaaaaataacaggaggaccctctaactgaaaccaggtaggcccagagtgagctcctcaggcccctgtggcagcctggccaaagctggcctttatggagccagcgcgtggagaagtctggggaaccggggccctccctcttgtgaggaaagggctgagcaaactcatgttctctttagtgaaatggtccaaattcagatccaaaagcctccattatggcattccctggcactcttcttatactttatacattgaaggcagctccctcttttatggccagtataagcaggcaaagaaacaaaggaatatagatacatatatgtgtatatatatatattttatataggtaaaatatatacatattttatatatgtatatatacatatttgggggtagggaaaggagaggagggtcatgtaaacctaaacagtcatcacattaccccaaatgagcctgactttaacanaaagataat

SEQ ID NO: 214429 - DNA, 747 bp, Homo Sapiens
  misc_feature (627)..(627): n is a, c, g, or t
  misc_feature (644)..(644): n is a, c, g, or t
  misc_feature (651)..(651): n is a, c, g, or t
  misc_feature (727)..(727): n is a, c, g, or t
ttttttttttttttttttcacattttaaaaaatgctcatttattctcaagtacttgtgcaaggctgatttcagagtttaggaacgcaccagtcatgaaataatgatcccatcgtagggcttaaaacgctaaacctcagaaaagattaccatctttcaaaagaattgtgggaaaataatgaaaaccaggtagcagaaaagttgtgatcagagaaaacaacacaagaaaacactggagcacacggtatacagttgaagggagaactgttcatccttctagaaccattactattatcaacatcaggaaagtagagatactttcctgaaaggttaatttggttaataagaaatgaaagccactattacatgatgtgagccaacttacctacaagacagaaaaagaaaacaaactatatggaaaaagcctgaggcgagagctaattagctagtctgcaaaaagatccaagaaaaatgccctaactttagacatgttacatattgcacactcaaaaaagaaaaagaaacatttagaaaactattttaaatgtctttaattgctgaatgcctctttggctaatatttggaagatcattatttagtcctacaaccgacgcattgttccactttcncatcattttgtttgcanaccgctnaaagtcttatttcctcatctctttgacacattaccaaagtggaccctatgctgtaatcacacaggataatgttggnaagtatgaatatctaaatta

SEQ ID NO: 214430 - DNA, 684 bp, Homo Sapiens
ttttttttttttttttttcacataacaataatttattcaaatttattaaggcaggagctgggcctaaagagggtgctgagaggcaggagctgggcctggagaggtcaactgaaggaaatttttggcctaaggaggctgccaggaagcaggagctgggcaaaaacaggttgttgttaggcaggatttgggctcatagaggcagccaggaggcaggaactggatctttataaaaggggcaacgtaaggcaggagcagggcctgcagagtctaccaggaagcaggaccagggcacaagaggctgacatgaggcagaaagttgcccttgggaggccactgtgaggcaggactcttgaaaggacgcaaagctgggcctgtagtggctgctaaaaggcaggaacgtggtctggaaggccctggtgaggaaagagttgggccaaaagaggccactaggaggcaggagctgggcctcaggaggctgccataaaacaggagctgggactcggaaggcagacatgaagcaaaagctggcctttggaaggctgatgaaagggagaagccgggcctggtgaggttgacttgagaaagtttggggcctggagagatccatgggaggcaggagccaaacttgtagacgctactggaaggcaggaggtgggcctggtgaggtaacatgaggaattctag

SEQ ID NO: 214431 - DNA, 706 bp, Homo Sapiens
  misc_feature (681)..(681): n is a, c, g, or t
ttttttttttttttttttgcatcataacatttgataaaaatcttttgtttttgttttttgtttttttttttttactaaaataaacctgttcgggggaacagctactagatgaatttaagggttttatgcaccttatagaacttatagcaaaaatagttttagttgatttcattataaataacgttttcaagaacctgtgcaaaactgtcaataatttcctaaagcacaattgatcagaaaaatccatgattgttcagccttcacacccttcttcatgtaagaacacctttctgtacatctcacagttacttattaggttgaaaggtatatggagaatggtcattagacgtctcgacagccacctgctgttgaccacttgcctcctcaacaggaaccgctgtcgtctgcatatgtgcatactgtggcaagtaggctccttgcatagctgacgttgcaggcatgtatgttccggtgctgcctagtgacagatgactcatctgctgggccagagggctgatcattgatgcgggctgtagtgacatggtgtgctccattgagggagttaacacggcaccagggtgctgtagaatatatggttgaggttgcatccacgaaggactttgcaccttgatagcagagccccgatacttgttttctctggtttccctttgcacctggtangcagatacaggagatgcaatatagg

SEQ ID NO: 214432 - DNA, 698 bp, Homo Sapiens
ttttttttttttttttttcccatgacccacacctaccatgggtactgggtatattgaacatcaatcaaaaaaaacacattcaagatgtcaaggaaagttaaaaaaaaaaatcagtaataggaaacatttcaaagcaatggaattcaaaaaactggtctcacagcttaaaaagggacacaactgggatttaaaaagggtctggtaattcaggttctgccaaccttttgagaaatgtggcccctgacggccattgtagctgcttctgctcaggctcaagggcagcctcctgctgtaaggaatcaaagcttagataactgtccttactcaatttggtatttaaaagacgtcatcacattgtagtcctcttccaagtccagaacagtctcaacaatattatgatcatcaaaagcctgtttgaggctgccagggtcagcatctgtggccttctgagggctcttgtccatgagcagggcccaggcttcctctttgaagggtgaatcttggcaatgaccacacatgtggttcaattcgttttcaaattctatttttccagccaattcttcaatagttcggatgcttgtatggtcaatcatatcaagcagatcctttgtgacctcttggctagaattgttgagtggcatgtttgagtcagccttcaaatctctctccatatctttccttaaattttcttttctcca

SEQ ID NO: 214433 - DNA, 712 bp, Homo Sapiens
  misc_feature (683)..(683): n is a, c, g, or t
ttttttttttttttttttgattttaaaatcagtttattttactcattattcttaatatttaaggaaaacaatgtaaaatgggaaaaaatgtatcttctgctacatcaaaaaagcattttaatccaaaccccactaaaaattataacaagctctgcatgatttcataaaaatgaaaacatgaaagttaacaagcattgaaaatgccaaattatcacaaaatcatagggaggtggtggtggtgatattgcttcttgacttacactgggatttacaacatgattactaatacacttaacactcaaggaaatatctgatacagagaattacttctacattgtggccttccagagggcaaagactattattcatcttcgaatagtcaaattctaacacagtatttggagtaacagtaggtgttaaataaacatttgttgtattgacatgttccttttataattaatgtaatgatttcttggtaatttattatacaatattttctggttagattattgttcaaaagcatattacatattatctaactttaattagatatcaaatattagaaaaggctagttttaaaaacacaagaaatagttctttcagttttactttcctatttcataaaaaaggacagtaagaatacattgttagagtaacatgaactaattcacgtgcatattganattagatagaactaaatgcttttctcttc

SEQ ID NO: 214434 - DNA, 723 bp, Homo Sapiens
ttttttttttttttttttggacaatgcttttaatggcaagtcatcacagcaggtctgcggaggtgcagggcagcgctcaggccttgctcagtttcttcttgatgaagtagctcaccagccgctgcggcctctgctggtactcgctgagcacattgcgagggctgctgatctggtccccttccaggcggttcaggagggtgacacacaccacggccgcttggaggccgcaggcgctgcacatggcggcaaacaccgaggactccatctcgatattgcggacgccggctgcataggctgcctccagatacgcctgcttgtccttctccgtgtaggagcagagagccccatccagacggccttgcccttcatagaagtccaaggtgcacatggtgttccccaccactgtggtgaactcgctcagctctgcagaacacagcaacagctcctgcaccagcttcttgttaaggtccgttttccggatgacccgcttccccaggacaatctgctcaaactctgccttgaagcaggtatccactgcctgctctgttatgaccacagtgccgggctccagacctatcccaccagaagtgccaatgcggatgatagtgacgttggagcaccgggcatagtacagcagctttatgagctcatgcaacatgattgagatagaaggaatgcccataccatgactgacagacagcaccggtcctactttatacatgg

SEQ ID NO: 214435 - DNA, 663 bp, Homo Sapiens
ttttttttttttttttttcaaaatataaactttattattttacattcaagtgaaacttccatctggaggggctaaacacagctgccggccacattcactgatttattactttgttgcctttttcgttcacctgatggaagaattcaaccctcttaaaaacataacaacaacaaaaacagctggagagtcccagccgtaatactaggtgtagacacgcacaagcacacacacaaattcaaaaacttctacatagaaaaataaaggataaacattatccatctattttgtactgtgtaatgcaacttttatatacataaattttttttttttttttttttttttttttttttttttttttaacgggtttcagtcactgcaaattttcttccctcctctgggatctaaggatccagggaggaggctgccacagtgaagcagaaaagctacattctgcccagggaggaagagaaaaagcaatttctcgctccccttcccaagtccttcctgtccaccaccacctcggatgtccccgcacacagccttccggtgagcggccgtgccgtcccctcctctctctaaggcattggggagcagagggcccataggcagcaccctgcaaaaaaaaatgatctacgtgtgaggagagggcaaggggctggatgc

SEQ ID NO: 214436 - DNA, 731 bp, Homo Sapiens
ttttttttttttttttttccatacaaatgtttctattttattgttccttcttgtaataaagggaagataaaaccatccttagcgctgtctccctcaatatcccccaccccatcttgttgtgcaaactgactgcttgatttgggggtgcctggcctttgaggtagtcacagggaggcccctccccaacatgagactgggtggggatggggagagagaagtggggaatggaggggaaggtgcttggggaatttctttgtccagggtgccccatctagccttccggccctttggaaccctttctgcgctttgctggtggctcctgagcatggcgggattggcgcaggtcggcactgaacagcaccgcttgggcccagccagcataaggtccccacaggctccggaaaaagtttcccagttccttgttggtctgggggctcggtcccttcgcctgggacgtggtagggtgccagctgtagtcacgttgggcaatgtgccacatatggacatccacgggcacagcctggggcttgtctagggccatcaggcagatgcagtcagccaccttggtgcccactccaggcaggatgcagagggccttgtgggcctcctcatatgaggactctcgtagctgctgcagccaggctagcccgccctgttcttccaggatggctcgggcactggcactcacgtaacgggcacgatagcccaggcccagcttcctgagatgagcc

SEQ ID NO: 214437 - DNA, 542 bp, Homo Sapiens
  misc_feature (422)..(422): n is a, c, g, or t
ttttttttttttttttttgcaagatttctttttattgtgctgaaatggaactacataccgggtgttcaccaacaagcctgtctaactgcctagcaacccacttcctgaaactcttgctgggtccagagtctaagtgtttcagaagccacagatgagaaacaggaagggagcctcacccaggcagactacccaggaaacaacgaaggtgctggaggaggaagaaaaaggaaagtggggctcactcactgctttcattttgtggatgttggaccaaaacttggaactgcagccggaggatccctggactttgggcatcttggtcacagccttgcaaagagaggttgaagttccccgccatgttcccaggctgcttgtcctccagcttgaacacctcggggttggtggtggagcccgggatgtantattcaacccgctcctccttcctctcacagttggagaggttgaagttgaggaaggagacgctggcccgcaggtgtgcaggaacgacaaactgccacgtcatgagttcatcctcagggaag

SEQ ID NO: 214438 - DNA, 603 bp, Homo Sapiens; identical to SEQ ID NO: 46340

SEQ ID NO: 214439 - DNA, 741 bp, Homo Sapiens
  misc_feature (694)..(694): n is a, c, g, or t
ttttttttttttttttctgttttacaagaatttaataacaaagattaaacaatcaaaatgaaccatgggactcaaaaacatcctaagttgcaaaatcaatacataatggaaaatctgacgacatttaaaactgtaagattaattcttttcattgagttcttctacttgcatttgcaaacagagagaatgacgcgcctgtttcagggattctttagccttagcaaggtcttcttttaacttgttgtattgctgcacatcaaagtgctgttgctttgatttcttgtggaagaactgaagaaattgcctactcttaacagctgagtaagtataatcctgtcgagtgactataaagtatgcaaaaaagaccatagaatttgcaaatgtgatgaagtatgtaactggctccatgatatcccaggagtacacccaccacgtgagccaggccagtgccccaccctgaatggacagcagtgccaatccagcccacaggagtccactggttttggcttccgaatgagcttctattccagctttcacctgttcaaggggctgcagctgttccttcaggtggtcaattttctccagtaaatggtgctctctctttttctgagactcttctaaatgcaagattggtaatagtctgtgaaccaaggatttcatgtgttccatctcagcagtgtgctcattacttggnttttctctctttgggcactgcacatcatatgctattttattaatgac

SEQ ID NO: 214440 - DNA, 701 bp, Homo Sapiens
  misc_feature (676)..(676): n is a, c, g, or t
ttttttttttttttttttgatgctctgagacattttatttaaactttttttttttaaaaaaagacagcaataattaatgccaagaacagaaaagaatgttgacgtgttgcccggcccgccaagcgggcccctgcccaggcccccaagctctgccaccactggggtgccgtcccctcccgcagcggggcacagtcagctttgaaggtgacagcgggccaaggccaggactctgggtggaggaggccccttctctgccggccccgcctctgctgggagcagccacagcctgtggctggggtgctgggatttcttcctggtcatcaaagagaaacgtacaaacctcaaggacccagacacacagtgggtggccagggcagaccccacagcagaccccatggctcgcctgagctctggcagctgccccactgctccttccatccttgccccaatcccccaatgcttgttttgattgttttcttaaaaaatataattttgtaaatgttccataaaaatactattattcctagtcaaacacagatattgcaatatgaagagtaactgctctgtctttgctctataaaacgtgaaaagattatcacactggataatatagaaaagatgccagggttcctaagtatcacaaaagccagtaccaaatgcgcaaggtggaagcggngccggggcagggtcgggctgggcag

SEQ ID NO: 214441 - DNA, 465 bp, Homo Sapiens
  misc_feature (456)..(456): n is a, c, g, or t
ttttttttttttttttttcccagaaatacttttattaaaataaactgagcaaggccaggcggctcaaaatgatccacacaagggggttcaaagataatccaacgatggagacaggagacagggtgggagggaagcgggtcacgaatgcacaggaaacagcgggactgtgggaggacaccctgcagcctcgggccctccagctgggctgacaggcaggctctgggctttggaggcagtgagggtcaattcggggctccatggggcgtcctgtccctgtgtgccttctgcgtgtgcttgcagaacagaccatagagcacccgcagtgtgctcttggcatccttgttcacgatatcttcagggctgacagggcagctgagcaggccctcgtccttcagcagctccagcgccagggtgacgttgtgcagcatttctgcaggagagttcggagtgaggtanaattccttt

SEQ ID NO: 214442 - DNA, 706 bp, Homo Sapiens
ttttttttttttttttttccagagctggctgactcttaatgtggaaacaagttttggctacagacattcaggtttaaggcacataccacaaattacaagaagccctgtcactgacagggaactggctttgttctcgtggtttctgcaaggaagatggaaggaatgactttctggcccttttttttttgttttttctaaaaaggagtgagtttggcagtaacaaagctcgtgacacactcaccagatgcacaggctaccctctcaggcacgcctccctttctctcctcagcgaggacacggtgcttcacccacccagtcgccctcaccagaaatgtgtatgcagcaaacagacttgtatgcctctgtctggcaatgactgtaagaaaagaaaatatgcctccaaataaaaatatacaattacatgacgaaatgaagccaagtcttagccacaggcaaaggggaatgattgcatgagtcagaaaaatgaaacatctattttagcagcaagaggctgtgagggatggggtagaaaaggcatcctgagagagttctagaccgacccaggtcctgtggcacactatacgggtcaggaggggtggaagacaggcctaagctctaggacggtgaatctcggggctatttgtggatttgttagaaacagacattcttttggccttttcctggcactggtgttgccggcaggtgg

SEQ ID NO: 214443 - DNA, 728 bp, Homo Sapiens
  misc_feature (63)..(63): n is a, c, g, or t
ttttttttttttttttttccttggagactcttccatggcctctggatcaccatcacccatggngagagcagctgtgccgaagtgggtcctggtgcaggccgccttcttcaccaagaccttctgctcctttcctcctccgcttcctgctgctcgcgtggtggccgtccgtaacacatcccacctgctggccattcacctgtggctgtgtgccatcttcctgccgtctgacagcgggcagctgtgcctggccctccctcctgtacatggggctcccaggctgtctctgtgtctgcccctcctgcagggcgctggcagctgtgtcctccgggcgcttcttcttcttcctcttcctcttcccgtggggagccgcagtggcctccctgatgtgctgtgggaggcacgtctctgagcccagcctctgcggctctcccacaaaggtctttttcctcttctcagaggggctccgggggggctcactggcctctggcaactggtgtggaagggacacaaggtcctcgttgacctgaggcagcgccgtcgagatggaggagcagctccgtggttctgacgtccctgggggcttgggggtactggacagcaatgtggggtgggggctgaaggggggttgcaggcggctggatgattggggagcaagtgacacagccctggctctatggacgggccaagtggaggcacgacggggtgagaggtttcatggggtgggtgag

SEQ ID NO: 214444 - DNA, 692 bp, Homo Sapiens
  misc_feature (654)..(654): n is a, c, g, or t
  misc_feature (682)..(682): n is a, c, g, or t
tttttttttttttttattaataattctctatttattaaaaagggtcctacagctttacagccacagcaccggacacggccctggacagcgacggcgagcccggccaggggccgctttgcaacttcaatgccaagctcacgtctggctgcgaccgtggcaggctgtggcatccccgacagcggccggtggcggaggtatgggggcgggtggcaccgctcactcgagattcacagaacatggcaagcccgcctgactggcatggcagtgaatcgtcctgtacagcttcatttcaagaaaacagttacagtagagttcaagtccgagagcaggaatgtatggtcactgaggacaaaaggcagtggcctggcccgtggcccagaccccgcttcagttctgccttctgtcaccctggcggctaggcacaggtcggggccctggatgcccgacaagtgacaggggaggggcgggccagaaggtccactggtaagcacctcggccttttccgtcaacaggtgccactgccccctgctgggccctgggccttcagcacacatggcacgtgaagatgaggtcccacaggggtgggggaagagcaggtgcagacggttggagtgcagccccgtccctcaatcccatggggcgggctttcgccanacccctaacgttgcccaccctgaggccnagccaccagc

SEQ ID NO: 214445 - DNA, 731 bp, Homo Sapiens
  misc_feature (647)..(647): n is a, c, g, or t
ttttttttttttttttttcattcatagtaaaactttattgaacagaaaacccagcaaaggttttcacctccgcaaagttccccttagtttaaagtaaagcactgcattttaaaaagcaattatacataagtctttcctagaaaagtcctgctaaaacatgtctagcaatttcattgattatataaagtagtacacttagtgtaatttaaacattccaacaggaatcaaatcgtaccagcagaaccacttctgcatctatgacttctatgtacaaacacacatgcagacacacacatttggaaaagttcctcaagcatagacatgcaacacctaaggccttctacgtacagtgcttattaaactacatagagtatatattaaagctcttcagaataaagacatgagaagccttgggcattttttgttcaccaatttgtatcacggcttcacgtttctgcttttgcttgctcacaaaagcatatcatcatccacactgttttttaaaaactcatcattgccatgtccaggagaggcaatctagctggagtcaggtgatccagtccattcctgtcaaagcctccaacagctacagcacaaacaccatcagtttgcgatggctggggggccttctggaagaagagaggcanagaaagtcttgaagacaagcatgctgtgctcaataaggaggggctggtctgctcgccatctagtacatccctgtctggagggag

SEQ ID NO: 214446 - DNA, 625 bp, Homo Sapiens
ttttttttttttttggttcaaacaaattttattgccgttacgtcaaaaacagtaggaaataataacattgaaaaaccaagttcctgctatgtagcattttatacctaggagcttttcttataaaccgtaacataaaatatgatacagcatcacaatataccatatgtaaaatgatactgaattgtacttccatacaattcaaatattaaattattagtatgatcataagcatatcaaaagcatgctattagctactaaacaataggaataaggttacttcagccttaaggggcttattatactgctgaagaggacaagtacagccaaatataaaacccaacttgcttcaaatcctttcccagaataagatgtggttatctgtaaaactccaattttttttttttttttttgagacggaatttcgctcttgttgcccaggctggagtgcaatggcgcgatctcggctcactgcaacctccgcctcctgggttcaagcgattcttctgcctcagcctcccaagtagctggaatacaggcatgcaccaccacgcccagctaattttgtgtttttagtagagataggacttctttatgttggtcaggatggtctcaaactcccgacctc

SEQ ID NO: 214447 - DNA, 778 bp, Homo Sapiens
  misc_feature (707)..(707): n is a, c, g, or t
  misc_feature (755)..(755): n is a, c, g, or t
ttttttttttttttttttaaaacaaacgtttatttaacaaattatattaagaatacagacaatcacacagtggacttcccttgccaagtacaagagtcaccttgaataaatatgcagcggggacgtcatccctaagggtcttccttgtccaggcctgacacagtcacacagcagctccacggccttagctgggagaacaaagccgtctctggtggcaacccccggacatgtgctcagagtggcaggaggaggccgggccaccctgagggtgccaggcagcccaagcaggggctgtgggctcaggggtgagcgcctggcgtggcctccaggggcaaggcaggctgcgaaccaagttcatgagctcagccgctgcgtggctgccaggcctgggggctgcttcctcaaggccctcctttgctttcatccttaggttcacctgcttctccaagaacctgcaggctgggattccccacagatgcctgcaggctctggagggccctcatctgggtggaggagtacgggcaggccactcctgaccatgctctgcgcccactgcacagtggcctggtgaccggcagggcccagtggcggccgggaagtccgtaactggactggaaacagaaagggcagccccagcacgggcttgcgacagcatggctggccctgcctctgccgcttagcagtgggccaagtctcagcctcttcanctctgacaaggagcaaagacatctacttccaggtcactctgtttttanggggaatgaaaggagaaatgtgc

SEQ ID NO: 214448 - DNA, 643 bp, Homo Sapiens
ttttttttttttttttttgagatggaaaataggatttattggggggaaccgtacaagcagaggagaagcaggggtgcccaggctgtcacagccttgcagtgcatggtgggttccgtggccaacttgccaggggacaggcctgttgctggcactccccccacaattacagggtgggagtgaaggacctcgcggctgcggacaggtccttgttagtaaggaggaggctctgcagtcccggtggggtcatcttgcctctccggactgctccctctgactggtgaagccacactctgtgaagctgtctgacagaaggggacacgcctttgctgcccaggatggacctgggccacccaggatgccgctggcctcagccagggcacgtgtgcccagcgctggctcctgctgacccctggactggctcccatctcgggaatgacgcctgccgtgggaatcgtggagagggggtttaatttaacttggaaggagcacagaaaggaaagtgtggagtgcggagcgaggcctctggcttggccagctccggttgctggggatggccatgccctggcagcaggcgggcagagaccaggaaggcctacccagcacctgtccagaagagattggtgtggggtgacctggcctatgc

SEQ ID NO: 214449 - DNA, 655 bp, Homo Sapiens
ttttttttttttgtttttcgtttgtttgtttttgtcccaagtgccagacactgtgttaaagtgcttaacctccatggcaagggtggtggtgtctccattttacagatgaggacactgagacccagagggtaatcacatggctgcgctaggaaacagcaggtccctaaagcccccaggttggctggtctcaggaactgtcccactctatcctgctgcctgcacgcgccccctccacatccagcaggccagtcacgtcatacatgccactcccagccaggccctggtgtgggcctagccagaggtctcccctttctggtcctcttcaaggagcccatacaggaagtggtggtgggagctgtgggccagaaaggtggctccgtgggcaaggcaacaggtccagaccaggtaggtgctgaggcccaggtaggctgcggccagcaaggctgcaaggccgaagtaggcagggtggggcaggctgggcagatagctgaccacgaagtagaggttgatggcgcagactagcaccatgatggaagaggtgacgaccttgttcagcaggccattggcaaactcctgcatgagggtgggcatgctggtgaacgtgaggatgggcagcacggcgaacgggagcagcaggctctgcagcacgttgagc

SEQ ID NO: 214450 - DNA, 767 bp, Homo Sapiens
ttttttttttttttttttaacagtcataataatcctttattagtaccagctcttaaaattttttttttttgccagagctaaacaatttaatataaaaaatgccattttttgtccatacagtatttataaaaaagtacatagtggttagttttgcaataatttctttttagccagatgtcatatcatcatataaatctatgaatataacaaatgacataagaacagtataaataagtttttgtagtatttacacttacacagaaactagcccaaatggtgtcctaagaaattgtttacagttaaagtgaaactactgattcaacatactgacactccaatgctttttaaagtttcgtattattttctatactagttttggctatgattttgcatagaattacttataaagtatgagcatttcacatcacagtaggagcttttagtataatagtacaaaaaaactagctcagaaaaggtcaaatcctcctaaatctagtttttcttaacatctggcttcttacttttgggaacaaggaaaacattgccatctcttgtttgctgcagggagtattcactaggagaataaggttttccatcttcatcacgtagcatgctgaaaacttcgagatataaggtgctgagttgttttttcagtaggtgaaggttttgtcattttctcctttttctttgagcatttttctttttcatctttcaaatgatctaaatcttgctctagttctactatattttccagttttctttttctg

SEQ ID NO: 214451 - DNA, 655 bp, Homo Sapiens
ttttttttttttttttttaagatttttatattaatttaataaaacaaattcttaaatagaacaaaataaacacctaatgagccacttatatatagaatgcttgtgcccgttggctctcgttcttaccttgggccctcttacctgccaaagcctacaaggcccttaattctaaagccacccacccttcccacaaccataaaaacgtacagtccagtgaccttggaatgcaggatctgccagaggcctccactacgtgggcattaacaccctggctggggcggggccctgtactgtagccttggcctttcattcagacagaaaggctctaccttctttcctccccaagaagagacactccctcatgactgtcactcactggcacaattcctgcctctcagcaggcatcagctgacaactcccggccacccctgtggccctcttgtggccctctctagaagaacatgaagtcccagctctgtggcaaccagagccatcctttcttccacctcccgctcagagagctctgcgtgaatgggcagcccggctggctgtgaggcgccagcacactgcccgcacatcctaggaggggttgggaaagggcccaggccccattagggggccaggaaaagggtggagggtacatgctttcatcatt

SEQ ID NO: 214452 - DNA, 681 bp, Homo Sapiens
ttttttttttttttttttgaggctaaaatcatttaattatacacaggccacaattgcaggatggaaaggcagtgggcacttggaagtgactacacatggcaataagcagcctatcttctttaccaaccagaagtttcttggggcatgtgatggtaggccagaccctttccaagggaatactactacactaagcctacactgtactgtgagagtcatggtggaacaaggccacaggcagtgggaggaaatgtgatgactcactgtgtcagaattctaaggcccagcatgatcaggatgtaaggctccataattttctaaaccagaaattatgagaagaacaaaattctgcaatcacttatgtttttttcttcttttttttttttttgaggtaaagtgatagtgagtcaagaatgttaaagagatagttcctactttggatgggagtctgactaggctttttttcattcttcgttggtttgtcaaacatttatggagtatccgttgtacatcaggcacagacctcatctcaagggaaaaaaattgactaagataccatccctgctcccagggaagacagaagccctacccactgggtaatactgtgctccccacagcactatggcatcctgacatggggcctgtctcctgcagtggcagctgtgcttagctgtgccctctgtc

SEQ ID NO: 214453 - DNA, 778 bp, Homo Sapiens
  misc_feature (679)..(679): n is a, c, g, or t
  misc_feature (764)..(764): n is a, c, g, or t
ttttttttttttttatttggaagcaaaatttttattttttaagaacagagctatttcataaagccagctacaacatctgtggtacaaactcatcccagctctctcgccatattccctctctgtagacccagagaccatatccataacccaaagggacacagggagggcagacagaccttctttaggagagaagtttagaaactgatccacttcatgaggctccagcttaattttaggaataatggtctggcacgaggaatcaaccccagtgttcatttccagaggaggttcctccttttccaacggggtggagatggctgtgatggtcagagtgacagacggaacgagtcctgggggtggttcgtctgtaattggctctgtcttgatggatgttgaagggaagtctgtagacaggtaccatttctcactttccacctcatcgtcattgaagctgtcactggtaatgtgggtgaagggcgactgggcccgaggctcctcgcacagggagtagctgtgctcagcctggatgagaggcgccggggacgtcggggaaggttccacctccattgacacactcttctctgagaggaaaggatcattcaggagctgacccaagacgttctgggaaaactcatccagaagttctgagaagtgcagatgctatgactcagcccagcanattagctccagctgggtgtccttggcagtggtgggctcaagactcagcagacaggtcaacatccattgctggtgcaggatcgggncagagtgggccatc

SEQ ID NO: 214454 - DNA, 658 bp, Homo Sapiens
ttttttttttttttttttccttgtataaattattttatttattattgtaattagatcttcacaaagttgtcttttcactgtgttttgtcaacgtgaaattaaattgtagttataagcaaaagttggttgcctagggaacaattgtatattcagtttaacagaaataaaagaatatttgtcttaagatgcaagatttgtttttacatagccttttgccatacaattataaaaatttcatttcaaaagtgaaatttttttgtgctgttttagctttaagggttggaatgtttaggtgcaacatcagctccttaaagaaaaagcaaagtgatctaggatatgtctcccttgcaagagggaattaacatttacaattaacatgaaaatcatgtatcagacttctgcaggagattcttcagcataccttatccaaaaattactcactgtcctaatgtatcattttgaagagtcctggtaagtacttctccttggcagcctcaccttcccacatcatggaagtacaggtttgcacatatacacaacatgatgatagaaaatatgatatagtaaattagctttctaaatttcggttctaagtctccttgtcgataccagtagataagtatgcaggcagtaatactactcaaagagatgcagacag

SEQ ID NO: 214455 - DNA, 647 bp, Homo Sapiens
  misc_feature (436)..(436): n is a, c, g, or t
ttttttttttttttttttaatcgcaatttcctctttttattcatttcagacattaacaaactaaatgcagataaatgtattctacttcacaggacagtaagtgtcctagataaaaacaagcactggctccaagcagtcgcccattctagtcccgcaacggtaatctatttttcttcaaatgtcagttcttcacagtttcaatactgcagcagcaagttcttccttagatcaagaaagccgtggtccgtatttcagaaaatcttaagtagagataagtgagcaagcttctggtgccacgtgcagtttgggtgggacaattttacctgaagtcctgcagactggccgtggggatgacgggggccccgtcccttgcggtgttcttcatatcgattcagggaagcgaactgtgcagtgctcgcattctatttattggtcnctgtcaccccgtggggtgtcacagaaaaaaaaaagtcaatgcttcacagaggagttgttcagagcaggtcaggcaggacgaggccaggaggctttggttcgacacagttgatccagaagttggcacagctggcgtgatactggtgccctccataggccagcttgaaactgtctgtttctgagttgaatgcttttttaggatgttcttctgc

SEQ ID NO: 214456 - DNA, 710 bp, Homo Sapiens
  misc_feature (689)..(689): n is a, c, g, or t
ttttttttttttttttttagctttttcatttaatttttattttagagtcatttgcttccccatcccaaattaactatgcaaattaattgttttgaagatgccatgcccaaatgtggaggtgactcagagcttggaaactcagaagctctaaggtgagcctccagacagggaaagtctgcaacatggtgactgagagggtagtagaaattcacttgctatttaactctctcttgagatttattcttggaggacagagcaaaagtccactcttcagcagctctcctagggtcgttccttcacaacgtatattccgtttccagttctttgcgttccttccttttccttcgacttcaaattcatttggtgttaaccaagttccatcctcattccgaatgcacttcactgaggatccgtgtttcattttcttcttatataaaatccctttcgcctcaccacaggtcacggggagcttagaacagtgaaaatccacagtgtcacttttgggttttcctcttcggtgaatatttttctgaaatctcctttttgagcttgaacagatatctttctcctttttcttttctttcgatctggactttcgggcaatttagttcttgccttttggacctcatcatgacctctgagttccaggttgagtcgtctttcctttgagtcaccttatccaccacttnggagcttctcttggatgccat

SEQ ID NO: 214457 - DNA, 727 bp, Homo Sapiens
  misc_feature (599)..(599): n is a, c, g, or t
ttttttttttttttttctggggaaaatagtttaatgtatcgctcagaaaaaaatagtttatatttttccatctgaaacagtgctttacgaggtccaacgccaccaagcgactttcattctgtcccatactgccgaaagtgaatctaaggcaggacggacgtccaggatggtgaactggtagtccttgttgacttcaccaccatcataataatcaatcacatatctaacttctgtcccgcaacggtttatgatccaatcgtgcctatcaaaaggcaactcataccccatccaggaacgaattcgtgcccttggtgaatactcttttgctttccctccaaaccggatcaatgatggaccacaaggacactctgcagcatgaagggcttcccacttcaaaatctccttccaagcctgctcgttattctgattgtgaattctaatgatattatacatatccttctgactgatatcctcatccttccacttccaccctttctttaacattgcattccagaacatctgctcagaagggtaaacccactttttctctgaatctgctctcggaatggatgactcttctctgacagtagacaatgcanatggctgatctggagctggtgtttgatttggtggtggcatcagatttgaaggatctaggttctccttattctcagccgcagtgcccctaatgggacactccacgtactcataggcgcgttcctggtgg

SEQ ID NO: 214458 - DNA, 702 bp, Homo Sapiens
ttttttttttttttttttcaatatcacacaggggcctcagccccatttatttgcacagccaggggttcctgccacaaacagcagttttcgattatcagtagctgtttccctctagcctgggcaggggctgagagagacacacacagaaatatgatatttcagactcctttgagatctgaagaaatcatttcctcctttcttgccatctccataagaccacctctggaagtatgctatgctcaacttatactcacacatacagatttgctcataggttgaacagtgaagtttaagtaaaacccattgcacagactgttcctttcatcacagacacaaagaaggtgagagtaagatgctatcaaggaactagccaatcttggaccaagcgtacatgctcccttccttcttactccatggaagagactgctccatgggcctctcctggacctgttgccacggggagatttaggaggccatccaaggagtgactgagccttggccctcttccatggctacaggaatattgttcctgcaggtactatccagatttcagctctagatgtaactgaaaaaacctgaaactctgaggaaaggaatctaaggcttatagtgcttgagtactgatggggaaaactgcagcgaacagaccagggaagctggaggatgctcagtaggtgaatcgcatcttttgtgagtagccca

SEQ ID NO: 214459 - DNA, 639 bp, Homo Sapiens
ttttttttttttttttttgctttcaatatattttattctgacgaagttacaaaagtagatacaaaatactttttttagaagtacagttaactgacttagaaaaatagataaagcccctaaggattttaaaacacaacataaatttttatgtaaagaacatttaaaaatattttagatggtaaccaaaactaacttacacaaactatttttgatgtagaatagaatgctgttctataataagaagtctgtagcacactggtaatccatttggatctacagaatacttgtttggaacagaatctgataatgagagaaaactcaaatgaatgtcagtgcagttgcttcaaaaaaattactgctaccacatgtactatcatcccccaaggccttttacagtctgaaatatcaaaattgaaagcaaaaataggatgaccaaaggactactattttacctcttttcagaactctacaatagtagaaactaaattcccttatggatctcagggggaaataatgtgcctgttgaaggggctcagtgtttggtgtccaggctggcatttttcaggtgagggtttcatactgacaggaggcaggctcctaaaacaaggcggtagcaccagcaccatgactagggctgct

SEQ ID NO: 214460 - DNA, 673 bp, Homo Sapiens
ttttttttttttttttttgacaagagaaatttattactaaaaataaagcagctgaaggttttcccagggaaaaccatcaccacaggaccctccatgatgaaatacgttagtatcttctttacttctgaattgctgccttctttcatatacccaaaattttagtttaagttaaattaatcacgacaaaaacgatgtggcatctgatcccttcttgttcaatctgaagactgaattgggctaccctgtgatggagacttcaagtgctgcaggtgagtatctaccaagggttcatgtgtcaggtacatgggctggtaagaagacacaaaggctgcaggctgaagctctgggaggtccaaggatcctggcagaaggggatcattctgatcttcatcaaagatctgtctctgaaaggcttcaaagctcatagctgcatcattctccggcagcccctcaggtagctgcccatctccaggtttgcacacatcaaatttcacccactggtaattgatgcattttcgagctcctggacagctctggatcaggttgtggatggctggatgagaaaatccaaaaaagtcagctccagctggaagcaggttaggcattagtttccccatagtagtgcttatagtcctgagcagttctgcatgacaagcatctgcagaagagctga

SEQ ID NO: 214461 - DNA, 600 bp, Homo Sapiens
ttttttttttttttttttcacttgaaaatgttaaactttacttattatgaagaaaaactatcaatgattcatcatttgtcattatcaaagaataaaagactcaagaatatgcaatactggggaggatgggatgagacaggcactctctgaaactgctggtggaaacataagttgattcacaaaaatattcaccatagcattcatagcattataaaataatgttacaaagcatctatgtataaactataaactatgatacagctatatgcagcccttaatgtttaggaaccatttctagttcacatagaatgatgttcacaaagtgggatacaaacatatatatttatgtaatcccaacagtgtaaaacaatagtgtaaaaagaagtgtgctgttcagagtggttatttctacgacctgaagtatagatgacttttagtcttttctctgcactttcatgtattttctagtttcctacaatcagcatgtgttattataaacaggaaaaggtttatctaaaaatggccacagtgactcagcagtctcccctttgccctctgaaggaaacactggcttatcattaaaggacatttaaaagctca

SEQ ID NO: 214462 - DNA, 749 bp, Homo Sapiens
  misc_feature (691)..(691): n is a, c, g, or t
ttttttttttttttttttcacatgaagtctccatttattctgggatgggttagagtaagcctctgaggctgccatcaggctggctgagttgttgcccaacattgtatccagcagtctcaggcccgcgcagtgcacagccagcatggggctcacaggtgcagatggaatccagaagctcccaactatgctgcaaaggccaggcctaggggtccgggtacatgcagtgagtccttggggcagggccagccctgctgactacacaagcaaggttggtggtgagacaaggggtgtatgtttccccgccaggacagagggcaacacacaggtgggtggcgaccctcaaggctgacggcatccctgcccagagtgacgaccagggcctactagctctactaaattcagggtggcggaaatcctggatgtgccccttgtcatggctcaggggcctcctttcatcctagttcatgaagccccaacacttcctccctgggatcagtaccaatcccctgcaaggccctgcccctccctccaacttcatcccagtcaaccacacacgtccaatcgtgtagtctgttgcccttctttccttcctggggcatcctgagccctctgggatggcgtgtgcccagttccagctcacggacctccatggcccatccaccaagcaccccatcgtatcaacttgccatgntagggtgtggaccccttccccgctcatggatgctcctgggtggctccactgaacatgt

SEQ ID NO: 214463 - DNA, 690 bp, Homo Sapiens
tttttttttttttttattagccatgcatttattcatttaagattttattgagacacttaacccaaatctgcaggtggtagggcacatcttagaggggatgagttttaaaggatgggtaactgctagctgggcacagaggaggcattcatttcaaggagagcaaacagttgaaccaagtatttgtatgtgtgagtgttaggtggtaggggaggaagtggtaggcagaaaccagtcaccactaagtagctttaatgtatcctgaggtcaacgggatacctttaggaaattttagggtgggttaagagtgataatgataaagacagtaagctgtttttaattattaccacttggacacagttaagaatgtgctgcagtggctttggtgagatgtaataagaatctgaatgagaacagtaacagagggatgaaactaaagggacagatttgagaagtattaaagagagagaccagcaggactttgcccagttttgttagtgagggtaaagagtcaagcatggagcatatttcttgcttggataactgagtgctggcatcccatttgatcattcgtagatatgctgagtttcaggtggcttcaggacatccaagtggacatccagtaggattctgcagatgtatggaggattccgtcactgttgttggcttgatcagataccctttacagatata

SEQ ID NO: 214464 - DNA, 627 bp, Homo Sapiens
ttttttttttttttttacagtgtagtgaaggaagtttatttacggatgtggagagaacatggtaaaggcccctgggctggccagcaagggggcaatcagtggagattgaaaacagattctccaagccagggccagggaaaagggctggggaaccagcaggaggggggcggaggggcagagctgacctgaacctagagaagagagaacatggccaagaattatccaggtagaagaaacagaggaatctaaagggggtgtatgtccaaccccaagggtgccccaaaggcacagtggcagtgaggcttgctctggcctagtcctccagcaaattccatcactgctgatggactgggcaccatttcagccgttctcagaggtagcccgcccaggccaggcatgctggaccacaggctcttgaccttgactgccctctgcttctggggctggcggtctcctcactcaggctccctcagcacagcaaccagctccctctgttctctgtgtagagcctgccaggcctgctgctgggcctggacctgtagctgcagctcctccacctgcctccgccctgccaggacggcatctgccagctgctggttctcggcctcctgtttctgcacatggcgc

SEQ ID NO: 214465 - DNA, 748 bp, Homo Sapiens
  misc_feature (741)..(741): n is a, c, g, or t
ttttttttttttttctttcctcaaatttatataccagctgataaaaatacatttcaatctatttacaggacagcactgcctacaagccaacaatgctgtgttagcaacatcccatttttttctagacagtagtacttgtgcaattaaatatatataataaaaagtagaaataaaatgtacttatattcctaaaacataaagctttaaatgtaattggaaaaaatatagaaatcaccaggcatgcccaaaataatacatctacaaccttcataaggctatttgctaaaacagatgtatacttgtgaagggaaaaaaatctaaattaaaaaagtttatgaagactagaaatatgtcaaaacaatgtgtgaggacgaaggctttaatgcaaaatagctttagctcacagaaccaaaatccatctgaaaacaaacaagcctattaccaaactataggttactaaactataggcccatttctaagaacacatttatggttggaagcaaaggaatatttatactaaacaggtaaaagtcaccactgaaacagagagtcgcacggtacattttaattccttatcaacatccatgaaccaccaccatgtatcccaattttcttaagtatgtacttaggaaacagcagtgaggtgtttttgttttttgagatggagttttgctctttttgcccaggctggagtgcatggcacgatctgggctcactgtaacctcctcctcctgagttcangtgattc

SEQ ID NO: 214466 - DNA, 725 bp, Homo Sapiens
  misc_feature (588)..(588): n is a, c, g, or t
  misc_feature (711)..(711): n is a, c, g, or t
ttttttttttttttttttacaaagtaaactatgatttttattgtgaaattttcatagatggaaaattgaatattctgtccatttcattttacaattatcttaccacttatttttgtaccatgtatttcaattgcctgtttagtgaaaaataaaaattaaaaaaacctattcatttttggcttgtgtttagcttaaattttatcattaaattaaggagcccacaacaaaatgtgttgccagcagccatatcccaagcccctgcgtgaagaatgttttggctgctatttcaacctaaggaaacaacgtttgacctcagtcaccttaaaatgccagtgtgggcagaagattttttattcctcacaattaaaaaccaaacaaaaccccctaggatcttgaaggtcctatttcagaaaatcttcatatatgcaaaatgtcaccaaaataaatacatttgcctcaattatcattaccacccagtattcatgttttaatttttagggatataatttctaaatttagagcaatcaaatttcctgcttcctatcttaatgcttaaaccctcctccaacaccaagttaagcaactgtnggaggataaaatagttgaatctgactgaaagcatggaagaaaaacattagcacacattagtctgatcatttgccaattaggaaaggtgctgctttctacctctaccacagatgcatttatganatgttgatcaatga

SEQ ID NO: 214467 - DNA, 711 bp, Homo Sapiens
ttttttttttttttttttgaaattctcataattttaatgatcaatagcttctggtgggctctggatggtacagttaaacaatagacttaaagacctcccccaaagcacgtccacaccccctcggcagcgtctgcctccatcagcattccactgcccagtcggacttccacagcctcagacccccctcttgggttatggaaatccacatcttagtgtaatgagctgaaaaaccctgggtacacccgtgatctgttattttttaaaaataacaaatactaagccaaacacctgcccaggctctgctgcctcacagagtgtggcgatctgaatactctgttgtctcttgtgggccgggtggttttgcttcgctccctgttctactgaaatcatacggcatagagttcgtaaatcttctttacacagtacaccagggcggccagtgctatcgtgttgtgcagtctctttctgtgcaggtcgtccttccggaccagcaccaccggggtggaggaggtgagtgtgtgcagaggcaggcgcgacagtttataggcgtcgtactccacttggtacttgcagcaagggtcaaactgccaggagatcccatagagggtgcagcaggccaggctcagcacaccagcgggcagggaaatgtagtgggaataatctaagggcatcgccaacggggtgaagaggcaggcggtgcccgccagcacg

SEQ ID NO: 214468 - DNA, 713 bp, Homo Sapiens
tttttttttttttttgttctgaaaatgctttaatgccaccaagaaatctgaaaggtgcaggaagctgccgccatccccctgggtgcctgggcccaggctgtccctgaagtggccatcagcaggcaggaggcttgcatagccaagcagcccaagcaattgctgacatccttttgtcctctgccctaaatgccccaggttcctcctcagctggggaaagaaagaggaggaagtggaaaaagagtaggaggagggtggttctctccagggcacccttcctgctttgggatggtgactcacccagcaggccctgggagaggcaatttatcagccccaacgaagacaggccaggcctcgggctccagaaggggcagaggaggttcttctgatgcagtggccaggaggagtcaccagcagaagccaaggggcggtggaccatccctctgctgcctctgtcactttgggcctttctttagtacaacattgtcatactcagttcctggctgccagccagaagcagagaaatcctgcccggctggctggacatgctggaggccagcagggtccctgtcagctgtcgcctgcctcctccatgcctcaccccggggctcctgcgggctgtcatagagggacagggcagccactccctcgggctcatcgtatatgtggtcaggtcgagggggcagggtctcctcaatgctgtcgtacagagggtc

SEQ ID NO: 214469 - DNA, 792 bp, Homo Sapiens
ttttttttttttttttttgcatgaaatatatttgtaaacaatataataaaagtaatttttaaagacctataaagaatgaattttctattggactattctaatactatctagcagtttaaatggtttttaaagaagtagactggactataacatagttctacaattctagctataatatattttgagagatactttctacaaaacaaaaacgactaaagggcagaaaaatgattccacactaagaaggcattggtgcctctagaagttggcccaatctaaatttgcacaaggattttttcaattttcaaagcattttccttgtttaagtcggtcaatgtagtagcatagcttcacagccgttcccagcttcacccccaagtgcttcagcaacacgtcactcgtgagtaggagcagagccttcccgtcaatttcatggcttctgaagaggtcgacaagagggcataatgcaagaggatctgtttgttttagaaataggaccactgcttccaccgaccaggttgaagggtgcttagtgatgcttccttcctctatgtaaccgtcattttcaactggtgaccttgtaactgaaggtggtgctgcagaagcatggtcagttgagtaagtgttgtggatgctgtcagcccgagggttggcaaggcagagccctgaagaagaccatacgttgcacatcagatgcataatacggctgacaattatgctcagagaaatctgagggatgcactggactcggagtgcggctgaggatcgggtctcctccagctcagctcgctg

SEQ ID NO: 214470 - DNA, 684 bp, Homo Sapiens
ttttttttttttttttttgctgtttgaaatggatgtctttatttacagaactaagagtcaacctctagacagtatgacaagcctcctagtaggagggactacccacagcaatgtgtccatccagtcactaccagcctcacttccagcagatgatgatgttggggtcattttcaagccgctcatccagctcatggtagctcatgcctgtcttgcagcagatctcgtcatagctgtggcagcctgtataaagccgggcagggtggctctgctcttcccgagtcacccgcacaggatacttctgtagtcgcctgatgaggttcttcataagcccgaactggatcagcttccgttcatcaacatgctgcagctgctgggggtggcggccaatgaggtctcgcacggtagtgccagggctcaggctgcagtatagctggaacacatcccggagactggccctcttgtgcccttgcttggtcacgtaggatagacatgcctcttgcagggacttgtcatctaccaggtcctggaccttgggcgttgggcagtatacattggagtactggaggatggacaccagtgtcacaacgccgtagtacagcaggttctggatagcaatgcgcaccaggttgagctccacatctgcctctgctgaaatcttctggatgtggcgggacccatcaatgt

SEQ ID NO: 214471 - DNA, 769 bp, Homo Sapiens
  misc_feature (738)..(738): n is a, c, g, or t
ttttttttttttttttttccaaattaccaagaacctttatttaacctaccaaactaaaagagcaataaaataaaaatattttccatccacaaaacggttttacatcaactacactgaccaatacagagaaaagggaaatccctgaggaactgccaacaataaataatatacttaaaatagaatgttctgagtgtaaaggaacatttcctgagcccgttcagtttggggaaatttggccctttgcaaaattcagtttctcaaaaggatatccaactgatgcaagtttcctgtcatgacaagaagctgtcatgttcagtagcaccttacacgaaaggtggggaaataggccgggcgcagtggctcacgcctgtaatcccagcactttgggaggccgaggcaggtggatcacctgaggccaggagtttgagaccagcctgaccaacatggtaaaaccctgtctctactaaaaatacaaaaaattagccaggtgtggtggtgggtgcctgtaatcccagctactcaggaggctgaggcaggagaatcacttgaacccgggaggcagaggttgcagtgagctgagatcatgccgctgcacttcagcctgggggacagagagagactctgtctcaaaaaaaagaaaaaaagatgaggaaataatcaatcttcttctgatcaatttgtccatagttctggaaaagctactgcacagagcaggagaggaactatttgctctctgtnatactgaaaaactgagagtgctattttaact

SEQ ID NO: 214472 - DNA, 665 bp, Homo Sapiens
  misc_feature (649)..(649): n is a, c, g, or t
ttttttttttttttttttaaggaaacctaagccatcaaaataacttttatttgtattttctacataaacacacagtggcaattcatggcatttggtaattcgtccagacgtgaaaggtttatgaaatcagcaaatgccattttgaaaagagtattctgtcaaaaataatttaccaaagttcaagataggcctgttcagcaaaatccaatatcattctctcagtactttataaatggaattttcttctacttgtatccatttcccggggcttatggacccattcatactctccatatttagaatcaaaggttcctttctgaagagaccttaattttaaggtaaaacgtggtccaagttcctgaattcccactttcttttcactcctgaatatgtatctgtgaaatctgaagaatatgtaatcccgttgattgtggaatgtggcaacctgccttccgataaattgaggattatgaggaaagagagatgcaaacatacgtccaattgaatgacccagccgtgttgtaaaattattcagaattatttcaggtatgtgttctgtggggtccttgcctcttctcttaatttctttacgaagacgaacactgctcattttaaaatgagcagttgggccatttggcaagtgactcanaataagtccatttggg

SEQ ID NO: 214473 - DNA, 731 bp, Homo Sapiens
  misc_feature (76)..(76): n is a, c, g, or t
  misc_feature (652)..(652): n is a, c, g, or t
ttttttttttttttttttcattgcatcgtgtttttaataacagagctttggaaatgccttaaacacccatccgggnggactgatgatgaacacgaagagtgcacagtgcaagagtattcggctggtaaaaatatctgcctgaggccgggtgcagtggctcacacctgtaatccctgcactttgggaggccgaggcaggtggatcacttgaggtcaggagttcaagaccagcctggccaacatggcaaaatccggtctttctggagaggagacctagggctctgcattcgtccccaggctcaccacccagcgcattctctgggctcagggtctctgggtaggggctggctctacaggatgctccagagggcctcgtggggagggtgtattcagagaggggtagtgcacgcgtccactccagatggtcctcagggaaagaactttctccacacggtcatgtgagcaggctcctggcagcagtcacacatcagcatcactgttgctactgtggttggggccagctcaggcagggtgacaccaagacaaaggcctgcaggaaggatgggcctgacacgtaggtacacacttgtcagaggcgttcgaaccagagcgactccattttggagtgagggctggaaaacgaggctgggacncgctgggctgcattaccagaaaggtgggtattccgagcccaaaggccgtcatttgtctccgtccccgcacccatctatc

SEQ ID NO: 214474 - DNA, 731 bp, Homo Sapiens
  misc_feature (48)..(48): n is a, c, g, or t
ttttttttttttttttttaacttaaaaaaatatttcagctttatttgngggatggagacagtgacaggagtcagggtgaagggcaaaggagaggtgcttaaccaagctcattctattttcagtcgctcccacataggatcaaagtgatacctgcaggcatcttctgcttgttcctctctttttccaatgccttggaattgagagggaaaaagaaatgtctttataataaacactggctcacacttcagccccaagttctagtaccccagtttcaattacagtcacatatttatcatcaatctggaccagaagcactgccttgtcgatgtgggatctggtacctggatctctgctgcaaggcacccatcggtgaatcacatggccttccatgccctcctgcggactccagtctttccagctatttctcccagcttttaaccggattccttcatcaggccactgtagctctttccttttagacaggttgatcccttccagaatttgactgggatccacaatttggactctgtaaatcacttctgcctttctggagtgtgaattgttggcaggacttaaggtgttgcctggctgtgcatcagtggcactgctctgacctccctctgtcgcaagaaagcccacgagagtgtgatgtttgcaggctgggatgctttggctggagctgctggaggaaggcaggccgtgctgcacacaggccaggccgctctgacctg

SEQ ID NO: 214475 - DNA, 740 bp, Homo Sapiens
ttttttttttttttttttacatttatgtacattttatttctattattattacattgtaacatatagtgaaatatacaactcacagtaatgtaggatccgtgggagccctgagcttgttttcctgcaactagacagtcctatctggaggtgatgggcaacaacgacagatcaggcattaggttttcaaaagaagcgcgcaacctcctcacatgcgcagttcaccatagggttccagctcctatgacaatctccagccgccactgatctgacaggaggcggagctcaggctgctgtgggatcaatgggggggtggctgtaaatacagatgaagcttcccttgctcgcctgctgctcacctcctgctgtgtggcccggttctggtaccggtctgtagcccaggggttggggacccctagtctataaaaccgtgagcctccagacattgtcctaccctgcctgccttcaggcagtttcgaggcagacacctggcccacgatcaggttgttagtgccaggcactgtgcactgggccaaccaccctctcagcctgttcccagcaggtcctggcaccaatggatggagactgccatggggctctgggtggagcccatggggcaccaacctctgacccagcttccttctgggaagacagcccctatccactttccattgtcccaggcctggagagctcaggatggaggtcgattcatgacattccccgctaggctcttcctgtggctc

SEQ ID NO: 214476 - DNA, 689 bp, Homo Sapiens
ttttttttttttttttttccgaaaatactttaatgcgaggtcctcgtgtgggtcgtgttttggagagataactggccttggactggagggtggctgccttcttcctttgccaggtcatgcgaggggctgctggccaccccatgcacatgcccctgcccctccatgtcagatgcgtgcccctcggggctggccgtgtccgatgcaggccccttccggctgttgatcttgatggcggcgcgcagcgccgacttgaccgccgtctccacccagccgtgcgggtaggcggtgtgctcgccggcaaagtagatgcggccataagggaccgtccagtcatccttttcggtttgccagagcgccggcggctgtaccacaaagccaccctggctgtgctggtcctccgcccaacgcttgacgacgccggtgccgtcccagagctggcgcacgacaggcccgtgcaatgccgccacgtcgtcgagcgccaagcgcaacgcctcttcccggctcaagccggcgaacgctgccgccgcgtccgaccacgtgtacgaggccagcagcagcgcgccctcgcgcggcggcgggtagaaaatcatgcgcgacgggcgatcggtgtttgagtggccgccttcaatgtgctcctcgcgccagaagggcctgcggaagcttaggaaacaccttggtggccggcacgt

SEQ ID NO: 214477 - DNA, 781 bp, Homo Sapiens
ttttttttttttttttttgcatgcaggctctttttactgttctgggcagtgttttgcaatgtgtgacccctccgcactgttggtgaacatacagacctcctatatgggcacccaagcccaggccagtgtgagaaccttggcgggggggtggggaggatgagaaggggaggcccctagcctgactcagaggtgaagactgctaggccctgctgtccttggggtacgactgtcagggcctctacctccccgcccccgcgggtgggcttctggaagtggatctccaggacgtcatgcagctccgggccatccaagatatcaggaatgttgagcaccagtaccgagcggggaactggctgcgacctgatctcagccttctggatctccccattcacatacggagagactctcagagggacttgctgcccacccagtggcactgtgaactggccgatttggcacagacgctgagccactccatccctagcaaaccccagcatgacactccctggcagtagctcccgaacgtccacatcgccacctccgttcctagtcttgccaaagaagatctctagcttgtccagcagctcctcctcactcagcctgaggctggcaggaaatccagtgaccaacaccctccggccactcaactggctggacaccatcacctggatggtggtgaccatgggcagctccaagggctggacctgcacccgcagccggcactcctccatgttgatcgtgtgctccttttgttgcagacctgctcagcactttggggtca

SEQ ID NO: 214478 - DNA, 706 bp, Homo Sapiens
  misc_feature (686)..(686): n is a, c, g, or t
ttttttttttttttttttaacacaggaataataaatttattataatcacagatggtggggtagtgcacataaaaaggggggacctcttctcaccagagggtgctggccggtgcccagagtggcaggcaacatagggaggcgctccctgcatggcccggcccgctgccaggcccgctgtctctgggtgctcagtgtgtggtgctctgaggacacgggtcctgagggccttgctcttcatccttcacagtggggacacggccctcatgccagcggcacaggggtgccggcagcaggatccctgacgcccctgctccctgggtgccccacggtgctcagcaggaatgccgtgagggctgaggcccagctggtggcggggagccagcagcacctatgggccagccctccctccaaaaggcagcctgtgccctggacttgcaggcttcctcggggggtgctccacctgcccaaagcagcatagcctgaacccaaaactgtgaccagagaatcccatgtgtgttttaagggtttcctatgtcctctgtgttctataggaacgagtaggggtgcgtctagcacacacgagacgctctaacaacaccctgagtgcaccctcacgctgctgagatggacctggaccgtggacaggccacggtgagagcagcctgaggatcgcatctggctcctgngaggaagtcacatggagggc

SEQ ID NO: 214479 - DNA, 779 bp, Homo Sapiens
  misc_feature (694)..(694): n is a, c, g, or t
  misc_feature (721)..(721): n is a, c, g, or t
ttttttttttttttttttaaaaatcgaatacctttatttgtgctcccttaagcagcatgtgagaagtggcagtgacctcagcagcaggcctggtatctttgccctgttgagaagccaagatctcagctgtactagtcaggtgttttttcagacagcaagtagaagaggtggtggccaactccagtgctgtatcctggaggaggtccgggtcagcactgggcaaggtaggtagctagctgcctgacccctagtctggggttggaacttctgtttgcctgagtaaagggatgtcagtcctaagatttctccacattgtgtctttcttctgcagtggtaaaaaggctggtccttgaattgtcctgcatggtaccctaaggcaggcccactggctctttttgatcaaggattctgagaaaagctgcccttggaggcccttgaaataacatagggagcagaatgagtgctcgagtcgtggctgacacagtccagctcacactgccatcacagaggctgagtgagcagtcacccagggagggggctcccagctcattccattcccatggggcaagtgactagaaggtaagagcacccgagtaagccagtgccttcctgtatccacacccaggaataccttccagttgtccaagcagccgtagtttgtaggattcctaaatactctgccccttggctgtangcgacgtctctccttcttgttgatgtngctttcgatgctagtctcacctcgactgatgagaacagcatgccatacagttagggca

SEQ ID NO: 214480 - DNA, 803 bp, Homo Sapiens
ttttttttttttttttttccattgaataatcctttatgaggacccatgtggggatgacacagatacagtgtggatccgaagcagctgctgcccccatcccttccctggaacagtccattagagtgaagggggaaaaaaaaaaacatacagcacgaagataggaagtctgcagaatgcggccagagctgaaagaggatgacttcactgaagaggcagcatttcaaccaggcttgagcgttcccctgctggggcggtgaggaagacgggactaaatgagcagagacatgggagtgggagctgtctgggaaaagcaagaatagttgggaggcttccagaaagtcatgtgggaaatgcaggtagggccctggagtgcaaggctaaggcatcaacagtcttggtggtttctgagcagtagagcagtgtgaggagtaggacgttaggaaggctaatggataggtggagagagaatggcaggaggaggaggcattataaggaggctgtgattttctaggtaggtgggaatggagtttgaatttggtgagagaagggacccaaagcagagaaggagggggtgtgttgcgcatccacgcagcctacaggcagtcagggactgttcactccaggtaaacaggtaggacccaagctctggtcaaggttgtgctgctgctggccctgtgctgagtcttaaccctgctgctgtggactgctgtggctggagggcaaggctcttgggtggggggcaaggttgcctcagcccagccagagctgggccaggacgacgtgacgctggacacctgttcagg

SEQ ID NO: 214481 - DNA, 740 bp, Homo Sapiens
tttttttttttttttattgttgaaaagtatttatttacactatagtcacaaaccatccattatctgaacttcagttagtggttttgcgttagaatagatttattttttcacaactattaagagctaatgaccaaacaaatcagctccggtaacattatgtacattcttatctgaaatttgactacaaaggtaacacttttaagtcacaaaacaaagcatacaaaaatatactttctaaaaaaaattccaaatattaataggcagaaatatacagccatactaaactcagggagtgatttttttctccataataaggcaacccatttacatgcagaccttgtaacattgtctacatcacacaaggcaccaaggacacttccaacacaattgcatgcatcctagtttcagagaatatatgtacatcccccttaaataagttaacctctgagatcataaatgctttacattttttcccaaagattcagaatttagagaacagtgtacatcaaaaatacacaaaatctgagtggatatacactgaaaaaatagcctacatttctcaaacaactcgaaaaggagcagatattgctatgttcctcccatcacattgcacttctgttctctgagtttataatacatattgcttcaagggttgagacaactagatatgctctgattcaccattttagggccacagagtgtggcataaaggctatacttcactcactgtacaatgtccc

SEQ ID NO: 214482 - DNA, 789 bp, Homo Sapiens
ttttttttttttttttttgaagtgtgccttgctttatgcaacatacgtcttccatagagaaaatgttagggtcggatcacattaatattgtcattgcagagcatggcttcatcgattggtgaaaaatcgacgtgttcatctcaacaccaggaagtgcatctaaccagggatttgccaacacatttgttagtctgtaaacaacacctgaatacaacaggagagctgccatttataggaaccctgagagtattttgataatgcagtcatccctaatttacctactgtgtaaatgtagattttggaggttgctcaaaagggatgcagccattatagggcatgttatagtgagaatgcagtgttaaaatctagggtgtggatcctggagacaaaggacccacatctctctgaaagtgaggtttcggttagagagcctgtgcagccacaggcagacacacctgagacttggtccaagcacctttcctccaagaggctttcctctatgttctcatttctcctcccaacaggtatttttacccctgatttgtaggcagaagtaaagcccaagcaactcaatcaaggtcacaaaacaggcatagctgagaccagaagccaagtctccctctgccttcttcactagctcactccaccctatcgtggcccagtccacataacactgtgccagggcctagcatctccttccacgctcccaggagctcagcaagggagcatcttgttctctggccatccagagcagcagccagggagaggaacagcttaacttcctgtcac

SEQ ID NO: 214483 - DNA, 681 bp, Homo Sapiens
tttttttttttttgttttgcagcttgtgcacttcttttattattaaatatataagcagcttcctatcttttaaatagatatttaaatgactttatataaaataattcaccacttccaagtataaaaacaaaatctcacagtgcgtgagccaatgtcctctcttgacttctcagagaacagaaggggttcctgagcaggtagcctggggggacaccagaggtggctctggggctcctcctgctctgatgccaccaagtgctcaaaaagagcttctgcagtgggttggattgcttttttgacctttaaaatattatatgtttaaggtagggggatgaagggggaatgcctttttatttttcttccatttaaaaatatgtgttttctagcatcaaatatagaggctgtgactagaaggctaagccccatatgcaagttcactgcccttccctaagctgtcggcatcaggacagggaaggtggggccagccgaccctcactttcctgggcaggaagggaaagtcacggggcccagcggccaggtagggcagggtctcttagcggaggacaaagggcggcaggagaggaggcacacagcagcacaaaggaacccaggggcaactggcagccctgtcgctcgttgcctaggcctcagagccacaccacaggctggccacaacgtgga

SEQ ID NO: 214484 - DNA, 697 bp, Homo Sapiens
  misc_feature (510)..(510): n is a, c, g, or t
ttttttttttttttttttgcaaagtgaaagttgtttattgcttgttacgatttaacaggcaaaatacgacaccagggatgtaatacctacaaggcggtcttcctgaaatgcctgcccggaacagaatgctgggatgcactcaactgtgaatttttcttgaggtcttcctttccttcatctggatgaagtggagcccagccctcctgtgtcagtgagactggaagcctctgggggccatgtgctctgccctctgccatctctgctcattgttcccccatgttcacacctgcctgcattaaccatgagcagtcacacatttgtactcagtgcgcagtcacacatgttgaagaaaacaaatcgtactgcttgttcttaaaaatgagatgaaaaaataaatctaaacacacttttcaagtgttactcttctttaaacttttatatatgttaaggctcttctttttcttttcaatatactctacttagaattttaaaaaataaactttctttttntggtacctcttgtttcctgtattagcctgggaaacatttagaaatacatctccctagaactcttctgtgcaaataataaacataaataatattaacatttatttatatatattaaaaaaggccatttcaaggttttcactgtgaccgccttgaagatgctcctataagtagtctgtggtctggccct

SEQ ID NO: 214485 - DNA, 691 bp, Homo Sapiens
ttttttttttttttttttgctgtgtcatttaagttcttttttaatgttctcagtcatctgctccctaaatgcccctgtaactgggtggatcaccattctcaaggggcccccttttggatggcagagacacagcctcacacagtgtgacgcaggggaggtagagccctgccctcaggcagctccagcctgcagaggaggaggcaggtcacctgcaaaaaatgctccaagactggaggaaggagccctgagggcagatcttgagcaccaggcctgtgctgggcaagtggggtaactgctgaggtaagacccttccccccatactgggctcccgggcttccgacccggaggggtgtcaccccagcggcggtcccgaggctggggtctgggtgagctggtggcctctcgtcccccagtctccgtggccgggtgcagtcgatgggagccgagggctcgcaggcgggtggtggttgcgggggaaggcagcgggcccgcggggtcgcacaggcagctgcaggtcaggagcaggtcaaacagcagcagcttgaagagcagcagccgcaggacccccagccacagcgccccacccggtgtccccctgagaggctcctgggggcaggtcctggctgtagaagctctcctgttgtccagggagaagcgaatgagtctttggggatgggccatgcactctgga

SEQ ID NO: 214486 - DNA, 733 bp, Homo Sapiens
  misc_feature (604)..(604): n is a, c, g, or t
tttttttttttttttttgagatagagtctgatctggaggctggaaggcggggctaaaactcccactcacttacctctaccaacaactaggccaccaagtcatttctgaggactggctcaagaaagcagatttaacttacactggcctagcccaggccaccagatgcatccacggagatccaaatgcatataatcacttgaatcaagatctagacagggacgcgtgcagcaggcttcatctgactgattcctgacacgggagagaaagcctaagctccgaatcatccttcaatgtttacaaaggccctaaatagcagtgggctaattgctgttcctggatttccaggagacctgagacccatgaaggagcaggaaagagcttggggataaaaaattaatctggaacctactggagcggaaggggctgcactcacctggaaaagacaaagttcttgggaactggccacgtaggccaggtccctaagcaattccatcccgcaccctaacaccccgactggtgttgctgggtccctaacattgtctgtacccgcttcggaggttggacaaaatgagtttttcactgccctgcctcaggcctctctcanaggtctggcccatgatatttggtgtacattgggaccccagcgcccagatatttgaaacggggtggggagcgggtgttgagctgctacatttccaggttctaggtacctggggaaccctggtcgttgacg

SEQ ID NO: 214487 - DNA, 771 bp, Homo Sapiens
  misc_feature (591)..(591): n is a, c, g, or t
  misc_feature (624)..(624): n is a, c, g, or t
  misc_feature (637)..(637): n is a, c, g, or t
  misc_feature (726)..(726): n is a, c, g, or t
ttttttttttttttttttacaagtagaagttgtacactctaaaataatgattaaaaagtataatatagtaattacataaaccagtaacatggtcatttattataattttcaagtatgtactgtgcgtagctggatgtgctagacttttatacaactggcagtacagtaggtttgtgtacaccagggtcaccacaaatgagagtcgtgttgtgatgttatgatggctacgatgtcactagatgacaggaatttttctgcacctctatcatctcatgggactgtggtacatgcggcccatcgttactgaaatgtgatgaagtgcatgactctagtcttcacagatacggaggctctaaggacagatatcaaatacattagactgggcacctatgggggaacaggaatagggaatgaaggagagaaaagagtaaaataaaaaacaaacatgcaaaactgtacataactggcatggattaatggtgataatgtaccaggcactgagaaatatgacagaaaaatatgagaattaaggttttaaaaaacaagcaaaaaacaagaagataccaagcactgatttcagataactccctngaagcctcatatttaagctttgagacttaattnttggacaatccanaacagtggttccaatgagtaaatcacaattagggtaatccaaagagtctttttcttcagttgtctgtggaaacgtgacatttccttcangtaaatccgtgtacactggctgcagcacagagcatctggctggcc

SEQ ID NO: 214488 - DNA, 643 bp, Homo Sapiens
tttttttttttttttgttgtggctgctgttctattgatggtaggtaatcatcactcttcactatctgagcattcggtccactaacctgagtcatatccggcactggtttctctagaaagggctccgacggggaatgctgatgcacaggcactttctgcggggtgttctggggtgatgggtggagctgtgcccaaggctggtgatgagggtgtggaggtgaagactggtggtgcaagcccgggtgaggctgcagtggaggacaggttggcaactgctgaaaagatggctgttgaccaggatgttgttggccaggtatcagtcgttcctggattgcttgtgggtctccaaggccaacaccaggacaaccatttggcctcatgtgcccagtcaattcccttggtgccgaggacatgcctataaatggacgagactgctgcatgtttctggggcccatattcctctgtccgattcccatggcaccagggggctggtgagatggctgaggatggggcatatttggataactgccaacttccattggtatcccagcacttcccggcctgacttgtggaggaggagtgcctgctggattactcattgctttcatgggtgacatgggaggtggagaggcataagttccctg

SEQ ID NO: 214489 - DNA, 700 bp, Homo Sapiens
ttttttttttttttttctacttacttattatttatttttaaaatatatttaaacagcagcagtcacttccaaaatgcaaaaaaaattacaatttttagaataaaattataatgtttataatgcgggtcagaagaattgaaggtacaacagaatcaaatcacgcagcactggaggcggctggagaagccaaagcccactggtcaggggtccaagctgacaagaagtcccaacctgagaggtctccacacccaaatcatacccctcagcttcccattgacagagccagtgtcctctgggttagagaaggagaagcggcaaggagctggccctctgtgtgggtgtcccaaacccagtcccccccatcagccagggacctgctaatccacctcctccatgttgctgtaggtgggggctggccgatcaacagggggggcgaagcgttcaggggctgtccgcgtgggggccacctcgggggcctggccagggcctagtccctggctggcagcagcctcagctgcagggcctaggtctgggtggtgctcagagtgacctgccctggggggcctctccacaggagagttccgccggcggtagaagagtacataggcataacgcgtcacaacctggctctcgtctaccgttgtcactgtgctgtcatcaaacaagcgccagcccacgtcactgcgctgactgctacgat

SEQ ID NO: 214490 - DNA, 701 bp, Homo Sapiens
  misc_feature (528)..(528): n is a, c, g, or t
  misc_feature (662)..(662): n is a, c, g, or t
ttttttttttttttttctgtatgcatgtgtttaattttaagtgtcaacactgaaaaattttaacagataaaaacacattacacaacgtctacaaccttcacaacagtgagaacctcctgcccggccaggcagggcaggcctctgtaccgtgagcctcaggcagtggccccaaggggcctcgccatggggcctctgacatcagtcttagcttaagagggaagctgagccccagcgcctagtctcttcagttctgcagcaaagacatgagaggaaaagtccaggatgggacaagcgcccttagtctgtcccgagtactggccacaggtgccagggcaacatgctgcattgcagccctgggccagcccctgtccccaccctgggtcacaaggtggagcagagaggcagccagcagcaggaccagtggctccgactccaccccactgggtgtcctggactttggtgccagactatagctgccactccctcctggtggcacacgggatcagggagggagggtggagggagtanagtggtggacgaagggaggatggatggtcttcgtgtacaaagctgctgtggccacaggagctgctgggccgtccagaaccatgcgccttcatatgccggactctgatgccctgagggcccgggtctgattgtgngcagtgccagacgtggtggaggtgattctgagtacttgc

SEQ ID NO: 214491 - DNA, 783 bp, Homo Sapiens
  misc_feature (634)..(634): n is a, c, g, or t
  misc_feature (679)..(679): n is a, c, g, or t
ttttttttttttttttgtgttcatacatttccatttataaggcacaaaacccacaaatctcacaaaaaggaagaaaacaaaagatttgaagacaataaagtaaactcggaggaggttcatcaaactggagttaaatcatgtccctttttagtaactaagggacctcatactgacaggaatcattgcctctgaaaagagggcttctgagcccttcttttgacacagcctccttcactggattagtgcagaagtcaatcctcagggagggctgcatggccacaacacatcaatcccaagcaccacctatcccatagaagcttctgggcagcaatgctccaaacaaaccagggtgcctggttcacatgttctcacccaaaggagccttcagggaccaatccacagtaaacacacatgcttgcctatcccagtacttgagtattttatgggttctgctctaagctgaagcagaactgcctgcctgagaaccctgaactaggttagttttgtgggtccttcgtggggcagcatctatgtaggaggctggactttgggttcctcttgaaataatgaggtccctagagggatccttagaaccaactaatcctaccaagagcttttaaaacatgctggtcanatatggcgattccctggtgcaaccccagatctcctggtctgttangcagccctaataactctcaagtaatcctgtagtccactggtaaaaaatagatgggtcccatgataccatatagtatctatgcttaatggctgggcctcctggtg

SEQ ID NO: 214492 - DNA, 746 bp, Homo Sapiens
tttttttttttttttcttatttcaaatacagttatataattattttaaattacaatatacaatttctgttaaatacaactgttaagggattctgagaacaattataagattattataatatatacaaactaacttctgaaatgacatggttgtttccttcccaccctcctaccctctcaaagagtttttgcatttgctgttcctggttgcaaaaggcaaaagaaaatctaaaaatagtctgtgtgtgtccacgacatgctcgctcctttgagaatctcaaacagccagaaccatcccgtcccacggactgccaggcgccaggacggcttcccggtgcctctttctcgaccattttcacttaaaagcactgtgagtagaattagctgtgccgttgctgccacaagggaggcagcctggtcaagaggcgtggtttgggatgcaataaggccactgcttcttggccactttcctggacattttcaatcctgcctttcctgggtcctcggagcagctggtcaggatgggcttcccactcagtccacgagcctggggccggctcagggtggtcccggcgacctcagtcctccgtgtcgggctggacgcccaggatggcgtgcagttcctcgggcgtgaaccccagcaagttctggaggtcgcacacgaagcggtacacgtagcgcttccccgacgtcttgtggatgatgttcttgtcgtaatagtagcgtaagcccggctcacttctcgta

SEQ ID NO: 214493 - DNA, 703 bp, Homo Sapiens
  misc_feature (664)..(664): n is a, c, g, or t
ttttttttttttttttttcagaggggaagatttcactttattattacatcagtctcacaaatgaacccaacacagccagaaacactgaaaggataaagtgccaatgcagagaggcctggcaacaggaggagggaggaatccagttcgtctcctccacgtccccagcctggcaatatatttctattacacaagagtgagggcagctgacataccaggcaacccattgtatagacactttgagctaagaaatagaaaattgtaccaggtagggtctgtgcagggcaagaaaatagaaaaaagtcagaaaatgttattttcccgagtcaggcatggaaatatcaaatgataaaaccaatatttttcaaactctgtcatttgagatagacatctaataaggaatgagacaggtctggtgcttcatgctactgcctattttcagaactatgacaccctttctcccacaccctcaatgtaaggtaccagaattttttaggactcctgggaaaaactgacctcaccttcttaccttctcagcccccaaaaattagacccagtgctccctcatgcacatcaaggagatatgagctaggagaataatcaacttggaggcatttaaagaaagtgaatgaaggccgggtgcggtggctcacgcctgtaatcccancactttgggaggctgaggtgggcggccacaaggtcagga

SEQ ID NO: 214494 - DNA, 647 bp, Homo Sapiens
ttttttttttttttttgtaatcaatgatttttatctctgaaaatggaagcaagtgttttgacagaacactatggccactctataagagccgacctaggagtaattcactgtcctcttctgggatgtcatggcttaaaaaaaaaaaaaaaaaaagacaaaacaggaaaataatccacaatgctttgggcgcctactctgagcttggctgggcatccattcattaaataagtcataagctacaaactaagatcagggtaactttcccttgccctcctgcttctctttgaaccacatgccctacggtgtttcaccaccatcaacaactttacttcattaattcgatatcagaaccttaaaacactactgaatcttagacaaaaggtcctcagcagattacattgataaagaaacaaatacagatttgaatataagtcattgccattattgttttctttacatctcatgatccacttcaatattaaacacatacatacacacacacaaaaccacatcaaacattcagatgccctgaaattgtggagacagcactcccagtattggctggataagaacatggtcctttttctacacggacattactccaagttcggctgtcaccacactctgccctcaccctggctccctgc

SEQ ID NO: 214495 - DNA, 780 bp, Homo Sapiens
ttttttttttttttttttcactctttccttgtttattaaatatcaacttttcctgcctaatgggctgaggttcattttcccattcctcaaggtaagggtagactacctaggaacttattgcatctttaggccagctggcttagtgctacccatctgaacccccagattactacccaagtcttccttttgccccttcctgccctaacagcaagtaccaggccagtcccttccccagcaaatgccaggggcttcatgtgaagaggaactggccacaaggctgaggggaggaggagaaactgtttctgcaggaaggacagcagtgcctccaggctcttgggcatcttcacatgtttctagataaggacaagctcaactctggagcctctggtaggcagaagaaaggaggcagggagtatggcctgggcttcagataccgctgttctggatggatccacagatgacgaaggcaaggttcctgggacctggagtcacacagggccatagccaagccttttcactagaagggcaggcagtgcccattcatcttgtcagaggcaacctcagctgtggacccgaatggagtgagcaaagggagtccaggcctccactctgctctagagatggcagtgtccaggctcctgattcccaggaagcagggaagctaaaggaaacctggaaaggcactctggagcagcaggatggtcacaataataagcccgacacacagcaggagcaggaggcacacaggaacactcggccgtgagggcacagatgcagctg

SEQ ID NO: 214496 - DNA, 693 bp, Homo Sapiens
  misc_feature (628)..(628): n is a, c, g, or t
tttttttttttttttttggatatgaaacaaaacaattttaatttcagaatattacaagaatataaaagaaagacaatgcataggatcgtttctttacaattacatatacatagtcaaataagaatgaaaactttaaccaaaacacttaagaaaccttgtttctcttgttgagcaagctcagggataggacaaaggcaacccttgctctgcagaaagaaccctggggtgagggaatatttcccccaacaggttctatctgtccccagacatggccaggggagggctccatggctctttagcacaggctgtggcctcacacactccagtctccatggtaacccaagcactcaggctattatgtcccacacctcctcgctggcctgcttctgtcaactctacgctggtagaagatctcggcattagctgtctggggaagctaacttcctacagtgggttttagttgagttaatcaccactggtgtaaaacgcttgtgcatcttaggaacccaaatcttccccaaattctagacaatcccacaaaatgctagtatctaggtttagatctaggtcctgtcttccgtttgaagccttcagggtaaaggagggcagagataaggctctctcctgnggaaagggtttctacacaaaaatgacctcagaatgggggccattagcctcaagcatctgtgtgag

SEQ ID NO: 214497 - DNA, 618 bp, Homo Sapiens
tttttttttttttttcttcagtgaagtttatttcagaaccattgaacagtatgatatttgctcatttataaatattcccatttaaataatctgagcttatatattttcagtcttaattaaaggacttgatttaaagagagcacaccagtccaaattgaattgattccatagctattaaaaactaggctcttttacagacactgctacttcttgccccctttgaataaattagaccaatgaataaaacaaacaaacaaataaataaataaatagggaagcggttgctcatcagaatgtgggagcgaatgacagagggtttcttagaaccaaatgtggccgtggtttctgtcaggcgggctttaagtgagtaggagaggtgagagaggcctggctcaacaaaagggctggggattggccctgaaaggagagagctgactgtcctggctgatggacaggagatcctcttagcactaccctaaggcaggcagttgggcattggtgtagacaacaggaaagtccaggctatagccgtactcaaaaacctttctgttccctttctgccagccctagggattgagtccacattcagcacaggactctctgggtacagctctcttt

SEQ ID NO: 214498 - DNA, 722 bp, Homo Sapiens
  misc_feature (619)..(619): n is a, c, g, or t
  misc_feature (698)..(698): n is a, c, g, or t
ttttttttttttttttttaatacgacatccttaggtttatttattttattgtttgtttcactgtttgaatgtttatcttgcgagagtctacagaattgagagaaaatatctgcaggctaattttacataacatgaggcaaagattaagcactaaatataaaaaataaaacttttagcttgcttattaaactaggaagaattttcctgaaacacagcagttaaattggtctacaatgcattaataaatggagaacacggatctcgcctatgaaatattttaaacattgtggacgctaccaaaaagctcattggtatataaaaattttcaagtcacagtcctctaagcagactaaatacaagttagtttttaacctgaattcagaagtgcaaaatctgtaaaaataaaaatatttccattgttctcagcaatctatggattaaccttacaaatccttaaagtcttttcagtaacatgaaccatgatctcttgacaagttccttgcttaagtggcaagtaacttttgaagctggacttctcaatctgtagagagaagcaagctgcattcacagcattgctcccttttgaaaattatcttctgaagagaagaaggtccagcanagatcttcagtgcaatactccctgcatatgtgcaagtctgcatgagaggtcccccacaggtgcagctgccagccaacgnaatcagaacagatgaaagaggaga

SEQ ID NO: 214499 - DNA, 480 bp, Homo Sapiens; identical to SEQ ID NO: 61912

SEQ ID NO: 214500 - DNA, 974 bp, Homo Sapiens
ccaaggatagaatctctttccggtgtggagtctggagacgacgtgcagaaatggcacctcgaaaggggaaggaaaagaaggaagaacaggtcatcagcctcggacctcaggtggctgaaggagagaatgtatttggtgtctgccatatctttgcatccttcaatgacacttttgtccatgtcactgatctttctggcaaggaaaccatctgccgtgtgactggtgggatgaaggtaaaggcagaccgagatgaatcctcaccatatgctgctatgttggctgcccaggatgtggcccagaggtgcaaggagctgggtatcaccgccctacacatcaaactccgggccacaggaggaaataggaccaagacccctggacctggggcccagtcggccctcagagcccttgcccgctcgggtatgaagatcgggcggattgaggatgtcacccccatcccctctgacagcactcgcaggaaggggggtcgccgtggtcgccgtctgtgaacaagattcctcaaaatattttctgttagtaaattgccttcatgtaaaaaaaaaaaaaaaaacccaggctttctttgcacaaaagttggcctttataagaaaagcatttgcctaatcaattttgtttgttaacccaccctgccacaattttttcggtccaaatattatcatccccctttcttgtcccatttaccccgccccctctttttcgaccccttttcccccctatatccctcccccccctttcactttctttcgctacccccatccacaacacccccttttcccgcttcatttcatccgcatcacgttaccccatacattttacctcccttttattcccccaatggaaccccctataattactccacttccaccatatctcccctcacacaaatcccccagcaacccaaacacttaccgatctcccatacccctcccccgtaatattcctccctcttacccctc

SEQ ID NO: 214501 - DNA, 416 bp, Homo Sapiens; identical to SEQ ID NO: 61086

SEQ ID NO: 214502 - DNA, 937 bp, Homo Sapiens
  misc_feature (16)..(16): n is a, c, g, or t
attgtttwaaaaawhnttataattattttactaaaatttaagaagctactgtcctgggtatgaagctccatcataaataaattcatgttttttttttcctcttattcaaatttaaaatattttaccaagttttagacactgtaatttaaatttaaattaaattcagtttctcttagaaagacaaagaaaaaggacaaagtttgcattgattagctgctgtaatgagttcatttcataaatacatttaaaatcttgaaattatttaaagtccttgawgtggcagtwgaatcttgttaaccacatagcatgtaattaagcaaccttgctgctttactcaaaaagggactgttctgtggccataagtgagcagcaactaaaaaaaaatattttgagatggaaaaatagcaactgaatagtaatgtttcacaatgtttccaaatgttgtagaagcaggtcttctgtgtaaccactcaatgtcacagccaaatttaatgtccttcattttgcagctacgagtgcaccatcaactgttttcaatgaatcaaagcaggcgattactcgtccattttcaacttggcagcttttcgaaggatgtgcaaatttacattccgtgtctggccgtgagcaagtgcccctctggaactctctacatacttccagtgttagccattttgtgtcccgaattggtgtgacactaacagccatgtttagattttacaggtagttaaatgtttcagtgaaaccaacaaacccaacccccccaaaaaagagcaacaaccaaaaaaaaaagctgaactgatgatgaaaatgtmccctcaaaawacttttccccactccctgctttaaaagtacatggraaattgtgtcgtcaatatcaaggaaaagatctcccactagaaattcacagcatgaaactgttaattcaagaggttttggt

SEQ ID NO: 214503 - DNA, 1000 bp, Homo Sapiens
catsgtaattcccatatgtcctttagacaaagttttcaacaatcctcaggaaaaaatatgaaagakaacaacgcggtataggataggtttattttattctattagagtttctctttattatgagatcatgtcctttttttttctcggcattaaaatgttttttacctcatgaaataatttgtaagtagaaggtacctggctttgttttggttcattttgaaacagtcttatttgccaaataagaagacagcaatcaagtttctataccaaatatttgttgatattttatttatccatatcacccagtgatttaaaggactcaagaaagttccctttgtcctaaaatgcacctctgcacacaaagagtaggcaattactcttccaacaagtagacctccataagaattagatcattacattttgacacaaggaaatgtaagtkttcccaccctcttgctgtatcactcacaagaacaataatatcactgtaaaacagacccaaacacacagtactgtaaatatgcaaaaagtctagtcaaagaaactatattggtgacaataacaattgtaattaatgacagttacttcagtaacggtaaaagtagccaaattcttatcaaggttatttatggctagtctctagtatcatccacaataaaaatggtttatatttattaagctccaaatagggtagggtgggagaagagagaaaaggagggaaaaagttaataataacttaataaaaactctattatgtaactaaagtytgtcactagcattgacaaaactgcaaaatattcttggtagttgaaaatgacacaaacttcatgcaggacacccatctcccaacaaaaaatacatctgtgcttacctctggtaatctgtatgcttttatgcaagggtwaaatgtagaagggcattacacatagcataacaaagaggttttaagtcaggtggtcttaattccycattcagacyagatctmcctttacttctgtat

SEQ ID NO: 214504 - DNA, 1000 bp, Homo Sapiens
gctttcatatttaagtctttcctgaattgctgtcatcattcaacaacagttgcatgtcgccttgctagctgtcaaagtagacttcatccccaaatggatataaagctcgaaggagacttgaggctgtcgtttgtgctggtgttcctctagccacaggggctgctgaccggatcctgtccacgtggtccagccacacctcttgsggggctgtatgtgctgccttggtctgggctgcctgcggcttcagacttgagctgggccttttccgctgcgggtgaaccttctgtattccctgatgtgtcttggccagagacaggcttggccgactggctgctttcagtactgctttctttcggtgtgccttcccccaggattccacctgtctccttgggctttgtatccaaaacaggtgatttatgactgggtaccaccgtgggatgctctcgtgcctctgcgtctggtacatcaaatgcccggagcacttcagggctcttgttgccagtctgaaatctcaagtcaacatctctctctctcaaaatctctcttctaccctcatacgttttggcataagggccttgctcagtggggcccatttggcccctataatggaaatcggcatcacctgctccaccatcaggtctataatcaatttcctcctgccgtcttctatcccgtggccgaagtgcctgggggaggttcgctctcaggaccgcctatatgtctcagcacatgaactgattttccagcaccatagcagaaactcaggatggctaatgccataattatcagcactggaagatgaagcagcgctggaatttccttcatgagtgctttaataaattccccagttccttttccaatatgcttcaatggctccgttacaaatgtggtgaatgtaactgcagtgcctttgttggtgggaccaacmaataggggtgactagtaagagcyatagtattttggcatggtcatcytatagkccwgaactctaaacawttcc

SEQ ID NO: 214505 - DNA, 1000 bp, Homo Sapiens
  misc_feature (9)..(9): n is a, c, g, or t
gcaccgcgngcccgaagcagcccccagaggacagacgggccctgcgcactgaggtagctgcatcttaagcccccatgagtacaactgcccagggctgcccaattcccagaggggaggaggagagagaggcaggcagggggagccccggcttcaggtggggcacaccccacaccctcaacaaacctcccagcctctcgggctgggcacttcctgcctggccacccagccagccatggggcagcggggtggccaccagaggcgggcgtgctggggtgcgaggtcactgctgctccaggcagtcctcggtcaccccctgggcagccagctcagccagcacgttctgcaggtagttggggtcgggatagccgtggcccgtaatgttgcggtccatctctgtcttgtggtggatctcgttccataccacggtgtccgtctcacccgtggtgctggacgtgcccactgtgaagatgagccgcctcttccaggccaccttcaggagctctaggaccttgcggccctgggcgttgtctggaaggtagcactggcggggaaaccctctggcagtgaacggctttccgggattggggtgctcagggccctggatgccatggggaatgctgtaaactatgaggatggtcccgcagtcctcgtggccggggagcgacatctggaaccgtaatacctccatctttccctggggctgggtcccgtcttctctccatagatggttttgcaggagggacactgcagacttccatccttattgccgttgcagtacatggccaggaggcacagcaggtggaaggcatggctgcacttggtgaggkggcccacagccagggacccgattgccttgctgtcagtcacatcgctgtatccagatgctgcggacascttctccatgcagatgatgcagtcctcatctgggggsactttcagctcttccgtgtarkttttttatgacctgctctggctcttgstctggcttcgggggcgctcc

SEQ ID NO: 214506 - DNA, 411 bp, Homo Sapiens
gtgagaccctcccccatctcaataaaaaatacagaaattagctgggtgtgggggcatgtgccagtagccccagctacttgggaggctgagatgggaggattgcttgagtccaggaggttgaggctgcagtgaacaaagactgtgccactgcactccagcctgggcaacagagggagcccttgtctcaaaaaattaaattaaaaaaatttttaaagtgcactgtacatataaaatggaatattttaatcatctcccaggttctcattggaaaggcagggttaaaaggaaatggaccaggccaggtgcggtggctcacgcctgtaatcccaacactttgggaggctgagtcaggcggatcacctgaggtcaggagtttgagaccagcctggccaacatggtgaaacctgtctc

SEQ ID NO: 214507 - DNA, 472 bp, Homo Sapiens; identical to SEQ ID NO: 60229

SEQ ID NO: 214508 - DNA, 481 bp, Homo Sapiens
taggtgtgtagcttttggtttgagttttaaattactaccaaatcatgaaagatcagagctgcagggcctttagggagtctaaggcagggctctaaatggaagtagttgggcctaattcaccatgtcttgtgagaccaagcacagatctaaaataattttgacttctgaatacctttgaaaagaacacaccctatcccattcctccaggtagccaccattcttggacttataccaagcagccttgctacaaaacacttctgagtttgctaagatccaagagaccagaccttctcatgacaccactgctgtcttcttgtcttcctctctgtgcagccaccttagcaaggctcagtctcagtcttgcctccagtcaccatccaaaaataaccaccacctccctcacccccaaacaaaaacctaggtgctcaggaaaggaactggtctcaagtaacttcgcaacacacaactgacccaggtcctc

SEQ ID NO: 214509 - DNA, 752 bp, Homo Sapiens; identical to SEQ ID NO: 48986

SEQ ID NO: 214510 - DNA, 731 bp, Homo Sapiens
gggaatgacggtcaagtgactatgaaacctgcaagtgaaccaataaagttaaagtattggtacaaatttgtacacatttatatagccttaccaggtatagtcatcagtgtacaggcaaatgattttttttttttttgcttgagtgcattagagaaagtccaaaaatgcagtcttataaatcttggaaaactgcaatttaaaataagctgtggaagatcacctagcctaataattgaaccaacactgggatctagccccaaattctatcactgtgagcacacaggctcactccaacataggcggaacctcggggaatgatttctaaatatcccattaccataaaatctctggtatttgaatctcactaattcaatctggtatttgatggatgcagcagggggtggccgagacattcataaagtttgaaggtactttttcttcattgtttcctagttttccttgaggaatcagatgatattttgcatagttcagagtgccctccaaaagaaaatcaacagtttaaggagttttctgcattactgagatgaagtaagcttacaagctttaacttgctgcatatgtctctcattaaagaatcttccaacccttcaaaaaaaaaaaaaaggggaaacaaaacaaccccaaaataaaaaaaacccttgttcggcccggcctccggcccctccaagaagcctttcctagaaccatttcctttttgggcgccgcggggc

SEQ ID NO: 214511 - DNA, 946 bp, Homo Sapiens; identical to SEQ ID NO: 54681

SEQ ID NO: 214512 - DNA, 923 bp, Homo Sapiens; identical to SEQ ID NO: 50854

SEQ ID NO: 214513 - DNA, 567 bp, Homo Sapiens; identical to SEQ ID NO: 49735

SEQ ID NO: 214514 - DNA, 733 bp, Homo Sapiens; identical to SEQ ID NO: 44986

SEQ ID NO: 214515 - DNA, 983 bp, Homo Sapiens; identical to SEQ ID NO: 43741

SEQ ID NO: 214516 - DNA, 842 bp, Homo Sapiens
cggctggtccggtccggattcccgggatggaaggtcaccaacaacatgcagcggcctggctttgccactcatgccgccagcatcaaccccacagagctggtgccctacgggctgtccttgcgcctggcccgcctttgcaccgagaacctgctgaagcctgacactcgggagtgcgcccagctgcgccaggaggtggaggagaacctgaacgaggtctacaggcagatctccggtgtacacaagctccagcagaccaagttccggcagcagcccaatgccgggaaaaagcaagaccacaccattgtggacacagtgctgatggcgccccgctcggccaagccggccctgctgaagcttacagagaagcaggtggaacagagggccttccacgacctcaaggtggcccccggctactacaccctcactgcagaccaggacgcccggggcatggtggagttccaggagggcgtggagctggtggacgtacgggtgcccctctttatccggcctgaggatgacgacgagaagcagctgctggtggaggccatcgacgtgcccgcaggcactgccaccctcggccgccgcctggtaaacatcaccatcatcaaggagcaagccagagacgtggtgtcctttgagcagcctgagttctcggtcagccgcggggaccaggtggcccgcatccctgtcatccggcgtgtcctggacggcgggaagtcccaggtctcctaccgcacacaggatggcaccgcgcagggcaaccgggactacatcccccgtggagggtgagctgctgttccagcctggggaggcctggaaagagctgcaggtgaagctcctgg

SEQ ID NO: 214517 - DNA, 836 bp, Homo Sapiens
agtttattcctactctttatcatttcccaaccaactgtgaggcttgtatgaagcccctgtggcacatgtttaagcctcctcctgctttggagtgccgccgttgccatattaagtgtcataaagatcatatggacaaaaaggaggagattatagcaccttgcaaagtatattatgatatttcaacggcaaagaatctgttattactagcaaattctacagaagagcagcagaagtgggttagtcggttggtgaaaaagatacctaaaaagcccccagctccagacccttttgcccgatcatctcctagaacttcaatgaagatacagcaaaaccagtctattagacggccaagtcgacagcttgccccaaacaaacctagctaactgccttctatgaaagcagtcattattcaaggtgatcgtattcttccagtgaaaacaagactgaaatatgatggcccaaaatttattaaaaagctatattttcctgagagactgatacatacactcatacatatatgtgttccccttttccctgtaatataaattacaaatctgggctcctttgaagcaacaggttgaaccaacaatgattggttgatagactaaggatatatgcaactcttccagacttttccataaagctctctcggcagtcgctcacactacagtgcacacaagggattgagaaagagttaaaggcttaaagaaaaacaatctttttctaagctttcaaacagaaagagggttttccacccagccacatttttaacccaagaaagaaattcctgggggaaaatgggggattttcccaacctttaacaaggtgggaattat

SEQ ID NO: 214518 - DNA, 378 bp, Homo Sapiens
tttccgtatggtattcaaccatttttaaatattttatttcaccatattgcaaatttttaggcacaataaaaagcaccctaaacaatgtaagcagaatgtgcatgttaaagaacatatttatggaaaaaaaatttttgaaacttaaataaattggtgattttgcttagagatcagcttctactagatgctcctttacaacatgttagcagatctcagctcattgttttagaaatcacatgttcatgctagacctaaccagttggccaaatacctatgatggagaaatcatttctgagaaaactgataagagctctcacttcagtcttacttaccccactgctattccctgtggagaaagccggctaattgttttgataa

SEQ ID NO: 214519 - DNA, 885 bp, Homo Sapiens
agacatttgtgcattgttgcactttgaggttattatttatcaagttcttgaaggaagcagaaagagggactcctctctccctccgtgtatagtctctatgtttgtgctagtttttcttttttttctctgtgtccagtcagccacagggcccgcctccctgcaggaataaggggtaaaacgttaggtgttgtttggcaagaaaccacactgactgatgaggggtaaaatggaaccaggtagagccactccgggcagctgtcacccattcagaacttctttccgcagctgaagaaatgttcagtaacctgtttgacgctaattaaaacagagcctgcaggaagtggggctaaagtggcattcagtgatcctgttctgtagacttttctttctttttttaaccaaatccaaaggatgttacagaaaagctagccactggtattttgttttgtttaaaaaaaaaaagaaagaaagaaagaaagaaaaacggaaaggaacctagctgcctgtatctttcatttttaaaatagcacttgagttattttctgagtaatccaataaagaacttttgatgacagccagaatgtgttagaactctggctgaacatttcatctcctgtgagtcagaagggctttatttctccctttgatggggccccttcttctttctggtgctctggaagttgtttagaggaaagaattctaattttaattaattgcgcagtgagttaatctcactcgcttttctgcttccaggcatcttaggaaaaacaaatggttttagtagataagggatgcctactaatgcttttttaaaacaaacaggggacattttttatttatagattttgaattttttttaatgaaatgtttttttaaaaaatataa

SEQ ID NO: 214520 - DNA, 888 bp, Homo Sapiens; identical to SEQ ID NO: 48801
  misc_feature (770)..(770): n is a, c, g, or t
  misc_feature (843)..(843): n is a, c, g, or t
  misc_feature (855)..(855): n is a, c, g, or t

SEQ ID NO: 214521 - DNA, 860 bp, Homo Sapiens; identical to SEQ ID NO: 40753
  misc_feature (44)..(44): n is a, c, g, or t

SEQ ID NO: 214522 - DNA, 960 bp, Homo Sapiens; identical to SEQ ID NO: 55180

SEQ ID NO: 214523 - DNA, 943 bp, Homo Sapiens; identical to SEQ ID NO: 40782
  misc_feature (656)..(656): n is a, c, g, or t
  misc_feature (727)..(727): n is a, c, g, or t

SEQ ID NO: 214524 - DNA, 522 bp, Homo Sapiens
  misc_feature (430)..(430): n is a, c, g, or t
  misc_feature (488)..(488): n is a, c, g, or t
  misc_feature (511)..(511): n is a, c, g, or t
  misc_feature (522)..(522): n is a, c, g, or t
tgctaagagctataaagcagaggcttcaattgtacacagtttggaagtttaggcaaaagtcatttcttccctatattttgtcatgcttatctcctgtctctttctgttttacagattagcaataaactccttaaaacccaaaggtttgggcttctgttcctttcacttgcagtcagacatggagttagtggtagaagaaacagaaggggtaacctgcatggtgacagctactgaggggatggataggaaagcaggctgagtccctggggccagtggttaccaaagccaaggagagagcaaggggagcccagtgggcctggccatggactgctctggaattccgagtgtgaactttcagccaagaaggtagtgtgaaaatattactgtgaggttttaaaagtacacaaataacaattgttttttataaaanaaaaaaaaaaaaaaaaaaaaaaaaaaaaaaaaaaaaaaaaaaaaaaaaaaaaaaaaanaaaaaaaaaaaaaaaaaaaaaanaaaaaaaaaan

SEQ ID NO: 214525 - DNA, 833 bp, Homo Sapiens
caggctctgctcaggctgggaggcagagggcacaaaccttataattttttaaatgaaaaaccgctgctgctggctgtggctagagccccctggggctgctggagctgctgcctctgttctggaggacgagccttctccttatctgctgcccatctttccaggaagtcaggatggagtcagaacaactacagtcatcccccgtggtgtctgcacatcactccagccccataaagagtgtcatgttagctgagtcaccatttggcttcggcctggaaatagtgtgattagaacactgatcgtgtgcgaggccaggagatcaagaccatcctgactaacaaacacagtgaaaccccgtctctactaaaaatacaaaaaaattagccaggcgtggtggtgggcgcctgtagtcccagctacttgggaggctgaggcaggagaatggtgtgaacccgggagatggcgcttgcagtgagctgagattgcactccagcctgggcgacaggctcaaaaaagaaaaaaaaaagaacaccgatcatgtgcttcttggatctggtgactgttctctccctgttttcctttctttttgggtgtttgaggagcatggcttagcttgagacacacacagacactgtgtacttcagtgaagggcttaatatacagtttccaaacctgacgactcttcttcttgtaatggctgcccttttcctacctgaggccgtcttagagaaaggggccagtctcctctaatgctcagatttcccatagttgggctttttgctggtgtctcctggcctcagggcaagtgtcattttctggggaagccagggtgggtt

SEQ ID NO: 214526 - DNA, 914 bp, Homo Sapiens; identical to SEQ ID NO: 53174

SEQ ID NO: 214527 - DNA, 605 bp, Homo Sapiens; identical to SEQ ID NO: 44992
  misc_feature (597)..(597): n is a, c, g, or t
  misc_feature (600)..(600): n is a, c, g, or t
  misc_feature (602)..(603): n is a, c, g, or t
  misc_feature (605)..(605): n is a, c, g, or t

SEQ ID NO: 214528 - DNA, 874 bp, Homo Sapiens
  misc_feature (859)..(859): n is a, c, g, or t
tgaaagtgggtgcaagcttggctgatgttgatccaatgaacattgataaatcagtacggtttgatagcataggtggattgagccatcatattcatgcgctaaaggaaatggtagtattcccacttttatatccagaaatttttgaaaagtttaaaattcagcctccaaggggctgtttgttttatggccctcctggcacaggtaaaaccttggttgccagagcattagctaatgaatgcagccaaggagacaaaaaagtggctttttttatgcgaaaaggagcagattgtttgagcaagtgggttggtgaatctgaaaggcaacttaggcttctttttgatcaggcatatttgatgagaccttctataatattttttgatgaaatagatggattagctccagttcgctctagcagacaagatcagatccacagctattatgataatgctcaacctgctacaggttgagcatcccaaatccaaaaatctgaaatctgaaatgttccaacatttgaaactgtttgaattttcacatgacactcaaaggaaatgctcatcaaagctttttcagttttggattttgggattcaggaagctccactggtaaatataatgcaaatattccaaaatctgaaaaatatcccaagtttaaaataattctggtctgaagcttttttttttttttttttgagatggagtctcactctgttgcccaggctggagtgcagtggcgggatcttggctcactgcaacctctgcctcccgggttcaagcggttctcctgcctcggcctcccaagtgggtgggattacaggcatgtgccacccacgccgggccaatttttttttgaattttttagnaagagacttgggttt

SEQ ID NO: 214529 - DNA, 919 bp, Homo Sapiens; identical to SEQ ID NO: 47819
  misc_feature (764)..(765): n is a, c, g, or t
  misc_feature (775)..(775): n is a, c, g, or t
  misc_feature (891)..(891): n is a, c, g, or t
  misc_feature (900)..(900): n is a, c, g, or t

SEQ ID NO: 214530 - DNA, 764 bp, Homo Sapiens; identical to SEQ ID NO: 52644
  misc_feature (758)..(758): n is a, c, g, or t
  misc_feature (764)..(764): n is a, c, g, or t

SEQ ID NO: 214531 - DNA, 876 bp, Homo Sapiens; identical to SEQ ID NO: 55389

SEQ ID NO: 214532 - DNA, 563 bp, Homo Sapiens; identical to SEQ ID NO: 44724
  misc_feature (563)..(563): n is a, c, g, or t

SEQ ID NO: 214533 - DNA, 679 bp, Homo Sapiens; identical to SEQ ID NO: 48337
  misc_feature (679)..(679): n is a, c, g, or t

SEQ ID NO: 214534 - DNA, 715 bp, Homo Sapiens
  misc_feature (688)..(688): n is a, c, g, or t
  misc_feature (715)..(715): n is a, c, g, or t
ggctctttgacctggtggtgccaatgatcttacagcagagagctgagaggccgtcacacacagtggatatatccagtcataagccacccaagaggaccagatctgggtgttgtgcctgactttcgagggcctcctggactcagactgtgcatgttgggaaggggtctgaccaggcaagctgtgatctgaaaggagcaaggaacagcaaggaattattttccagaatgacacccgcagcagaatgttggagtggaaatgatggctggctatgaagaggaggtcaacgtgtgtggtctcctcagtctctgtcagaggggtggggaggtgggaaacaggaatcctctgcaaagcccaatctgcagagtcgagacccctggtgctctctgccccgctgcctggcactggtcctttgcagccagccaccaacggcccccttgcccttgcagaggcagaagcctgcgtctgcacctgcacctctgaccgtttcagcaccctgggttgttaccacgtcctacaactctgacatttcttgttctcaagcgtttctcttcactgtgagttgtctttggtcctcccacttggtacttgtatcttgatgctttataatcctgactctcgacgtgttcatttatacaaaatcaggaataactttgtttttatactgattgcagcaatgttgggctacatngtattattaaaagaggatttttgaaan

SEQ ID NO: 214535 - DNA, 656 bp, Homo Sapiens; identical to SEQ ID NO: 44639
  misc_feature (656)..(656): n is a, c, g, or t

SEQ ID NO: 214536 - DNA, 506 bp, Homo Sapiens; identical to SEQ ID NO: 48530
  misc_feature (506)..(506): n is a, c, g, or t

SEQ ID NO: 214537 - DNA, 731 bp, Homo Sapiens; identical to SEQ ID NO: 45381
  misc_feature (626)..(627): n is a, c, g, or t
  misc_feature (631)..(631): n is a, c, g, or t

SEQ ID NO: 214538 - DNA, 895 bp, Homo Sapiens; identical to SEQ ID NO: 47334

SEQ ID NO: 214539 - DNA, 756 bp, Homo Sapiens; identical to SEQ ID NO: 52944

SEQ ID NO: 214540 - DNA, 905 bp, Homo Sapiens; identical to SEQ ID NO: 52140

SEQ ID NO: 214541 - DNA, 390 bp, Homo Sapiens
gcacatttcttaaaaaagtttatttctagccctgaaagaacaaaattattgaacaaagtcataaaatacagcagttaatgtcaatgtataacaattaaataattgaatgggattaaattaaaaataaaagacattataaaatttgaagacaacagaaaagacaaactataattttacttaattccatttctatcacaacaagaaaaaaaagccaatgcgttccaaccaaagatgctgaattccaaacataattgcttctcttaataaagaatagaagtgtgcttgacagaattatcatccatttctttctgcctctgtcttggcagcattctagagaagtgaatgggaaagacttccgttctttcaaggccaggccagtgcttgcttctt

SEQ ID NO: 214542 - DNA, 407 bp, Homo Sapiens
gtataagtcctggaaaactggcagccacttgtgcttataatttctgtattctaaaagatatttaagcgcaaacaaaaaggacacacaacattgctttgcttccaaacatcacagacactgtatcaaatgctatgagccaggttggatggatggtggaaacaaaggagaaacagccagttttatttcagtctatgtaaataaaaaaaatctaaataagaaagagcatattaatgtatttatatcgttcttacacagacaaagggacagagaacagggtgagcagaggatgttgaaaactgaaagcaaacaggaaaggacagcaggaaagaaaggcaacagatgaacattaagctgccatgctgaggaatttatttgcgtcttttacttggttgaatgcggagttgttg

SEQ ID NO: 214543 - DNA, 481 bp, Homo Sapiens
tgggctgatgaatacatttacctaagaaactcatttcgttttacttaagaggggaagtgcagttttcttttggcagttcagaatccaagcacttgatttgctgggtttggaaaactccttttttggccttctatgtgcttagccataacaattccattaagcaagaaggtaagcaaaagacaaaaaaaaaaaaaggaaaaaaaaaaacttgcactggcttgtctcacttacgaaacatgtcggagctgtttgcctgggtggggctgggtaccgtacctgtcaatgcctgtgattttcataattagcacgtacataaagaagtacattctgttcaggtgataactgagcctcaatcaagcagaaactttttgcttgaaattaaaaaaaaatttctattagtgaaatttcttttttttttttttttggaagcaccctgttatctaaagaatctttgtaagatttttgtaaaattttgttttac

SEQ ID NO: 214544 - DNA, 609 bp, Homo Sapiens
tctgtttgttcacctctttattcactggacatactgaacaccatactggacagtctggcactgttccaggggctaagaattcagtagactccacccttcttacaagagtacagtacaggacaggctggggaaaatgaattctttagatcaagtgtcaaaaatcctgtggtgctggttaaaaatgcagattcctgggatctaccctgcttcttgatgtgagaaaggggtcccaggaatatgcatttaaacttgttctctgggtgattcttatggactgtaacatctgataatttctggtctaagaaaggagataccaacacttcattggcatcagtaaggcaaaacagcattactgtctagatgcaggtggaggaacttgctagaacctggtttttgattcctggagaaggggtagaaccctagcccagacaagtgccttcacttacaggagctccgacacgtccaggaggtccggggagtccaggtggtccttggggcccccgcatgccgacctcacccggaagccacggttctcccagctctcctggctcccctccatgcctttgatgcggtctcacccagggggccgggcacaccggcgaaaccctt

SEQ ID NO: 214545 - DNA, 373 bp, Homo Sapiens
atgttaaccagcttgatttaattattccacactgcattcatagattataacacaactttgcatgctataaatctgcgcaattataaattgccagtttatcattataaaaagaaaaaaaaataccttcacagcaacattcagactggtattttaccaaatatctgggtaatgtggcctacccaagatgacacatgaagttaaccatcgcagggtccaactttgttctttttttttttttttccaactttgttcttttgcatgtggttatccagttgctccaggaacattcactgaagagactgttctttccttattgaatgatcttggcccccttgtcaataatcagttcaccatagatgtttgggtttattta

SEQ ID NO: 214546 - DNA, 861 bp, Homo Sapiens; identical to SEQ ID NO: 46237

SEQ ID NO: 214547 - DNA, 876 bp, Homo Sapiens
ttcggatcttgaatatatgtttgcttgttagaacatattaagatatatttatttgccactagtatttaacattaactgcacattttcataattacattcttacctttcaaattttgactcaaagtggataggctagtgttgatattggagtgcaaatgtatatactccaagagctagttcttaattctgctgagttggaaagccttttattattgtctgtatccttactggttttatctagttcaaaaaaggtgacaacgtctaaattttgatgtggacctctctccatagagagccgctcctaagtgcaagaaattccaacaggtgtcagtaggacttggccctgggggacaacaagtggcaggaacaggatcctttaaaacagtgtcaaacttctcatgcatggagcatgaattcttactaatagagactgtagttttttttcttgtctttggtaaatatataaaagaccttaatttttcttttttaatgaatggagaaaacatgagaaaaccagatggacctgttagtactacatttttaaggcattttatatttgatggtgccgtacttttaataataataaaactgaagttttttagtggcaatactgatttattttttaaaccagaaagataatccatattgattacttactacaaaaaaggggaaaatatgccaaaaaataaaaaacctttaaattcatatgaagcaacgtaacagataactgagcactttggctcaagtggtcagaacttttccataatgttactggtggtaaggtttggaaatttacctaaataaccccccagggcttcggggatttaaacaggaagggtttcctggggtggggagttttttaaaacacacattttc

SEQ ID NO: 214548 - DNA, 923 bp, Homo Sapiens; identical to SEQ ID NO: 44542

SEQ ID NO: 214549 - DNA, 923 bp, Homo Sapiens; identical to SEQ ID NO: 52158

SEQ ID NO: 214550 - DNA, 1000 bp, Homo Sapiens
agatcgcaccactgcactccaacctgggtgacagagcaagactccatctcaaaaacaaagaaacactgaacagttatcctatctgatctttttatatgcaggatagtgattaaatcactctacaaccactttcctctaatttctcctcataagcctaatcaaatgtatttgccttacttcctaccattctgttgaagattctccgaaaattggagaaagcactaaatatggtaggaagattctcttgaagttcctgtgatcttttgaaactgcattcctgagttctatccttacttccttaaagcagcatgcacttttggtttgttgttaatcaggggtctcctgtgcttggtgtgtggggtaggaaggcaggtgatcacctgcaacaattcttcacagattggaagttaaacatgaaaagcccccggagaccccacgaactagatgccagaaagttctgcagtcattgactgttaactgcaattccaactatacggtcagccctccatatccatgggttccatatccgtggattcaccaacatggattgaaatattccaaaaaaaaaaaaaaaaaacccataaattccgcaaagtttcaaaaaagcatagccttgaattttgccctgcacgggattcctgcactgaatccacacaaatgaaagtgagtttgtagggcgttggggtaaaaaaagggattctagaagttgatttaaaagtggacccggagaaatgcagggtagggtttctgcaaaatactggaacccttttttatttcaggggacctggagcattccacagattttggtggttttgaaggggtccctggaaaccaaatcccccccccccccccccggccccaaataaccaagggagacaaacttggaacaagggtttccggccccggcgctaaaaaaaagggggaaaaaccctagctttagaaaccaaacttctccctggaaaaaagtggggacaaaacccccctcttgaaaaacacccct

SEQ ID NO: 214551 - DNA, 877 bp, Homo Sapiens; identical to SEQ ID NO: 50445

SEQ ID NO: 214552 - DNA, 874 bp, Homo Sapiens; identical to SEQ ID NO: 41837

SEQ ID NO: 214553 - DNA, 612 bp, Homo Sapiens
  misc_feature (496)..(496): n is a, c, g, or t
  misc_feature (569)..(569): n is a, c, g, or t
tttttttttttttttttttcttgagacagggtctcactctgttgcccaggctggagtgcggtggcacagtcacagctcactgcagcctggacctcctgcggttaagtgatcctcctgcttcagccacccaagtagcttggaccacaggcgtgcgccaccatgcccggcttatttttgtataatattttttgtaaagacagagtttctccatgttgcccaggctgctgaactcctgagctcaagcaatctgcccacctcaacctcccaaagtgctaggattacaggagtgacccaccacgctcagcccaacttttctttaaagaaaagaaagcacaagaactttggtatgtttgtaaaaacatctaagccatgttcacatcagtccttatcataaatcatcttttctctgacctccctccaatcaaaattacctagaagacattttagaaaaggtgtttctttttatttcagaattaacaaagcaaaagattatgtntaaaatctcaattcaagggttcagacaaataatataatactatgatccctttttctgtaaaggaaaagagacnagtcacaggtaggcttagagcttcagctccctggcctgcctgg

SEQ ID NO: 214554 - DNA, 523 bp, Homo Sapiens
  misc_feature (509)..(509): n is a, c, g, or t
tttctttttttttttttttagatcacctacacagcgttaaattcgcactgcaaattatacaagggtcagctggttgcttaaaattctcagcagtgatcttgcccccatattcactccgacaaggttttagctatacaaataatttttgcagtgtggttcccgaccagcaaaatcactatcatctggaaacttattagaggtacaaattttaaaagtctcaccccagacctactgaatcttacactctggggatgttgcccagcaatctttgttttaacaagacctccatgtgattctgatgcacattaaaaactaagaagcatgcagaaaatcaactttccctgcaatcttgaaggatggtgggattggtggtggtttccagtttagctgagtctcagctttaaggtgaagaggaagaacgtatcagattcatcatcccagaaagaaagaccttattatttcctcaggttcctcaatgctctctgatgctgaggaaaggaaaccagatntggcaaatgccccc

SEQ ID NO: 214555 - DNA, 664 bp, Homo Sapiens
ggagttgggagtgtttcagccctaaggcagcatcagagatcataatcttctgctctcgtggcaagaaatttgtgcggatagagttgatacacctcacttgaagttggcctggagaaaagaggcgtcggactcctggacggggttgggaaacggtcaccagtttcggctcaaagcagcctgtttccaggagaccgccatggtcgaggcagcgtcctggtcccacggtgcggggccggacgatcatttatgggatataaataaaaggactatgaggtggtaaataaaagactaccaactagaagccatagggagtcatttgaaggagaaataggcacggctcatctgtggttgagggaaagggatcttgaaagatgattaggagaacttgggttctggggaaagtgcgggaagacattctggcagagaagcaaacgtgaggaaaggtaagaaggcaagaatctcccattacaaagggtttggtgaaaccctttgcctgtccttttcgctcccttcgggagcagtcggcaataagctggaagggtaatggggtgaaaatgcccgtggtcagttccctggctctgcgactcactagatgtctgacaataaacaagttacttagcttctgggagtctgttttcccgattgtgaaatggggatactatat

SEQ ID NO: 214556 - DNA, 485 bp, Homo Sapiens
tttttttttttttttttttaggtcaactctgatcatggccattagcctcagcacagagcggtgtgtgatcgccaaccaccagacgggatgaaggcttacacttccttatctctgttgaaccccaaatctccaagcttccaactgaaattcaggcaagaagacagagcctcctatggtttcttcagttcaccatccgctgcaaactcatgtcatttcagggaggaaagaagaaacaacctgagttccacactgtagagggaagcccagggtaaaaatctgcatttggcctctgtcttgtcttccaagtgccacagaatgctgggggcaggcactgctctcatggaggaagggcaactggggaagctgcagcatttaatcctttcagctcagtaactgccatatgtaatggcttcaaaagcataccttcaatgcttcacccagtactcacagctctgaaatctggatggtttataattagtaactga

SEQ ID NO: 214557 - DNA, 664 bp, Homo Sapiens
  misc_feature (595)..(595): n is a, c, g, or t
gtaagctccattggggatgcagcatctgtgtcttcttgaaggaactgcggcatcttggcaagttcagtcattgattcttaggcaggtgggtctcagtgttttggcctctctcaactctgggaatgtctccttgccctgtgtataccaacacaacagccaacatgcacgagagttcaaaaagggcagctggggtgatacttacctgattcggtgttttcaaatttccgagtttcacccttagggagctagtttgcagtttggttctttgcagtttggttctgagagccattcctgaagttcagttgaaaatctgccttcacctttccatcaaattttaagttatctttaacccctaataaatctctataggcttaaactatttgagtgtgctgtttcttttcctaaaaaccagaaaaggaaatatgagtgatatcacattcaattttatgtctacaaacttattacatcctttttaaaaataatgttcttaaagaaatgaatctaggccgggcacggtggctcatgcctgtaatcccagcactttcggaggccgaggtggtcggatcacgaggttaggagattgagaacatcctgnctaacacagtgaaaccccatctctaataaaaatacaaaaaaactagccgggcgtggtggcaggtgcctg

SEQ ID NO: 214558 - DNA, 651 bp, Homo Sapiens
  misc_feature (302)..(302): n is a, c, g, or t
  misc_feature (361)..(361): n is a, c, g, or t
tttttttttttctcctagtgctttctgggtccaggcaatcttcatttgagaaccactagtttacagcactctctgagccaaggaatttggagtcaaccagtgctcatctaggtatcaaaatggtggcaagccccaagtgcaactaacaacctacagaagacggaagtctaactttagtcaacactcagggagtggggatgaagaatgtagtcttcaaagctcctggccactatggaacactgttctcctgctgcaccctacatgctcacccctccatcgtcaaagcctcctcctcctggttntggaacaggtggtaaagcttttggaggccctgtgccaaccagtgctctccgcaccgttnatctgggaaccccaaatcaagatgcttgaccctcctgggattctgagaggtcagccctgtggcaccagaggctttctggaatgattcatcatattgtcagctgaaattctactgaagtggatgcccaagactagtttctcagtactgcagtatctcactcaatcccagtaatccgaaaatccatccatcctcccaggacagtctgactgtgtagctggttcaggaaaccaaaggcaagcgggggtcactcatccctccagagcctccagactgagaataaggaaaaaaat

SEQ ID NO: 214559 - DNA, 659 bp, Homo Sapiens
  misc_feature (506)..(506): n is a, c, g, or t
  misc_feature (597)..(597): n is a, c, g, or t
tttttttttttttttttttactcttgataagttgttttccttccccctctaaaatagattctatttgtttagagaagttttaagttcacagcaaaattgaatgaaagatacagatatttcccatttatccccagcacccacacatgtacagcctcccctgttgtcaacatcccccaccagagtggtacattttttacagttgacgaacataaattaatacatcattgtcacctgaattccatagattatattaaggcccactcttgttgtatattctatggattttgacaatgtacagtgttaggtctgattttgaagtctatatgcttggacaagtaatttacttttttgacacccccctgcccaagggtgctgctatactttatgaaaatacaaagacaattagggaaaaaggcagttaggcacaaaaatgtaagggcagttcaggtagggtttctgtattttctgctctttctgatgtttctccctgtgctagatgcccaggnatcacctccagatagtcacacaagccactgagcttgccacttgggtttctcttagagatgagatgccacgcactaccattcatcactaggncacttacacctgcacaaatggagtgcttcttgactctcgctgtgactacagctgttccagtg

SEQ ID NO: 214560 - DNA, 550 bp, Homo Sapiens
tttttttttttttttttttagtagagacagggtttcactgtgttggcaaggctggtctcaaacttctgacttcagcagatccacccgcctcagcctcccaaagtgctgggattacaggtgtgagccaccatgcctgaccttgatattatcattttatccacagggtttgtcaaagggtatcctcattggcttgccagggcataagagagtttgactgagaaggcattagtgggctgtgtaatgactaactttgtaccactttctcaattagcaacatcagagatatcagagcaaatggtagatctttacagtgatgcagttaggagtttgttaactgccttttggaagtcagtgtaagaataagtagtgttgatgggttcagtacgagttgtttccttaactgttttagtcagccagccacagcaacacccagaaacacatgaattagggatctgttttaggtattcaggtatgggagtggctctactcaatgttcggcttagctgtttggtggcaaattgcagtgctccatttagagtggcatgatctc

SEQ ID NO: 214561 - DNA, 614 bp, Homo Sapiens
tttttttttttttttttaaaacataacaagttttcttattctttattagtttaaaggaagctagaacctaataacaatacgccacatacggttcagaaccaaacaaaagctgcttagttatttattttgcatttgcattttgtaggaagtgagaaaaaaacagctctattgggactcaagtttattttcaattaaaatccccataaattaggaaatgtcttataaaacggagaaattggaaaaaactgttattcagaaaaaaactttcttgagtgtgcttgtttcctgtagcaccttggattttgtgatcagtcttttaaagatattttttaaaaaattcaacctctgtcttcacatttaggacagggcataacagtgtcttgtcctttcatgcaaataagaggaaaaatttatacttgcttagtttcgagcattgaaagcactcgcccctaattctgccatttgctcatgtcccacatgaataaaaggatacagcttagaaaccagggccttgctgctattgtatttttttctaattaaaattcagagtattaaacacagttgagtacatccatgcatacatgacataccgtcatcacataccggaagctcca

SEQ ID NO: 214562 - DNA, 692 bp, Homo Sapiens
  misc_feature (70)..(70): n is a, c, g, or t
  misc_feature (586)..(586): n is a, c, g, or t
ttttttttttttttttttcgttttttttaatgagatggagtctcactctgtcactcagactgcagtgcantgatgcgatctcagctcactgcaacctctgcctcctgggttcaagtgattctctcatgtgatggtgggtttttaaatgttttttccttctgaaaacctgatgtggttttgtccctacctctgagaactaaagaataatccccttgtttataataaaagaaaaaacacgaaagaatataatgatggtttcatttttctatatttaactctgtgtgatcctaatgatatctgggctcacaaaattattttgtggacagaattccatcctcaaaagaattctttatatggtttcataagctgcttaaccaagctggttacgtcagctaagtgactagcatagcacttaatgttgccgctctactttgcctcaactcagagcacctaaaaagtagataaataaattatgcacctttgttatttgttagtttttgggattacctaagccaatcacattttaattgcaaccctattttaagggcaaagccagacagtaaatggttaaatgcccaaggtttgncctatagctcaagtacttaatttcatacttgcaatagggcttttagcttcagtggtccagaattttagctttaccagaagaacactcttcttatcctccctatgtt

SEQ ID NO: 214563 - DNA, 469 bp, Homo Sapiens
ggaaccggcttctcttggtgggaccatacgaactcgaactgctgatctgttctgtatttctgatacagggactgattactttcctaacttgtgattactgacaaaagctacatgttgaggggaaagcatatcactaggactgtgacccctgtgcctacccatcttactctctacctcttaggaaagttcactgtgtttacttgggacttctggactagctgccgtttgcaacagtggacttaccagtttgccactactctgctacctttctactggtgcacacaccttactaaggcagtttgattactaaatgcagctgtctccagaaatggaatgatgctataggccacttactaaatgaatgatcaggaggaaagcagtgagtggctctctaaaaccattttgaaatattttgaaaattcaggatttaattctgaccagttctgaaaatggcatgtctttctggtta

SEQ ID NO: 214564 - DNA, 506 bp, Homo Sapiens
tgtttttttttttttttttttggtttaaacattatatttttattatttatttatttatatttaattcttttttagagacagggtcttcttaggttgcccaggctggtcttgaactcctggcctcaacgatcttcccacttcagcctcctgcattgctgggattataggtgtgagccaccatgcctggcttacacagtataaagggaatgcattggcccacacagtggaaaaaaatatctagtaggaataggaaggacttcaggtgaggtttgatccagcagctcaaatgttgtcaccacaggcctggattcctctggcctttctcaaggtctctttcattttcatgctccacaagatggcttctgccaggctgacctccctcccctgaccccagcagctctggacacccctctcagtgccatttatattgttgcatcagtaggctcatttctatatactgcaaggttcagagaagacagaatatctctctcaagagttctaacata

SEQ ID NO: 214565 - DNA, 590 bp, Homo Sapiens
aaatgttctatttcttaacctgatagtgggtacatgaatgtttattattctgtaaatcatattgtgcttatgaattgtttcacaattaaaaaaaaaattcatcccacctattccctttgctcaggttccatgctcattaaagaccattctggtgatgctctgacttctattgtagctttgcctccaataagcaaatggacattggtccatttggcatgtgtaattctctttttagagtaataaactggtgtacaagttttattttagaaaaaaagtattaataaaacaatgaatgcttagttcacttaattactatgttcttataaatgaaattaaattggtctcaaaatatatcctcttagagccaatgtatcttctgcaactaaccaaattcattctcagaatcaagaccttttcgacgcttcaatttccttccatattgcagcttcaatttttgaagtatcatattccctcatcatatcaaattcaagccatggctgattccacttctgagcttctttcatttgctgttcagttaaacaaagatcaaatctgattcctttaatattaaaatttggacgttcccagcg

SEQ ID NO: 214566 - DNA, 514 bp, Homo Sapiens; identical to SEQ ID NO: 46728

SEQ ID NO: 214567 - DNA, 651 bp, Homo Sapiens; identical to SEQ ID NO: 45899

SEQ ID NO: 214568 - DNA, 641 bp, Homo Sapiens; identical to SEQ ID NO: 52121

SEQ ID NO: 214569 - DNA, 697 bp, Homo Sapiens
tactgggattaccgtgcctggtccgttctttgttttaaaatgtttcagactcttacaagcaaaagatactcaagttagatcaaattggtgggggcagggagtgtgcagggccttaacaacaatacatcatgtatgttagtacagcttaatggttatgagcagggactctggagtcctcgattcaagtcctgacatcgtaagtaagataactgatgtattatttaaccatcctgagccttagtatccttatctataagatagggataataatacctgtgtctcagaggtgttaaggctcaaggggaaacctatgtagtatgtaacacaggacgctcacaggaggtgttcagtatatcggctatcagattttacaggaccaaccagacggggggtcataaagctgggctgaatttgaagtgaatttgccaaaaacggaggctgctctgcagaagtatcatgggccagagcatattgtttcttgcagaaaacaatatggaaggttctgtgtatgtatctagaaggttaggtttatgtatcttgcaggagtcatttgtcactttctaggatgttattccttctggctttgttttagtttctttttaaatgagtaactggccacaatcatgtatacacacattcacaatgacttttctcaacttggtcaattaaattgcctcttcaaaaaaaaaaaaaaaaa

SEQ ID NO: 214570 - DNA, 528 bp, Homo Sapiens
tgtttttttttttttttttttctttttttgtatttcagtagagacggggtttcaccatgttggccgggatggtcttgatctcctcaccttgtgatccacccaccttggcctcccaaagtgctgggattacaggcgtgagccaccgtgcccggccgcaacttatatttttaaaataggcttttagatcagttttaagggttattttatagttaactagcagaaaatgtggattaaaattacagtaccatactcaattaaaaatcatgcgctacataatttaagttctcctgttaacttctgtttgggttgaaccccgaagtacaatagtgtagattctcattgtgacctcacctgcccctttaggcattttgcaaaatttacaccttttacaatttgaaaggcagggtgccagtgccttcatgtatttcatttaatctgaaatttttatacgtattagacatagaaactgcataaaatatgaatgtacaaattaaagtaaaatatacatctgggtacccatcattcaag

SEQ ID NO: 214571 - DNA, 531 bp, Homo Sapiens
tgtaagccaaatcaagtcattttttaatggcacataagctagcaagtatttacattattaaatggttggagaaaacagtatttcatgacacatgaaaattacacaaaactcaagtttcagtttgcagaaataaagctctattgaaacacagccacctgcattccttcatctagtaattacctggctgctttcgtgctacaacagctgagttcagcagcagcaacagagactataaaagcccacaaagcttgaactatttactgcatgggcctttccagaaaaaaatttgatgacacctggtatagggacagagaatagcttgacggttgccacggtaaaaggtggggaaggagctgaccacagggaatttactggagggtgatatagctgttaattgtggtggtggtagtgacttgactgcatttgccaaaactcagaactgtacaccaaaaagtagattttaaaatattttattttaaaataaatgtcaatgaacaagagggacagaaaacaccagtggttgctaggggg

SEQ ID NO: 214572 - DNA, 422 bp, Homo Sapiens
gaatttacacaatttataaattttagtgttgtacttacaataatactatttaccattgacacagatgcatttcaatagtttaacaattgagacagtcatgctggtctctatcagtgaaatatcatatctgcttataatcccaaccaatactggatattattaatcttttaaagttttgggaatccgagaggccaacgttgttaattcacatttaatcatgaatgaatttgtgcatctttacatatattagttggtctttttaccctccccttgaattgctgatttatatccctagcccattttattgatttataaatattaatattacatacatgatatgattgtccaagtatttcctttgcccatttaaatttactgataaatgtttttattaagaaaattagtcctttgtctacataagt

SEQ ID NO: 214573 - DNA, 622 bp, Homo Sapiens
  misc_feature (592)..(592): n is a, c, g, or t
ggatacaaatgccaagtgatatgactcttttggcatggtggtagcatggtccattcagctttcagaatctttcggaggctctagtttggtgcctagtactagttatttttgttagaacaatctctcaaaatttagataattttccagttgtatgtctgtcacttttaactctaaagcgtaagaatcatggtaaccctctcggaagtggtcctttcttgctcatttcagtttcgtattaatttcaaatcactgatgtattgtctttcaagctatcaattgttatatgtaccaatttaatttagtttgtagttatctgaagtcacaaaattggttcagcattgatgtcaaacaatggctttgcttcttaccaaacagacttagtatcctgctgcttgtttcaatcttgatgcagtaagtgatgcagtatctgggtctgtatttacttagaaactgtactgtcctttctctgtgcttaacttgctaaaaatatattcccttacctgtgaaattcctgagcggtgctctgccaacttttcaaggggagggatttggatggctgtgttactgcacactggatctggaattgtcaggntatgagtgacaaattcttaacacagcagcc

SEQ ID NO: 214574 - DNA, 695 bp, Homo Sapiens; identical to SEQ ID NO: 43576
  misc_feature (576)..(576): n is a, c, g, or t
  misc_feature (587)..(587): n is a, c, g, or t
  misc_feature (637)..(637): n is a, c, g, or t
  misc_feature (666)..(666): n is a, c, g, or t

SEQ ID NO: 214575 - DNA, 725 bp, Homo Sapiens
  misc_feature (600)..(600): n is a, c, g, or t
  misc_feature (635)..(635): n is a, c, g, or t
  misc_feature (651)..(651): n is a, c, g, or t
gggagaagctgaaagctgccgactgcgacctgcagatcaccaatgcgcagacgaaagaagaatatactgatgataatgctctgattcctaagaattcttctgtaattgttagaagaattcctattggaggtgttaaatctacaagcaagacatatgttataagtcgaactgaaccagcgatggcaactacaaaagcagtatgtaaaaacacaatctcacactttttctacacattgcttttacctttataatgtagcagtgaagtaaatcattttagaacttaatatccaactgatcatagtacatattgtaaataaaatgtattttgatgacagctcagttgaatatggataatatgtggcatcacttgcacacttattttgtagaaatgggtaatttgtgcccgtaacactgtttcatattaaatatgatagcattatccctgtatgacactgtgttgtacagttaatgtatgatcctttttagatcgtttaggttttacactaaggaacatgatgacatgttctacatttgtctgtctatagttagtattttgtatgtatgtacaggctgttgtgtgctttttgtttctttgcatanaaaaatgttggagtgtatattttgccattttcacngtgtatcacttagttnttttgtagttttttttcctgcctgattatgggctccaaacgcatagcacatgcaaagctatataagttgagctt

SEQ ID NO: 214576 - DNA, 669 bp, Homo Sapiens; identical to SEQ ID NO: 48073
  misc_feature (588)..(588): n is a, c, g, or t
  misc_feature (593)..(593): n is a, c, g, or t

SEQ ID NO: 214577 - DNA, 709 bp, Homo Sapiens; identical to SEQ ID NO: 54566
  misc_feature (650)..(650): n is a, c, g, or t

SEQ ID NO: 214578 - DNA, 307 bp, Homo Sapiens
ataataaaatagcaatattataaaagaataatattgctattttattattcttgatcattgacattaccatataaatggtagaatcagcttgtaaatttctaccaaaatgccgcttggaattattaaaagaattgcattggatctggagaaaaatttacgaagaactgactttttaaacataacaactcttctgatccatgacaaggtttatctccccactaatttagttctttcataatttctcaaagcaattttttgtagtttttggtgtactggccttacataaattttgttgactttccttttt

SEQ ID NO: 214579 - DNA, 703 bp, Homo Sapiens
  misc_feature (597)..(597): n is a, c, g, or t
  misc_feature (608)..(608): n is a, c, g, or t
  misc_feature (614)..(614): n is a, c, g, or t
  misc_feature (616)..(616): n is a, c, g, or t
  misc_feature (618)..(618): n is a, c, g, or t
  misc_feature (620)..(621): n is a, c, g, or t
  misc_feature (637)..(638): n is a, c, g, or t
  misc_feature (663)..(663): n is a, c, g, or t
  misc_feature (676)..(676): n is a, c, g, or t
  misc_feature (684)..(684): n is a, c, g, or t
  misc_feature (686)..(686): n is a, c, g, or t
gggatgagtttgtggaggactatgagcctaccaaagcagacagctatcggaagaaggtagtgctagatggggaggaagtccagatcgatatcttagatacagctgggcaggaggactacgctgcaattagagacaactacttccgaagtggggaggggttcctctgtgttttctctattacagaaatggaatcctttgcagctacagctgacttcagggagcagattttaagagtaaaagaagatgagaatgttccatttctactggttggtaacaaatcagatttagaagataaaagacaggtttctgtagaagaggcaaaaaacagagctgagcagtggaatgttaactacgtggaaacatctgctaaaacacgagctaatgttgacaaggtattttttgatttaatgagagaaattcgagcgagaaagatggaagacagcaaagaaaagaatggaaaaaagaagaggaaaagtttagccaagagaatcagagaaagatgctgcattttataatcaaagcccaaactcctttcttatcttgaccatactaataaatataatttataagcattgccatttgaaggcttattgactngaattactttnacattntngnannatgtgtatatcactannagcatgaattggaaactgcatgaangtcaatttacttnaaaagaantnatatggcttcacagaac

SEQ ID NO: 214580 - DNA, 731 bp, Homo Sapiens; identical to SEQ ID NO: 49500
  misc_feature (541)..(541): n is a, c, g, or t
  misc_feature (558)..(558): n is a, c, g, or t
  misc_feature (639)..(639): n is a, c, g, or t
  misc_feature (704)..(704): n is a, c, g, or t
  misc_feature (731)..(731): n is a, c, g, or t

SEQ ID NO: 214581 - DNA, 657 bp, Homo Sapiens
  misc_feature (546)..(546): n is a, c, g, or t
  misc_feature (657)..(657): n is a, c, g, or t
ggggcagtgcgtcctacagataccacaacctggatcaggtccaagcaaaacgtccagagtgctacaaaatgttgcgttctcagtccaaaaagaagtggaaaagaatctgaagtcatgcttggacaatgttaatgttgtgtccgtagacactgccagaacactattcaaccaagtgatggaaaaggagtttgaagacggcatcattaactggggaagaattgtaaccatatttgcatttgaaggtattctcatcaagaaacttctacgacagcaaattgccccggatgtggatacctataaggagatttcatattttgttgcggagttcataatgaataacacaggagaatggataaggcaaaacggaggctgggaaaatggctttgtaaagaagtttgaacctaaatctggctggatgacttttctagaagttacaggaaagatctgtgaaatgctatctctcctgaagcaatactgttgaccagaaaggacactccatattgtgaaaccggcctaatttttctgactgatatggaaacgattgcncacacatacttctacttttaaataaacaactttgatgatgtaacttgaccttccagaagtatggaaattttgtccccatgtaatgaataaattgtatgtatttttctctan

SEQ ID NO: 214582 - DNA, 737 bp, Homo Sapiens
  misc_feature (564)..(564): n is a, c, g, or t
  misc_feature (580)..(580): n is a, c, g, or t
  misc_feature (625)..(625): n is a, c, g, or t
  misc_feature (648)..(648): n is a, c, g, or t
  misc_feature (671)..(671): n is a, c, g, or t
ggggtggtgatggtgcggggcatgtgtgtgtgtgtgtgtgtgtgcgcgcttgaggagttgtggaagtgttcatatctgtaaagtattatttcatggatgcagaccttaatgctaggttgaataactttgttgccatagaagaagaaccgcacgtcaggcttttttcattagcaaaccagtaagcactcactttgggcctttgaaatcacttccatcacctaacaccagagatacaaactgaagctagcccttaagagcctccccctaagatttagagagaatgatttctcaaccagttttcatctttgaaagtgccatttctccctttatcattgtgatttttattcaaatgcatgagtctctgattttctaccatatacaaaagggtagagactacagtttcctatagaagaaacttcacatagtggccgaaggatcttatttctcaaaattcaggaactggtttcctctttctggaaattatgacattaacttgatttcatggtatctctttcatcttcctcaatgcctgtgctgtatgtatatttttattatatactgtangtatatttttattacncaaaaaaggagaatttgagcatgcccacatctttgaaaatctgangttgccctgctgtagaacccttntactgcagacttgtactgttccnagtgtacagagcagccgcagcctatcatctgtactttactgacaggtcttgcttggtcttgacttt

SEQ ID NO: 214583 - DNA, 794 bp, Homo Sapiens; identical to SEQ ID NO: 39970
  misc_feature (699)..(699): n is a, c, g, or t
  misc_feature (794)..(794): n is a, c, g, or t

SEQ ID NO: 214584 - DNA, 865 bp, Homo Sapiens; identical to SEQ ID NO: 41557
  misc_feature (668)..(668): n is a, c, g, or t
  misc_feature (694)..(694): n is a, c, g, or t
  misc_feature (753)..(753): n is a, c, g, or t
  misc_feature (785)..(786): n is a, c, g, or t
  misc_feature (797)..(798): n is a, c, g, or t
  misc_feature (809)..(809): n is a, c, g, or t
  misc_feature (865)..(865): n is a, c, g, or t

SEQ ID NO: 214585 - DNA, 787 bp, Homo Sapiens; identical to SEQ ID NO: 42410
  misc_feature (777)..(777): n is a, c, g, or t

SEQ ID NO: 214586 - DNA, 813 bp, Homo Sapiens
  misc_feature (692)..(692): n is a, c, g, or t
  misc_feature (718)..(718): n is a, c, g, or t
  misc_feature (766)..(766): n is a, c, g, or t
cccgacatagatgacatctatgtcgggtggtcgacaagaggtaatcccttttttttttttttttttgagacggagtcttgctctgtcaccgggctggagtgcagcggcgcgacctcctgggttcaagtgattcttatgcctcagtctcccgagtagctgggattataggcatgcgtcaccatacccagctaatttttgtatttttagtggagacagggtttcaccatgttggccaggatggcctcgatctcctgacctcgtgatctgcctgccttggcctcccaaagtgctgggattataggcgtaagccaccacacccggccaggaatgacaatttcaatatatttactatctgttcttcattttattattatttagcttctgttaactcagtgttagctgaaacatcagaaagaaataaaacttatgagaagggtattagcaaatgtgtgaaaaagtcaagtactgttcatactccaaaaagtatttggagcttataattcctttaaaagtcatactgagggtcatagttggggatgcagcattttgcatatcacatcaaactgttatgatggtcccataaccatctgaatgttaatagtacccattttcttctatgctggaagagttttatgttcccaaaccatttgcaaaagttgcttacagttatgaaaagtcttctagacatatgngacctaagaatgctatcttgtatttncccagaagtcctcaggtacttgaagaatcttcataacttggttcattnaacatctcctcagatacataatgtgtactctaacttctccagcgcag

SEQ ID NO: 214587 - DNA, 830 bp, Homo Sapiens; identical to SEQ ID NO: 53618
  misc_feature (692)..(692): n is a, c, g, or t
  misc_feature (724)..(724): n is a, c, g, or t
  misc_feature (757)..(758): n is a, c, g, or t
  misc_feature (768)..(768): n is a, c, g, or t
  misc_feature (830)..(830): n is a, c, g, or t

SEQ ID NO: 214588 - DNA, 806 bp, Homo Sapiens
agaggtaatccaacaaatgtcaaatgtattagagccactttgggtggagaaattcgagctagacttcgttaaatgcaaggggagcagactgagacttcccccttcccccaactctctgggttgcattccatttagtctttcctagaggcagggaaatgggctaggtggcctttggagcacactgctggcttggtaaatttctgatcttacagatgaaataagaggccttaaaaagtataaggcctttggctcctaagcactaatctgggcaggttagaaagctactcagggctttgggcgaaagccccatatgcccattcagtaagtatataaaaccaggattggcttattgccctcaccattcacgtgcaaatttatcccttcccttcaacattggaaggggcctaaagtgggtgaccccagatttgcgtttcagttctgaagaaaacatgcaagaaaaagaaaatggcgggaggtgctcgcaagctggttctaaaggctaccacaggaaactggacttctaaattcttcagtgacctcaatcccaggttgggggaatgttttttatagatcatcaccgaccgacctggctttcatgatgagagtgccatctaccccgtgggctattgcagtactcgaatatatgccagcatgaagtgcccagaccagaagtgtctatatacctgtcagatcaaggatggtggtgtgcagcctcagtttgaaattgtttcctgaagatgacccccagaatgccattgtcagctcttctgcaaatgcttgtcatgccaactgctcaggctataagc

SEQ ID NO: 214589 - DNA, 754 bp, Homo Sapiens
agaggtaatcctttttttttttttgagacgaatctcgctctgtcacccaggctagagtacaatggagtgaactcggcttactgcaacctccgtctcccgggttcaagcgattctcctgcttcagcctcccgagtagctgggaccacaggtgtgtgccaccacgcccggctaatttttgtatttttagtagcgaggggtttcaccatgttggccaggctggtctcaaactcctgacctcaggtgatgcacccacctcggcctcccaaagtgctgggattacagcatgagccatcatgcctggccagaatgtacttccttataccacttctctgtaaagaaagaattagatgatatttctgttccggtttaaaaaaaaatcaagaaaaaaagaatgcctctagatgtaagtcatgggttggaaggatggtcctactgtttcatgtccttttctggggaagactgagcatgttcacctccccaagttaactggcttcctgtccaatctccagcaggcagagaatctacagattccagctgggaacagcactgtctctggttcagcacatatgctaatctctctttgctattctatagcaatggacaaagggagagagatctcctttctaccataacaaaaatcatagaacactcaaaacctagtagggtttttcgcttattccttgtgtcataggcacaaatgcaacccccattccaagccctcatcttagtcgtttcattactacaaacctccaca

SEQ ID NO: 214590 - DNA, 794 bp, Homo Sapiens
  misc_feature (691)..(691): n is a, c, g, or t
  misc_feature (713)..(714): n is a, c, g, or t
agaggtaatccccttggatgaggatagcaggcgtaaatacctactgtaatacaatgtcactgtgtttcctctgcactgttcccttccacttcctcatcctctttgtgacatggaagttcattgtcatagcttcagcttcagaagctgtttgtggcatttgtaggattcaaactcatggaaaattccctcctcttccccccttttttttaattaaaagaagtcacttaggaaaataacatcacagagaaaagaatttcttctttccctcagtaggaatatagaatgatgaattttattagacaactttattttacttggtgacttttaatcttaggaaactctgccttccttttagaataatattttaattgccaggcaaaatgggtttcagtttttgaatcttgtatttatttttctgtataatgaaattaatatctagacttgaccactatctgcccaccccattggcactcccatcttagggcattcgcacacatatcagtcaggtccttattggcacctagtagggcatgtgcatttaaaaacttgtccttaaaaatagaagacagaagtattaaaattatattttcttttattttaagtcttctgccttctttcttgagtttgctcctgttgacttcccacagcacagataattgacatgtccctttgtgtttaaaatactactaangtgaccctagtggtctccttgnntgcataataataaactcttgcaaatgtctccttgagacgagcattcaataataccacatgagtgtctggcatcgaagtat

SEQ ID NO: 214591 - DNA, 829 bp, Homo Sapiens; identical to SEQ ID NO: 52628
  misc_feature (754)..(754): n is a, c, g, or t
  misc_feature (799)..(799): n is a, c, g, or t

SEQ ID NO: 214592 - DNA, 804 bp, Homo Sapiens
  misc_feature (752)..(752): n is a, c, g, or t
  misc_feature (804)..(804): n is a, c, g, or t
cccgacatagatgacatctatgtcaggtggtcgacaagaggtaatcctgaaaatatgcttctcttggcagcaacattttcatgagattactcagcagttgagagcaaaatgggtggcatgggcacagagatatctcatcaaaattgccccaacttggctccagcttgggaaagtaacccagaaaaccctgattagagataacagaccagtcttatgaactaatatgatgccccttctggcttgatctgtcttggtcctatcctaagggaatagcacagaaccagatgctggcttggctaaataagtaagtggatataagaaataaataaaaattaattttggctaatggaattgcaaagttcctcctaccctcacctccagatatggcagcatacggggcataagaccgtttagttcaacgtgttctacacattccagctgttttttgtttgtttgttttgttgttttgtttttgtaggggccacattcatggaagagagaaaaattactagttacccggatatcctattatagttcatgtaacagaagggacactatatttgctcactgatagtagaaaaatgtgtaatcattaaagaatgaccttttttgtaattctttgttggcaagttaaaattgtttgtggaaagcatggtatagcaaaagttcagttgggtgaactgggatactggaaaaagaaagaagatacttgactagtctgggtggtctaaggtggggtaataaggagtagnagaggtagttcaaggaatgacatgacagagtttctcatatctgttactcgan

SEQ ID NO: 214593 - DNA, 839 bp, Homo Sapiens
  misc_feature (666)..(666): n is a, c, g, or t
  misc_feature (704)..(704): n is a, c, g, or t
  misc_feature (719)..(719): n is a, c, g, or t
  misc_feature (722)..(722): n is a, c, g, or t
  misc_feature (733)..(734): n is a, c, g, or t
  misc_feature (743)..(743): n is a, c, g, or t
  misc_feature (754)..(754): n is a, c, g, or t
  misc_feature (779)..(779): n is a, c, g, or t
  misc_feature (785)..(785): n is a, c, g, or t
  misc_feature (819)..(819): n is a, c, g, or t
agagtaatcccaaagctaaacaagagcagaatccagattattaaaataacaatttaaaaagcatgattgtcacaggcttcaataattacctgcctgctcttgagtgtttaggttggtcttggaatcggcctgtccctgtgcttgaggagtggaccctcagggtgtcactgcccttctttgtgatctctttttagcctactgtccttcctttggtgcctaactcagaaataaacattcttaatctgttcagcttaattgagattcaaacctcttaaaaagtagttttgtcaagaggcgtgtgaaccagagcaactccattttgaataggagctgggtaaaatgaggctgagacctactgggctgcattcccagacggttaaggcattctaactcactggatgagatagttggtcagcacaagatacaggtcataaagaccttgctggtaaaacaggttgcagtaaagaagccagctaaaacccaccaaaacaaagatggccacgagagtgacctctggttgttctcactgccacactcccacaagccccatgacagtttacaagtgctgtggcaaagtcaggaagttactctatatatatagtctaaaaaggggaggcatgaataatccacccctcgtttagcatatcatcaagaaatagccataanaatgggcaatcagcagcccttgggctgctttgtctacngagtagccattcttnttnatacttacttnncctataacnttgcttccttnactctaggactcgtcagaatctccntgtggnagatcagactgtctttgagtctggatggaccttnctgtatattgatgtcagtgg

SEQ ID NO: 214594 - DNA, 804 bp, Homo Sapiens; identical to SEQ ID NO: 40693
  misc_feature (751)..(751): n is a, c, g, or t
  misc_feature (775)..(775): n is a, c, g, or t

SEQ ID NO: 214595 - DNA, 773 bp, Homo Sapiens
agaggtaatccgtaaccatggaaaagtccctttccaatcaaacttttagcacccctttccccccatctctgctccctttgccacaggataccttgtaaagttcctgccccagtatagggatatttttactgtcttttttattttttgagacagggttgcccagggtggagtgcagtggcaggatcacagcttactgcagccttgacctcccaggctcaggtcccatctgagcctcccgagtagctggggctacaggtgtgtgccaccctgccagctaattttttatatttttttgtagagacaaaacttttatttttttttcccatgttgctcatgctggtctcaaactcctgggctcaagcaatccacccacctctgcctcccaaagtgctgggattacaggcgtgagccactgtgcctgacctgtcatttttatagaatgaaatgtgcttatttctaaacattctaatcaaattttaaaatgtgcaaagaatgaagtgaaaaactgaatttttttttttttgatacggagtctcactctgttacccaggctagagtgcagtggcgcgatctccgctcactgcaagctctgcctcctgggctcacaccattctcctgcctcagcctcctcagtagctgggactacaagtgcctgccaccacgcctgggttattttttatatttttagtagagacggggttcactgtgttagcaggaggtctcatctcaggatgtctcgatctccagatgtctcatctctgactctgatcacc

SEQ ID NO: 214596 - DNA, 828 bp, Homo Sapiens
  misc_feature (761)..(761): n is a, c, g, or t
agaggtaatcccaatttaggaccaaagaccccatctctaaatggctaccataataatctagatccaatgcataactatgtaaatacagagaatgtaacagtgccagcaagtgctcacaaaatagaatattcaaggcgtcgggactgtacaccaacagtctttaactttgatatcagacgcccaagtttagaacacaggcagcttaattacatacaggttgacttggaaggtggcagtgactctgacaaccctcagactccaaaaacgcctacaactccccttccacaaacccctaccaggcgcacagagctgtatgccgtgatagacatcgagagaactgctgctatgtcaaatttgcagaaagcactgccacgagatgatggtacatctaggaaaactagacacaatagtactgatctgcccatgtgagcctggaaagcattgtgttgtttgcacctttgtgaagtttttaaaaatgaagatgcaagtgcttcattttcatttctaaacactaactccttttatagactgataaaatttttttctgaatatttcatgtgcatctttaactaaagggaattaatgtagagcaggtactccttaaagaacactaatttcattatatactactcgttgtacagcagcattcccgttttcacagtgcctatttaaatgagagttgaagtaatgacatgctggttgatttttatcatatctggacttacgcataccttcatgctagtcatggtggctttaaactnttataagctctgacagtaatgctacagtacaatagctgaagatgccctaatcagttcagagggctcc

SEQ ID NO: 214597 - DNA, 848 bp, Homo Sapiens; identical to SEQ ID NO: 55763
  misc_feature (1)..(1): n is a, c, g, or t

SEQ ID NO: 214598 - DNA, 805 bp, Homo Sapiens
agaggtaatccgctatataaaaaggtgaggaagcagttttgttacctaatgaaaattattacactcataatgctgtgtaggcaacattgagattcaaatgcccagtggtcaactgggttcactcatcaactcattcccgtcccagtttactcacatttcaaatttataaatttcttcatgttatactattctatttagatttgcccagaattagttgaaataatgctaaacctgtcaatattttccagtaacattaagcaccatactgcatgggagagacacagtactaaaaagagttgttagtgctttatgtgagtgatatttctttcataatgctataaagaactacagttaaaataacaaaatattttaaagatgtcctaaaagcatctgatcccagtaataactaatggatgtcatctagagcagtgggtgttaatgaataggtatatgtcatttaagaatttttcaaatttctgtttgatatcctgcatagaatttgacaaaaaaaacacttccaagtgtgagcattttttatttcatttcccaagagtaagtaagtaactattagcctagccatctgcctcgaagtataccttaagtgaccccataaatccattcaagaggcaggtactctataccatttggcagccacggccaaacctaccatggccagatttcagtgaaaatgatgaagtaatcaaaatcaggtataatatggtgtccctttatgtgctttatgttccttagagctgttataaagtctttattctcagtgttagataatcgactactacctttcccg

SEQ ID NO: 214599 - DNA, 804 bp, Homo Sapiens; identical to SEQ ID NO: 41090
  misc_feature (698)..(698): n is a, c, g, or t
  misc_feature (735)..(736): n is a, c, g, or t
  misc_feature (740)..(740): n is a, c, g, or t

SEQ ID NO: 214600 - DNA, 794 bp, Homo Sapiens; identical to SEQ ID NO: 39979

SEQ ID NO: 214601 - DNA, 753 bp, Homo Sapiens; identical to SEQ ID NO: 51185
  misc_feature (692)..(692): n is a, c, g, or t
  misc_feature (727)..(727): n is a, c, g, or t
  misc_feature (732)..(732): n is a, c, g, or t
  misc_feature (753)..(753): n is a, c, g, or t

SEQ ID NO: 214602 - DNA, 840 bp, Homo Sapiens
  misc_feature (761)..(761): n is a, c, g, or t
  misc_feature (765)..(765): n is a, c, g, or t
agaggtaatccgccgccctttttttttttttttcctttttggacttcttattctctttctcacactctttctttttaagaactgcacaggaaccaggacttggaaaaatcatattctgggaagcagctttgatagtagccaaagagatgtcttcccaaaaagccactaaatgttgtaaagttaagggaagaggagacttagacttcattgtgttatgcatggacatttcaaaagtggtctcggttttcccatcctcacatttttcatgcagaggtggttccttaagcatagacaataccttgtttttgttgatgctacccatcttagatatatctggtccatggggtgcaatattaaacatattcagtgcagatgatatttctaatgaatgtctattttttaacttggtttctttttcctctgtaggttgttggctatttaaactactccttataggagcatgttctttggaaagttcaggatgaaactttaggaaagaagaacaagccattgcatcatgtactatgccttcatgccagaggaaggaagcaaacacagctctggcacattcggccacagaaggagacatggcttgcttggctggctctaaaggcttggatccatctcctttgaaaagaaaactcgatttttcttttttgggcctggtgtgtctattagcacattttcgacttattttgggagatgctctcatttcctgtttcatcttcagtggtgcttttccatgctaaatgaacttattngacntcatcacactcttaaatactgctgtcatcgcaggctgtctgtagactatgtttaagactgagtgaactcacactc

SEQ ID NO: 214603 - DNA, 634 bp, Homo Sapiens; identical to SEQ ID NO: 44752

SEQ ID NO: 214604 - DNA, 552 bp, Homo Sapiens
tgtttttttttttttttttactttcaatacatgtttattgcaaaaccacaagcacagtaaccataatgtcaacataaccgtatttcctaacggaacaggagatcgccatgcctaagtgcgtgcgttttccaaagaaatggcggcttatttggaagctcacacgctgcaagtgatgacgagaagccctgttgtgaactaggagttctaaaccattaaacatttaattaccactttggcaaagcaatgcacattaccatttctacaatggaacagcacagagattttaaatgcatctttattttttagaatcttcagtattcacaatgtgtaaaatgaagcagcattttaagtaaagctctatgccaaaacagtttcttaaaaagtctggattaaaaagaaggaaaaccacacatgaataatatttatcagtgctcacagttgacactaactatagttttttaaaagaataaaaatactcaagacttcaacatttccttacaaaagtatacttggccataaaataaaaatctataaaaccccaaatattacaaa

SEQ ID NO: 214605 - DNA, 638 bp, Homo Sapiens
aagtgcaaaaccatgtaaaatattgacttctaattgtgaattagtttccctttttctacttgtttggccttgttggatatgaaacatttcaagtatgtcattgtaggattatttttgacattttattcttagaatggtgatttagttgcataattctcatttgctataccacttttctaaaaaataaatgtttgaattattgaaatatcccaagatactccttgttatataattgtagatcattactttattttcagacaaattatgctattgtggataaatattcaatgtataaaatacaggacttcttttttcctgttttacaaaactccagtgccctttcttatctactattttaatattcctttgctatagtatattgcataatgtggagtcaactattttttacaatatgtacgtgttgatctgaaagttcctattgagttaaataatgaaaaataatttggtggaccatgaattttaaatttgttaaaaattgttttatttgtgtatgtgtataaaattaaattttgcaaattggtaaatttattcttcatttaaccttgttgctttgagtactcctaaagcttgtaataattctttggggagtaatataaaatatatcattcataagtgaa

SEQ ID NO: 214606 - DNA, 714 bp, Homo Sapiens
ttttttttttttttttttcaactatttggctggcaccgttttttaatctgactgccaacaggtggtgcaaacattcttaattggccacagttcttaccactctcccatcctttcgatgtcatttgttatatgcctggcccctgcagacatgagagttctcaatccctagataagatgtggtttgcaactcttggtgagcctagacctgccttcagaaaaaagatactggtgatcaggactcaaccagactcaccaatcacgatctctctggcacggttctggaaataacctatatgtttacaaaattttgcgggtgattctgatgtgcaataaaaattaaaactggtctaggataaggaccggtggggggcacaaacaagggaaggagcgaagggaaccctcccttttgtacatgcatgccatgtttctactcatgtgtgcacacatagggggaagcattttattccttcccagtctactgtcttcatagccacacagctagcagcatgaactctaaatgcaaagctggcctgccttgctttctgttgcttaaatttcccccagctttcctctcatggtaaaatcccaaaccaagaaggtttccccctcccccacctctcatctcaccttctgctactcctgaaccttccatgacactccattgctgtggtctccatggttacagaccttttttatccagttatagataccttt

SEQ ID NO: 214607 - DNA, 651 bp, Homo Sapiens
  misc_feature (593)..(593): n is a, c, g, or t
agtgaaagtgcccagacagagctcagttcttagtgagaatcagaggatgaataatccagagagatggtttgagagtactgggtgtggaaaaacttacaatcagaacagagcttttaaccagcaccagagatttcatagtggagagaagacctatgagcacaatgaatgtggaaaagctttcagttggccctctatcctcagtaaacatcagagaatccacactggtaagaaactctacacatgtgaggattgtggcaaatctttcagtgttcactcatactttattcagcattgtaaaattcacactagagaaaaaccctatgagtgtattaaatgtgggaaagcttttagtacacattcatcttatgttcaacatctaaaaattcatacaggagagaaacatcatgagtgtaatcagtgtgggaaagcctttagtcatagctctaatctaattcatcatcagagaattcatagtggagagaaaccttacaagtgcaaagaatgtgggaaagccttcaacagacaatcaaaccttattcagcatcagagaattcattctgggagagaaaccttatgactgtaaggagtgtggncaagccttcagtacacaattatttctcattcagcatcagagaatcatacaggagaaaa

SEQ ID NO: 214608 - DNA, 480 bp, Homo Sapiens; identical to SEQ ID NO: 40254

SEQ ID NO: 214609 - DNA, 647 bp, Homo Sapiens; identical to SEQ ID NO: 50498
  misc_feature (487)..(487): n is a, c, g, or t
  misc_feature (547)..(547): n is a, c, g, or t

SEQ ID NO: 214610 - DNA, 553 bp, Homo Sapiens; identical to SEQ ID NO: 55486

SEQ ID NO: 214611 - DNA, 488 bp, Homo Sapiens; identical to SEQ ID NO: 40592

SEQ ID NO: 214612 - DNA, 630 bp, Homo Sapiens
ttttttttttttttttttgggtgttggatacttggctttactttataaaaatacacaacttaaatacatatgacactctgtttacaagacataaactggtagatttaacattttcagttatttcaacagaaagaaaatatgtaaattaccttgtaagagcaaagagttcatttatagactctgctttcacagttaagggggaagaacgcccaggggcaatcaatgcaggaagctaaccaacactgtccagctctccagcaaaactcatcttgccaacagggcctctattgcaccgcctaatattgcactgctcgttagacaccatctcacttatccatgtcaccagtgtaagcttttgtcttctctagaaaagtttaatggaaaaaaacgatgtacaaacagtaaaactgtatcttacaattgtgctaaataccaattatgagaagtacgaacctctcttcactttgcaaagcttgcaatggaaagtggttagctatattttgcagctaagttcattttcaaaagttttacaaaacctttgattcagagtaagcttgatggggtacagtggcaaaggaggtgacattcccatgcctagtggaattagttgtaagacgcgcactgtcactg

SEQ ID NO: 214613 - DNA, 724 bp, Homo Sapiens; identical to SEQ ID NO: 40791

SEQ ID NO: 214614 - DNA, 629 bp, Homo Sapiens; identical to SEQ ID NO: 50528

SEQ ID NO: 214615 - DNA, 478 bp, Homo Sapiens
tttttttttttttttttagagggagtacaaagtttattcaaacattttagaaataatcaattaattacataagaatatagtgaaatctgtcaaaaacaatgtcaagtaacttgtttttaaagtggcaacgcaatatagtaaagcaatggctttaatgactaaatgaaagaatcacaaagcacctagaaatatttattgaagaaataataaacaaattttcatgatttattttgtccatttgcaatttcagtattttagctctatctcatatcattttttggtaggtgctgttaacatatgaggttaaagtggtaagtctcacaataaagtagccatcttctttgaatatttcatctcttcatttctatgaatataatcatctttcagctgcatgattccttcagcctgattctcatttcatgtctcaataaacgtgcttttgcctgataaagagaactgtgcacatattgattctgct

SEQ ID NO: 214616 - DNA, 602 bp, Homo Sapiens
  misc_feature (138)..(138): n is a, c, g, or t
acggccaacatgttttttttttttttttttttggagagggtcccagcaaaggctatatgctgtagtagcaaaacgtcaatgtgtgtatgtgctgtgtcgggaggggcagggttctgggcctttccagtcacagtgaanagcttacactaaagcaaagaggggtgataaacagatgcttctccagcatactccagcccaatgctgccccacgcaaatacaatgtgagcttcaaatgtgagccccgtatgtaaagttaaattttccaacagtacatttaaaaagtaaaaagaaatgggtaaaattcattttaataatatatttgattcaacccaatatacccaaactactatttcagtatgtaaccattaaaaaaaaaaagattttacctttttctgtactaactcttcaacatcagtattttacactcaacagcacagctcaatttgaacaaatcccatttcagtgctcaacagccctaggtgactaatggctatgatgtgggacaacacaatcctaggcagttcagtatgactagggcacaaaatgggaaggacatgagaaacaagagcagaagctggcaatactgcaggccagatcacaaa

SEQ ID NO: 214617 - DNA, 706 bp, Homo Sapiens
  misc_feature (586)..(586): n is a, c, g, or t
  misc_feature (620)..(620): n is a, c, g, or t
tcggccacggccgacatgtttttttttttttttttaattaaagtgatttgaaacaatttggtaatgcagactgggacaatgtcactatacccactgaggtaactgagacatgagagctttccaacccaaggtcagaaatcactgaaacagcttatgaaaccctcactattttagtgttttaaattgagaatgctgtatttttctcttgggcaacagataaccttcatttttgacgtaaatgataatggtggcttcacatggcccaggcaaacttcaaaacaaaactgtaggaccacatttttctaacctgaaaataagtcatataaggtacaaataagtaaaattggaattaaattattctaggaaaaatatgtggttatcttgtatctagtcagtaatcagatttattctgtaagataataacttaattctcataaaataaactcttctcagaataatgggacaatatgaaaaaatcaagaaggaaaactgcgtttttaaaaataatgtatctcactcatgtgaaaggtatgaatatttaaggaatataaataaacgatgatttaaacagatagtggtagaaatntctgactctatgacattgagatgcacaatctatnttgagtggacacagttgaggatcatcttctaagttttccaaagcggcactatactactgcaaacactgcccaaggacataacttca

SEQ ID NO: 214618 - DNA, 584 bp, Homo Sapiens
  misc_feature (460)..(460): n is a, c, g, or t
ccccgcgtgaggcccagcaaggcccggctctggtggaggaagttggggctagagaagcagtagagcacggggtccaggacactgttgaggtaggtgaaggccagggagccatggaagagctgtgtgcagaggtccagggagcggcaggcggacagccagaaagccaccatggaagccatgccaaagatgatgctgggcaagaagcagatggtgtagacggccaccaccatggccagcacacgcatggccctctgcgggcctgcctgcccgcccagaccacggttccggatggtgagcccaatgctcacaatagcaaagaggatgagtgccagtggcaggaagaactccagcaggtacagtgcctggtgccagcggagcgaggccgagggcttcgtgcccaccctgtagctgaggcaaggaggggccggagaaggtgctcaggagcaggtgcccgttgagngccaggatgcccacccagagtcccccggccacccgggcagctgcccccacggaagcacggctcagcacgtggtggggctgcaccaccttcaggtagcggttgagtgcgatggctgtgaggaagc

SEQ ID NO: 214619 - DNA, 496 bp, Homo Sapiens
tgttttttttttttgggtgtgccatcaacattatagttaaacaatgttcttaaagatctgctgtacatttatttatcgtattataaaatgtgagataaaaaacaacttttaaaagttaaccaattcattgtcgtaaaaagcctattgtctccaaattaatttgcacactgatataggaatgtttgtggtagataggcactgacttcaagtagaagaaataaagattagttgaaattgtattactcagaatggtgatattccttgcttcctgaaataattgagctcttacaaaggtcaatataaatacgacttttcataagttacacttttttgtaactcacattattgtggtttttaaattttttattattttagggacagggtcttgctatgttacccaggctagactgaactggcctcaagtggttctcctgcctctgtctcctgagcagcctgaactacaggcacacaccaccacacccagtcatcattgtct

SEQ ID NO: 214620 - DNA, 631 bp, Homo Sapiens; identical to SEQ ID NO: 50738

SEQ ID NO: 214621 - DNA, 504 bp, Homo Sapiens; identical to SEQ ID NO: 49055

SEQ ID NO: 214622 - DNA, 754 bp, Homo Sapiens
ttttttttttttttttttaaagagatgttattatttatttattttttcttttttttaaattttactttaagttctgggatacatgtgcagaacgtgcaggtttgttacataggtatacatttgccatggcgtttagctgcccttatttactttttttaagatagtaaggctgacttgattggaggaggccatggcagcagctataggagccattgcagtggggtcttgcagtgtgggagagagcttggactcaagtcctttaaagagatttcagaataggataaagaaactgtggctcagagtgatccttagatttgtgtaagttcacataaataacagtcatggaaattgcaatgaaaagctctgtaattccatgtctaattctccctgcctcatagaatgcagcccttctaacttcattatgttctaatcttggaatgtagactacctctcagggttggtgaaaacaaaaaggataagcatgccatgatccttctagaactcaaaacttggattcgtacctgggatttaatgtggtaccattttcaaataaatctccaactagaattatagcttcatttgtttattcgtggcaacaatttctttggttggtgactgaagcaaatttttctgaaaagcccaaatccaccatataccagggatctgcctctcattggtttttgaatatatgtaattttttctaatacaatggctttctcaagtgatctggattgattgaaggtgataggctgag

SEQ ID NO: 214623 - DNA, 499 bp, Homo Sapiens
  misc_feature (19)..(19): n is a, c, g, or t
  misc_feature (191)..(191): n is a, c, g, or t
tgttctgaagatgccaagnagcaaatccttataaagctcttcgcccagcacctgcacagattgtaagttccctgtaaagcatagctcctacccacagaattctcactgctgtattacgaggttatttccccatttttcagttgaagaaactgagtaagtaacttgcttaagacaagattagtgaatatganagccagactaaaatagataaatctataaaaatatggctcattctcaaccattttgttagaaaaacattaacacaagagggaaaatctgtaggaattcgttgaaagaaaaggtacaaagcaagctgtcaagtgcccccatgctgggtggagtggggccatttgaagtaaagcttatagctgggaagaggcagaagcaggaattaaagaattgtccatggcgtgaacgcgggaggcggagcttgcagtgagccaagatggcgccactgcactccagcctgcgcgacagagcgagactccgtctcaaaaaa

SEQ ID NO: 214624 - DNA, 657 bp, Homo Sapiens
  misc_feature (297)..(297): n is a, c, g, or t
  misc_feature (616)..(616): n is a, c, g, or t
  misc_feature (622)..(622): n is a, c, g, or t
  misc_feature (641)..(641): n is a, c, g, or t
ccgacatgtttttttttttttttttttagtataagcatatcccatgcaatttttggaacatatactgaaaaattatactgaaagtcaaatcaaactgatctggcaaccctatctagttacctacaatctaccgtgttcccataaaggctttaagtaatttggaatccgttaacacatttagcttattctttccccattggttccctgggcttagagcagacagcaagcctttctttcacttggccaagaaggcacctccttttcccatctaacaggttgggatcacagctagttggnggcaaagccatccacatgcatgttgtttatctttttaaggatatggtcatagtttccacccctccttacctctcctgactcaccatctctaagccttcccacacaggccctgctgcagccgccggagaactgaccgtgcttgtgggtccactccctcctcccacatcttccttaagcctcaatccatcccagttcatccatgccctttccaaagtcctgtgattcctcagctgccagtggccctcgaagatgtggcaggctgagggggtacctggggagctggcctggccagaggggtcactgcaaggcagcagggaanggaaanggtcacagtttcactctgngagtatcagacaccca

SEQ ID NO: 214625 - DNA, 612 bp, Homo Sapiens
cctgcagtacccgggaattcggcccggccgacatgttttgttttttttttttttgaatacagaaactttattaaaatactgtatattacaaatttttaatccaataaattctgtgtaatgacatttaagtgctggattcactttttaacagttgtcttgtgtgtatcagtaaagagttcaccctgtatattacaaagaggagagccacatgtggacctcagaaatggtcctgtgattagacactgaatgatagtaattgtgcatcttttccttaaagcaatgaattggaacctagatcttatctttgtagacctactttctataattaaaaataacttgcatatgtttattgctgccctttgaagaaaatgagaatggtgaaaaataatttaaaataaagatcaacatctctaggctaaactgatgcttactgcaattaaaattacttaaaattcactgcaaaatttgtgttctccaggaaattatgctatatacataatgagatttgtacatgaattgggaaataaaaaattgcttatataaaattaaaaatcaataatatacaatatttacagcttgttaggtattatatataaacatagtttttaaaat

SEQ ID NO: 214626 - DNA, 689 bp, Homo Sapiens
  misc_feature (588)..(588): n is a, c, g, or t
  misc_feature (603)..(603): n is a, c, g, or t
  misc_feature (640)..(640): n is a, c, g, or t
  misc_feature (647)..(647): n is a, c, g, or t
  misc_feature (668)..(668): n is a, c, g, or t
ccgacatgttttttttttttttttttgagatagactctcactctgtcgcccaggctggagcccagtggtgcgatctcgactccctgcaagctccgcctcacaggttcatgccattctcctgcctcagcatctggagtagctgggactacaggcgccagccaccatgcccagctaattttttgtatttttagtagagacagggattcaccctgttagccaggaaagtctcgatctcctgaccccgtgatctgcctgcctcggcctcccaaagtgctgggattacaggcatgagcctccgtgcctggcctcatatcccttttaaaaattactatgatatatccctttcaaaaagtactaactgaaaaaagtactatctctttaaaaagtactggctcaaaaaaataatagaaaataagaaacaaaaaacaggctgagaaaagtggctcacatctgttggccatgctggtttcaaactcctgacctcaagtgacctatgtgccttggcctcccgacgtgctgggattacaggtcggagccaccacacctggccccatcctcttaacataaacacttgaatgtcaataaaangcttgaactccatgntaagtcaacccaaactcaagtcaatgctgaattgacnccaatgncaattaatgcttgaagggttngctatactcatttcatttggg

SEQ ID NO: 214627 - DNA, 679 bp, Homo Sapiens
  misc_feature (540)..(540): n is a, c, g, or t
  misc_feature (554)..(554): n is a, c, g, or t
  misc_feature (558)..(558): n is a, c, g, or t
  misc_feature (595)..(595): n is a, c, g, or t
tttttttttttttttttttcaggttgggagtattatttattcaaataaacaaaaatgttttatttccctttcaatggtatatatcttaaattgctggaacatacaagtataaaaataagattattttagaaaactccagttttgaagggcacgacaatagttcagacatttgtcagtagctatgaagccacttttaacatggaatgaatatccctttactccaactcttggtcttattacatttttaaatcaaatcagcgtgctggaaatagagaaaaattcccaaagggaaatataaaataattttaagcattttcagaaatacaagttacacttaagaaacttgtattaaaggatgttaatctgagataaacagaaaacaaacgttttgcaaagcactactttttgcatctgtttgaggatacacagtttgcagctctcctgccagaagcaaaatactgactctagcacagcagaaaaggcatcaactttaagaaaaaaatgagtggtcgctttcaatgactgaacataacatattanactttaagaatttntaancaatgcaattaacagcaatagtagaaaatacatcatnttagattacaaaaattcagcttttattagcacatgaacaatctcattcattcgctgccctctcatatgtgctgagtaactgcta

SEQ ID NO: 214628 - DNA, 570 bp, Homo Sapiens
tgtgtcaagttctgatttagagtttataaggaaggtagaaacgattggccaaaataagatatttggatgaggattatttaagccgtttagatttggccagagacgccagatttagcaaaggactgggttcttatcttctttcattcatgaatatatgccttgggaggacactggtgattcccacagaattaggccaatgatttgccacattaccctttaagctagcccataattccaccagatcccacaccaagtttcagttcatgactcatactgaataaacgtcagttgtaaatgatgtttgaattggtcttcctactaaagtgaaacatcttcttttaagccaagccacatgaatgaaatagcacaatcagaaaaaaatctttttttttttttttttttgcatatcaaaccaatggccttctccactaagccagcaactaaaggtattcagaaaacaagttaatcaaggtgggcagaactttttgaactgtgaggaaatgttcctaagtttagatttattacctgtcatttagggcaaaaatctaatgtcttttttatttcttaatc

SEQ ID NO: 214629 - DNA, 324 bp, Homo Sapiens
aacagcaacaaaaatacacagtataataattacatttacatagcatttattttgtattagacattataagtaatctacagatgatttaaagtatatgggagaatgtatgtagattatatggaaatatgagggtattttatttaaagggacttgggcctgtggataccaaggaataactaaggtaaaactgagcataagtggcctgtccatattttgttaaatatcagattattgattagtgatcatcaacattttcccgcattcatgcagtgcggcctctgaaaacatggttgaacatcctatggaattttttttttttttgag

SEQ ID NO: 214630 - DNA, 570 bp, Homo Sapiens
tgttttttttttttttttttgctctttatgtaaagtctgaggtcaaggcaaggtcacagatatacagtaattgaacttatagttttgctttctccagctagtactgaaaatttataaacatcttattaaggcacttaagttactttaagttccttaataagatagttttgtacaattatttttgtagcctctccaaaagtgacaagtcactgacatgtaaaaaagtagttaatatacgctctccagagtcatacgcatgagattctcttaagatccgtttgttctgcataatattaaaaattacgtatcaaatccagaaaatgaagaggacatattagattctgaaatagtaaattccttttagttcccaactcagatcaaatctgagcaggacataaaaaatacaatgaaaagtttaataaggctctattaatgattaaaggatccatagtccagtatgaattctagtttgtaaatctgcccacttcaggaaggaaaatagttcctaaaaaccaaaccattaaacagacagggacaggttttcaaaacaaaaatgcatacttcataaca

SEQ ID NO: 214631 - DNA, 535 bp, Homo Sapiens
attgttttctcttataattggctttgcttttggagccttatactggaagaagagacagccaagtcttacaagggcagttgaaaatatacaaattaatgaagaggataatgagataagtatgttgcaagagaaagagagagagtttcaagaagtgtaattgtggcttgtatcaacactgttactttcgtacattggctggtaacagttcatgtttgcttcacaaatgaagcagctttaaacaaattcatattctgtctggagtgacagaccacatctttatctgttcttgctacccatgactttatatggatgattcagaaattggaacagaatgttttactgtgaaactggcactgaattaatcatctataaagaagaacttgcatggagcaggactctattttaaggactgcgggacttgggtctcatttagaacttgcagctgatgttggaagagaaagcacgtgtctcagactgcatgcaccatttgcatggctccaaaaatgtctaaatgctgaaaaacacctagctttat

SEQ ID NO: 214632 - DNA, 627 bp, Homo Sapiens
ttttttttttttttttttgagacagtctcactgtcacccaggctgcatgcagtggctcgatctccacttgctgcagcctctgcctcccagttcaagcaatatttgtgcctcagtctcctgagtagctgggattacaggcgtgtgtcactgcgcccagcctatattcaataacaatttgtaattaaaatgtcaataatatggcaggaacaatttaaaagtggtaataataaaggacattatcagagtcagttaaaaaatccacttaatgctgttatagaagacaatctaaaattaaacaccaatggttgaaataaacaggaaaataaaataggtcttggctaacaaaagaaatgtagatatggcattattactgtatgcaaactagaattcaagtaaaaaagcatttgcaagggtgaagatactgtgtatttaataaaagtaaataaaaacacataaagaagatacagcataatagccatgaacctctgtgatgctaagtggcttcaaatgattaaagcaaaagcagagttataaaattcaccacaatcatgaccagagatgttaacatacctctccagaaacccacagattgagtaaaggacaataaaaagggcaatatgtattttt

SEQ ID NO: 214633 - DNA, 629 bp, Homo Sapiens; identical to SEQ ID NO: 55877

SEQ ID NO: 214634 - DNA, 525 bp, Homo Sapiens
  misc_feature (208)..(208): n is a, c, g, or t
ttttttttttttttttttcaaaggtttttctttccatcttctcaatgtccctttccttaatttgagatcgcttctcaggtttttctttactttcctttatatgcttttcttgtttttcaatgtctatttccttttccactaaatgaagccctatagattcctcaatggcactcatacccaaagaagtaaattctgagtctttatctgngggtatgttttctctctcttcttttagatcttttattttttcctccctaaaagatttctcgctttcctttttaatcttgtctcgttcctctttaaagttcctctcttttgacacatgcttttccttggttgatttatcatctttgatgtttttttccaattttgattttttttctaatgttaaggattcatgttccatatttaaaaagagatcttcagtttcatcacttttaaaaaaattctctttccaaaattctctatcaaattccacactcctctgcagttctttggcactatcctagtttggatttttccttt

SEQ ID NO: 214635 - DNA, 442 bp, Homo Sapiens
ttttttttttttttttttcccagacagagtttcattcttgttgcccaggctgaagtgcaatggcaaaatctcagctcactgcaacctccgcctcccaggttcaagtgactctcctgtctcagcatcccaagtagctggaattacaggcatgcgccaccatgtccggctaatttttgtgtttttagtaaagatggagtttcaccatgttggccaggctggtctcaaacttctgacctcaggtgatccacctgccccagctttcccaaagtgctgggattacaggcgtgagccactgtgcccggcgtgcctttgacttttgaaagggcagagtgagagagccacaaaagtctctgccagtggcctctcctacagagccctacgaactcgggctggggtgtgctgtccctgggggtgccttggtcctcccatgggcacctccaga

SEQ ID NO: 214636 - DNA, 681 bp, Homo Sapiens; identical to SEQ ID NO: 48722
  misc_feature (343)..(344): n is a, c, g, or t
  misc_feature (482)..(482): n is a, c, g, or t
  misc_feature (578)..(579): n is a, c, g, or t
  misc_feature (617)..(617): n is a, c, g, or t

SEQ ID NO: 214637 - DNA, 637 bp, Homo Sapiens
tgcaggtaccccgggacatcggccacggccgacatgtttttttttttttttttttataatttcaaaactttatttttcacacataacagaaatgtacaaaaaacacgcttctatttaagttctagcatatggtggaaatcttgctagaagcagcagcttaaatttgcagtctcacgtgaacaaagaatacttagattagcagaggaagtttatagcgtaaagatgacacaaaaaaccagcatgtcacatctccttatccagagtgttttctgataagcagagctccagggctttctacgacagaagtcttagtcatttataaaatgaattattttgtcctaaaagtaatgaattttcaatattttaattaagaacttggaatttgttggacaattaaaaataaactaagactcatactctcccctcctctactcaaaaaggtctaaaaactgcagtatcccattcgattaaaaaaaaaattctccattagcctggtaattggccagttcaagatctctgttaaccatacagtgacaactggtgtcaatgatcactgcaagatgtaatgaaatcttgaaggaacatctgggtaaagaattagttactaaccagtttccacagctgctcatgcaggtgg

SEQ ID NO: 214638 - DNA, 425 bp, Homo Sapiens
atgtttttttttttttttttctaataaaatatttattaaacagtaaaaagtacttatacaagttaagcaaagtgcaaatgatatatgaactagaacaagctacttttcgtaccagtgcctcctgttgaaacgcccaacacaagtgctcaataaatgtccaccatattgaaacacatttaagagagaacactggcctgggcacggaggctcacagctgtaatcacagcactctgggaggccaaggcgggtggatcacaaggtcaggagtttgagaccagcctggccaacatggtgaaaccctgtctccactaaaaatacaaaaattagccgggcatggtggagcatgcctgtaatcccagctactcaggaggctgaggcaggagaatcgcttgatcccgggaggcggaggttgcagtgagccgagc

SEQ ID NO: 214639 - DNA, 553 bp, Homo Sapiens
cggcccggccgacatgttttttttttttgtttttcttttcattttaagagcagcaaaatttgccctggtttctgtgacccaaattctctttcctacttatgaggtaaagcattcttgcgtgcatgccgactgtcctcaaatattaggcttgaggctctgtggccaatgggaggttagatttcaatgaaaagggaacagatgtagatttgggttaagtttcttcaggatcctgtgctggaaaagccccttaacacattactgtcatcatagtaacagccaattccatctgcatagtaatccttgctttattcttcttgtctgagccaagttacattgtgactcactcgtctaccctctaaatcattattccctttgctgaaaaaaaggcagtcaactactgtggcaacaaggtagttagtgaactggcaaacaggcctgctgtgctggtatttaaatgactgaagaatgtttagttttacctccaagatattttactattgacgtctcaccatcaatactagtatctcacacaggtatttctagattaaacaat

SEQ ID NO: 214640 - DNA, 354 bp, Homo Sapiens
  misc_feature (48)..(48): n is a, c, g, or t
  misc_feature (65)..(65): n is a, c, g, or t
  misc_feature (79)..(79): n is a, c, g, or t
  misc_feature (98)..(98): n is a, c, g, or t
  misc_feature (150)..(150): n is a, c, g, or t
  misc_feature (180)..(180): n is a, c, g, or t
  misc_feature (247)..(247): n is a, c, g, or t
  misc_feature (270)..(270): n is a, c, g, or t
gaatgttaactcctaaagacagaaactttgttcctactgagatctacntaatcttaccattgccntatacttcacaggngctcaatatttgttaatangacctttttgaaaattatgttgagatcacctgcagaatatcctgaatttgtnaacaggaaacctgaaagtagccttaataanattaagtcgggagaccattgaaatgtagaaaaccactcaatactgaactccccaatgttaatttggnattgtcttgtgattatatcctgncctcctttagcctcactaatcaagttgggtcctatcttcccagatgactagttttctactggttttataccatatagattcaat

SEQ ID NO: 214641 - DNA, 619 bp, Homo Sapiens; identical to SEQ ID NO: 53209
  misc_feature (2)..(2): n is a, c, g, or t
  misc_feature (11)..(11): n is a, c, g, or t

SEQ ID NO: 214642 - DNA, 615 bp, Homo Sapiens; identical to SEQ ID NO: 40017
  misc_feature (573)..(573): n is a, c, g, or t

SEQ ID NO: 214643 - DNA, 501 bp, Homo Sapiens
tgtttttttttttttttttttgttttcatttttaaatttaactttttaattctagcagaaacacgcaaacctccaagactcttgtgcccgtcctggctccgtctgctgggaggagaccagctctgcctgtccccatggggtcccctgagcctccacctcctggtccagctccccagggttcgggggcggaggggccttgataacggccgggcctgagacgcggctcccacctcccagcccgccccccacagtcggattcggatctggaattccacaccaggcccgagctcggctactggaatgtagccttcatcctccgtagcttgtcctgaatcttccgtgagtgcttctcgctggagacctggtggaagttggccctgctatctgcggcgagtgtggaaatgtcggcaccgctgaagcgggcaatcctctgcttgaggtacgactggagcttggggtcggggctgaaggtgtaagggttctcctggaacgcgtgcacct

SEQ ID NO: 214644 - DNA, 505 bp, Homo Sapiens
gtttgctgagagttcttttataaatgtgttcatatatatatgttttatatttttcttattcttactatctgcatattagagggagtttagctcattggttaaaaggatttgttccggaaacctaactccaaatctttgaacttcctagaaacctggcctgtttatttaccccgtatgtcactttcctttatctgtaactggaaaatgtgtacgaagagcttaatacaatgactgatacacagtgagttctccataaatgttagttattattttaatattacagcatctgtggcaacagcgggtttatatttcagcgtcctgagaaacactcatcctgaacaatgggaacattggccacatccgccattgtcaattttaaataaaagatctgatgactagttggtgagttgatcttgtaagacttttacagatacccagaacggctctacttcttcatattacactttttagttttaaaagtttaagtagatctctgtgatccctg

SEQ ID NO: 214645 - DNA, 697 bp, Homo Sapiens
gactttattaactgaactatactcctgattacaacattctgtgtatgttaatagtttctctggagaaattacgggcacaggaagttcctctcattaaggatattaacataaagcttaatatgaaaaattagcactcagttcagaaatgacgacttcagaaatgacttcagaaatgacgatttgtatgatcttttcattcctcacaacccagtattaaaactatctaatattgcaaaggatggtagtgttccacttcgttttgctattcaattattgctgatagatacatgttttcaaaaaggccattggcatctgtttgctttctcctacttctccaagtgaatacacccttcaatatgtagtaaatacatatgtggagttatgttttgagatttttttgaaggatttgaaccaaactgtttaaacagctggtagcctaaaactggaatatttcccacaagggaaaaataattatttggggaatgtatgttaccacaaactcatctgacttggaaagtgcgcctttacaccaaatcaaataactgaacaatgggattagaaacttttaattattattaacctcggccaccgggcgccgtggctcacgcctgtaattccagcactttggaaggcagtggcaggtggatcgctcgagctcaggagttcaacaccaacctagcaacatgacaaaacaccg

SEQ ID NO: 214646 - DNA, 536 bp, Homo Sapiens
ttttttttttttttttttttctttttttttttttttttttttttttttttttactgtgttaaaaaaaagatggcacatttattgctacataaatgttatatacatattgtgttttctgttacagtgacagaaaaaaatttgaacttcttgctgctggttgaaaaggtttatcaataataccttgaatttgacacaggatacaaatctgcaataaaccaacaatggaaactggagaacaagatgagaagcaattcatctccaacaattagctcttacaatactccataggtactacacggtatgctagaatcctactatggtcttaaaatgctattgtaaatttctgatattaatgaacaggttatggtaaataaccctacattttttactacctaatataataaaataaagtaagaaactttttactgaaaactttttgatttcaaaaatctagaaagagtaatatttagaattcaagaaattttcttacaagattattgtataaaagactagctacagtgaaaaataagccaaat

SEQ ID NO: 214647 - DNA, 495 bp, Homo Sapiens
tttttttttttttttttttgcgtggctcacagaggcttcatttgtaacagccaaaaactggaaacagtccagacacccatcaacaggtgaaaagatccccaaatagctgcctgcatgtgttgcagtgctactcagcaacgaatgggagggaattactgaaactccaggcatcaacatgaacctaaaaaccataccaggtaaggccagcctgcaatcccagcaccttgggaggctgaggcaggtggatcacttgaggtcaggagttcgagaccagcctggccaacaaggtgaaaccccatctctactaaaaatacaaaaattagccaggtgtggtggtgggcacctgtagtcgcagctactcgagaggctgaggcaggagaatcgcttgaacctgggaggtgaaggttgcagtgagctgagattgtgccacactgcactccagcctgggctacagagcgagactatgtctcaaaaaaagaaaaaaaaaaaaagtga

SEQ ID NO: 214648 - DNA, 531 bp, Homo Sapiens
tttttttttttttttgtgacggagttttgctcttgttgccaggctggagtgcagtggcgtgatctcagctcactgcaatctcagctcactgcaatctctgcctcccaggttcaagggattctcctgcctcaggctctctagtggctgggattacaggtgcctgccaccacgcccggctaattttttgtatttttagtagagacagggtttcaccatgttggccaggctggtcttgaactcctgacctcaggtgatctgcccacctcggcctcttaaagtgcttggattacaggtgtgagccaccacaccaggcccaagaacttccttatattcctttgctgatgcccagaagaggccagaagggcaaacagggatctgacacaggaggcagaattctttttttcctgttgccaggacatgagacaagtagcagggaatgagaggaagctgcacaattacttgcgggtgttctcgttcttgagcagagacttggcctgctgctcactgatgatggtggccttcacctggggg

SEQ ID NO: 214649 - DNA, 470 bp, Homo Sapiens
  misc_feature (360)..(360): n is a, c, g, or t
gacctattttctcaggagctcagcctggccttacttcagtgataaaaggaggaaaggtgagtgggagttggaggcattaaaattcttgagttcaagacagactgcgctgatgctcaactgctgaccactaaagtcataaaattcctaccagtttcccaaagagcttgagtgttgttcttggctttgttccagctctggttgaattacttttacaagtttaattgtctgtgggcttcttgtctttctgtcctaaactattgctgtgtatctccaaatgacttaagcctagaagtgaatgtgtgccccctgccccatgtcttcttttcttctttattcattttccttgtattttgtctttgngtcgatcatattttttacgttgttaaaaactggaacttagtttgcctgagttctgttcatcctgttgtcaaatcaggtctcttcccctctcacagcttcgggttgtcatc

SEQ ID NO: 214650 - DNA, 611 bp, Homo Sapiens
ggtgggatacgaaaagaccgaagaggagggagaatgttgaaacacaagcgccagagagatgatggggagggcaggggtgaagtggggtctgctggagacatgagagctgccaacctttggccaagcccgctcatgatcaaacgctctaagaagaacagcctggccttgtccctgacggccgaccagatggtcagtgccttgttggatgctgagccccccatactctattccgagtatgatcctaccagacccttcagtgaagcttcgatgatgggcttactgaccaacctggcagacagggagctggttcacatgatcaactgggcgaagagggtgccaggctttgtggatttgaccctccatgatcaggtccaccttctagaatgtgcctggctagagatcctgatgattggtctcgtctggcgctccatggagcacccagggaagctactgtttgctcctaacttgctcttggacaggaaccagggaaaatgtgtagagggcatggtggagatcttcgacatgctgctggctacatcatctcggttccgcatgatgaatctgcagggagaggagtttgtgtgcctcaaatctattattttgcttaattc

SEQ ID NO: 214651 - DNA, 701 bp, Homo Sapiens
  misc_feature (106)..(106): n is a, c, g, or t
  misc_feature (619)..(619): n is a, c, g, or t
  misc_feature (684)..(684): n is a, c, g, or t
gaagatttaaaaattcaacatacttatagatggtttctctttaactgttttgatttgagaattttcagagacatgaattttattccttatttctttctgcctctgngtgggatctctccataaatgattttttcctctttataaatgcttcttgtaagctccctggtacaggtgtaagcctgcgaggggtttctgctgggggaaaagaaatttatgacagaaataggcaaagtatctactttccattagaagtgtggaggccgtccaaggcttacctgtagatgctgtccttggtttttctatggaaagttctgatacagctggataatctgaggcttctgttgctgatacaagaggcagaaacacactcacctaatggcaagaaagttgcatgttttactctttttaaacgctttaagcgggtcttgctctgctgtcagattagagtgcagcggcatgatcacacctcactgcagcctcaatcttagctgggtctacagagacccgccaccatgcctgatttttgtattttttgtagggattgggttttgccttgttgcccaggctggtcttgaactgggcttaggctccactgccctcacacctctaggcctctgtntagatagctttattcttattgcctccctactcccctagtaaaataccagttgttctgaagtcatntttcaatatctgggaat

SEQ ID NO: 214652 - DNA, 586 bp, Homo Sapiens
tcctaggtccaaatccctgctttgccacttaataatggtgactagacaagtcactaaacctctccgagtctgtatcttttcctacataacataaaagcagcagtgatcacatggcattgttgcaaagattaaattaaaaaattcctgttttactctttcattaggcatgtggaaagttttcaataaatattagttattgtaacttctaatctagttccccttgtttactagtgaagaaaaggagatcccaaagagttgagacacatgtgcccacatttatccaactggttgatagttctggaactagaagctgctgcccctgatgcctagaacagagctctcattaagctgcagggcagctagggagcttttggtatctgtgttccagacatttccctactcacctttaaaaaaaaaaaaatgcctagaagacagggtcctttaattcactcaaccctagtctgttcctagccatctcacatagcactaggggcacgtattgatatttgccttttgtatgatttggcacacctttgtttgcattcattcagcatttatttattgtgtacctactgtgtgccacaca

SEQ ID NO: 214653 - DNA, 561 bp, Homo Sapiens; identical to SEQ ID NO: 45729

SEQ ID NO: 214654 - DNA, 486 bp, Homo Sapiens
caagaggaagaaaaatgatggatgatgccacctgcttcaactgtatataataaacacttatgatgacatttcttgcctggctgagatctgatataatggaattgtaaatactcttcagaacaatttcttcagctacaggaagcgtggtgccatataattttaagaacttggcagtggagctccatttggggcttcacgtttcttcatatgacttctgattattgaagcattacttcagctagaggctcctgagggaaatgttcagaggaggttttatcaggattttaatttaaggtttcaaacaggggaagacaggaaattcaaagcgtgacgggataaaactcatgcctccctttgtccaggcttatcagaagtaatacatctgctctgaatagcatgaatgaatcaatgtgcagttttatcagatggcatcatggataaagatgataatgctgccttttctgtctctcaggctgtttccatgga

SEQ ID NO: 214655 - DNA, 627 bp, Homo Sapiens
atgttttttttttttttttttaaaggcaatttaagaaaaaaaatttgcttggacttttgcttctggccatgatggactagatttactctcccagatgactcaattaaaaaaccaaagacaaaatacatgaagaacagtttcaggccctgaaccccagcgtgaacacgagtgtgatccctgagagggacatgaacaggggagttggccttcagtgcctgggccgcagagccggcagggtaagcctgcagatggccttccccacatcttcagcctgggaaacaaccgcctgagggatgagagggaacaagcccagggaaggctcaccaagagaggaatggtttgttttcccaccggccacagtggaaaactctcctaaacacacaggatagcagggacagtgctcagaagggcactgcttccgcagtggggaaaatgagccctagagaaaaggctgctctgattccacctagaaagttggttccaggtaacttcactgcatttcaaaacaaagctcaagaatatctattagaatacaaaaatattcagtaaagtaaaatttaaaactccgagcatctcctcaaaaatcacaaagcatgcaaagaaatagaaaatatgacctataatgca

SEQ ID NO: 214656 - DNA, 570 bp, Homo Sapiens; identical to SEQ ID NO: 48477

SEQ ID NO: 214657 - DNA, 588 bp, Homo Sapiens
ttttattataaatcaaaacaccaaacttttgcaaactttacataaacgtgtagccatatgactgtataacaagagcccaagagcaaccattgtctaacaggtagaaatgcagacagtttcatgttaagcctttagaatttcctttcacggcaggtttccaaaataaactaacttttctaacatttattctcacaaaaatatatttcaagttagaataaacaactcattggcttcagacatttaattgtatgtatttaaccatactcagataattgtcatatttagccaaatggaggctttttctgtgacctatttccaaattctcagattctggttcatctactccttcaagcagtttggaatgacttgccagttggcatttatatcattggaactattctgcaaataagccattttgataaagcttgcttggtttgagacaactatgtatttggagataaaagactcagaacaaagtgcttgccttttctacagtttatatcaaacgagatgggcacttaagcagtcagcctggattcatatgtctagagtggccaggctgtaaatacaataagtctagctgccttc

SEQ ID NO: 214658 - DNA, 628 bp, Homo Sapiens; identical to SEQ ID NO: 56028
  misc_feature (525)..(525): n is a, c, g, or t
  misc_feature (531)..(531): n is a, c, g, or t

SEQ ID NO: 214659 - DNA, 647 bp, Homo Sapiens
  misc_feature (528)..(528): n is a, c, g, or t
gagcacatggaaagcaggatggttacagaaacagaagagacccaggagaagaaggcagagagtaaagaacccatagaagaggagcccactggggctggactgaataaggataaagagacagaagaaaggactgatggggaaagagttgctgaggtagcacctgaagaaagggaaaacgttgccgttgccaaactgcaggaaagccagccaggaaacgcagttattgataaggaaactatagatttattggcgttcacctctgttgcagaactggagttgctgggtttggagaagctcaaatgtgaactgatggcccttggactgaaatgtgggggcactctgcaggagcgggcagcaagactcttctctgtcagaggactggcaaaggagcaaattgacccggctttatttgccaagcctttgaaagggaagaaaaaatgagtatcatcagagctgattcctatttgtttatagtgtctaccatctacaacctgcataatgtggactcttgaccagtattcctgttgnatattaaagctaactttttagtaacccaattctaactatcccctttttccttgtccgggctggtagaattatgtctgaaaccatctgggcccttaatttctttgtctggtttctatagt

SEQ ID NO: 214660 - DNA, 608 bp, Homo Sapiens; identical to SEQ ID NO: 48788

SEQ ID NO: 214661 - DNA, 514 bp, Homo Sapiens
gaaacaaagtatgttatatatttgccaataattcacatgctgcctcagtgtcctcagatcccaggctgcacataaggtccatttgcctgagtattattacatacctccttctccagaaaactttcaagttcacagccttgcgttgtccatctttaatacacttagttgttggttttaataattaaggaaacaggacctacctatacctgtgccaacagggggcactatccctctgtaaagaacaaatcaaaaagtattttgtgttgtagctggaggatccaatggtcttgcttttggcaaaaacttgaagaggagggtggtctttacatgtgtggaaaccttgagtgaccgagcaaatagcaagagaaattgcttagtggcttttaaaatttgaaatataattttactttttatttttacaatacagtgtacagtatgacatctcaaaataacagtgcagatacaggaaaagagtacaaagggggattaacaacagatgtcagaaggttacctt

SEQ ID NO: 214662 - DNA, 466 bp, Homo Sapiens; identical to SEQ ID NO: 52585

SEQ ID NO: 214663 - DNA, 620 bp, Homo Sapiens; identical to SEQ ID NO: 52081
  misc_feature (423)..(423): n is a, c, g, or t

SEQ ID NO: 214664 - DNA, 540 bp, Homo Sapiens; identical to SEQ ID NO: 55586

SEQ ID NO: 214665 - DNA, 630 bp, Homo Sapiens
gagggagcgggcagccagacagacggacaggcggaccgctagggagctcaagtacccggacacacgcacgagcgcagaacaaagggccggacatgctccagccggctccgcctgcgcctcggccttgcgcgcgggggcccgggttacctgcgcagtgcccttggtgtggtggaagcaaggtgccatgtgataagtaagcctccagagaggcctgcatggcaggatccaatgtctttagccaacagcatctgggaacctgagacctgccaacacccttgtgagtgagcctggaagtggacctcctgctcttgaaccttgaggtgactatagtgctggctgacaccttgactgcagtccctgagctggggggcccagctgatctactcccagaatcccccctactaaaacagtgatataataaatgcttattgtttcaagctggtaacttttggaatgcattcactgaaaaaaattagaatatcaaactataaaccgtttacttagtcaactttttggggaactaatatggccataaatatcaaacctcctacaattttgcacattctttgactttgtagttctacatctataaacttctcttaagggaaatcatggatgccaacaaagaaa

SEQ ID NO: 214666 - DNA, 699 bp, Homo Sapiens; identical to SEQ ID NO: 43118
  misc_feature (634)..(634): n is a, c, g, or t

SEQ ID NO: 214667 - DNA, 613 bp, Homo Sapiens
tttttttttttttttttttcttttttttttttttgacagtatttttccatttttatttcattttcttctagcagtttgaaatagctcattaaacagttccacaaatagtatcacaacatgcataaacaatgctcttgataccacttcaaacatttttaagacaggttatgaattagccttgttttgaactagtgttatagatggctagggagttaccaaatatttagactactgaaaaggctaaatggatattaattgtagtaatttgattattaatctttataagtaaataagaacctctactaaaagatgtgtttccaagggtttttaacaaataggttgtctacggccataccaccctgaacgcgcccgatctcgtctgatctcggaaacaaataggtttacatgagagcatataaacctataaaagttgaatcaattggctaaccacattcttgaagaggtccataaggcatctgagaattccttaaatactttacctattattgtttttttttctttgagacaaagtctcactctgtcacccaggctggagtgcagtggcacgatctcggctcactgcgacctccgcctcccgagttcaagcaattct

SEQ ID NO: 214668 - DNA, 532 bp, Homo Sapiens
tgttttttttttttttttaattgacacacgataattatacatatttatggggtacatagtgacattgcaatacacaaaatatacagtgatcagattagggtaattagtatatccatcatcttaagcatttatcatttctttctgttgagaacattcaatatcctccttctagctatttagaatatatattattgttaactgtagtcatcctacagagctatagaacactacaacttaatcttcctatctagctgtaattttgtatcttttaacaaatttcttcctatcccccattaccttttaaattaaatttattttaataattaggtaacctactcatgtaatttaaaaaccaaaatgatatgaaaaggtctacagtgcttctactcctgtcactactcctctgttctcccatcttgtttggtatggatcttttgaatccttctgagagtttctttaggcaattaaaagcaaatacacatatgcaaaaggaatcatactatatatgttattttgtacctttttaaaaact

SEQ ID NO: 214669 - DNA, 640 bp, Homo Sapiens; identical to SEQ ID NO: 46509
  misc_feature (629)..(629): n is a, c, g, or t

SEQ ID NO: 214670 - DNA, 732 bp, Homo Sapiens; identical to SEQ ID NO: 42647
  misc_feature (612)..(612): n is a, c, g, or t
  misc_feature (640)..(640): n is a, c, g, or t
  misc_feature (684)..(684): n is a, c, g, or t

SEQ ID NO: 214671 - DNA, 627 bp, Homo Sapiens
  misc_feature (13)..(13): n is a, c, g, or t
  misc_feature (554)..(554): n is a, c, g, or t
tttacatcattanaaataattttattatttattttaaagcagttcaatgtaactggtagcaaaatggtacagacaataaacagaatcaattcccattgggctacaaggactattattgactttatattttattttcatgtgcaagtataattattttaaaaaggcaacatttcattaaaagtcttttataagcatgtttttattctttaaataacagaaagactaataaattatcattattgtagcaagctggtatgaactgtgtcaaatattaaatttggactaatgttcatagtcaaaaataattattttaaaatttatgaaacaaaatctttagttatataggaaatataatcatatcctagcttaaaatcctagtctcaacaactgtcataatgcaaaaataccaaacttcagatcttgtggggaaataaaagatttgtaaaatcttacatttattcctaaaaataatgaagtaaaaaaagtcaacttaaagaaacatcatacttgactcttgatatgcaaatataaaacaagttcataaaatttattgnttttctctggtacatatattagttccattctgccttcagtttttaacaatttatatgtgaatgtgtgtgtcaa

SEQ ID NO: 214672 - DNA, 626 bp, Homo Sapiens
tttaatctcagaaacatttgcattcagagtacgttcccttagaattttctcctctccactccatgaggagtgggcatgtgctttattatatcaacaagactaagaagccgcacccgagtggtcccactcaaaaaagagatttctgtttctacctcaaaatgcagaaaccattacagattaaaagagaaacacacacacacactttgagaaactcgcccttcctcatcttcaaagtgtggggtatgcattccagatctctcagcctgatggacagcttggaagtggaagggaccaatgtccagcaagtggactttgccccatgtccattgtgccttgtgtcttcctagccaactcagaactcctcacatccagcccccagactaccgctcatgggctcaggcaaaggtgggagtagccagggtttggcacttgggagacactcaaaaatattttttggacaaacaagtgaatgtgagccctgaaactttctagagagtctctgtcccattgggttcaagccagtaaaaagccagagaagtgtctttctgtcccaaacataagcaagagatggatgagtcctctgtgcagaagttactaaacactccttggtgtggaggagttttttg

SEQ ID NO: 214673 - DNA, 607 bp, Homo Sapiens
ttttttttttttttttttttttttttttttgtataaacattctgatttaataaatggtatgaatatatattttgcatactttacaataaagaaagttttgaaagaaaatggatctaaaactttgtttccctccaatttacatagtaaagtcaactgcatacagttctttccatgtgtaagttttacatttgtattttctacaattaagtaaatctaaatgttaaattttaacacatatatccaattatgtacacaattacaatgtcaatttataagtcaagcttacttaacaatcataaattacaaaaaacgcactatgaataattttgttctagaagtatcacatcaactcatatgatctaggtgaacccaaaagtaaaaaataatgattataaattatggtagtgtctgtaaaaccctgttataaaggaggtattcttttaaaatatgtaccttatatataaaagctcctgactccttttaaggaccaaaattattttcagtctaaccattttcattaaagcgcttatttaaaaagtatcaccttataaaactgagtatataaaatacaatgcagcccttgatagctaagaatctttataaacgc

SEQ ID NO: 214674 - DNA, 757 bp, Homo Sapiens; identical to SEQ ID NO: 52677

SEQ ID NO: 214675 - DNA, 718 bp, Homo Sapiens; identical to SEQ ID NO: 56004

SEQ ID NO: 214676 - DNA, 638 bp, Homo Sapiens
ctgttgtaagccgacagttcaagtctttatttcccaggttggtggggagtgaggagaccctaccttcattccctttcctagcccactgatttttgggggcaggtcagggagaaagcatttttttttttttttgagtctcactctgttgcccaggctggagtgcagtggtacagtcttggcttactgcaacctccacctcccgggttcaagctattctcctgccttagcctccagagtggctgggattataggcgcccaccaccacaccaggctaatttttgtatttttagtagagacggggttttaccatgttcaccaggctggtcttgaactcttgaccttatgatccgcccgcctcagcttcccaaagtgctgggattacaggcgtgagccaccacacccagcaggagaaaccattttctaggctctttaggaaggaccatgcaatgagtaggtgatgtatttgagccctcacagtctttacacccctagaggagctggaggacttaagagtttgctgcagaagcgtggccaagcacaaaacacatgatcaggaaagcagagtgttttcccattaccaatggatgaactatgcaaaccctaaacgccttggcagacacctcccaccccttacccct

SEQ ID NO: 214677 - DNA, 470 bp, Homo Sapiens
tttaggatcccaagacttccaggatttattatgtatcattgtacacactcactgattcagcttcaatactggggaagtaaggattcctatagtaacaatagtccctcaagtagaggctctgctcacctgaggttgggattggggtcattggggttggcactggacaataattccctctctcccccaccctcaccccattaaagagacatgtagagggacagagtcaagttcacagatgagacgggccacctagcggacccgaaataagtggagccagtggctctctcttcccttgtatgagacgatctgagggcctctggacactgcgggtggttatttatgtttgggtggccactgcacctcctgcttctgctgctggtgctctacaggaagcaatacttctccctttgtgggcagggctggttgaatgtcttggacctggcctggagctggggcaaacacaggctgct

SEQ ID NO: 214678 - DNA, 689 bp, Homo Sapiens
atgatcgaccgcctcttcctctggatctttgtctttgtctgtgtctttggcaccatcggcatgttcctgcagcctctcttccagaactacaccaccaccaccttcctccactcagaccactcagcccccagctccaagtgaggcccttcctcatctccatgctctttcaccctgccaccctctgctgcacagtagtgttgggtggaggatggacgagtgagctaccaggaagaggggcgctgcccccacagatccatccttttgcttcatctggagtccctcctcccccacgcctccatccacacacagcagctccaacctggaggctggaccaactgctttgttttggctgctctccatctcttgtaccagcccaggcaatagtgttgaggaggggagcaaggctgctaagtggaagacagagatggcagagccatccaccctgaggagtgacgggcaaggggccaggaaggggacaggattgtctgctgcctccaagtcatgggagaagaggggtataggacaaggggtggaagggcaggagctcacaccgcaccgggctggcctgacacaatggtagctctgaagggaggggaagagagaggcctgggtgtgacctgacacctgccgctgcttgagtggacagcagctggactgggtgggccccacagtggtcagcgattcctgcc

SEQ ID NO: 214679 - DNA, 601 bp, Homo Sapiens; identical to SEQ ID NO: 47185
  misc_feature (513)..(513): n is a, c, g, or t

SEQ ID NO: 214680 - DNA, 611 bp, Homo Sapiens
ttttttttttttttttcaggcaaagatcttttatttgtggttaggcttacaccattccaaaaagtaaacataattaacaaaacacttaaaagtaccagaggaggtgccccggtatcaacactaatcagaccacagaagaaagcttgacaaggatcttcatatacggatgccagcttcaatcatgtcaaatgaacatgttgttctctcagtggtaacagttagtaggccagagcagaactggagactcttttccactggtgtaggcagccagggctctccaggagtactattatagatgacatgaaggtgactaccacggtagcaatgacaacaatcccagttacaatgactgaacaaagctaaggccatcagtataggcttgaagcgatctagaaatccttctggagcctctcatcagctgatcatccctgatacatcccttggatggccacagaatccattttcacaaaactgaatccaatgcattgtgttatcactgcaacacgtgaggtctggtagttgctaatttggaaaaatggtaaatactaatactactgcaaatagtcaatctatgctacaagaaaaacatattaacacacacaggtactttt

SEQ ID NO: 214681 - DNA, 735 bp, Homo Sapiens
tatttgaactttttattgatttttggggggagtaaagaattattttgtgatgcaaataaatatcctttaattgatcgacttgccaaatttagatttgtgtgcatcaggctttcttttttttctttttttagagaagttcaatataagcttttcttttctttgtttctttctttctttattttgagatggagtcttgctctgtcgcccatgctggagtgcagtggcgcgatctcggctcactgcaacctccacctcctgggttcaagcgattctcttgcctcaacctcccaagcagttgggactacaggcgtgagccaccatgcccggctaatttttgtatttttagtagagacagggtttcaccatgttagccaggctggtctcaaactcctgacctcaggcaatctgcccgcctgggtctcctaaagtactgggattacaggcgtgagccacctcgcccagcggcatcaggctttcttaaagtgagagcacgcctgtactagagcaagcaggaatcagagaccttccagaaatactactgtgtaagggccagaaatatcttcacttgtcattgttatataatcattattacttttgctgtaatgttaatattgatttattaatatatattatcttttcatacattttctaagaaacatttatattgataagaatcttttattttgccaagggcataaattattggttttctttttttttttttaataaatttca

SEQ ID NO: 214682 - DNA, 728 bp, Homo Sapiens
  misc_feature (642)..(642): n is a, c, g, or t
  misc_feature (668)..(668): n is a, c, g, or t
  misc_feature (674)..(674): n is a, c, g, or t
  misc_feature (687)..(687): n is a, c, g, or t
  misc_feature (709)..(709): n is a, c, g, or t
  misc_feature (713)..(713): n is a, c, g, or t
  misc_feature (726)..(726): n is a, c, g, or t
tcatatgaggaacaaaattaaatttgaatacagtcagataactgccacgcagggcatttggggaaccatccccgaatgccctgatgtgatttccctcagaaaatccttgtgtattagaggagaaggtgctgggcaggggcagcagcatctcagacatcaagtcaactttatcatctactacatcagcactgaagtccaggggtattgaggcactaactaggttccattttctttggtttggttacttattttttctttttgggttctcggtgtgcagaggctgtagagagagcctcagggcggtgaccgctgcaggaattcggccctccagctcccctccagttaccaggagccgatttggaggccaggccttcccagctgagtgtctgtcagcttcattctctctcagctgtgcagtggaagagcaacaacagacaggtgaccttcttgggttgtgcttcacaatggactgggaaaaacatctttgaaatcaggaaatcaggccgggcgcagtggctcatgcctgtaagcccagcactttgggaggcggaggcgggtggatccattgaggtcaggagctcaagaccagcctggtcaacatggtgaaaccccgtctctactaaaaatacaaaaaaaaattanctgggcgtgttggcgggagcctgtantcccanctacacgggaggntaaggggggagaattgcttgancccnggaggcggaggtnca

SEQ ID NO: 214683 - DNA, 577 bp, Homo Sapiens; identical to SEQ ID NO: 49111

SEQ ID NO: 214684 - DNA, 565 bp, Homo Sapiens; identical to SEQ ID NO: 40611
  misc_feature (9)..(9): n is a, c, g, or t

SEQ ID NO: 214685 - DNA, 661 bp, Homo Sapiens
  misc_feature (571)..(571): n is a, c, g, or t
  misc_feature (615)..(615): n is a, c, g, or t
ggccggcatggtgaaaccccatctatactaaaaatacagaagttggcctgccaccacacccacctaatttttttgtgtttttggtagagacggggtttcaccgtgttggccagggtggtatcgatctcctgaccttgtgatccgcccaccttgggctcccaaagtgttgggattacaggcgtaagccactgcacccggcaataaacctctttcttttgtaaattgcccaggtatgtctttatcagcagcatgaaaatggactcatacaatgatccattacctagggtaaaattctcctgaatgtcaaacaaagagataaactacatttgggttttgggtaagtcccctgtaatgatgaatcaagaatcctcaagtctgtcttgccacccatttaatacgtatttttgttaaggctgaagtttagagttagaatcaggacattttggcctattgagaggttctgaattccaacagaagatgccatgtaaatcagtgaatttgattcttttaaaagcaacttacaaaatttacaagatgtattcaataaagcagtttagctttggtatatcanaccttataatgaaccattttttccacttcatcttatgcaatgtntaatattttctatttttggtcaggatattaacctacacctggaaac

SEQ ID NO: 214686 - DNA, 724 bp, Homo Sapiens
tctgacagacctcagcagatccagcaacctccctccaggtggaggcctccagaaccagagggaccagaccagagggagcatctgagccccgcagcagcaaaaccctttgttcaaaccagtcccatccagacccaacatctggaaagatgcacctagaacctcactgataaaacttcttaagttcacgaccctaacatttccccatacaaagctggtcagagagagcggggacacaggccaggactcgcagcgcgtccgcctcctccgctctggccccagcgaggtgccgaccaatgaaggtcacacctggttccccagtgatccccattagtagtatttctcaagtatgtgttgtttaaaaacataatttaagtacatttgaaaatgtgacatattaggccgggcgcggtggctcacgtctctaatcccagcactttgggaggctgaggcgggcagatcacctgagttcaggagttcgagaccagctagatcaacatggagaaaccccgtctctattaaaaatacaaaattagctgggcttggtggcgcatgcctgtagtcccagctactggagaggctgaggcaggagaatagcttgaatccaggaggcggaggttgcggtgagccgagatcgcaccactgcactccagcctgggaaacaagagtgaaactgtctcaaaaaataataaagaaaaaaaatgacaaattacagttgcaactttga

SEQ ID NO: 214687 - DNA, 663 bp, Homo Sapiens
gacagtggctcccagcactttgggaggctgaggcaggtggatcactggaggtcagaagttcgagaccagcccgggtaacgtggcgaaacccaatctctactaaaaatataaaaattagtggccaggcatgctggctcacgcctgtaatcccagcacgttgcgaggccgaggcgagaagatcacatgaggccagaagttcgagagcagcctggccaacatggcaaaccctgtctctactaaaaatacaaaaatagtcccagccacttgggaggctgacactatagctcctggctccagtttctacttctaatcctaccttggagcaaagaaagtaggagacgaggccggggacagtggctcccagcactttgggaggctgaggcaggtggatcactggaggtcagaagttcgagaccagcccgggtaacgtggcgaaacccaatctctactaaaaatataaaaattagtggccaggcatgctggctcacgcctgtaatcccagcacgttgcgaggccgaggcgagaagatcacatgaggccagaagttcgagagcagcctggccaacatggcaaaccctgtctctactaaaaatacaaaaaatagtcccagccacttggggaggctgaggcaggagaatcatttgaacccaggaagtggaggtt

SEQ ID NO: 214688 - DNA, 598 bp, Homo Sapiens
  misc_feature (342)..(342): n is a, c, g, or t
  misc_feature (578)..(578): n is a, c, g, or t
  misc_feature (593)..(593): n is a, c, g, or t
gactctgataagcctccctctttgctgccactccccctaccttgtgatccttcatccctctgtacatctagcctttctctacatttctccggttgcttttctcctcctgctttcttatctttttttttttttcacttctgccatctcttggcatatccctcaccaatcctctattttgccatctgttatgggcctttcttattcttcttttctctgcctcaggttttctactgctctctgtctcctgattcctttggcccacacaatcgcaacacggtttggagtaagacgcctgcatcccggaggagcgcattttccacgccctggagctccgcaggcaanaagaccccgtgccgcaggacaggcccctgggacctccccagtgcaggttcaatgaaagcggtgactgcggaggggagacctggggagcagcaggccccggcatgaggaggaaggtgcggggcggcgcgacggcgccttaggaccaggatggggtctgcaggatcccaggacctggcagaggactcggcctcccccgggactggggcttgcggcgcggcgctcccggggctgagganggggaggctggaagncgccc

SEQ ID NO: 214689 - DNA, 628 bp, Homo Sapiens; identical to SEQ ID NO: 45111

SEQ ID NO: 214690 - DNA, 668 bp, Homo Sapiens; identical to SEQ ID NO: 48380
  misc_feature (614)..(614): n is a, c, g, or t
  misc_feature (661)..(661): n is a, c, g, or t

SEQ ID NO: 214691 - DNA, 666 bp, Homo Sapiens
tgcccacatttcctcatattctgcagaccagataatgagtttattgattttaataataaaactatttttttatttgtaacatattcttatgaaaaaatcatgcacccatatcttttctttcatcttaagcattttttttttcttagaaaccctttatctggtacttgaaaataaatgtgaaatattgcactggtggacacctgaatgttactaacctgcatagagcatagttccttagtccagtgcatcattgtctgcaatgaattcttttgaagttgtgaaaatgggtgctgaatgggaaacatccaaaaagtctgccccccccttttttttttaacactcagacatcttcacctgcttgaacagtgaactttgaattagtttctccccaagttttcttcagtaaaactagtttttattagattgaacattgaaattaactagcctttattttccccttttattttaatcatgtatattttaaaatattgctaaattagaataatttcaaatagtcttgacattttaaaacatttttctgaaaaactagacatctcaattcacagcatatgctgtttatagcaagagataagtaaatcatgacattgcattctttaaatttcagactttcaattaaatcagtatttttaaagagacaattggggt

SEQ ID NO: 214692 - DNA, 653 bp, Homo Sapiens; identical to SEQ ID NO: 52985
  misc_feature (599)..(599): n is a, c, g, or t
  misc_feature (652)..(652): n is a, c, g, or t

SEQ ID NO: 214693 - DNA, 575 bp, Homo Sapiens; identical to SEQ ID NO: 42996
  misc_feature (278)..(278): n is a, c, g, or t

SEQ ID NO: 214694 - DNA, 660 bp, Homo Sapiens; identical to SEQ ID NO: 46554
  misc_feature (614)..(614): n is a, c, g, or t

SEQ ID NO: 214695 - DNA, 601 bp, Homo Sapiens
aacaaaggttatgtgtgacagcctggctgcaatcatcatatttaatggtgaagtgtgttcacactaagatcaggaacaagcattaatgttgattcttatcactcttatttagcattatcctagaataactagctaacctgttaaggtattaaaaaggaataaaaggcataaacgttgaaacagaaaaaaaaattttttattcacagaagatgtgagtatgtacatggaagaatagttaaacaactagatactagtaacacacagtttaggaacttcagaaaataaggtcagtatttttaaaaagcacttgtatttctgtaacctagcagcaaacagttaaaaaatgaaatacatatttatactaccatcaaaaacaacatatttaaacttctaagagtaaatgtaggggaatatctttgtgactttggaataggtaaagatagcacagatgggacatgaaaggtaaactatttatgtaagtatatagaaagaaataacaaaaatgttttaaatcacctttcaactgccgtcagaggaagaaatttcactgtttttcttctccaactacatgtaaaccaaaaagtatcagagtcaagtacca

SEQ ID NO: 214696 - DNA, 662 bp, Homo Sapiens
ggtttagacacagctgccgagcatgaatgaacaaaatagggatcatgagatggacagaacagacactgtggcaataagataccaaattgtaaacaggacctaaggccatgccaagcaagggttaagtcatgtagagcccgccttcatgccccgcctcccctgcccccaacttatgaataaactatgttctaactgcacaaggttttttgtttttggtttttttttccctgtagcagctaaaaagcttaaaaacaaaacaaaacaaaaaccactttttattttgtttgttttgagacggagtcttactctgtcgcccaggctggagtgcagtggcgtgatcttggctcacttcaacctctgcctcctgggttcaagtgattctcctgcctcagcctcctgagtaactgggattacaggtgtccgccaccacacccggctaatttttgtatttttagtagagatggggtttcaccatattggccaggctggtcttgaactcctgacctcaggtgatctgcccgcctcagcctcccaaagtgttgggattacaggcgtgagccaccgcacccggtccaagcactggctttgagataagcaatattaaaaacattttcagcttcatcagatgctgactaactgacctccaaccactgttccaccag

SEQ ID NO: 214697 - DNA, 481 bp, Homo Sapiens
gagaattgttaagagagagagctcatatgaaattggttatcgtgggatatttaaaataaaacaaagaacagtttactttcaggcaaaaagatgccagtaatcaatattgaggacctgacagaaaaggacaaattgaagatggaagttgaccagctcaagaaagaagtgacactggaaagaatgctagtttccaaatgttgtgaagaagtaagagattacgttgaagaacgatctggcgaggatccactggtaaagggcatcccagaggacaaaaatcccttcaaggagctcaaaggaggctgtgtgatttcataatacaaacaaaaagaaaaaaaattaaacaaattcttggaaatatctcaaatgttaataacaatatgaatttttctcatgcatactattactactaagcatgtacgtgaatttttaaatgtatagatgtaaacttttaataaaaattggggtgtggtaaaaaagaaaa

SEQ ID NO: 214698 - DNA, 685 bp, Homo Sapiens
  misc_feature (628)..(628): n is a, c, g, or t
  misc_feature (653)..(653): n is a, c, g, or t
tttacaaattcttctttattgcagacagttcaggcacaggtacatggaagaagccgtattgcagattttacacaaggtggtttgaggcagcaggcacctacctcttccccacccccacttccccaaatacacatcagcctagagatcattcccactgaaatctcctgagcatgctgtcctctcaaacagcacaccatccagccctgtgcccaatgtcaccaggcaatctgtgggatctgaggaggtccttagcctccacccgtagtgggacaggggaagggtatccttttacatgtcagatttagctgtggtgtccttaccaatcctaaaacccttaacagggcactgacccaaatcttgggtttggttctagcctatggttgctacattgccactaggtttataccatccagaagtctgtgggacaaggggctagatttgtactgggcaaggcctttgtccccaaaatggagaagcagaaactgccctaatagctaagactccccggaattggaagatagcatgaagtctgtatgctgaggaaggaagtggagagaggcctggcaatgtcctgcagcagtctgaggggtgaggactcctaaagcatgagtccctcacagactgcctnctttcacagctcctgacctatactncaacacaactgggcctggctctgtgggcagtg

SEQ ID NO: 214699 - DNA, 635 bp, Homo Sapiens
  misc_feature (566)..(566): n is a, c, g, or t
  misc_feature (578)..(578): n is a, c, g, or t
  misc_feature (598)..(598): n is a, c, g, or t
gaagcacaatcaaagaatgaatttctttcaagagaactaattgaaaaagaaagagatttagaaaggagtaggacagtgatagccaaatttcagaataaattaaaagaattagttgaagaaaataagcaacttgaagaaggtatgaaagaaatattgcaagcaattaaggaaatgcagaaagatcctgatgttaaaggaggagaaacatctctaattatccctagccttgaaagactagttaatgctatagaatcaaagaatgcagaaggaatctttgatgcgagtctgcatttgaaagcccaagttgatcagcttaccggaagaaatgaagaattaagacaggagctcagggaatctcggaaagaggctataaattattcacagcagttggcaaaagctaatttaaagatagaccatcttgaaaaagaaactagtcttttacgacaatcagaaggatcgaatgttgtttttaaaggaattgacttacctgatgggatagcaccatctagtgccagtatcattaattctcagaatgaatatttaatacatttgttacaggaactagnaaataaagaaanaaagttaaagaaatttagangattctcttgaagattacaaccgaaaatttgctgtaa

SEQ ID NO: 214700 - DNA, 733 bp, Homo Sapiens; identical to SEQ ID NO: 45437

SEQ ID NO: 214701 - DNA, 702 bp, Homo Sapiens; identical to SEQ ID NO: 48582
  misc_feature (624)..(624): n is a, c, g, or t
  misc_feature (693)..(693): n is a, c, g, or t

SEQ ID NO: 214702 - DNA, 455 bp, Homo Sapiens; identical to SEQ ID NO: 50918

SEQ ID NO: 214703 - DNA, 555 bp, Homo Sapiens; identical to SEQ ID NO: 50659

SEQ ID NO: 214704 - DNA, 601 bp, Homo Sapiens; identical to SEQ ID NO: 52433

SEQ ID NO: 214705 - DNA, 541 bp, Homo Sapiens
tttttttttttttttttttagtcattgactaaggtcttattgaatgcagctttattgatagtgatgagattacaaaataacactacatacattttagtttgttgttccttatatagtaccagaatgttttaagcaaagaaagaaatttttttgccaaaatttgctgaataaataaaaagtttttaaagaatatccaggacaaataatttatttcaaattccctgagagggcaaattaaatggtctttacccagtgaatgtgctggagggtaaatctttaatattttagattgtttaattcttataattacgaataaaggactgtttggaaaattattctgtaggttttttggcatgaaaagaaatactgaaaagtatttccttttaatgctgccttgtgctggagaacatattcatcagcggctggaatagggatgtagttcattcagagattacataaattcatttggttgtaactaagggaaaaaaattaatgaggtgattttagtttatttcgtctcgtaacttggatgagttctgaa

SEQ ID NO: 214706 - DNA, 601 bp, Homo Sapiens; identical to SEQ ID NO: 40552
  misc_feature (188)..(188): n is a, c, g, or t

SEQ ID NO: 214707 - DNA, 524 bp, Homo Sapiens
ataataacaaagttttatttatattattggcatctcacagtatcacatggcattctttagaccatctgcggactatctcctaccaccctatgagtacacaaatgtttaggcaaaattccaggggatacaaggtacaaacagctctgcctcagtgacctttcagcctagaagcagaacaagatgcattatatcatctttaacattttaaatcacagtcaatccaacaaccaacaaaagccagttgacatctcactaaaactgtgtttgtgtaaaatgaccctgtggaagacactaatgatactttataaactttaatctgaagcaacagaatccccaggggaaagtatgtaaatttttcagtgaaacttaatttcattttatggacaaaagtatatgtcattataatacatgacagtctggccatgttaaaaaaatcacagtatccaagttttattttgtatttcaaatctacaatcacactttcatctaactgaacaatattaaataacctagaaataagtgag

SEQ ID NO: 214708 - DNA, 664 bp, Homo Sapiens; identical to SEQ ID NO: 45982

SEQ ID NO: 214709 - DNA, 600 bp, Homo Sapiens
cttttttttttttttttgaacgtttgcaaaggtttattaactgtcagtgactgatacaacggaatcggatgaggggagtacatgctgaacaggaaacagagtgaggggggcttgaccaggtcgcatggcaatggagaaaagcagatgggagatgcttatactggtacttggtgtgtgtgtgtgcgtgtgtggtgtgtgtgtaaatgcagaggaaaaaatcggaaattaaacactcagacctcccctcagtagtcacatctggggagagaggagggtagtgctgttctatggagagaatacctgacaatacttgttttctgaggtaggtgcatggatacacaagccgaaatatgcattaagcatgtcttgctcatcaacgaaaacgctaatgtctaacagaatggcacactgcaagaaaatacagcggaaacgccaacatcgaactcttggcacactaagaaaaatgacgctcaacttttcactgttgtgaacacttgctttcacttgctatgcacctgatgacgaggggtccgcagccatgcccatgttcgtgaaaggtcaccacgttctgcttctcatcatgggcatgtgtcatatccc

SEQ ID NO: 214710 - DNA, 606 bp, Homo Sapiens
cttttttttttttttttagattacattgacattttaatcagtaaggcagatgccctccaagatgtgggcgggccttgtctaatcagttgaaggcctccactattccacccacagtaaccaccctcccacacaggcagggcctccctcctcatgtggcagacagaagtcaggacactgggggctggaaaccaacttataaaactgaaagggccaggacagaactgatagcaccctcccagggaggtcaggagcaggaggtggtggccacagaagttcaccagcagcccaaggagccctttccccaaatgtccatgggatctgcgtgcttggcagccaagaggggctgtggcccttcacgctggacttgggatgcctggaccctctggcccttctcacacgggaaggagaggtttctccctgaatggagggcagggaggggccgggagggggcgtgggatcccacctctgctgagccttcacagagggggtccttgacctttgctctcaggaaggagcccgtgccagctgatactggagtaggagtgggtgaagaccctccgggctcccgagctctagaggaaggtggtcctgacatggtttgggagc

SEQ ID NO: 214711 - DNA, 625 bp, Homo Sapiens
ctttttttttttttttctcagcttgaaaagaggctggaaatgggatgcaggttaggttcaaagcttaaactttgtaacaactggacacaaggttcctcagaattgtcaaaagtctcttgtgacacatcctacaaccttttctcaataaacaacaatatatgaaataattaccaaaacatctcctaattcatataatttacatgatataagcttgcttgatagcagctggtgttcagtcgtgaaaaaacacacaaagtaaaatggttgctgactacaatgtacagctattgctgggtgtgatggaatgtacaaacggaggtcgatgtagacgagttttttccaccagagatattgcctttccatgcagcacttgtgctctcagctttaacttggcttttggttcttcctttatcttcagtatctgttctgatgctcataatgccaccgattaaaatctatattaaaagctacaatgctaccagaagccatgccagtgatcagagtcctctggtcatgggacaagtccattgctctaatgccagcatcacatccagggtaaatgtacagttgcttgaagtcacaggcctgccagacctctactaccccattgtcccctccggtgacc

SEQ ID NO: 214712 - DNA, 637 bp, Homo Sapiens
ctttttttttttttttatctggaagccagtattttatttctcttggctgcagagggccgctcttgcctaggcgtccacaggcgcgacgatggggctcgcggaggagtccgcagcagggcaccccacacccgggggaccggcctcggcgagaagggcacacagtggaagaccccaccaagcccggcgccacccagcagcgtggggactgcctgtccgccgtccatcccaccctccccgtcccacgacctcctcctgggctaatggcagcaacaggcagcaccccgccgaattgtccgtgcaactacccgcaaaccctcctccgggcctgaaccagggctgcattcgggccgcctctgcgcctcggtgggtcccaaccctcacggtgccacaggccacgctgcctggagggtcccagggtcaccgacgatgcaggggtgaaggtgaaggccagcgtagaggctgtgtagagaagcagccccgtcccacacccacccctgcctgcgaacttacgggcctggctccagctcctcccactccgcctccagcctggtggcgctgggcaaggacaggcacccgggcgatgggaggcgcagcgtccacaggaagcgcccccaccgcaggccgagctccggctgtc

SEQ ID NO: 214713 - DNA, 632 bp, Homo Sapiens; identical to SEQ ID NO: 44480

SEQ ID NO: 214714 - DNA, 595 bp, Homo Sapiens
ctttttttttttttttggtacaaaaccttgtattaatcatttcccttcactttcaatataacgttgatatgaaatatagccatgattcttagttacatgggaggaaatgaataataaatacattgtagcaagtttaaaccacaagggtgtttcactggtaacaacatttgaaaactgtacacttgcaaagaacagcatcttcaaacattagtatatctgtatatcagtaaagcttttacatgtaacaaacatgctctttccatatatgacaaatttaaaaaatatgcattgcttggcaacatgaactaggcaaaaatatttctttgttcactaactttatacaggaaaacaggacgaaaggcatgcatgtacaatacagatgcctgcacagggcatgcaacaaaagaaagctttttaaaagtcagcttacattaggcataaatacatgaggattatatattaataagggaggaagttttctgttcgacattattaacattcctgttttcttcctattcctcccagaggaatacacattcacctttaagtaaagataaaggaattacaaaaaaataaaactcactttgcaaacatc

SEQ ID NO: 214715 - DNA, 581 bp, Homo Sapiens
ctttttttttttttttgtttgaaaattaaagtttattaggatatattaatgtatgatattatagtattactcatcacatgtaagctttacatctgaagcaattcatgcttactgggagggaagtttgagtacttacttagcttttcctgctattcctaggtaaaggccctcctgtggtcattctgaacagaagagtgagcttactgcaaaccacaggctggacagtagagggtgcatatcctcactgagtggagctcagaaaagaattaggattctgcacacatttattccagactcagttcccactgttggtttttatattgagattattttaaaatcttttcgaaatataatttatttgctctttaagtatgggtggggtgttaagctaaatttaaattgttctgtgaggcacaggcattatacttaagcatgaacctaatgaagccctgaacataccaacaggtagcagtccagttaagctctttataaggccacatgcctaagctccaaagggaatcttaattttttattggggagacatttcgttactacatttagtggactttgttagattataa

SEQ ID NO: 214716 - DNA, 570 bp, Homo Sapiens
cgcaggcgccgagaggcgcacgggagacctcaggcccagactccactccccagctgtgaaaggactgctggccagacccccaagctagcccgccaggcctccatagagctgcccagcatgactgcgtccagtaccaagagttggtgggagacgggtgaggtacaggctcagtctgcggccaagactccgtcctgcaagatggactctgtgactacatgactaataaaatatggcagaaatgacaccatgcagtttccaagcccaggccttaggagacaggcagcttccagttcagtcttttggagggtcagctctggggccctcagccatcacgcatggagtccaaccaccctgagacgtcatgctggagacccacctgtggatgccccagtcaagagtcctggctgagcccagcctcccagccacccccacccaaggcatcagaccacgaagcttctggccaaggcttcaccaacttcacttgatgctgtgaggaacagaactgcccatccaagccctgccagaatttctaacccacaaagccatgagtcacaataaacgccatgggac

SEQ ID NO: 214717 - DNA, 626 bp, Homo Sapiens
ctttttttttttttttaaaaattgcagtgggtactttattaagaatttattttaccatctagccattcaaaacatctttacatcaacaaacacagcagtttgactattgaaatcataagcgatttatcttgaaaaggttatatttgtaggtggatgcaagtatattggagaaatatttctatcaaaatcactggttttgttaggagtattttgatttttctatttttacgctgggaaaaaaattaaaacaagtatgtcagtgttcattttatgggatagttggcttcactgtgtttgtcatgtttgtccgaattacagctgtttatcttgcaactttaagattaattaaatgcaaatgtaactctgtgaatcatgggaatacctgccagacctcttattaataccttcacttaaaaccccctgtgcctgagagtcattaatttgctaaaagaaaagtgctaaagcagccctttgcccacaaacaattctgcgatggctgcccaattaatcccaaagcattctgatcctcctttcaggcctcgtggccctttgaggacacaagaaggctccgatgataacctggcaacctaggtagaaacccagccaagtgtgagcgtttgaagctg

SEQ ID NO: 214718 - DNA, 621 bp, Homo Sapiens
ctttttttttttttttctgggattacaattttatttctgttataagttttaaaagcaatcaatcatccatcagagataggcacaccaaaatgcactcagtaatggtataaccaagatgcagcagcagaaaacaaatacattaagcatgaagccgaaaggttcagtttctttacctctccatttcttagttcaatttccttgcttaaaaggtttaaggtaaggtgacggccttcatccagggaattccacttctgttgcatggccaaagcattggcctctctctgaagaagtaatgagttgctcttggcctgctgaagttcaaggctcaaaaggtccccagtactggaatgctttctatgaccagataaatcagtaacaatgaatctgtccctttcaacatagtgtgctgatgatgtggcctcgttgccatatgaactccaccttgaatcaacagcattgacataagggacataatctgatacactgatgggcttagtcgcacttccttgggaagcagtggcctggacaggatctgtggtatggtaacctgtacgggaagatctggaaatcgcaccccattttgagatgatgggtccatcactaaagggaattattggatct

SEQ ID NO: 214719 - DNA, 523 bp, Homo Sapiens
ggctgtctgatctatgaaatgattcagggacattctccattcaaaaaatacaaagagaaagtcaaatgggaggaggtcgatcaaagaatcaagaatgataccgaggagtattctgagaagttttcagaggatgccaaatctatctgcaggatgttactcaccaagaatccaagcaagcggctgggctgcaggggcgagggagcggctggggtgaagcagcaccccgtgttcaaggacatcaacttcaggaggctggaggcaaacatgctggagccccctttctgtcctgatcctcatgccgtttactgtaaggacgtcctggatatcgagcagttctcggcggtgaaagggatctacctggacaccgcagatgaagacttctatgctcggtttgctaccgggtgtgtctccatcccctggcagaatgagggctgcctgaccatggtccccagtgagaaggaagtggaacccaagcaatgctgagcaccccggtgcggaccacagagcagaccctggcgccagg

SEQ ID NO: 214720 - DNA, 640 bp, Homo Sapiens; identical to SEQ ID NO: 45733

SEQ ID NO: 214721 - DNA, 546 bp, Homo Sapiens
cttttttttttttttttttaccacacatcttctttattaatgcattgacaatcagtgaagacaatgaaaacccaccacttttgtccgtgaactgagaaagaaaatggcaatgtcatatggcattaatgatgcatgagatctatgggtgtagtgtcacgtctaggcgtgtagtaatccagtcttcggccttactccagggagaaagattcagctttgttactttccagtcactctctcccgtaacacagcaccaagaccgtttaaagcacttaattaattcacttcagcttcgctggagaggtctcagggttcccgagactccattacataatatctttcacaaagtctattcccagctcgaatggaagatggattctcatccagtgtgcggaggttccatgcctttgcttccctttcccggagttcgatccggcgataccctcccgaggctgcagccatcgccccggccccgagcttctggggtacccgccactcttcgaactccaatctggccccgaaggtgcagccgcctcgccctcctggctc

SEQ ID NO: 214722 - DNA, 630 bp, Homo Sapiens
ctttttttttttttttgataagaaaatggagaatactgtatttgctttagaaagtttttacatatagataaacacgcagtttaagataacagtaaaagcgccctacagggagtgagagatacctctgaagctgctaagaaatactggaaatagcttttgcataagaatactacaatctcactctccgcttttgctagcgacagggtccctcttcctaacccaggccaccatgcctctccttgactgccaagtcgacaccaggagcaccgagtgggaggagaaccccaaaaagaaaagagacagttgagcggggagaaagacagagagagggagaggagagaaagagaaagggagaggagaaaaagcaatatcatatacaggcaatttctacacatatattacaaactgggaaaatgaccgatcattaagatatacataattcatataaaattttgaaataaaaataaaaatctgttacagtcataactattctttttccacatttataaccagtacccacacaggcagtgacagagtggagagaaaaaggtgcttacgaagaaaatgattgtctgctgaacaaaaaacagaagattgcatttttttgaccaatacttgacttaaaaacag

SEQ ID NO: 214723 - DNA, 528 bp, Homo Sapiens
ctttttttttttttttaaggcttattctactaacatctcactgattcacataatacaaaattcaacaggtaacaacgcttccttacatttttatacaaaactctttaaacattattttagttaggtgaaaaaggtgttctaaaattaagtagattatcatcttgttacccccgccatggagacgtttttagtagtcaaggttatcatctttgcagaccacctgacaggcagtgtcgttcttggggacgaactgcaccccttcccacagcatggggaagtgggatcatgctattctcttccctccaccccacaagatcacacatgggccagcctaccccccatcacaaggcccccacccatccaaacacctgtcattctaagaacctcatgctggaacagtctgaccattaatagggccacgaaacagtcagtaagggaccctctgcactgggcttcctggtgtcatttcccaaccagctgaattaacgcatgctgatgtattagagttaagtgctggaccgctgcaca

SEQ ID NO: 214724 - DNA, 544 bp, Homo Sapiens
ctttttttttttttttgtaaacagtctcacccaagctaaggtcaagaaagctgaaacccggtgtttctccccaagttaaaaaccagcaaggagcaccgcagctagccagccttggacagcagaggctgggcccaccatcgagctgagctgcttccccgcaggctgcagctccatcttcaggcagaagccctggccctcgtggcctggccccccaggaggccacttctttgccctgagcctgtgatagcctctgaggccgggggctgccgctctggctgccccctctccggccaaacttctgaggccgttgcaaagaaacataaaacgactaaaacgctactgagtctgcaacccagggcactgggcccgttctgctcaaacccggggcccctgagcgaccgcggggcctctccccagccgggggtggatgctgcatgtcggccaaggttggctcagatctctgactcccgtctgtagggccgctgctccaggaccccgccgccagcctggagtctgtcaaagtcatgcctggcctgggggctga

SEQ ID NO: 214725 - DNA, 555 bp, Homo Sapiens
ctttttttttttttttaacataaaatagaaactaactttatttctttggaagaagcaggtactgaatgccggagcaacaactttgccaacaggctggtgggaaaacatggaaccgcgtgggggaattgggtggaagaggaagcactgatgtccctccagggcggctgccccttggtctccttccagccctggggccttgggccctggtccccgccagagaatggtctggcaccctttctccgcttcctgagccacctcaggctatttccaggcacaagatcctgaggccagccaagtcccattcaagtccatggtaaggccacaagtcacattctgcccgacaccccagctgctgccaggggccccctggaagaaggcccagtcctaggaggtcccaccgggtgccggtccgcctctccctgtggccaacacatcccgcctgcccaggtccagcctggtttcctcccagtctgtcacccagggcagggcctgggggtactactccacccacaggccccgcccaggaccagggccagaggcaggtcatacccagag

SEQ ID NO: 214726 - DNA, 346 bp, Homo Sapiens
aaaaaaaaaaaaaaaaatcagatgacagaggggagcggggacaagttttaagtctaagcctcctgggtggggagttctgctgtttcaacatatgctccagtcatggcagactttggccagacagcgccctttttcagagtgaactgagtgtagcacaaattatctgccagtgctagttagcaaacagaatggagccaaaaaagaattgatttgggaaggcccaaggaatttgaaaccgttgagatgaacactttccgtttttgctacactgatttatgttgtgctgggaattgtacaagcctttgaccagaccttagggttgttctttaaaaaaaaaaaaaaaaag

SEQ ID NO: 214727 - DNA, 674 bp, Homo Sapiens
  misc_feature (570)..(570): n is a, c, g, or t
cttttttttttttttttagtagagatgggggtttctccatgttggtcaggctggtcttgaactcccgacctcaggtgaaccacccgccgcggacttccaaagtgccgagattacaggtgtgagccgctgcactcggcctgattatattattttaaaggaaagcccaactaatcattagctcaaaaaagatcatggttttgcaatttcattactgattctttaattagtttggttatgtaaccaaataccctgcatttttggagagtgtgataccacacataataaaatttacagagagaatgccaatggcagcaggaaaggcagcatgttcataatcacagctccatgtacactatcatcatgaagggtagttacttgctgctataggtgggattataggtctcatcccatagaagtactggctaagcctgaattccccattatgacaagaaaatgatgggacatatgcaaatatatgcgccatattcaaacacaccttcatttagtgtggctacaaatagctcgaataaaggtaacacatcttacttcagtccattaaatgataagctntactaataaaagtatagagagaactcgaattcatataatttgctaatcattattcccccataatagtaattagtgaagagaatacagataatcattaatctttt

SEQ ID NO: 214728 - DNA, 554 bp, Homo Sapiens
ggccgcccttttttttttttttttttcaaattcttcaactttattaaaacattatgagatttttgcacaaaccattgttttttgttttagctcatcagctatggttactgtattttatgtgtggcccaagacaattcttccaacatggcccagggaagccaaaggattggatacccctgaactataccctagggtggggagtggctaagacccctaggccagggtctttcccccagctgaggccatagtgcttccccatggccaagacagtgaggtatttaagaatggaattactggcttagaagccaaagttgactgtaatatctccaactctggctcctgttttgaaaaccagaattctttggaagttaatggaaaactcaaaatagcagattctgcctttggggtgtttgcagagggctttgaagtggtctcaaattactgacaagtgaagatcaggtagagttaacaaagcaaccaatgtagaagcaggtctcaagggcaattcacatttatttcctgagcatgctgactaaacatacttcaaacacagc

SEQ ID NO: 214729 - DNA, 684 bp, Homo Sapiens
ctttttttttttttttggaaagatattttttaattacatactctttaaatctcttaatacacattaaattagaaggttcatagaaaacattactataaaaataaggcactacatggcagaattttaaaaccctgcttcataattacagcatcattaaggtactgcagaaaaatcattgttatttttactcattttatgtgagaagtcaaatcttaaaccatgtggtaatatttataaaaacaggtactttggcatctttgaatatctccctgtcggatattaagtttacaatattttcacaggccttgcgtggtaggaattcttggtctaggaagtcttaagttaactttaagagaaacttgtgaaaacttggattggtgtttccatgagtatgttgttatcaaatcagggaatccgtgaggagagttgcctccttgacccacaaggatatcccaaggtttctgctgctcttccaagaaatgtaagtgtaccagtattcgtttcctgacttctgctaaacaaaaaagattatgatggggccagcagcaactcatagccttccaagaaatcataaatctcttctggtcctcctcttacctaggccaacccaacctatctcaacaacagcatccatcaggagagcaggctctatctttcccatatgtctacatctacaagaccttg

SEQ ID NO: 214730 - DNA, 681 bp, Homo Sapiens
cttttttttttttttttgcatgaactttaggaaatcattttggtcggttttatacaatgtgtaagttaatgtctggaaagatgttttgaacaggatgcaggaattagaaggcacagaaatgataatataaaaatttagatcatatatgaattttttctaaatgttcaagctaattgctttcattagtcatcctgaactgctgcaggtttcatttcccaccaggacagctgtgccttttaaagtaaaaatagtcatttgtattaactataaggaaaaagtggcttcagctggaagaacttaccaaccgaaacactcttgagcttatagaaataactttggtaagtggcctctcttaaaaaggctgctgaaagctctaaaatataaggataaaacatacggtttcagactgtacactttgctgctacaaactacatcttgatgggattaagaggctacattgattcttgggtttattgcaccaacaatccatctctgacctacccatggctgcatctgaaacaaggtaaactccaagaagaaatgaaaacagtgggtccctaaagcactcttcccaacaagcaattcttacatgttttatgtcaaacagtcactgctaaagccactggagctgaagatggcacaatgtggctttctttgctttaccttgtctaaaaagcaaac

SEQ ID NO: 214731 - DNA, 696 bp, Homo Sapiens
gatcgcgggccgcggagtggcctaccggggaccctcccccagagggaccggcccggggcggggagatgaacggcttcagcacggaggaggacagccgcgaagggccccccgccgccccagctgccgccgccccgggctacggccagagctgctgcctcatcgaggacggcgagcgctgcgtccggcccgcgggcaacgcctccttcagcaagagggtccagaagagcatctcgcagaagaaactcaagctggacatcgacaagagcgtaaggcacctatatatctgtgattttcacaaaaatttcatccagagtgtccgaaataaaaggaagaggaagacaagtgacgatggcggagattctcccgagcacgacactgacattcctgaggttgatctgttccagctgcaggtgaacaccctacgacgttataaacgacactacaagttgcagaccagaccaggcttcaataaggcccagttagcagaaactgtgagtcgacacttcaggaacatacctgtgaatgaaaaagagacccttgcctacttcatctacatggtgaagagtaacaagagtagactggaccagaaatcggagggtggcaagcagcttgagtgaggatgaagcacatcttaaaggaatgaagtgtaatgcttgatgcacaggtgatatctactacatttaagcccataaagac

SEQ ID NO: 214732 - DNA, 562 bp, Homo Sapiens; identical to SEQ ID NO: 44109

SEQ ID NO: 214733 - DNA, 652 bp, Homo Sapiens
tttttttttttttttcatcaattcattctttattcaacatacacttgttgatgcccggctctgtgcccgacaagatggtagctgtggagactgatctgaaaaagcatccttcgtgacaggtggaagttggatgggaacaacccacccagccaattaggttcctcagttgcatgacaccaaggagctgctgtctgggaaatgcacttattaggagagggacaaactgtgactgagccacaggctcacctcagccagtcaaaaggacttgggcactgcctcattcaagccaccttggagcagacgtggctacgctcccagcagccctgtacccatcggccactgaagatctcagctctcgtcagccttgcaaagcttgctgcatctgagtcttgggctcccggtccactgcttaaaaagttactatcacacaaagtcgaaagtagacagttcctcttgacctggaattgtccaagtcagcaccacagctggttaaggcagcccctctctctttcctcttcttattttcttggctttaagtctgcttaggactcctggaaaatcaggttaagggagatcagttgtgttcatcattttaatacaatgtttattgatccacagatgtgtgccgattgctgggataaagagataacta

SEQ ID NO: 214734 - DNA, 648 bp, Homo Sapiens
ggccgccctttttttttttttttgagcgtaccgggttttctccatgctgtttcttactctcctcttttgcacccctcccatttccctcgtttttctttgaaaatttctcccccctccagttcgctgtccggccctcacatgtgtgagaggggcagtgtgccgttaatggccgtgccgggcaccgggccgctctggtagtgctgggacatgtgaagtctgctgggggcggcgggttccggcacctcggcgccggggagatacatgctgatcatgtcccggaggtccccggcctggcagggcgccctggagtgggaggaagaggtaaccacaggggggctggagctggcctcggacttgaccaccgaacccatggagccaagagccatgccaggggtgccctgctgcgagtaggacatgctgtaggtgggcgagccgttcatgtaggtctgcgagctggtcatggagttgtactgcagggcgctcacgtcgtagcggtgcatgggctgcatctgcgctgcgccgtgcgcattgaggcccgggtgctgcgggtagcccagctggtcctgcatcatgctgtagctgccgttgctccagccgttcatgtgcgcgtaactgtccatgcgctggttcacgcccgcgcccaggccg

SEQ ID NO: 214735 - DNA, 610 bp, Homo Sapiens; identical to SEQ ID NO: 52558

SEQ ID NO: 214736 - DNA, 543 bp, Homo Sapiens; identical to SEQ ID NO: 45662

SEQ ID NO: 214737 - DNA, 603 bp, Homo Sapiens; identical to SEQ ID NO: 49902

SEQ ID NO: 214738 - DNA, 579 bp, Homo Sapiens
aagatttgtggcccctttactaccatccctgtggctccatgatctgcagattaggagcagctatctggccactaagccccctggaagggagttaccagttgattacagatgatggtggctatagcgtaatcagacagtgtgcaggctcaatgctttcacactgaaatagtagctgctgacactgcagaatgtgttctcagtcttcaagaattgtcacctctactggtattcctatagaaagggcttataccccatggaacatttttgtggctaggaagcattactttgttaggacattcatagacttatttactattctcatcaacaccaggacttcgcctcctttttaagtcgatttttcacctgtttttatcacagaagagctcttgtgagctggatgatagagagagctcagccttgctgagaggcagatgcaggtagttaccagctgcagtaataaactgcagccaggattcagcttcagccaagatagcacttctggtcttagagccacacaagtgatcagaatcacaaatgtgaaatccatgactgcccaaggcctgtcctcttctcctgctg

SEQ ID NO: 214739 - DNA, 622 bp, Homo Sapiens
gcccttttttttttttttttgaatttcattaactttattgaaaggtatatcccttagtactaaaacataatggtagttggttagtttacctctgccaactcaaaattaacaatgatgtattcaaaatattgaaatttatcagccttttgggaaaactaaaaagttacccataaaacatggtttacaaaagttaagaataagatatactgtggttctttggtttttcattgtgtactgatccataacgtgatgtcaaattggatatagccatcatggatagactcaggctatacattgcactgagtaactgtttacaacactttaacactgtacttcttacattcactaactgccatggaggatcctaaacactacttcagcagcttcattcatagttatgaaggtgtctacttgcttttcttaagatttttgttttggcacagtaagggcatcagtggaagtatattctctatttataaaattgccatcacttctaacttaaaaacagtctgtagtaaaaaattctggagtgttcaatctagtctgaacttaccttagtgtgggaaagcaagttttcgaagtgataatttattttgagttactaatacaatagaaactagtt

SEQ ID NO: 214740 - DNA, 565 bp, Homo Sapiens
ggcagcggcagctcctggacaccatcgcagcctgcgaggagatgttacggcagctgggccgccggcgcccggagccggctggtggcgggaacgtctcagccaaacctggagcgcccccccagccggctgtctccgccagaggcggctttccaaaggatgctggcgatggagctgcggagccctgaccatccccgagcagaataccctgacttctctccctccccagggccggtggctggactctgaacaactcccttcagtaaaggggccagtcttcactggcagtggctggtacttggctctcagcctggagtggcagctctgctagcagctgggttcactcccacttcatcctggctgaaagcagtgctgtgctttgaaatgcagccaatgaatacccagtctgattacccagatttgggcagaccagcagtgctcgccagagtggtctggcctgctatgggggatccaggtggtgttacatgtccatttcatgttttgggggcttttagccccacaaaacaccttcagtagagccttgattaaaaggaaacctgcagactct

SEQ ID NO: 214741 - DNA, 632 bp, Homo Sapiens
cttttttttttttttttcaagatattttttcttttatttaaaatgttagctatcacaacacatcatacaatgaaatgaagacattagaatcacattgaaacttttaaaaacatctctatatagtcacaaaacatgaaacatgcttcagagatacaaatacagtgtaataccaaaatctcagtacattttcaccatgaaaacaaataggaaaagcacaagactgtcaggagtttccttccttttccgcagtagctgacacaactgcttcaaagcaatgattttttttctttagggactgtatcattgacaggttttacaatttcatttaacactgtgctttgttgagaaataaccacttatttctattttaagggagtcatcatattggaattaaaacacatgtttacaatacatattggcacaatatgaaaaataaacactttttgaattttcaaccccaaacaattgttattaaataaataattattcctcatagtgcatgtcttaatttacctgtcattgcccattgacacaaatgaagctgaataaataatgttaggtagtttattaacgtcttctttcataattctgcattgcactcctttcataagccacagaatttaaagctcttt

SEQ ID NO: 214742 - DNA, 635 bp, Homo Sapiens
ctttttttttttttttcattttaaatgattttaattttctgaatattatgttccaactcaagatattgcacaatgctttaatattacacttgttatttttctcacactagtgagattttgataaacatagttgactttggaagtaacagagaatgttttcattggttaaataatttcaatgacctgtgaggaactgaaagcaagctattacattcatataaaagataagtacatatccataaattcacttggattcaatgaaaaataataaacttctcgtgtacttaataaaacttaaaaggaaacaaaattttaaatggtgcaaaaatagaatgtatttcttaaagttttgaaaacacttagacctaaaagaattctaagaatatctggccacattataagcctcttatttgtaaaagctaacacttgataattttaaaacaaaatctagattaaataaatatagttctgcattattaaagtaacaaaatctgtgatggtaaggtaaaatttccctaaataatataaacaaaaaacaacaccggaaagcaaatgtatcacgttatggcatcgataaacatttctgttcaaatgtgtggatctacagcattttctctaggtaacacacacagttg

SEQ ID NO: 214743 - DNA, 619 bp, Homo Sapiens; identical to SEQ ID NO: 44552

SEQ ID NO: 214744 - DNA, 527 bp, Homo Sapiens; identical to SEQ ID NO: 49274

SEQ ID NO: 214745 - DNA, 571 bp, Homo Sapiens; identical to SEQ ID NO: 48696

SEQ ID NO: 214746 - DNA, 534 bp, Homo Sapiens
cttctgctgttgcaaagtgcaaaactgtgagtggaattgttttattctgacttaatgtgttagaaattagagaatacagtgggaggatttttagacattgctgctgctgttacccaaggtattttagataaaaaatttttaataaacatccctttggtatttaaagtggaacatttagcctgttcattttaatctaaagcaaaaagtaatttgggtcaaaatattggtatatttgtaaagcgccttaatatatccctttgtggaaggcactacacagtttacttttatattgtattgtgtatataagtattttgtattaaaattgaatcagtggcaacattaaagttttataaaatcatgctttgttagaaaaagaattacagctttgcaatataactaattgtttcgcataattctgaatgtaatagatatgaataatcagcctgtgtttttaatgaacttatttgtattttcccaatcattttctctagtgtaatgtttgctgggataataaaaaaaattcaaatctttcaa

SEQ ID NO: 214747 - DNA, 633 bp, Homo Sapiens; identical to SEQ ID NO: 48329

SEQ ID NO: 214748 - DNA, 597 bp, Homo Sapiens; identical to SEQ ID NO: 49576

SEQ ID NO: 214749 - DNA, 637 bp, Homo Sapiens; identical to SEQ ID NO: 52488

SEQ ID NO: 214750 - DNA, 562 bp, Homo Sapiens
ggatcatccacagattttttctttacaatcttgttctccttgtccatggaccatcaatagttgacttgccaggtttaattctttcattgcttgagaagaaaggaatcaaaggactgtgtgtagtaagctgacggtaaagttaagattaaattaagacagagagagaatacatatcactgccaggcctgataggaaaaatctgctcttccttttaataacagtgatgaattgtcaggaccttatttaggaaaccctgacctacccataactccctgctaggctaagtagaaaccaggttatttctccctgcttatggctccccgcaaagggacttgcagcgtgtcctgcaactttgtcttcagatagtgcttcctacaaaactaggtcttgttttgtaatcttttctcgtgttgaatcagatctgcttacttatttaggtttggttatgagcttgtatctcactgtatttctcatgctttgttcttttaaacaaatcctttaaactgtgtcattttgtatacacatgtgaggtttgaaaaaaaaaaaaaaaaaaaaaaaaaag

SEQ ID NO: 214751 - DNA, 591 bp, Homo Sapiens; identical to SEQ ID NO: 48285

SEQ ID NO: 214752 - DNA, 625 bp, Homo Sapiens; identical to SEQ ID NO: 52881

SEQ ID NO: 214753 - DNA, 577 bp, Homo Sapiens
ctttttttttttttttaaatagagatgaggtttcactatgttgcccaggctgatctcgaactcctaggctcaagcaatcctcccaatatgctgggattacaggcatgagccaccacctggcccaagcaagaaattgacactatatagttatttaaggtagtcaggcagtagaaacattgccagaaggatagaaaggaatttggattatatataaggaaaataacaaatcggtgtttttaagactatcactgtcatatattagatccttgtattagtccatccattaatattagttctattcgtggtgctaggtagcttgacaggtatgatatgcataagtcatagctctattcttagtgtcataaagtgtagctaatttataagctctaagtaatcagctttatctaatttgagggcattaaaattactgcctagaactttgagaagagaaaaattcagggataagttgaaaggcactggaactgttcatgtccataccagaccggtaaattataagatccagatgttagtgtctagaattagctgtttagaattcagaggggacatatgttttaac

SEQ ID NO: 214754 - DNA, 594 bp, Homo Sapiens
gccagtgtaacaggaagtcttgactaatggttcccggtttagctgaagattcaaaaaaaaaaaaaaaagctttatgctaactggagttaaatacctagaagaatttcaacattgttttaaatgttgtgcatctgtaacttcaggaggatcacttgagctttaaaacctgtgccttctcgaaacaagaatttgtgcctgaggtgaaaaaagtttgtaagttattgaattatggtgttcattagaacagctactagctgattcccctattttaacaaactgacaagagcacatccataaaatgaaaacctgttacaactatgtacagaagggtttgacgttttattgggcttttgtcttttaaagaatatgtctactatgggtatttttttttaaatgttaaaatgggctaggtaaaagggggctgcttttctgttaagcatcgataggtaagttgatggataaaagttactatgtaagcctatttttttgagtccttatttgaatattgaaaacattcttgataaaatgtgttagtccatgttggaaacaaccgaaagaacagaattcaagttctagttctgatgtttattatat

SEQ ID NO: 214755 - DNA, 511 bp, Homo Sapiens; identical to SEQ ID NO: 48541

SEQ ID NO: 214756 - DNA, 624 bp, Homo Sapiens; identical to SEQ ID NO: 49630

SEQ ID NO: 214757 - DNA, 609 bp, Homo Sapiens
gcttcccgttcagttaagtgtgggattattttactaaatcttacttatgtttggagatctcttttaacttaaagttacatggtctgtttcttgtttattttacctctattctttaggttgaaattttatataaagtaagatactggtatcttagtatttcctgttcatgcttagtagtttattacttcacttgagggtacttgacaatatgaacaaaaagtaaatttttatttgcataattttaagcttttgaaattaaattatctattcttccccccccccaaaaaaaagtattgtaaatccttaagtaaaattgtatttctagctattggtaagagttgtttcactattgctatgtaggactgtttaaaatgtgagtatctgatattatttaatcctccaatgtctcattttgcagtaactcctacagtgtgtaacactaaaaataagaactaatgatggctaaacactaaagtagccattcatacttatgcatattttagtatcccataatagtcaatccaaaatttttgtgactatagactttactgaagtgtcaacacattagtttgtgagcctcatgtaagaacatgatggtctttttttaaa

SEQ ID NO: 214758 - DNA, 479 bp, Homo Sapiens
atcctgccaggcaaacacatttattcttctggttgcctcccaagctcccgcccagctcttctgaaacactgctatcttgctccttccatcttttgcttaggttttctcttcctgggctactcatcccctcaacacatacatccacactgggcatcctccacaggacttccaaaataccctggacctctctttgtactcaccccattccattaccatgatctgttttggaatctgtttctcccatttatttgtgagcccttggcagataggggtggcacatctgtgtgttgtgcacatctgtgtacatatctgtgatgaattcgttgtttggtatatgtgctgtgactgttacatttaactgtattggtatatatgttttgtatttctatcatttaatcaacatttatgtgtcagcctctaagctaaatttaacaatgtcaaaataaaaccaaccaaacaaaacaaaaaaaaaaaaaaag

SEQ ID NO: 214759 - DNA, 656 bp, Homo Sapiens; identical to SEQ ID NO: 50825

SEQ ID NO: 214760 - DNA, 383 bp, Homo Sapiens; identical to SEQ ID NO: 40876

SEQ ID NO: 214761 - DNA, 545 bp, Homo Sapiens; identical to SEQ ID NO: 50129

SEQ ID NO: 214762 - DNA, 623 bp, Homo Sapiens; identical to SEQ ID NO: 43967
  misc_feature (516)..(516): n is a, c, g, or t

SEQ ID NO: 214763 - DNA, 564 bp, Homo Sapiens; identical to SEQ ID NO: 49133

SEQ ID NO: 214764 - DNA, 617 bp, Homo Sapiens
gtatcggccattatggccgggggcttcagctgtgggcacaagaggcagcactcaggacaatctccagcatggcctggtctcctctcctcctcactctcctcgctcactgcacagggtcctgggcccagtctgtgctgacgcaggcgccctcactgtctggggccccagggcagagggtcaccatctcctgcactgggagcagctccaacatcggggcagattatgatgtacactggtacctgcagcttccaggaacagcccccaaactcctcatctatggtaacaacaatcggccctcaggggtccctgaccgattctctggctccaagtctggcacctcagcctccctggccatcactgggctccaggctgaggatgaggctgattattactgccagtcctatgacaccagcctgagtggttgggtgttcggtggagggaccaagctgaccgtcctaggtcagcccaaggctgccccctcggtcactctgttcccgccctcctctgaggagcttcaagccaacaaggccacactggtgtgtctcataagtgacttctacccgggagccgtgacagtggcctggaaggcagatagcagcccgtcaaggcgggagtgg

SEQ ID NO: 214765 - DNA, 627 bp, Homo Sapiens
agcttgatatcgaattcgtatcggccattatggccggggggggtctcaggaggcagcgctctcgggacgtctccaccatggcctgggctctgctgctcctcaccctcctcactcagggcacagggtcctgggcccagtctgccctgactcagcctgcctccgtgtctgggtctcctggacagtcgatcaccatctcctgcactggaaccagcagtgacgttggtggttataactatgtctcctggtaccaacagcacccaggcaaagcccccaaactcatgatttatgatgtcagtaagcggccctcaggggtttctaatcgcttctctggctccaagtctggcaacacggcctccctgaccatctctgggctccaggctgaggacgaggctgattattactgcagctcatatacaagcagcagcactttgaaggtattcggcggagggaccaagctgaccgtcctaggtcagcccaaggctgccccctcggtcactctgttcccgccctcctctgaggagcttcaagccaacaaggccacactggtgtgtctcataagtgacttctacccgggagccgtgacagtggcctggaaggcagatagcagccccgtcaaggcgggagtgg

SEQ ID NO: 214766 - DNA, 573 bp, Homo Sapiens; identical to SEQ ID NO: 53753

SEQ ID NO: 214767 - DNA, 583 bp, Homo Sapiens; identical to SEQ ID NO: 48931

SEQ ID NO: 214768 - DNA, 557 bp, Homo Sapiens; identical to SEQ ID NO: 44624

SEQ ID NO: 214769 - DNA, 590 bp, Homo Sapiens
atcgaatcgtatcggccattatggccggggagcccggaggttggctatgtgaccaggcaacatgctgagccggcttcaggaactgcgcaaggaggaggagacgctgctgcggttgaaggcagccctgcacgaccagctgaaccgcctcaagatgttggtgcatgtagacaatgaagcatcaatcaaccaaacaaccctggagctgagcacaaagagtcatgtgacggaagaggaggaggaggaagaggaagaagaatcagattcctaaaggagggggaaagccaggctggtcagttatacaaattgcatttctaaggctcaggctacttctcctcaaggaaatcatcttgccctgggccctgtgatctgcttgaaaggaaagcaagaactataaggaggatgtgtagttgcaaaaatggctccatcggtaactcaagcttcagaatgttatgacatacagaaaatcaaagatgctgtgtcttagcattgagtaatatgggtggtgctgtctgtaatctggtcagattcagttaactgttcagaacaaaatttcctctgaaatactgttgagaaagtctgtcatttgcaaa

SEQ ID NO: 214770 - DNA, 433 bp, Homo Sapiens
gtatcggccattatggccgggagatttttctttaacaagctattttaaagataatggcattattatttccaagccatagcttgggctgaaggacaaattgaaattgtctgccaataccaaggatattcttgtatatttgaaaaataacttattatttgaattgttgtggttttgtttgtatttgagagctcttgttagctgatattcatgtttgaggtcataaaattgtctctggtctgaccaaacagaagtcatctttacagaggtgatatgcttgatctacacagagatgtgacttgatctgtagcaccaatgcaatgtaggtctcagtttgagagaaataggaagccctttgcagttgaggtgttaggaacctgctggtcatggtgtggaaggccaaatgaagctgccacagggtttcttgtcagtcctt

SEQ ID NO: 214771 - DNA, 476 bp, Homo Sapiens; identical to SEQ ID NO: 49738

SEQ ID NO: 214772 - DNA, 552 bp, Homo Sapiens; identical to SEQ ID NO: 41320

SEQ ID NO: 214773 - DNA, 606 bp, Homo Sapiens
gtacggccattatggccgggggccctcgcacagatcccagctgggtcacccgcactgagccaacagactgagcgcgtccaggcctgacagctctgcggctcgggccctgaggtttattcagaaaacatgtccactgcaattagggaggtaggagtttggagacagaccagaacacttctactgaagaattacttaattaaatgcagaaccaaaaagagtagtgttcaggaaattctttttccactattttttttattttggttaatattaattagcatgatgcatccaaataagaaatatgaagaagtgcctaatatagaactcaatcctatggacaagtttactctttctaatctaattcttggatatactccagtgactaatattacaagcagcatcatgcagaaagtgtctactgatcatctacctgatgtcataattactgaagaatatacaaatgaacaagaaatgttaacatccagtctctctaagccgagcaactttgtaggcgtggttttcaaagactccatgtcctatgaacttcgtttttttcctgatatgattccagtatcttctatttatatggattcaagagctggctgttca

SEQ ID NO: 214774 - DNA, 636 bp, Homo Sapiens; identical to SEQ ID NO: 54570

SEQ ID NO: 214775 - DNA, 486 bp, Homo Sapiens; identical to SEQ ID NO: 54452

SEQ ID NO: 214776 - DNA, 618 bp, Homo Sapiens; identical to SEQ ID NO: 47295

SEQ ID NO: 214777 - DNA, 458 bp, Homo Sapiens; identical to SEQ ID NO: 53093

SEQ ID NO: 214778 - DNA, 602 bp, Homo Sapiens; identical to SEQ ID NO: 40933

SEQ ID NO: 214779 - DNA, 589 bp, Homo Sapiens; identical to SEQ ID NO: 45603

SEQ ID NO: 214780 - DNA, 636 bp, Homo Sapiens; identical to SEQ ID NO: 42605

SEQ ID NO: 214781 - DNA, 621 bp, Homo Sapiens
ctagttagcctgacccatgcccgggactcagtggggacagccacgcaagttagactctagattaaattcctcccgcggttagcctgacccatgcccgggactcagtggagtcagccacacaagttaaactctagattaaattcctcccgcggttagcctgacccgtgcccgggactcagtggggacagccacacaagttaaactctagattaaattcctcccgcggttagcctgacccatgcccgggactcagtggagtcagccacacaagttagactctagattaaattcctcccgtggttagcctgacccgtgcccgggactcagtggagtcagccacgcaagttagactctagattaaattcctcccgcggttagcctgacccgtgcccgggactcagtggggacagccacgcaagttaaactctagattaaattcctcccgcggttagcctgacccgtgcccgggactcagtggagtcagccacgcaagttaaactctagattaaattcctcccgcggttagcctgacccgtgcccgggactcagtggggacagccacacaagttaaactctagattaaattcctcccgcggttagcctgacccgtgcccgggactc

SEQ ID NO: 214782 - DNA, 615 bp, Homo Sapiens
cgccctttttttttttttttttttttttttcctgttacgccgtcaatgcagcaggcaatgaggggaatgacacagccctctcattcccggaacgtagtcaatctcggctctgcggatttcacagaacacactttgcctattgccggctccaacaagaagtaactttccaggaagctgccggccccggcagccgccaggatcgctgcctgcgctgcgctggccgccggggattcacccggggaggcggggccgctggggaaggctcgcggggaatacagcacactttcccctaaatccctcgtccgcgccgagtgcagggctctcagagttcacctagtcccacctctcacccacaacagtttataaatggggaaggtcagacaagttagtagcagagctgggtctagaacccaggagttcgaatacaatccgaggctcatatcgagactttaagttgtccgattccgaagtttatttgcttttttccctctttttgccttccattctccctcacccccgttcttttaggggaatgtttgagcgagacttcaaggtcaaaagatggagtccctaggggctgagggtctccatcataggcgccccaggcaaggttgg

SEQ ID NO: 214783 - DNA, 591 bp, Homo Sapiens; identical to SEQ ID NO: 45476

SEQ ID NO: 214784 - DNA, 491 bp, Homo Sapiens; identical to SEQ ID NO: 58916

SEQ ID NO: 214785 - DNA, 638 bp, Homo Sapiens
ttttttttttttttttttgcaagccatatctgagaagccatctctgcccttcccctgcctgcatcccccagaccatgagccgggcaccggccaatgcattcagggtggggacgcagttcctgccgtggctgtcctttgagagacccacatgtttatttcatggaagacggagttggtgacttcaggaagctccttgtggagaacatggtaggcaccttcataaatcttgagagtcttgtcctggctcttggctaactccatgagcaggtaggcccctttgctgtcacataggcgatcggcagagccctggagcagcaggaagggcacagtcagcttggggagggcgcgctccacccgtgagacggcattcagcagttggatgccgaagcacaccttcagccctgcccggcagatcagggggtctgagttataaatgtcgacctctgtcttattccgagagagcacgctggagtcgatgggcccgagggacaagtttggcagcacaaggttgagcactttcgcagcaaggaccttgaaagttgttgcagattcaggattggcaagaaccagaggcgaaatgagtaccatgccggcgaagtggcccggcctctctgcggccgtgaggatggcgatggcgc

SEQ ID NO: 214786 - DNA, 623 bp, Homo Sapiens
ttttttttttttttttttcagatcttgcaattttactctgaaggcagagaagtgagagagtggatgaaggcagccaacgggacaggactttgctggagatgcaagcagagaatcagggaagtccagaggccccaggtccaaatcagctttgtactggggcagcatctgcccggcccgcagctcccatcgggtggacacacctagatcgcatctgcacactccagagaaggtggagctctttcctgtaaagcccacgacacactggatctgccgggccctcctcagccacacagccttccagtgtctttggggggttcgatccagccccttgcggtatacaatccaaccacttcggggtgtgtctgcgcctcgccctaaggccccacccacacccgcttcctagacctaagcgccatttgatggtggggcggggatcactcttccaggaccctccagactaatgtccatgctcttcagagacaacacttaagtcccgctggccaatcgtaaccaaaccacggccttagccacgccccatgcacagctcgcccagttgcggacgatctcggacggtaagacctgcactccagggccaccgggaggcgctgcggggccaccgggag

SEQ ID NO: 214787 - DNA, 653 bp, Homo Sapiens
ttttttttttttttttttgttagttgtttttgtttttaatttgtctccaataagcaatgtcttctgcccatccagcatgggaagtgggtcccacgtgaagggggcccaccacccactttgggagctgaaggcagagactcgggagccctcccggctcagactccccctacgctgggtgtgggttatattcagaggcccacacccacactggggtaggttaggtatggtttacttagccacaggcccccgggggcaggagacagagtgggggcccgaagctccctgtcctggaagagttaaaagttctggggtagccctggccccgtgggggcagttagagatgagggaggttactccttagcccaggagtggttagagacagtggggctggtagagatgcctgtttaagccttggcctctaggaggtgttagagatttgctggggttgggggccagggttgctgggaccccagttttggggagggagctgtaagagattgggggatgttctgagctccccagacaagaactgctggttaagagggggccaggcccggttggggctcagctgtccctgaggagctcggcatcccgcctgggagatgcagctgtcactggggtttctccctctctgttgtcctgggctcgtcctt

SEQ ID NO: 214788 - DNA, 726 bp, Homo Sapiens
ttttttttttttttttttgggggtcaaatgaagcacgttattttatttcacaaagactgtacaaaattccttataaaacatggggtagatgccacctggttacctcactcggcccccatccaactccgtatgagggggcaggtgagggtggaaactgtgtggatggaatagtattatgtacaaggcaggggttgaagtgataggtacaagttctttcatatttacactatttcacatattcacaggtatatagagagccaggaggaaggagtgaactctggctcgttctcttgtataaaaaagcaccagtgtcctggactggacacccactgctataaaagatgcaggggggcccagggcctgatcgtcaccgactgatatcccgactggagtcccacaacttgttgggcggctcagcccgaaggcgggcgaagaaaggatgctgaagggcttcacccaaggtcagccgcttagctggttcatactctagcatgctttcaatcagatcgaagagctggtggtgttcctctgcctctgaggtcagataccgccgcagcggtttgcagttctcacgaacatagcgcccagctgatgtgttctcatcccaatccaggcgaccccggtaaaaatatttctgctttcttgtctttcggatcatccgggaagggataggacccaagatcctttccatcatggctagatgctctctgttgtcatgggtctgga

SEQ ID NO: 214789 - DNA, 741 bp, Homo Sapiens
  misc_feature (709)..(709): n is a, c, g, or t
ttttttttttttttttttattattttattttgtttaccataaatgacagagcagagagtaatacaaaatattctaagaacatttttctcatttcaagacaaatgaaagttctttcttccagctggtgggaaaagaagtatcagaagtgatgtgactagagctcttgggggagcttgggaaagggctcccttcactacccccactcccttgagagccctgggagtcaagagggggcagaacaatggaaatctcggaataagaacaattggagggactcacagagcagacaggaccctggcctgactctggtgggtgcagtccctcatccagcttcatcacctgagtggagagtggcaatggctggagaagtctctggagcaggtgaggaccactacccaagaccctgcattcagcttggaggatgaacatgctcaaaaatttcctgtgtggcaggaggaacacagacatggcctggaaaggaatttcttcagcatggaaaagacatagagtggcctgtgcagacactacctgagtgtgaaaggcacaggagactgctaatgaccaaagctcaggtggtttatcaagcagaggacaatgggagccataagccagacaaccctccccacaatgcctctcccagcatagacaaaagaggagaaaaggggcaaacattgcaggaactgagtttcaatcttgaagggactatganaactctgaaaatgactgagttcaccttgaact

SEQ ID NO: 214790 - DNA, 658 bp, Homo Sapiens
ttttttttttttttttttacaaacaccaatatgattttattcaaacacaggcaagaacaatgaccttcagagctgggtaaaaataataagttaaaagcatggttagaattttagacaatcagataaaaagtttgaaggaagtgatttccccttcctctcctaattgattaattcaacacagcataaaaataatttgtatctataaaatatccttgttcccacacaaatgaactggaggtggccctaggatttccttgactatgcacaatgcacacaatctacatgtccctcctccccaacttttaaggcaaaaatggtcctgcatcttcaggcagagggtgggctcatgccagcagtcagctgtgtcaaggacactggggggcgtttctccaccgaaagatgcctgcttgggtcccacttgggcgcggattccattttatttctagcctttgcctcaccacagaaaaaaggagctgaaattctggcaagtggacactggactggtttggggcactcctccagtctgggctgaccgggtctcttgaggcatccgtggcctaggcaagtggtggtttcaggactgtgacagccctgaaggagccagacctggtgcctcctgcaagctggacaaagctgacggagggtgggcaggtgtctc

SEQ ID NO: 214791 - DNA, 639 bp, Homo Sapiens
ttttttttttttttttttgatgcaaatgtttttatttgccacttaaactacagtttccctgtgctatcctgatggtgtgggggtgtggaacaggctgctggaaccatggtttacagtagtagcaggtagatgattagtagcatgagtggtgaaatgctgcatctaagtgcctgtcactttgctcccaggggaatatcatgcagcccaggaatagtgttagactgggaaggactgtggcaggaacagtcactgtctctcctcattttggtgaggaatgggtcccacataatggagagctcaacagaagcatccagtcttgttctgaatggagcaggtcagtggcagcagcctcttgctttcatttacccctttgggctgcttgcctaaagtctctcttccttcacctccccaggccttttggcaagagggaagacactgccattcctggctctttccctggatcagtgtctgatctggtggaggtagcttgtggggcctgacttcctccagttccggcggatcctggcacttttcttcctagagtgcagatactgctcactggaggctgtctctgtggcactctgtgggttggccagtgcagagtggggctccaggattctgaggcggctgcagtggtgt

SEQ ID NO: 214792 - DNA, 628 bp, Homo Sapiens
  misc_feature (535)..(535): n is a, c, g, or t
  misc_feature (566)..(566): n is a, c, g, or t
ttttttttttttttttttgattagtaaccacatatggctgtttatttgatacagggctctgtacaaaatatttacacatattctttacagaataagtaaaccacctgaaggtaattagataatgctttcttctcaatgacagggagaatcctggtgtcagcaaagttagaaaacagataaacattctccttccgaggccacaactcaagcaaatgccacttgcttcctaggatctgaaaagctgtggccttgggaccctggtcacatgcacctcctttcctcaaccccatcaattccttcagtatttacaaacaggcttgagtacttgtggaaggaggggcagctggtgccgcccactgagaggatgacaagagggccagcttgctttgggagagcactgggaatatctgccgcatcatcacctctggaagaatttcctttgccctgatgaatacaccactgtctaaattaatccatcgacatcacacttaccccacagtggggctcctgagccatggacaatgatccatccctnttgagctttttttgggttttaaagtgcgtantggtggctgggcgtggtggctcacacctgtaatcccagcactttggggaggacgagacgggc

SEQ ID NO: 214793 - DNA, 693 bp, Homo Sapiens
ttttttttttttttttttccggagcgtaggtgtgtttattcctgtacaaatcattacaaaaccaagtctggggcagtcaccgcccccacccatcaccccagtgtgcaatggctagctgctggcctcctccatctggtccctccagcctcacagcctcctcctgaagccctttccttccaggctccagaagagcaggagacaaacacaccccactgaggcccagctttaataaagtgcctgatacagagccaggggacagaacccaggtgatacagctcccgacagccatcccaggacgacagagggtcgagggagaccctcggaagcccccagtgactccagacaaaggggcagccccaaaggcgcctccaacagttggaaaacctccctgctagagggcagaaaaggaggcctggccctttaagagccaagctaatggcagctggctgaggggctaagaaaacagcttaaggttttgtcccgtttccttcagagtcccccaaccctgaaggagtttgcgcaaaaataccctaaagttttccaggaggtggggaggtcaccccagacccccaaagagctgagccttccagcaagggatagtggctgggagggtccagacggggaggacagacccgagggcacttgtaggggaggtggaaagggtctcagactccgcactggaaactggtgtgg

SEQ ID NO: 214794 - DNA, 695 bp, Homo Sapiens
ttttttttttttttttttaaaatgccatttattggtataaaaaccatttatacattatataaatacaatataaatatttctttaaaaatatgtataagttagccatttatttgaggtaagcctacactttccaagaaatgatctggctctgaaacaaaggatattcaaactgcatagccactttccattattatttcaaaactaatacataaaatgtttcaagtggtacttcttaaaaatataaatatgacttacataaattaactcagcttcacatatttaaatattaataaattaaaaataattaaaatagtgtcctaacgctcatacttttagttctccatagagaacaacataagttctgtgcccagtggacaggtttctgaccagaagaaggaatgcccattaacaacaacaatctgaggtgcccatgctacatttgccgaagagccctcaggctggactgcaggaactccttaaagctgcgcagaatgagatgagttgtcatgtcctgcagccactggttctgtgcctgcagcttcgtcagcaggctggcatttgtggttgggtcaggggtggttattgcatctagattctttgcctttttctgcaggaactggatcaggacttttgtactcatctgcacagctctggcttgttcctcactactctcaaatctgttctggaggtactct

SEQ ID NO: 214795 - DNA, 741 bp, Homo Sapiens
ttttttttttttttttttaaaatagaattttttttcttggcaaatttggaaggtatttttcagttgcattttgttgggttttagtattttggtaatgactattagttatagtttccttacattctggcatccttctttgtagccagttgtcttttcagtttacctttatttttttttaagacctgatgatatatgttcattaacactgccatagctcctggagttggattttcagtgacttcattgaaaattaaaacgtttctatggcctttcatagttggaaagtactcttctgttttcataagtgttgttatctttctcagattgctgatttgtttccacatgtctcttatggtatagttcttgagcaatttcctgaaaaatacgccgagcactcttcttcttttgtgagtcttcttttatttctttgtttcttagagggttggattttgatttggagaggagtatgaaggccacgcacacaccggtcacatagacagagagcagtgatacaagagctgtcaggaagctccgcagttccttgctgagcagcttaatttctcttaccaccagtgtggtccctcctcctgtctgtttagctctcgcttccggcacactggggaatgctattccacagatgtaaattgcactgtcatttgaagtcactctgtttacagtgagggaaacttggtttctttgagggctcactcactgtgaactgtctgctcacttttgcaccgt

SEQ ID NO: 214796 - DNA, 564 bp, Homo Sapiens
  misc_feature (552)..(552): n is a, c, g, or t
ttttttttttttttttttgcggactcgcaaactttaagcaaacacgtggtggggccgctcccgcctggcgggtcagttgtccgcgtcggtcaccagcggggccaggtagtccgagtgccggatcccgaaactccagccgcggggcttccggtgctgatccacgttgtaggccgcgggccctggcttccgagtgttgtcttgggggagcgaagtccgcgccagaatcgtgaactggggggcccgggacttgtagacccctggactcacgacctgataggcgcaggggcccggggtcttgctgaggtcctcgaagaaactgccagccgctctgcggccgtaaatggagcaagttggggcggagactttgccgattacgcgcggacccaagagcgagggcaccgtaaaggccgcgggacctgggctctgctgttccgcctggacaccccagtttcggggagcaatggtgtgccgaggcgcactggggtacgtcgcgttccccgctcgctccgggaagtactgcctgcggggcggatcaagggtgtggggggctanaactgcgtggga

SEQ ID NO: 214797 - DNA, 714 bp, Homo Sapiens
  misc_feature (698)..(698): n is a, c, g, or t
ttttttttttttttttttatgatcaacaagtttttattacataatactcttgatattccaaacaattcagcactttgtaaaaaaaaaaagaaaaaagagaaaaccggatcatggtaagtttgctatattaacatatcacgaagaaaactggaaacctattgatctatggaattgacatcttcgcatggatgctccacgcagcacgcttgcttccgtctggtgagtgatcatctttcggccagggctggaatatttggcctttctctcctttggctttgtcacccaaaaaacacgacctcagtggtgtcagctttgaacatgctaatctgcctggcaccaccccattttagagactgtcacttggaggccctgaatgctccttccattcctcacatgcaggctgctccatggtgctggatggattagagttaaggggtcagcagggaatcgtgttactctttggcatctggcattttaaacaccattcaccacgtccattctgcgcagggtccttcccttctggtgcgccttcatcttccatggacattctataagctgggtgtggtgtgagttcagctgtctactctttgacagagattgtaaaatctgaccaaattccccaccagtgccaaggtttaagtccacaagcaactgtttgcaccagaagatcattactttttcagtagcaaaccattcantgttaggagttacttt

SEQ ID NO: 214798 - DNA, 718 bp, Homo Sapiens
ttttttttttttttttttcaatgctaaggaaaaatttaatgatggaaatatcgacaaatattcaacatcatttaaaaacaaagtagcttctcttatttcacatagcttagtttgggatagaaatagaactaatgtttacaatgattcttacatttagcattaatcagaaacgagggtttgttaagtgcccttgctgggtcccaacccccagagattccgattcagcaagtctgggatgcggcttgagaatttgcatttctaacaagtttctaggtgatgctgatgtcaatagtctgtgtaccgtttgagaaccgctggattgattctttgacagtttttgaagtccgctgctcaccatatcacttcatcctcttataaactttcactatgtgattgcctaagagcccctgcttgttggctgctccacattttcacacagttgtactatttctttctgaaatgacattgtttgagggacagtgggtggaacgtgtgagctcctcactgaaggctgcctccagaattccctgaatggactgccttgctttcttcctaaaatctttccccaagagggcataaaggaagggattaaagcaactattggcagatgctagagcaatgcatacatgatcccaggacatcagagttttccccaagggagtttctgggtcagtaagcaatgacaggactccaaaaatgtggtatggagtccagcaga

SEQ ID NO: 214799 - DNA, 679 bp, Homo Sapiens
tttttttttttttcctttctcgctctttaatctcactctgctctcttgacacagttccagcaatgcagccccaggcaccagctccgagaaggatgcggtggggcggggtggggaacctgcccagggggcccagctctggggcggggcgggggcgcctccttccggcccgcggtccgggcggccctcgcagctgtccaggccccggcaagcccgggcgtggtgtccgagcggacgaataaataggggcggtcagtggtcaggtgggtcaggtgggcttgtgatccgggtggcttttgagcgtgtggaacttgacgctgtccagcttctcgaagcgcttcccgcagcgatcgcacgtgaagttgtactgcacctccgcagtgtgcttcttcatgtgccagttgagcgacgcgcgctgccggcactggtagccacagatctcgcactgcaggggggtctcgccggtgtgggtgcgccgatgtacctccaggtggttcttcctcttgaaggacttgccgcaggtctcgcaggtgaattcacggacacctgaatggatgatcatgtgccgccgcaggtggttggataaatagaacttcttgccacagccaggatgagggcaactttggtctttcctttccgatgcacaagattgacgtggttctggaagctgctgagggcacgt

SEQ ID NO: 214800 - DNA, 690 bp, Homo Sapiens
ttttttttttttttttttaagcaacattctttctttaatttccctttgcaaatggaagcccctgagctggtgcccacccccacccctaccccataccctggggacccccgatgcaaggcccccacctcaacctggtgggaaaagaggagcaccccctccctatgatggtccattaaaaaattcctagtcatttaagaaatgaggctgggaatgggagaaaggaactggaagacaaggcccaggtcaggccagtctgaagatgttggggttgtgagacccttgagaagggtttgcaagcacatccctaagctcggggccagcatggctgaaggaggagaggtgacacacagacagatagtctgattcctcaaggtcctgcctgcctggctgtactgtagatgctgacactcaccaccaccaccaccaccaccaccaccaccaccaccaccaccaccacaggcctcctgatggagaattttccagttactctgggattgggtttgctaagcatcccctctggcccctgatctggggcatccctggggtccccctgagaccaaacctgggagaaggagggactctgggaacatgcaaagtgggggagcagagaccccgccccaccccgctgctctacaggatggtggctccagctgcatctgggctccgagggtccttaacagcgatgatgaa

SEQ ID NO: 214801 - DNA, 676 bp, Homo Sapiens
ttttttttttttttttttagaggtgtcatgtttactttttatttaggagtacaaactgagacaaaatcatccttccagttagtgaggttttgagggatcatactaaagagaagacaggaaaacaccagtaatggtgaaggtcttgagaaaaggacaggacccgcagatagcgagagatcagaggaggccctaatttctttcctcatttcctttccaaatatcccaaatgtgcaatgcatcacctgagacagaaggcagaaagcatcaagctctctgtttatcccaattcaatgacaaccagaacttattttttttgagatggggtctcgttctgtcgcccaggctggagtgcagtggggcattcatggctcatcgcagcctccaactctcagtctcaagcaaccctcctacgtcagtgtcctgagtagctggaactacaggcatgcaccaccacacttggctcatttttaaaaaatttcttgtagagacaggatcttgctacattgcccaggcttgagtgccgtggtgcattcacagctcaccgcaggctcaaactcttggtctcaagcgatcctcctgcctcagccttctgagtggctgggactacaggcatacaccaccatgtctggctcatttcttaaactttttgtagagacagagtcttgttttgttgcct

SEQ ID NO: 214802 - DNA, 728 bp, Homo Sapiens
ttttttttttttttttttaaagatagagttttgcttttgttgctcaggctggagtgcagtggcacaatcttggctcactgcaacctctgcctcccaggttcaagtgattctcctgcctcagcctcctgagtacctgggattataggcatgcgccaccttgtccggctaattttgtatttttagtagagacggggactcaaactcccgacctcaactcatccgcccgcctcggcctcccaaagtgctgggattacaggcgggagccaccgcgccgggccatcttagatcttagagcccactttagtccttgaaatacatctgagaagccaatggcagcgaatgacggtgcccgcctgccccaggcaccttgggtgggccaggccctgcttcaggaggtggcgggccactccggagactgatgcagccccaccccaatggttgtcggactcagctgtgtctgaggtctgtgaactcccagcctctcagaaccccatggcaacacgacaaggacaaggcagggcatgaggaggaggagaaagtgatgcctgtggccaggaaggcttcagacctctcatctgtcaatgggccagagtgatgcctcaggcaccgctagaaacccagggccggacaggaggcgaggagggtgagtggggacatggcagggctgagctgatgctcagctgactccatgagaagggaagtgacttcacatgggggatactggacag

SEQ ID NO: 214803 - DNA, 331 bp, Homo Sapiens
tttgataactcagtttagtatttggaaggaactcgttcatttaacacacatttaagagcctctgaggtatgatccctgttaggtactaaggatattatgaaacagcctctgccttcctgtagcaaacaacctataaaaagctaattaagttattatattacagagtaattatgatcagtactatgatggaagttaatcacaaaacatgacatatttgatgggatgtaaatcaaggaaaacatcctggaagaactgacatctgaacttgaattttctcagcctggacagaagttatactggaggtgagggagggtaggaagaagagcatttc

SEQ ID NO: 214804 - DNA, 540 bp, Homo Sapiens
aagcgtacaaaacaggatatttattaaatgtttatatcacaaacatacactagaaattaatacaaaaggaatcactattaaggctgaggcatgtaaaggcaataccatattaatcataattaagagatttctctcctactctgaatttttaggtacaaaataagtgctataccaggttttcctacatgctctacataaataacgtttctcacatttacaacaaggttttacggttgaacactctcccaggtccactgtatttgtagattcacgctccagcatgtgttctcacatgtgcttgaagcgatgcgagatacctgaaggttttcccacactgcttgcattcatacggtctctctccagtgtgcgttctcacgtgcacacgaagggacgaggaacaactgtaggctttcccacattcagtacattcgtagggtttgaccccactgtgtgatctcacatgcttttgaaagtactgagcgtggctgaaggctttcccacattgattacattcgtacagtttctctccgctgtgggttc

SEQ ID NO: 214805 - DNA, 387 bp, Homo Sapiens; identical to SEQ ID NO: 58335

SEQ ID NO: 214806 - DNA, 477 bp, Homo Sapiens; identical to SEQ ID NO: 59580

SEQ ID NO: 214807 - DNA, 464 bp, Homo Sapiens
tttggtagagatggggttttgccaagttgcttgagctggtcttgaactcctgggctcaagcggtccctgaccttgtccacccaaagtgctgggaatacagacatgaaccaccgcacctggcctcaaaaactttttttaaagccatttttatataaaggctacagtatattttcctccaaagttaaaaagcacttttctcatggctaggaatgaatatttaaatgcattgtttttccagactgatgatttttaggacaaacctgaagctagaaatagtactaatactcaacaccaagtatatgtatgtgcagaggcttggggaggcatataggatttaaatttgaaatttgttgctaaactcaccaaaacagaatgaatcatgagacctgcagaaggaatcctactcgagaaatggtgaaccatccaagagtcaattaaaaataccctagaataaaactaagttg

SEQ ID NO: 214808 - DNA, 549 bp, Homo Sapiens
tttagcttattaaatcgagaatattcgggaggaggcatccgctatgggctaaaggtcccaacatcacaataataaataacagctatgtttacagagacacattcaggacacatgcaaaagcttttcctagcaggaggacttgggcctttgcaaaacaagctgcttgggcctccccagagggcccaccctcccatgcacctaccccaccaccctgccccaactcattacacaactcggccttctggccacctgaggctactttttagaccaagtgactcagacgtttcaagtagaagacaggatgggccactgccaggggaccttgcagcagaaaattaggtcagaggacttggagggtggtgaagaacaaccagatagatgtgagagcccagcagggaaatgacaggaggcgcagcttaagtgtggaggctccaggtggccggtccccgcgcggctcagatgaagtggatccagctctcttcgcactccccgcgaggcatgtgcagcgcgtggttgcgacatgtgaggctgtagtctcggtggtcgttg

SEQ ID NO: 214809 - DNA, 495 bp, Homo Sapiens
ttttggagacagggtctcactctgttgcccaggatggagtgcagtggctcaatcttgggtcaccgcaacctctgcctcttgggttcaggcaattctcctgcctcagcctcccaggtagctggaactacaggctgtatcaatttaaatgaacattattcagagtgtgcaaggtaagctgtcaaaaactgttacctctttttaagtacttgtctttgtgaatcaaaacgtttttcacactgtgacagctaaacaatgacacagaatttattcagatgttgaaacactgaacgactacaatggcaatctagaatattctgattacgattttctggttaaaacacctcattgtacccttgactaactttacattaggaaaagttttacattataacttacaattataaaaatgcccctttcatatacattggagtttaatgcagcttaaaataaaacaaaacaaaaactccccacactcttaacgaatctgctttgaac

SEQ ID NO: 214810 - DNA, 511 bp, Homo Sapiens
aagcagagagaatatggatttaattgtttaccataagaaaagtgacatatccaaccaaccatccatccccacctgtgccctattctttccttgtgtttctttagagccttttcagctatttcctgtgaagcaaactgcacgaaggcctcccccgtactcctcccctggaagtccaccggcaatgttatcccatttggcacgatttccaacccttcaacccaaggacaaataaccccagtaggggggcaatattaacatcacaagcccagaaatgattcttcttatagctttaaataaaccagaatttttaactttaggtgaatggtatgctttcaacaagtactctttaaatatgcattgcaataatatgaagttccattattataaagtataactattcttaacacacccatggtacagtatatattaaaaaaaacttgctgaacacaggatgcattaagaattcaacaacttaagaacacatatctatgcaacttaatgttgagaatat

SEQ ID NO: 214811 - DNA, 544 bp, Homo Sapiens; identical to SEQ ID NO: 61444

SEQ ID NO: 214812 - DNA, 508 bp, Homo Sapiens; identical to SEQ ID NO: 60642

SEQ ID NO: 214813 - DNA, 407 bp, Homo Sapiens
ttttttttagatcaaacatgtagatatatttgtgctgttaaaatatgctttccaagtttggaagatgcggaggcctcatgcatgtctgtgcacacataagcaccaccacaaaatttgcttaacctatttcttttttcttttcttctcttcttcttcttcttttttttttttgcaatgatctctcagttcagagtgaatatacagcaataattctgcttgaaagaagtgcaaagaaggtcttttgctgtgcagcatgtagctcgatctaccgcaacaatacaatgaataggttatgggttttgtattattattttcctttgtgcatcagataacattcactgcgtactgttcacaggtagcctcagcctatacttcaccatggagacttcccacaggctctggagggc

SEQ ID NO: 214814 - DNA, 445 bp, Homo Sapiens
aaaacaactgcttaaaataaaacaattaagaaaccgaaccactcaaattcaaaacctctgaccattcatgttcaactggtttccaggatttcatgtattcgcagggctttgaacagatcccagaaaggatgctctccattttgggcaacagtaatacacctccttctccagacatcaattactcactgatttggagttaattcagagggaagaagagaaagcaaaggagcaacagaaagcttgtttttgacagaaaagaatataacaaaggacaatcacaaacacgtgaaatagcaaattttactttactagcgtcaatggtaagaatatcacatgcaagaccatggatgaaacattactcttaaatttaatattttcatttatatcactcccaaaatattcattttcttcaaaatcgaatttaatagctaaactttcaagacaa

SEQ ID NO: 214815 - DNA, 548 bp, Homo Sapiens
caaggttcacggggtttattagggagtcgggagggagaaaacccaggagtccccaggccatccacattgctccccggcatgtgacgatccagcctggctttctctggtcctttctggacagaggctggccaagcaggcagcagcctcaaggggagtgggtaggagctgggggccttctggcagccctactcagaggatgatctggttggtgaagcttcggctcagctccttgtgtggcagaacaatcgagttcaggatgagcacctcggcagggatccggactcggcagcccaggatggtgatagcaggcagcagcttcccgtccttgaagaggctctcactgtccatgcgggctcggggatcgttggggttagggtcactgggggtacctccacgcgggcccagcgtcccacggtgctcccccagcccacgatgctatgcagaacacacgtgtgctcctgcaaagtggctccatggaggacgatgctctcccggagccgcacaacctcacccacggtcacccccttcccgatggagacgttgtggcc

SEQ ID NO: 214816 - DNA, 581 bp, Homo Sapiens
cgtcacttttgttttctgccaggacagtgtagcgtccctctttcatggctttctggatgaacttatagtaggggttgaggtagtggtcgaagcgcagaaagtcaaactgggagttccgggcctgcttggcgttcagcatgatctcaaactgtgctccctgcctgcacacgaagctggccgtgcgctcgatgatggcgtgcattttagcggttggtggcaactccacgtcagacgggacgctcaatcctaagggggcaacgaagggctcttcattttcctctaaattttcggcctcatttttttctctctgtttggaaggctcctcctcctccgtcggctctgacgggtcgtaatagtcgctaccgtaagtgaaccccacggcattgtagctcgcatcctctgctagtgcttcactcaatcgcttgtattcttcctcttgccttgcctcctcgtcaagcaagtccgtatgcaaggctaaatacgtctcttcatcacacagggcctctattcgcgcgtcctcttcagacagctgataatctctgttcgacgttggaatactcagcatcgtactcagaaaggtc

SEQ ID NO: 214817 - DNA, 338 bp, Homo Sapiens
ttttaagacagagtctcactctgtcgcccaggctggagtgcagtggtgcaatctcggctcactgcaacctctgtctgtctccctgtttgagtaattcttgcctcagcctctcaagtagctgggactacaggtgtgtgtcaccacatccggctaatttttgtatttttaatagagatgaggtttcgccatgttgtctgggctggtctcaaattcctggcctcaggtgatccacctgtctcagcctcccaaagtgttgggattacaggcatgagccaactgtgcccggccagttttttaaaaaatttacaaatatcttcagaaatgttgtaagctttttc

SEQ ID NO: 214818 - DNA, 526 bp, Homo Sapiens
  misc_feature (489)..(489): n is a, c, g, or t
tgttaagagacagggtgtctttctgctgcccaggctggagagtgcagtggcatgatcatagctcactgtaacctcaaacacctgggctcaagcaagcctcctgcctcagcctcccaagtagcaaggattacagggatgagccaccacaccctgcctcacagatatttctttataagaaattcaaaattttagtcacttaagacactggaatttcataagacagaagatggggaaaatcaagttaaatgaagacaacaagtaggccgtttatactaacaaattgtgccaaatctaatcagtacattgtcttgcagtctaccctaaggtgacagcttcaaactaagttaaacaaacactcattaagtcatactatatactaggaactgtgaaagatataaagatgaaaaacaaaaaatactactatctgccctcaaagaatttataattcaaggagagagatcagacatctatcctctgcatactatgctnttcttcatctagcatgaccaaacaggtgttgaaaagg

SEQ ID NO: 214819 - DNA, 479 bp, Homo Sapiens; identical to SEQ ID NO: 60703

SEQ ID NO: 214820 - DNA, 410 bp, Homo Sapiens
actgctgagttttgcaagtacttattctagggactagtcctttcattttgggcaatttttgcataaagtgtgagacacagatcaaggtgttttgttttttcttctgcctactaatgttcagtaacagcactgtttttaggaaaacaaaacaaaaccccaaatgttcatcatcagaacagatatataaattgtggtatattcatcaatggaatgtcaaataaaaatgaaagaactaaagatacatagagcaatatagatgagaccagatacatgatactgagtgagagaggcaaattgctgaagaacatattgtacatacattgtgagtgactcgatttatatatggttgtaaaacatacaaaactacacatatgaaaaatatgttaacactatttaaaaagagaccccaa

SEQ ID NO: 214821 - DNA, 571 bp, Homo Sapiens
ttataataatcattgtactaaagcaaagattaagtacacattttcccaacataacaatttcatctatggataggcattagctacatgatttttcattttaaaaccccacaatgattatttttcagacataaataaaaaatacactggttctagatgccaacaaaatcacatttgcaaaccttaagagtttggtaagttacaacattaagatgactaacgatatgtgtgcagtattctcagtatagaatacccaaaattcccgtgtacatctgtgttgcttgagtgtcccagtatgggaggaggtagacttggcacatcgaaagccactgctatactaaagaatcatacaaagtctcagggattcttcagagaatcagctattataaaatccatcttgataattcattttgtgcgagaatgtgagaatgaaatgcaaaggaggttaattttacccaggagagcattcatatccttttccacttgtcagaatatacttgattcataagtggtcttttaccgacctacgactacatcacaagagcatgccacccacagtgtcttcccttaacac

SEQ ID NO: 214822 - DNA, 460 bp, Homo Sapiens
tttcccctttttacatttctggaagatgcatgaagcagaagaacatttttattcctatacactgagaagtatctttgtaaacattattcctcaaaaaatactaaggaaagcaattccaactatgctggcaacatttgtaagaaactgtaagtagaacttttagccatttactgaataatctgtggtatttatcagcaaaataacaaaagataactttaaagatagataaaatcatctgcatccatagtgctccctccaaagttgcacaactagaaacaaagttttctaccaggaaaaagttatagtactgacttttgtaagtaattgttcagttggccaatgaataagaataaagctctttgaaagttaaggaagttagaccaaaatgtcatcaatgcctatgcctgtatcaagttcggggcagcgagaaaaaagcccacacaccctgcagagacaactc

SEQ ID NO: 214823 - DNA, 438 bp, Homo Sapiens
ttttttttttttactttccaatggtttattttagaaaagtcgtctcctctttaacatttcttacggatggctaccattaacttccttattcaaattcaacactttaagattagtagaatgaaaaaggcacctgcggtctcctctatttcatgaaagaactgatattatgtggaaaacatacctgggcaagaaaagagtgtctgtgtccacaaaaatcctgctttgattacatcttaaaataatctccaacttcatggttctttcaaaaatgacagtgttttatagagaactaaaatcagagacatgtgagtgttttggtttacatgttatttcctccacctgtgtaatccacaataaaaaccttttcagttttatctctttattaccaacatggatgccagaaacttccatcgaccatacacctacaaacatgtgggt

SEQ ID NO: 214824 - DNA, 448 bp, Homo Sapiens
tttaaattgttttaagctattgtaggtcgtttgcctttctggatacatcttgtaataagcttatgtatgtctagagagacaaaatcaaagacaaaactccttgcttggattctgataggaactgcattaagcctaaagatcaactcggggagaaatgacatctttaccatattgagttttccgatccacgaacatggtatgtctttccatttggttatatcatcttttctttctttcatctgcatgtttacatatacaaatcccatatgttttcagtatacagattctgtacatgttttgttagatttatgcagaagaatctaattttctttgaaacaattataaatggtatgtgttttaaattttgatttctaaatttttgctgttcttatacagaaatgcgttgattctgtgtgtgtgtgctgatcacaaatcctgctattttgct

SEQ ID NO: 214825 - DNA, 530 bp, Homo Sapiens
  misc_feature (513)..(513): n is a, c, g, or t
tttgacagaccaatggtttattccaaaggggaaagcccaagctggatgtctccctccccaacccctgcaagctggcccatccttccagagcccccataggcctggggctgttgagacgggagatgtccccactgtgctgctcctggttttgtctcctctccaatccttgagcacccttccgccaggagctcatggggcttcgttggacccaatcccgttgcctttgttgacgtagaatggccggtagtgagactcaagggtacactgcctttggccctgtctctcagggaactgacacctcctggtcagctccttgcctttgtgtggtccacagcaggacttgagggatgctcagaccttgcttaaaccaccagcatagtctgcttgccagatttccaagtctggggctgggccttggggctttggctccgcatgagggagggatagcctttcagggagaaggaggagctgccttggacgacgggcaggtcattgtcagagttctgaatgctngaggagtactcccagac

SEQ ID NO: 214826 - DNA, 424 bp, Homo Sapiens
tttttttttgccctgcaccttgagtaaaagtttcctgaggcctccccacaagcagaaaccaccatgcttcctgtataccctatggaaccatgagccaactaaaggtatttctcatgtatttctttatagcaatgcaagaacatactaatacagctaagcagaggccatcaggaccagcaacagtctgagctggatgagagacaaagctaaactttgagaagcagcaggagctgccaggggacagaaaggaaggatggagtcctaaattccaggatgtctcctttaaatctgtaagaagctcagccactgtctttttacctgactcctctgggaaagagtttccctaggttaagccatacagggatagggcaggagatgccatttggatctaggagcagaggtcatagactcagcaggaagagtg

SEQ ID NO: 214827 - DNA, 398 bp, Homo Sapiens
tgcttcaagaactttgaaaagtgatcatccataaagctttaattcctttcctcttaacttgttcaaaaaaaagaagaggttgacaaactttataaggaacaatcaggcagctcagctgcaacagacccatgtctgacccctgacactcactatcatacccagagttatgtgggatcagtgtgaggaagtggaaagacattggcctgacagttaagagttctggtctctatcactaaccctttcacaacagctcagtcatttattttatttattttagagatggggtttctatgttgcccagactggactcaaactcctgggctcaagtgatcctcctgcctcagcctcctgagtagctgagactacaggcacacatcagtcaccacgcctggcagctc

SEQ ID NO: 214828 - DNA, 481 bp, Homo Sapiens
aaaaaagagatggggtttcatatgttgcccaggctaaacgcatactcctgggctcaagtgatcctcccacctcagcctcccaagtagctgggactataagtgcacccccccactttttctctctctttttttgcatcaaataaccagtggattcctccccccatcccctatcctggtcgggtttatacttgccaaatgcaaatatcaaaaggatacagagagtggaccagtaactggtgactctcaaaggactctatcggttcaatctgtctttcatgacttcaatttcaaaatcagcagtttatagggagattttgtacaaagcatgtatattacttacatgtcactatagctctagacagttacacctcatgcaaactcagtctagagcagcactggctaaaagaagtaaaatgtgagccatgtgtcattttaaattttctagtagccacatcggaaaagaaaaaaaaaatacagctga

SEQ ID NO: 214829 - DNA, 447 bp, Homo Sapiens; identical to SEQ ID NO: 60889

SEQ ID NO: 214830 - DNA, 436 bp, Homo Sapiens
ctttcttttgaggtagagtcttcccttatctgccaggctggagtgcaatggtgcaatcagcttaccacagcctcaaattcctgggctcgagtgatcctcccacctctgcctcttgagttgctaggactacaggtgcacaccaattttttttttttttaagagacagggtcttgccatgttgtccaggctgagctcaagtgactcttctgcctcagccccacaaagtgctgggattacaggcaagagccaccgcacctagcatcactgattactttctaaggccaattccttttggcctagctggactgtaaattccttgtgggcaggaaatgtatgtctcatttcttgtatctacattaaaactgaacatacactaggtgattaaaagaccctgtccagagaacaagagtgctggctttagagccagagaaaacca

SEQ ID NO: 214831 - DNA, 422 bp, Homo Sapiens
agagacaaggggtcactgtattgaccaggctagtctcgagctcctggcctcaagccatcctcctgtcttagcctcccaaagtgctgagattacaggcatgacccaccatgcctggccaaagacgatatattgtaagacctctatccaattttagaaatgctaaaatattaaaactgtgaaacttagattcagtgagtcatagtgtacctttatattttatatttccatcagtcatattaaataatgacattatatagagcatgacattgtcaattaaggaaaagcattatccctaacctcaaatagttaataacctaatgagacaaacagcatatactgcactgcctcaacttccttttcctatctttgaacaccacaaaaccttaacaccatgaaaaacctatcttgtaaatagatctctg

SEQ ID NO: 214832 - DNA, 1000 bp, Homo Sapiens
cgtcgaaccagaaacagcactgagaacctggctggtggcaccggcttcagctgcacagagagggggtcagcaggccacacagggtcatcctgaccagcggtcttttttgtggggtgtcgtgaagaaaagcaatgctcaagggtagataacgaattttctaagactgagcagccagcttagtggcagagtgaaaatgagaatagaagtggaagtacactggaatgaagatggctgcttagttttatctgcctcacccactagctagaacgtggctttagccataataccaatatgtatttttggaacattcctttgctcttttcctttgactttggatagcagatgcggtctattgcattgctgtgattttcagatgaaatcaagcacagtggtttacttttaaccaaaccccagtcatacttcctctctctgactcagcttccttgtcgtacgtaagattgatgacacacgccaccagctcacatttacaaaggcgttctaggtcttttgatgaacacctatatggcatctatattaatataattttctctgtgagaggagagatttaaatgagagttgtcttagtagctgaggaaacagatacaatgattaggggaatagctaatttcttgcctgatgtgatgtatggaaactgagaaaagcctggaaaaggaggttggaaaactgaaagtgggtgggcaccacttttcacacccaaccctctttccatgcccaaaacaccgtgggggcatcccctcctcacagggcctgtgtgctgggctgcactgacatgcattccggctcagagttggcttcacccttaacagcgggtactgggactctgtggacacatggacaactttacttaactctaaatcggggtgtccagtgttttggcttccctggaccacattggaagaagaaaaattgtcttggaccacacataaaatacattaacactaatgatagctgatgagctaaaaaaaaaaaaaaaaaaaaa

SEQ ID NO: 214833 - DNA, 1000 bp, Homo Sapiens
cagttgtgttggagggatgaaccgccgtccaattttaatcattgttactctggaaaccagagatgggcaagtcctgggccgacgctgctttgaggcccggatctgtgcttgcccaggaagagacaggaaggcggatgaagatagcatcagaaagcagcaagtttcggacagtacaaagaacggtgatggtacgaagcgcccgtctcgtcagaacacacatggtatccagatgacatccatcaagaaacgaagatccccagatgatgaactgttatacttaccagtgaggggccgtgagacttatgaaatgctgttgaagatcaaagagtccctggaactcatgcagtaccttcctcagcacacaattgaaacgtacaggcaacagcaacagcagcagcaccagcacttacttcagaaacagtgagtgtatcaacgtgtcattttaggaggcatgagtgacggtgactttatttggatcagcaatagggtgattgatgagcaatgtggaacataatgggagatagcagattgtcatagattcagatgacctggtatggcaaccctctttcagttgcaaccttttttacgtgtcttattataaccttcccttcagaattccacttatgttctgaaattaaatacaaaccatttctggtgaattacaaagaaactcacactaacagttctcttctctatatgcctggtccatacacactaacagtaagtacacactctatttggtagtgatgtgtatatttgaaaacatgaaatcttttctcatcccaatggattgtcttataaatctcctgggatgcacactatccacttttgggaataacactgtagaccagggatagcaaataggctttactataatataaagtgacttgtttgaatgctgtaatgagaagaattctgagacctagtgcatgataattggggaaatatctgggtgcagaaggataaggtagcatcatgttgccgtattttagcatctctg

SEQ ID NO: 214834 - DNA, 523 bp, Homo Sapiens
  misc_feature (437)..(437): n is a, c, g, or t
aaatacactggatatgaggttacaattttgagatcatcagacctgagatatcttggaacactgactgctttttctgttgctttacgatcattacttttcaatcatatttacctcttcttttttgaaggtaggcttgtcttcttggagcttttctcttttagcttgcactttagttcccttctcttctccctttttattttcaagaatggtaaggtcacacaagtaaaagaagccctttctagtttacaagagtgacagggtgctcggatcgccttgcaagtgctgcgtgggatggcttctcttctgccgtctcagcgctcacagcacagtggttctaaacagcaaggtgggatattttcttcccaccccaacatcttctcgtgtgcctgccattgcgctcactgaaatctagcatgatgtggcactcctcgtgtgtntacaaacctcgtgtgtggtttggtgcactttgctcatggtctcaattttagctgtgttcatgagcctcttgtacagaagcaggagt

SEQ ID NO: 214835 - DNA, 452 bp, Homo Sapiens
  misc_feature (441)..(441): n is a, c, g, or t
ttttttttattagtaaaaatttattccttaagttcaaatgtgaaacatttgctcattatgaagtcagggagaacaatgccaccgtgttgaacacactggggcaggctgtggttgacagctgcaggcttctgccagcctagcatccaaattacttccttattgtgtttccttgctcagtgtcaaacaatcctgtcacaaagataagaattagcagatagtagaagttttataagagcccatcatgcagtactgcaacagccttctattaaagtgaaaacaggagtgataggaatatatttcgaagttgaatttctaacgatatctggctgcaggtggggagggtcatgttgtttttaattgcaaatacagaagtcagacaagaagcaccaagaacttaaaataagcactaacccaggcaagcaatctgttgtatggaatcanagaaaaatcaa

SEQ ID NO: 214836 - DNA, 427 bp, Homo Sapiens
catttgcttagttttctgtgtcactattggaaatctctccaaagtttattacacaatcacaaaacccttctcaacagtatttttctcataatcaactacattaagtaatctattagtttatttcacctcaccacccagagatattcccttcagagcttttaggttgttttctacatcctcaattctgaaattgtatgataatgtgccctggtacagctttatttttcctttccattcattgtggtgggtactcaggccctttcaatctagaaactcttgctctgaagttctagacacttttttggtattactttctacggcaaaaaccacaataacttttgtaccaacctactatttgacaatttcctcccctgtttctggcctctctagaactaccactagtcagatgttggactttttagataaa

SEQ ID NO: 214837 - DNA, 459 bp, Homo Sapiens; identical to SEQ ID NO: 60579

SEQ ID NO: 214838 - DNA, 555 bp, Homo Sapiens
tttggtagagacaagctctcactgggttgacagactggtcttgaactcctaagctcaagcgatcctcccacctcagccttccaaagttctgggattatgggcgtgagccaccatgtccaccccagaactgtgcccaccccagaatcttattaaaggacgcaggaatccctggagcgtgatctcagctgccgactcacctctggctgccttgagagcccaacacacaggtgtgcctcagcagctcctgcaggctcacctcaaagttgggttatgcattcaagcaattattttactgtccaggtaaagtcactggaggttgccaagtatgtatttgccaccaacaaatatttactgagcatctgctatttaatcactctgatagatgtcacaggagctaggagggaacccaggtctcagagtgctaatgatctatttggacaaattggatttgaatatcaataatgactaataatattagttcatttttagaacacaccctcagcagagtgggggactcatggcagaccctaattgtctagggcagaaagtgtggaa

SEQ ID NO: 214839 - DNA, 453 bp, Homo Sapiens; identical to SEQ ID NO: 60750

SEQ ID NO: 214840 - DNA, 466 bp, Homo Sapiens
ggacggagtctcgctctgtcacccaggcacgcaccaccatgcccagctgatctttgtatttttagtagagacgggttttcaccatgttggccaggatggttttgtactcctgacctcaagtgatctgcccacctcggcttcccagagtgttgggcttacagatgtgagccaccacacctggccaaaagatttccttttaagaaaaatgtgggattttttctacgaaggctctttaaccacacaagcacagaatactagtttatgcaactacattatacgacaactccctaattttaatgcagaaacatccatcttatttttctttttgaggcagggtttcgctctttcacccaagctggagcccagtggtgcagtcacagttccctgcagcctggaccttctggtttcaattgatcctcccacctcagtctcccaagtagctaggactacaggagcacaccatgac

SEQ ID NO: 214841 - DNA, 562 bp, Homo Sapiens; identical to SEQ ID NO: 60300

SEQ ID NO: 214842 - DNA, 420 bp, Homo Sapiens
gctattaccaaagcatccaaagcggactgtttacattcttaacatgtcttctggaaaatgtacctactttggtttctcttgggtaaatgcctaagagtgaaactgttgagttttaggttgtaccagcaaaggtactggtaggaacaagatcaaattgtgtaattgaggaaagtttaaaaaaagaactattatgggacaacaaaacatgctaggactagcaagggcaaggatccttaaacatccctagccctaacaaggcacaaacagggagctattacttaatctcaaaagggtagctgcagctttaaaagattactcaacagagctctagctttcagtagaattcagttaacaaactggcagagaaagagttgatctcactaagaaccttgacctgactctctacccttctcacaaatg

SEQ ID NO: 214843 - DNA, 423 bp, Homo Sapiens; identical to SEQ ID NO: 61208

SEQ ID NO: 214844 - DNA, 470 bp, Homo Sapiens
tttttttgacattattctaagtgctcattcgagtgtgttgaactgttgtaaacatcacctctgaaaaatcagttctgctctcttttgcagggagtggagggaaggaaagagggagctacaaagtgaaggaacttatgaatgttaccaagtagtccagagctcaagaaaacaatcactttgtgaaaagtctgcatatgccaaaaatagcttattatttttatgtcaaaaacaaaaaaacaaaaagccaaaaacagtgtttgtttattccttggatatgataccagaatctatgctgtcactgaaaactatcactaggaaaaataacagtcaccacagctcacagctatagaacagccacatgatgaatgcagttctctttggccactggtgtggccagtactgatcaccacactggccacagtgaacagaatgaataccccacagttggagagctttaatttttttgcctc

SEQ ID NO: 214845 - DNA, 535 bp, Homo Sapiens
  misc_feature (492)..(492): n is a, c, g, or t
tttatcatagataactttttattttcccggtcgggatctatatgctagtcagtatcggtgtaaataaaagcatcaagaatgacagcacagctctgggagcatgcggaggtggaacatgcagaggtagcttccaggatggccaggaacgattgggagtcaggaggaggccctgccaggccccgggaaaaccttatgaatacccaagagtctaacacccctggtcaagagactggatacttaccaccaccaccaccaccaccaccactgctaccaaaacacaaaacaaaacaaaacccttttattgttggctgaaaatctcacgaaatgattgaagagcacatccgattatatgccccaataattatcatgacagcaaacggtaagaaatcaccatggcttcacatgagaattgtttttgaccttgctaagaacttcctgcaaccttccagctatcttttgagctgctatttatatttgagagcaaaagaactntatatagacccatgtgttcagctgcaccaaacagacaggaaag

SEQ ID NO: 214846 - DNA, 520 bp, Homo Sapiens
ttttaaagacagggcctggctctgtcacccaggctggagtgcaatggctccatcccagctcactgcagcctggacctcctggactcaagcgatctattctcttgcctcagcctcacaagtagctggtactacaggcatgtgccatcatgtccggctaattttttttttttttttgtagcgaaagggttttgccatgttgaccagactggtctcctgggctcaagcaatcccccctcctcagcttgccaaagtgctgggattacaggtgtgagtcactgcaactagttacttacaatgtttacctgacgaagtccctatccaatttaaacacttcaaaggctatggataattttttttaaaatccccactacaacctcaggaaaaaaactgacaaaagaaatactcaggagtttcacaattaaggaagcctcaaaacatgtgaaaagatatgcaacctcataggtgatcagaaaatgcaaactaaaactgcaaccaaataccatttcataactaccaaaat

SEQ ID NO: 214847 - DNA, 507 bp, Homo Sapiens
ttatttgggacaagaaactaaatgccttttcagtggttcatttgaatctaccatacttcaaaaattataaatctaccatcaccaaagaagtacagcgccatttgtattagttgcaaaattaggctatttacttttctgtatgtacttttgtgaggtttaaaacgttaggcttattacttctccttggtatgagagaaaaagcacaggcactggaaagaaaaaggaataggtgtgaaatcttgattttgtgaattaggatgaatgtgaccttatgtaaattacaaagttcctgaatctgtttgcgcagatgaaaatggaaatatactaactgcacctaccaaacacggctgactgaggattaaataaaacaatacatgtaaaggtagtgcctggtgcacagtagaaactccaggccgggcgcgatggctcacggctgtgtgttatcttctacgccagtttttctgattctcagtttatagatgggaaaggagacgcttccagcagcag

SEQ ID NO: 214848 - DNA, 631 bp, Homo Sapiens
tttttttttttttttttttttttttttataagaggaaacactttattacatcagtcagaaaattccagaaaatggaaagtactccatcatacagcaaagtaaatcaatggttgtttgaagagcagagagaaaaactttataaaggctccaagtaaatacaaaggtgatagattagataaattcattatggtgactctgatgatggtttcacgggattataataaaattcaagacttatcctacagctcaaatatgtgtactttattggatgtcatttatatctttattttatttttaagatggggtctcactctatcacccaggctggactgcagcgctgcaatcttagctcactgcaacctccgcctcccaggctcaagcaatcctcccacatcactaagaccaaggtacatgccaccatacctggctatttttcctagagacaaggttttgccatgttccccacactggtctcaaggaatctggcctcccaaagtgctgggaatacaggcatgagccatgatgctcagcctataccttattacagcttttataacacggtttaagagaaaaatacagatttgccatcatttttggtgacaggtttggcaattttatgttgactttacca

SEQ ID NO: 214849 - DNA, 516 bp, Homo Sapiens; identical to SEQ ID NO: 61857

SEQ ID NO: 214850 - DNA, 473 bp, Homo Sapiens
aaatccatttttttcttttccaggagttggttatttagaaatacaatcttactcctgctgacatcatcacaccaagacctttgtggctaagggtcataaaaagaaaatgttaatccaatatccccatttatagctgagtctccatcctgggacatggccaagagaagtactcacttatctcttggaaactcccattttgggtcctctggaagttcatactcggagacccctgccagcatgggggtgtctgccgttgaagagaggcgtgttgttatcctcaccagcggggtgttggagttcatggaggagctggactcagccgaaacctggatacaaaatgcaaagacacagatgtaatcctggctccatctgagaaggctggaagtcagccagagcccagccagagtatcgaatcttagaaaggaatgggttgggggctggcagaagtcagaaaccaaattagaaaaccactg

SEQ ID NO: 214851 - DNA, 604 bp, Homo Sapiens; identical to SEQ ID NO: 52084

SEQ ID NO: 214852 - DNA, 643 bp, Homo Sapiens
cacgaggtgtcaaccaggctcccctcagactcagattctgtatccatcaccttcacctaaatgacatcctcttcttcatgtcttccttctctttcttcaagtcctttgctttattttgaaggttcttttgcatctcttcataggtataagcaatttattgaaaccttttttaaaagtcaggcttcaatccaggaaaggatccatatgaattgtagcatcagacagcattcaatttcctctgcaaagacttcttcctatggaaatagactctcagtgatgaccaaagacagaaacttgagtagctcattaatttcactttccctaatatcaataaatcttaaacccacctgttttgcagacactaagattttttttaacttcttcattagctctagggaaatatgcatcattcacacatcctcccacagtttccagcaagcttaagagtggctgattttatatcacccatcacctcttttatcactaccaaagcatcggcaatattgtactgttgccatgcttctttcagagtaaggtgagggttttttcaatacagtcagcaaagtggtcaaacatatgcttgattatgttcaaatgcttcagttataccctgacccaagggctgaaagaaagctaaggacag

SEQ ID NO: 214853 - DNA, 687 bp, Homo Sapiens
  misc_feature (566)..(566): n is a, c, g, or t
cacgaggttttttttttttttttgcttgaatgtttttatatttttatgtttttctctctcaccacattagagattcacatgtcaaaaaaaaattcaaagattccacttaaatggtagtcaaaataaaaagcatgttgtttaatttgccaactattccataaatcctgtgcttgaagcactaccttttatcaaccacttgaaaggaaggaatatgaagtgtgactcttgaggattgcagttccatttctccacagacatagcagggtgtgtagttccaaatgggtttcttccaaagtcatctcctcagagtaggactgtctgtgtagtcattctgataatgttgccattaactacaagcacatctgaaaaccctcgtaaggaagtgccattagattcagattaataaagtacaaggaaaaccagtttaattactttataaatgcataactttttcttttcccagtgagagatctttttaaaaaaattctcctttttttgctattcattcttccatagtcactctgttcaaatgaatattctcagaactactacttcctttctcctcncttcacaccaaatgtctatgctatttatactgcagacataaaagataaagagtgatgaggtcagcttcataaatgtcaacctgataagctgagggattgtttgtattcaaattctttaaaa

SEQ ID NO: 214854 - DNA, 638 bp, Homo Sapiens
cacgaggcgagatggggtctggaatgcagtggtgcgatcatagctcactgcagactcaaactcctcggctcaagggatcctcccacctcagcctcctgagtagctacgttgaaaggcatatgctactacacgcagctaatttttaatcttttgtagagatggggtctcgctatgttgcccaggctggtctcaaactcctggcctcaagcaatcctcctgccacagactcccaaagtgccgggattataggcatgagccactgcgcctggcagagcctggtttttttttaatacttaatcttagccaaaaggctgagaagcgatggagaatgtggatttttggacgtgaattctgttgggtttggttttccagtagcctattctcttcgcagcctttgaacctaacacctctttggccccagctgctgtctgcacttgcagaccctcctgcaagctcaccctgtactaccgccgggggatgccgtgatcaaggagcatcctgcctgtggctggcagaagaggccattcactgcccattcgaaatctcaggcctcctctgactctgtaggaccctgtgccagtccaaggggggccggggtctcagctctgttccacagtgcacacggcctgaccaccctg

SEQ ID NO: 214855 - DNA, 657 bp, Homo Sapiens
cacgaggttttttttccattgaaggtactttaattttgcagttattgattaattaaaaaacacagttgttttcagcatttcctagctacagtagtgcataggaaattccattctaaacaaagaagtaattaatgaaataacaacacaccttaacattttacattgataggttacagtttacaaggtgctttcacatacattatttcatttgattcttacaacaagcagaaaaaacagtgggaaagattttttttttcaggcttacaatgagtattttcaggccaatgggcagttaacacaagaatataccaagaatgagacagcaatacccataagccacaatatcgtttttggtaggttgacagtttgattcaactgggtattcagcatcggtgagtgagaaaggaattaggacagacaccaaggctcttatgatattcaaataattttaagaacactgtcagagataagaagaaagatgccctaaaatatattgccttattgagacttacttcaaagcaatatacccttcaaaatatcagataaaaagacaatcttgtcatcgactgtgaaagttaggaggaatcttacaaactgcctaatccagttcttccattttacagacaagagaactgaggctgagatcatactgatagt

SEQ ID NO: 214856 - DNA, 478 bp, Homo Sapiens
cacgaggaagcagtggtaacaacgcagagtacgcggggtcatgaaggccatgcagtctctcaagtcccggggctgtgtgaaggaacagtttgcctggagacatttctactggtaccttaccaatgagggtagccagtatctccgtgattaccttcatctgcccccagagattgttcctgccaccctacatctgcccccggagattgttcctgccaccctacaccgcagccgtccagagactggcaggcctcggcctaaaggtctggagggtaagcgacctgcaagactcacaagacgggaagctgacagagatacctacagatggtgttctgtgccccctggtgctgacaagaaagccgaggctggggctgggtcagcaaccaaattccagtttagaggcagatgtggtcgtggacgtggtcagccacctcaataaaattggagaggattatttcacattgaataaacttacagccaa

SEQ ID NO: 214857 - DNA, 466 bp, Homo Sapiens; identical to SEQ ID NO: 43816

SEQ ID NO: 214858 - DNA, 534 bp, Homo Sapiens
tgataggaggataaagctttgtaggaattagaaaagatcattctcttttttgttgcagaagcagtatagtatagtagttagagcatgggccctggagccaggctgcttggtgtcttcctttatttatttatttatttaattataaaaagtaaatataaagtgagctatgttgaccaggttcgtcttgaactcctggcctcaagcaatcctcctgcctcagcctcccaaagtgctgggattacaggcatgagccaccacaacctggcctgcttgggtttttctatcttggctctgccacctagctgtgggtccttggacaagttacttcatctctctgtgcctcaggtttttcaaatgtaaaattgggataattggatctgtctcatagggttgtgaaaattaatgagttaatgctcttagaagagtacctcatatgtaataagcacgcaactgttaattattgttaatgtagaagttaattctgtgtataaatcagatacactgtgaaaaaaaaaaaaaaaaaaaaaaaatggc

SEQ ID NO: 214859 - DNA, 735 bp, Homo Sapiens; identical to SEQ ID NO: 40138
  misc_feature (714)..(714): n is a, c, g, or t

SEQ ID NO: 214860 - DNA, 728 bp, Homo Sapiens; identical to SEQ ID NO: 40184
  misc_feature (618)..(618): n is a, c, g, or t

SEQ ID NO: 214861 - DNA, 694 bp, Homo Sapiens
  misc_feature (621)..(621): n is a, c, g, or t
  misc_feature (652)..(652): n is a, c, g, or t
gcctcagcctcctgagtagctgggactacaggcacttgccaccacactcgtctaatttttttgtatttttagtggagacagggtttcgccgtgttagccaggatggtctcgatctcctgacctcgtgatccacccgcctcagcctcccaaagtgctggtgagaggtgacagcgtgctggcagtcctcacagccctcgctcgctctcggcgcctcctctgcctgggctcccactttggcggcacttgaggagcccttcagcccaccgctgcactgtgggagcccctttctgggctggccaaggccggagcccgctccctcagcttgcagggaggtgtggagggagaggcgcgagcgggaaccggggctgcgcggggcgcttgcgggccagctggagttccgggtgggcgtgggcttggtgggccccgcactcggagcagctggcgggccctgccggctccgggcaatgaggggcttagcacccgggccagcggctgctgagggtgtgctgggtcccccagcagtgccagcccaccggcgctgcgctcgatttctcgccgggccttagctgccttcccgtggggcagggctcgggacctgcagcccgccatgcctgagcctcncaccccctccgtgggctcctgtgcggcccangcctcctccacgagccccaccccctgctccatggtgtccagt

SEQ ID NO: 214862 - DNA, 572 bp, Homo Sapiens; identical to SEQ ID NO: 44684

SEQ ID NO: 214863 - DNA, 574 bp, Homo Sapiens
  misc_feature (542)..(543): n is a, c, g, or t
agaaatgaaatgccaataagagggaactacagggtggttcacgtggacgcaagatggagacagggacacgggctccagggcgagagttgaaaaactacctacagggtacagtgttcgtcgctacttggtgtcaggcccactagaacaagggtccccaaccgccaggctgcggaccggtacctggcctattggaaccgggccacgcagcaggaagtgagcggtgggcgggcattcctgcctgagctgcacctcatgtcagatcagcactgcattagattctccagcgcacgcacgcgcgcaagggatccaggctgcgcgctcctcatgacaatctaatgcctgatgatcgggggtggaacagttttatccctaaaccattcccgtcaccccagtctatggaaaaattgtcttccacaaaaccagtccctggtgccaaaaaggctggggaccactgccctagaaggcaaatcgcctacgttacacagtgtaccatgtggcaaacacgcacatgtacccccgagtctaaaataaaaattttttannaaagaaaaaaaaaaaaaaaaaaaaaaatggc

SEQ ID NO: 214864 - DNA, 675 bp, Homo Sapiens; identical to SEQ ID NO: 50502
  misc_feature (601)..(601): n is a, c, g, or t

SEQ ID NO: 214865 - DNA, 481 bp, Homo Sapiens; identical to SEQ ID NO: 51875

SEQ ID NO: 214866 - DNA, 759 bp, Homo Sapiens
  misc_feature (745)..(745): n is a, c, g, or t
agcgcatcaaagtggagcgcaagcggctgcggaaccggctggcggccaccaagtgccggaagcggaagctggagcgcatcgcgcgcctggaggacaaggtgaagacgctcaaggccgagaacgcggggctgtcgagtaccgccggcctcctccgggagcaggtggcccagctcaaacagaaggtcatgacccacgtcagcaacggctgtcagctgctgcttggggtcaagggacacgccttctgaacgtcccctgcccctttacggacaccccctcgcttggacggctgggcacacgcctcccactggggtccagggagcaggcggtgggcacccaccctgggacctaggggcgccgcaaaccacactggactccggccctcctaccctgcgcccagtccttccacctcgacgtttacaagcccccccttccacttttttttgtatgttttttttctgctggaaacagactcgattcatattgaatataatatatttgtgtatttaacagggaggggaagagggggcgatcgcggcggagctggccccgccgcctggtactcaagcccgcggggacattgggaaggggacccccgccccctgccctcccctctctgcaccgtactgtggaaaagaaacacgcacttagtctctaaagagtttattttaagacgtgtttgtgtttgtgtgtgtttgttctttttattgaatctatttaagtaaaaaaaaaattggttctttattanaaaaaaaaaaaaaa

SEQ ID NO: 214867 - DNA, 605 bp, Homo Sapiens
  misc_feature (13)..(13): n is a, c, g, or t
cggttctccacgnaggaggcaagcaagcagcagccactgcagtcagagcaacagctggcccagttgacacaacagctggcccagacagagcagcacctgaacaacctgatggcccagctggaccccctttttgagcgtgtgactactctggctggagcccagcaggagcttctgaacatgaagctatggaccatccacgagctgctgcaagatagcaagccggacaaggatatggaggcttcagaaccaggtgaaggctcgggaggcgagtctgctggaggtggagacaaagtctctgaaactggaacattcctgatctctccccacacagaggccagcagacctcttcctgaggacttctgtttaaaggaggacgaggaggaggttggtgacagtcaggcctgggaggagcccacaaactggagcacagagacatggaacctagctacttcctgggaggtggggcggggactacggagaaggtgcagccaggctgtggcaaagggccccagtcacagccttggctgggaaggagggacgacagctgaaggtcgactaaaacaaagtctgttttcatgaaaaaaaaaaaaaaaaaaaaaattggc

SEQ ID NO: 214868 - DNA, 603 bp, Homo Sapiens
  misc_feature (19)..(19): n is a, c, g, or t
tgagggggttggggtgtgngtgggggggtacccttatttcctcgacacgcaactggctcaaagacaatgttattttccttccctttcttgaagaacaaaaagaaagccgggcatgacggctcatgcctgtaatcccagcactttgggaggctgaggcaggtggatcactggaggtcaggagtttgagaccagcctggccaacatggtgaaaccctgtctctactaaaaatacaattagccaggtgtggcggcgtaatcccagctggcctgtaatcccagctacttgggaggctgaggcagaactgcttgaacccaggaggtggaggttgcagtgagccgtcatcgcgccactgagccaagatcgcgccactgcactccagcctgggcgacagagccagactgtctcaaataaataaatatgagataatgcagtcgggagaagggagggagagaattttattaaatgtgacgaactgcccccccccccccccccagcaggagagcagcaaaatttatgcaaatctttgacggggttttccttgtcctgccaggattaaaagccatgagtttcttgtcaaaaaaaaaaaaaaaaaaaaaaatggc

SEQ ID NO: 214869 - DNA, 684 bp, Homo Sapiens; identical to SEQ ID NO: 44348
  misc_feature (653)..(653): n is a, c, g, or t

SEQ ID NO: 214870 - DNA, 505 bp, Homo Sapiens
  misc_feature (483)..(483): n is a, c, g, or t
caagaaatgattgaggtgatgctctggaataatggggactagagagtcgtgacaactaaatgcaatgtgtggtgtggtagcatttttctgggctgtagtccctagatgggtagagaagaaagccccggagagggtgaagaggtggggatgtggaagacgtcagagagagcacagggcagagcgcagagaactgcatccacaggcctcgccatgcccccagcatggctgcaccacaccagcagatgccttcgcttcccagcagtggacacaggtcactggatcctcacaaatgagcagccaggagaatgtttgcagcctggagattcggggctttgtcagcaccttgggaaggttttgttcttgggttttgggtttttggtttttggatttttttggtaacaatatcgctatatttattctcctgcagtacacttttaaattgcttcaacattttccccttaaaataaaaaagaacaacaacanaaaaaaaaaaaaaaaaaatggc

SEQ ID NO: 214871 - DNA, 560 bp, Homo Sapiens
agtggacagggcagtgctgaaggaactgagtgaaaaactggaactggcagagaaggctctggcttccaaacagctgcaaatggatgaaatgaagcaaaccattgccaagcaggaagaggacctggaaaccatgaccatcctcagggctcagatggaagtttactgttctgattttcatgctgaaagagcagcgagagagaaaattcatgaggaaaaggagcaactggcattgcagctggcagttctgctgaaagagaatgatgctttcgaagacggaggcaggcagtccttgatggagatgcagagtcgtcatggggcgagaacaagtgactctgaccagcaggcttaccttgttcaaagaggagctgaggacagggactggcggcaacagcggaatattccgattcattcctgccccaagtgtggagaggttctgcctgacatagacacgttacagattcacgtgatggattgcatcatttaagtgttgatgtatcacctccccaaaactgttggtaaatgtcagattttttcctccaaaaaaaaaaaaaaaaaatggc

SEQ ID NO: 214872 - DNA, 550 bp, Homo Sapiens; identical to SEQ ID NO: 54537

SEQ ID NO: 214873 - DNA, 621 bp, Homo Sapiens; identical to SEQ ID NO: 42328

SEQ ID NO: 214874 - DNA, 786 bp, Homo Sapiens; identical to SEQ ID NO: 41678
  misc_feature (734)..(734): n is a, c, g, or t

SEQ ID NO: 214875 - DNA, 455 bp, Homo Sapiens
ggtggcttcagtgctggtgccagcctgaccgccactctcacatttgggctcttcgctggccctggtggagctggtgccagcaccagtggcagctctggtgcctgtggtttctcctacaagtgagattttaggtatctgccttggtttcagtggggacatctggggcttatggggctgggatgaggagctggatgattctaggaaggcccaagttggagaatgatgtggagagtgtgccaagacactgcttttggcattttattcctttctgtttgctggatgtcaattgacccttttattttctcttacttgtgttttcagatattgttaatcctgccagtctttctcttcaagccagggtgcatcctcagaaacctactcaacacagcactctaggcagccactatcaatcaattgaagttgacactctgcattaaatctatttgccatttctg

SEQ ID NO: 214876 - DNA, 474 bp, Homo Sapiens
actgcagccagctcatccagaccatcgaggacacaggcaccatcatgcgggaggttcgagacctcgaggagcagatcgagacagagctgggcaagaagaccctcagcaacctggagaagatccgggaggactaccgagccctccgccaggagaacgctggcctcctaggccgggtccgggaggcctgaggagccgccggcagaggtctctccccagcctcaggcagggatttggggtgctggaggcagtggccaagcacatgccctagctacttcctccgctgtccagttcctcctgctgcggccttggacccagacccctgcccactgaccgcaacccttatatggggtgatagtccagcatgtggggagctcggctgcagtttattggggacggtactgtgggttgggggccttggatcccaaataaatgagtagttcctctgcagtctaaaaaaaaaaaaaaaaaaaatgg

SEQ ID NO: 214877 - DNA, 768 bp, Homo Sapiens; identical to SEQ ID NO: 45991
  misc_feature (686)..(686): n is a, c, g, or t
  misc_feature (757)..(757): n is a, c, g, or t

SEQ ID NO: 214878 - DNA, 655 bp, Homo Sapiens
  misc_feature (630)..(630): n is a, c, g, or t
gcactcgtggcggctcagcctccctgagcacatggtgcttgctccccttcagtctatgcagcagaaccaggatcctgaagtatttgtgcagcctaaggtgttatccagtgccatcccggttgcaggcgccccactggttactgcaacgaccactgcagtgtcttcagtcctgctggccccaagtgttttccagcagacagttacaagatcttcggaccttgagaggaaagccagctccccttctcctctaactattggaacgccagaaagtcagagaaagccttccattattctcagcaagtctcagctccaggatacattaatacatctaataaagaatgattccagcttcctcagtacacttcatgaagtctacttgcaggtgctgaccaagaacaaagacaaccacaacctatgactggagcagaataagtctaaaggcagagccccagcctcagagacaaataggcttcatcatggaaacttctgagcagaacattgagtttgagaatcctgaaattgagcctatgagaaagagactcatttcttaagaatgttttccaagtgacattctcagtgataatggaggtttcactgtgaagcatcaccagcagatccttgttttgacanaaaaaaaaaaaaaaaaaaaaaatgg

SEQ ID NO: 214879 - DNA, 729 bp, Homo Sapiens; identical to SEQ ID NO: 54672

SEQ ID NO: 214880 - DNA, 704 bp, Homo Sapiens
  misc_feature (666)..(666): n is a, c, g, or t
ggcttggctgtctacacggcactgctgaacctcacatccgactgctcggtgctgtctggaatgacggccttcagggcagcgtgacagaagcggttcagggccggcaaatttgttttctgctcaatgtacagcctcagcttgtccctgaaggtctccccgagaaagctgtagatgagggggtttaggcagctgttggagaaggcggcgaggttgacaatgtggcccgtgagggggtgggcatggcggaaagactgcttgcagggagcggccccaggctgcgtccgctgcaggaggtgcacgctgatgaagacgttctccggcagccagcagacgaagaagaccagcaccaccgcgaggatcatgcggagcgccttctgccgccggggccgcagcccacggtgccggtgcgccctgaccagcacccggacaatgagggagtagcacaggccgatgatggcgaagggcacgatgaagcccagcgtgacctcgagccactgcacctcccggacatccgcgaaacagaagcaggcctcgtcggtgtgctgcaggtgcacggcggtgaagggcaccagcgtggctgacacggatgccatccagatgaggccacagctcagccgggcgtggtgcttggtgcggaacaggctgcagcgcatggccctggccagngcgatgtagcggtcgaagctcatccaggtgaggaagaa

SEQ ID NO: 214881 - DNA, 601 bp, Homo Sapiens; identical to SEQ ID NO: 48483

SEQ ID NO: 214882 - DNA, 583 bp, Homo Sapiens; identical to SEQ ID NO: 40323
  misc_feature (393)..(393): n is a, c, g, or t

SEQ ID NO: 214883 - DNA, 672 bp, Homo Sapiens
  misc_feature (13)..(13): n is a, c, g, or t
  misc_feature (15)..(15): n is a, c, g, or t
  misc_feature (19)..(19): n is a, c, g, or t
cacgaggccgcanangacntttttttttttttttttttttgtttttttgagattcagttttgctctgttgcccaggctggagtgcaatggcatgatcattgcacctctgcctcccaggttcaagcattttcctgcctcagcctcccgcgtagctcagattacaggcctgcaccaccacgcccagctaatttttgtatttttagtagagacagggtttctccatgttggccaggctggtctcgaactcctgacctcgtgatctgcccacttcggcctccaaagtgctgggattacaggcatgaaccaccgcgcccggcctttttttttttttctgagacagggtctcactctgtctcccaggctggagtgcagtggctggatctctgctcactgcaacctccgtctcccaggttcaagcgagtctcctgcctcagactcccgagtagctgcgattacaggagcccaccaccgcgcccggctaatttttgtatttttagtagagacggggtttcacccaccatgttggccaggctggtatcgaactcttaacctcaagtgatccacccgcctcggcctcccaaagtgctggtattacaggcatgagccaccgcgcccggccagtatttgttcttttcttcatttttcacgtcaggagactgcgtttcagaatag

SEQ ID NO: 214884 - DNA, 698 bp, Homo Sapiens; identical to SEQ ID NO: 47503

SEQ ID NO: 214885 - DNA, 755 bp, Homo Sapiens
  misc_feature (682)..(682): n is a, c, g, or t
  misc_feature (736)..(736): n is a, c, g, or t
cacgaggttttttttttttttttttaatagcatcactggtttattccgtttcatccagggcagctgttttaaaaacccgcacacaggacagtggctgtctctgccgcacgtgatctacataacgccatgcatagatcatcagcacgaggcaggtaagggctgcagctgagtcaggatccactcaggcttacgtggtctggtcctcagcagacccttcctagaagacacgaaaacacattccgccttccaagtttctaaaccagaaacacctgcgttttgaaacaggtggtcaggtactaaacggagagggtgtaccacgtgggaggggccttggcatgtctaggcaccgggaagactgtgctccaaattaggatgggccctggctggctcccgggcaaactgaggcagaggcccctgttcttttttttttttttttttgagacagagtcttgctctgttacccaggctggagtgcagtggcgtgatctcggctcactgcaacctccgcctcccgggttcacgccattctcctgcctctgcctcccgagcagctgggattacaggcgtgtgtcactacgcccggctaatttttgtatttttagtagagacagggtttcaccatgtgggccaggctggtctcgaactcctgatctcaggcgatccgcccacctctgcctcccanagtgctgggattacagatgtgagccaccacacctggtctggagccctctgttcntaaatactcttcaaaatca

SEQ ID NO: 214886 - DNA, 454 bp, Homo Sapiens
cacgaggatgactttttttttttttttttttttttgtgtctgtggaggtcagcgtcagagcacgctgctgagaggtctgagtcctgctgatgcctggagtcgcggtctcggtgtttgtctttggatttctttttcttctttgattttttgtgcttctttgctttaggctcttctagaggatccttctgttcgctcctccgggctttcttttcaacatgactgtcactgttctccacactgtcgtgtctccgtttccgggactttccattttcgtgttcgtgaaaccgatcagagaggttacagttgtctccggctacaagtgcagttctgtcgtgggagaagcggtcggggtgcggggcgagggcgtggggcgcgcctgcgcgggggctgctggggcggtgccgctccctctcccgggccgggtcgcagcccctacgggcccggttgtggtcct

SEQ ID NO: 214887 - DNA, 442 bp, Homo Sapiens; identical to SEQ ID NO: 55841

SEQ ID NO: 214888 - DNA, 435 bp, Homo Sapiens
cacgaggggaatatgcaactacttttatttacaaataataccaacatctctttagacaattcactctcatgaagaaaccatttcatctactaaagtagttcatcaatgttacaatccttagacaaaaaccatcagtttagtacatagtaatagtaatcaattacacaacagaaaaaatatcccaatcatattataaacaaaagccattaagtatctagaaataagtaaaacaagaaatgtgtacacttttatgctaaaaatataaagacttactaaagcacataaaagaatacctactgaaataaagacacaccaggtacaagagaaaaactcaatgtcgtaaagatgtcaataatgattcttttctttctaatactatggcagaggataaatattgaaactcctctattaaaaggatttaccggccgggcacgt

SEQ ID NO: 214889 - DNA, 535 bp, Homo Sapiens; identical to SEQ ID NO: 55116

SEQ ID NO: 214890 - DNA, 636 bp, Homo Sapiens; identical to SEQ ID NO: 54990
  misc_feature (492)..(492): n is a, c, g, or t

SEQ ID NO: 214891 - DNA, 770 bp, Homo Sapiens
cacgaggccgccccactttttttttttttttttttttttctgaacgtgtgtcaccatttattgtagtttgcgttaggaattgaacagaggacattgtctgtggagggaaaaaaggaaaagaaaaaagaaagtatgctttttatagacttaatttcttcagaacactttatggtttcaaatccttttttttttttaccccaaaggaaatttgagaattcaagtatgttaagtagggagcagtaatacaaaaagtcttatacttgtgtgcgcgtgtggctgtgtttgtctgtgtgtgttgaaaccggcagacatactcccacattcttgcaccctcttttgctttggtaaggccaaacacatcacacaaatgaccctgcctcaaactcacacacccaagggttgaagaattgatttacccccagaggataactgtgaaggtttcaaactgtcacgtagcattaaaaaaaaacccaaccctcatctccccaaaatataagtcacataagtcctgatacacttacacccctagattttgctgcagctgctcctcagatgccgaagagaggcttatcacaaggaccagagcagcaggattttctttattttgtttagaataaaaaaatcttaaagggacatttcaaaagaaaaaaaaaactgaaattcaaattctgaaaatatcttgccttttttattaatcatgtcatctaacaccaattaaaaaaaacaatatgtgaatatgatataaaatacgatcccaggattaacacttg

SEQ ID NO: 214892 - DNA, 388 bp, Homo Sapiens
agtgtgctggattcggcagaggaggactacgcgtgtccttgggcggagaagggaggtgactccggcggaagaggacaaggcagaatgcaggcccttcgggtgtcccaggcgctgatccgctccttcagctccaccgcccggaaccgctttcagaaccgagtgcgcgagaaacagaagctcttccaggaggacaatgacatcccgttgtacctgaagggcggcatcgttgacaacatcctgtaccgagtgacaatgacgctgtgtctgggcggcactgtctacagcttgtactcccttggctgggcctccttccccaggaattaagaccaagaagcctggggggcctgagagacttgaacaagtgtcaataaacgctggcctctgaaaa

SEQ ID NO: 214893 - DNA, 396 bp, Homo Sapiens
gtcgtggattcctcgagtactgtacctttgtgcttcacacgtgtcactaacgcacgtgttaccagagtctcacgaccctacggtgctatttttattggtgcaaaattaaaccctctcagctgaccgttgctggataggatcagaatgcaggaaaagagcctctatggcaatacgattgtccttttttcgtttcagagtcaaatgtatctattttccattcgttaacttgcattacatactgtacccatggaatttttgttttactttttggggctggttttgaaaggaaaaaaaacggaagacaaacattggacgccattatacatgaaaattatatagaaaaattaatcatttcattggaagcaagttgaatatgtgtaataaaatgtttttcca

SEQ ID NO: 214894 - DNA, 322 bp, Homo Sapiens
  misc_feature (2)..(2): n is a, c, g, or t
gntggaattccagacttgagccactgacctggccatggggtggtttcttaattagatatagctgaaaagaacgctagaccaaataggttctctgccttgccttttcgtttgttttgttttagctattatcagggaaccaaaaactttaaggagctagtactggtcttaatttttaataactagagatagcagagttagaaactaagttcaaagtgagagaacagctgcatttgtctttctgacctcatgcaattcctaggaaactctgtgttctgtgatttagtcaggcaataaaatgctctcactcctaaaaaaaaaaaaa

SEQ ID NO: 214895 - DNA, 321 bp, Homo Sapiens
cgtgaattcctcttgaactcgggaggtggaggttctggtgagccaagatcgtgccactgccctccagcctaggcgacagaatgaaactccatctcaaaaaaaaaagatgtagaactagataggcctgctcattagaatatcaagatggctccagcttgacttttctttcctaatttatatgtactagtggctttattttaaatagtttcctttgaaaataatcattttgaccagctattatgtgtttggtggtaagggacaagttgttatctgtaccatgccaaatatcctaataaaaactggaaaacataaaaaaaaaaa

SEQ ID NO: 214896 - DNA, 550 bp, Homo Sapiens
  misc_feature (364)..(364): n is a, c, g, or t
ttttttttttttttaaactcattctttcattaggtcgctcttattcatcttcacctaacaccaagcagcaataataactacaaactcaatttttcttctctgggcaccagatctgacaacttttcaattgttaagtattaatttaataaaattctatctatctatctatctatctatctatctatctatctatctatctatcaatcgactgactgagggtcttgctctgtcacacaggctggagtgcagtggtgtgatgatagctcactgcagcctcaaactctggggctcaagctaatctcccgcctcagcctctccagtagctaggactacaggtgcacagcactacactcagctatgattntattttattaagtgttctttatattcattatatatctttaacatactatatatcatagattctaagatgctttggtgctggtactgtttgtcacaactatgacttgaagtcaccatcagctgtaagatgcatcctgacttcagagagagaaacatgttcaataatgtgccacttaacaataaaaga

SEQ ID NO: 214897 - DNA, 418 bp, Homo Sapiens
ggtagtaacaattacaattataatatggctaccatatattgagtatttactatatgccaggcactgtgctaatgctcacaacagccctaagaggcattatctttacacaacagtggaataaactgaagctcagagaagttgacacagcaacatggctaataagtggcaaagctgggatttgaacccagatcgttgttgatgttctccagcacctcaccctgactatactcttgcaggctggtgaaagcaaccagggcacccctactcccaggagtgaaagcagtggctatatttctctttccaatactgtgtgggctctactcggacaggggtggtggctggatttgggcaaatatcccacactccctgacactcactccaagggtgctgtgatggtggaccggggctagagacccca

SEQ ID NO: 214898 - DNA, 535 bp, Homo Sapiens; identical to SEQ ID NO: 60273

SEQ ID NO: 214899 - DNA, 576 bp, Homo Sapiens
ttttttttttttccctaaatggtatggccaaaagtcagagttaaaatatatatagttagattccaacttcctccttcactctaaaaatagaatccaaacccactcttcatatatgcttccagaatggggcttaagtaccaatctctgctttgcaatgggcacaatcttggtcatgtcctgaggctctctaagaaaagagaggatctaggatgggagagctagaaagttgctaactgggaagaacaaggccctgagggcttggtctaccaatctgggaagatttgaaaacaaacttctcgcaactgaaggaaggctgaaggctgctgcaagtcattgagtgactttaggatgagcaaaacattgggccacttcctaatgccctatgtgtatagtaccagaagcaaggtctcagacttaacagacccagctctgttccaaggtgagtctgaaccaatagaaagcaaacatgtgcagatatccaaacaagactgctcatgcaagtcggggctggctacccgtcttaggcagcaacagcagagctccagggagcttattcaatatttactgagacttcga

SEQ ID NO: 214900 - DNA, 436 bp, Homo Sapiens
ttttttttttttgcagagacagagtttcctcataatcaccctggctggtctcgaactcctgaggctcaagcaatccgcccacctaggcttcccaacattctgggattacaggcacaagacaccacgccagacctaaaatttttttctatagcaacctgaactgacttaaccaggagatttcaagaaaacaaatgaaaacacaatgaatgtgggagagaaagagaatgagttcaactcaggccaaatttaaaatggctgatgtatgtccaagcagaataatcagtaggtagttggatacgtgaggctgaagcattgagaagagtctgggccaaaaataaagacacagtgaccattcatagttacattagatagaactctcggaagggtgtgaaagaggacaaaacatagaaaactgactggggttttcagatctttg

SEQ ID NO: 214901 - DNA, 451 bp, Homo Sapiens; identical to SEQ ID NO: 60578

SEQ ID NO: 214902 - DNA, 619 bp, Homo Sapiens
ttttttgtttttaaacagaacaccactttatttacaaattatggtcacagaacagtttagtactgtttctaacatgaaacaaatggaaatcaatgtgcaaaacataaccatggtcaccaaattatacctatgattagatacacagtaagaaaaggatcttgtaaagaaaagtatacttcccatacttaaaatcttcagaactgaatttgaaagtataaaaaaacaacaattcatttaaatggattggtctagcgcactgaagattaaatatatttgttagctataaatttaaaaattgagacattagcttaaaaagtattttaaagttcttatgaagaaaaaaacatgaaagtgaaacagacattcacttctctggaaataattcagaaaagccagtagtgatagaaaaggacatacatatacaagacaacagagatgaacatgaacataatctgcacctttagtataataaaggaattcagttaaatctttctgtgtggtccctaaaaagtccagaacagaaacacctcttttcaataggccacaggttaaatctattcactacattgtcaggccaagtcctccagtaggttattatgaatctcgagaataatttatc

SEQ ID NO: 214903 - DNA, 435 bp, Homo Sapiens; identical to SEQ ID NO: 60749

SEQ ID NO: 214904 - DNA, 409 bp, Homo Sapiens
taacaaaaggaaagaaaaaaactcatgccagacttgtttgtctgagatttatcactgtagggatcccagagacccccatggaagctggctttagtggtggctgcggctggggactggacagaacaggtcagtgtgagcttgaactagactgcgcctgcctcctggtgcacgtactgtgtttgggcatgtgttggctcttaaaatgctgttcatccatcaacatactgaccccttttgcaagtttcattgttctattattgtgactataaaagtggcacttgttacaaaaccagtttctgtgatctagaaccgtgttctcaaacttgcatctatcagaatcatctgccccacctctagagtgtctgatcagtagctttggggtggggcctgagaatctgcatttctaaca

SEQ ID NO: 214905 - DNA, 417 bp, Homo Sapiens
aggtagaaatcatttcctccgccaccccaggaaaacatagatacattatcacaaatgtattctccaaaatcagtcgtaaacttaggtcttacaaattaaacagcatttttttttcacacatcctgagctgttaaatgaaaacaattatgagtcatcaattccaggctcgagaattccactttggtttacctggatcaaggttactgtcaggccagctacctgcctagattccagactccagcctttctgagggcctttccttcctgagttccattagcaaaagaggtattgccggatgtaattttcccttgaaattacacaacctcatccacttgaaactgagactaagctactaatcccacctctgtgaagagcgaagatctcaatgcatgggcggatttgagagcccccttctgt

SEQ ID NO: 214906 - DNA, 380 bp, Homo Sapiens
agtagagacggggtttccccgtgttggccaggctggtctcggactcctgaccttgtgattcgcacgcctcggcctcccaaagtgctgggattacaggagttgagccactgcgcccggccgctttcttttggttatcataaggcgggcagtagctgaacttctcaggagtccaagctctgtcattctttaggctttgtgcttctggataagttacctcatcatccaaatgttactgcaaggactaagtgagatgtagaggcagtgggcaaattgtgtaaaaatactactgtttcaagtgttttgatgttggagttcatcttgccagccaagggatgatgatactttgattcttcaggatgatcagagctcagacttggacg

SEQ ID NO: 214907 - DNA, 426 bp, Homo Sapiens
aacacgtatgtgtctgtttatttcaaggtgtggaacacagacacatccccagatgggggaggaggggagacaaggacacgggtacaaaaactggaaacaaagccacccgctacagctcagacggcaccgccacgatgtggtttaaggctctgtacatatatatatgtgtagaggctcacacacgcgcacacgcacacgcagagcggcactgacacggggactgaggccagacgtgaaggctgactgcagctcgcagcccacctaaaatattgcaattatgtttattaaaaaagtgtaaaatgggaagactgtgcatcggtctgagtaaagtggcgaacttgagcctccccggcctgggtgcggggccagctaagccacacccctgcgccccccacacccctgcacacacctgcacccacaaccacc

SEQ ID NO: 214908 - DNA, 703 bp, Homo Sapiens; identical to SEQ ID NO: 48851

SEQ ID NO: 214909 - DNA, 858 bp, Homo Sapiens; identical to SEQ ID NO: 45241

SEQ ID NO: 214910 - DNA, 764 bp, Homo Sapiens; identical to SEQ ID NO: 50007
  misc_feature (762)..(762): n is a, c, g, or t
  misc_feature (764)..(764): n is a, c, g, or t

SEQ ID NO: 214911 - DNA, 906 bp, Homo Sapiens
  misc_feature (814)..(814): n is a, c, g, or t
  misc_feature (849)..(849): n is a, c, g, or t
gcccttttttttttttttttttttttttttttttccccacctaaaatttatttgaaaataaattatggcaggaattcacctgttaagacaatggtataacttgtcacaacttcatcttagaaaatcggatttaattttcatagctattgaagttagaggctttattccttttttatttttttttatgtttttatttttttttaagacaaggtcttactctgttgcccaggttggagtgcagtgatgcaattacagctcactgcagctttgaattgggctcaagtgatcctcccacctcagcttcctgagcacctgggaccacagatgtgtgccacttcgcctggctaattttgaaaaactcttttttgtagagccggagtctccctatattgcacaagctggtcttgaactcctgggctcaggcaattctcccacctcagcctcccaaagtgctgagattatagctgtgagccaccgtgcccagcctgaagctagaggctgttttcaatatgtcattattctcatttggttaggataagattgaagggaggggtagaaagtttcaaaggcggagagtttcaaaggcatcatgttaacaggcagcaacacgatcaagccccacacgaaggaaccaccaagactggagtgtgcattctcattgtaggaagtcttctgctaacttgttgaattcatctgcaaaacgcaaatgcaggttgtgtttgccttctggcatcaaatgcagccgtgagcctttcacgtgcttatgaatgaagtcggcatgaaaccgtggggaccagaggatcctttctcaccngtgcacaatcaagggcggggcactgggacccgggngcagcaggttgccgggcagatgttaccattcttggggaaatgttttaaaactgttct

SEQ ID NO: 214912 - DNA, 992 bp, Homo Sapiens
  misc_feature (849)..(849): n is a, c, g, or t
  misc_feature (859)..(859): n is a, c, g, or t
  misc_feature (920)..(920): n is a, c, g, or t
  misc_feature (926)..(926): n is a, c, g, or t
  misc_feature (940)..(940): n is a, c, g, or t
  misc_feature (961)..(961): n is a, c, g, or t
  misc_feature (992)..(992): n is a, c, g, or t
attttctgtaaaactctgtaaataaaatacaaaaccaagggatgtggctgggcagcggcagggtggccaagccccagacactgatttgtggcaagggatgtgctgagccgaggctgggaggcacttgactgcaggcactgactctccaaccccaggggcaacagaagaatatattagattttcattgctaggaatctgtgggggaggggtatctggagccagcccttaccctccctgccagtgcctggtgagccctgaaagtggggggaaaggggcaccaggaacccatgggtgaatagtttagaatgctgtgctggccatgctgccaggcccaaagatgcggggcagggcgtccagggactcctccagccgtcgatgggcagactgtccctcttctccacactgctgtaggctttgccgggcagcttccctcacagcttctgtgtcagtttggcagaggtacaccaggggctcaatgccctcgggagccttgatgcagcctagggccaggcagccagccactcgagtctgcacgtcctcatcctccagctggtccaggaagcacaggagggccctctcccggaaggtagggcccagtgacaggctccggagctgggtgctgacagcagccatgaccttgttgttgccatggacgagcagggagctgagggcccgcagcccgtcccttcgcagacgcccctcgggcgccaatctcagggccttcagcacaacagcctgatcatccgagttcagattccgcaccagtagcacctcctcagcggtctcagtcacgtaggccctcaatggtgggggctgtccaaaggtttccacaaaaactccagaactggnaagactgtgnagctggctctccaggcccctgggctgggggcctttctggggcaagcttctgcccccagggncatccntcccagggaacttncacaacacaccagccctcagnccccaagccctgggttggggcccccaaggan

SEQ ID NO: 214913 - DNA, 891 bp, Homo Sapiens
  misc_feature (742)..(742): n is a, c, g, or t
cgccctttttttgtcccttctgtctttcctgctcatccttatttgggtattagaggtgtcagttgaggagggactttagctgaggttaagccttcttttgggatttgcattgtaattgagggccctggaagatctctgagactcaaaatcaggtgaagctaggaagatggagctttaaggagcatggctagtgctctgagtaggaccgtaaccgcctccgtgcgtggcatatggtccctgcatgctgttcactctgtatagtacttagtattcgctgaggctaagaggcctcaggtgcctgggcttctgcccttggactcctggatatccagcctagtgctaattgaatgctaagcagtggtaattcaaaatgagagggtcccctgcctctagagtcatcatctaattggggacaggcagacctagataagaaaagcagagaactactttggaaaacagtttatctgctgtaattgaacattcagctaccctataacccagttaatccaatactggggataaatcctagagaaactcatacatgtacaccaggagatgtgtacaagaatattcatagcaaccctattcacaaaagcaaaagcctagaaataacccagatgcccatgagcaagagagtggacaagtaaactggaatattcacataatagaacattatacaattgtcaaatgaactataatgatacctaaccatatggatgaatctgagcaataaaataattangtgaaaaaagtttaatcccagaagagtaaatgtagcatgatgcccttttctaaatgaaaggttttttttctttctatggagtttattctttacatacaatataggttcaataatttttaaataataattgtttaataaaattttttgat

SEQ ID NO: 214914 - DNA, 653 bp, Homo Sapiens
tttttttttttttaacagcaaaaattccctttactgaatatttttaaaagtagacaattatcttgtggagaatagtcttgagaatctttcaagatggaccaggctgttcttgcctgtgagttgtctgtctgtgcgcctcatcttcagggagagttggtggaaacaaagcaacaggcaaaatccatagtcaactggatagaaatagctcaaaaaagtcctattcacaaggtaaccttgaaggtgacaagctggaaatctaagcttcaggaagccacagcatttggcacacccaggatcacacatatatccatcctttctggcaccctcttcgcccagttgatcatgtgaaccagctccctgtctgccaggttggtcagtaagcccatcatcgaagcttcactgaagggtctggtaggatcatactcggaatagagtatcgggggctcagcatccaacaaggcactgaccatctggtcggccgtcagggacaaggccaggctgttcttcttagagcgtttgatcatgagcgggcttggccaaaggttggcagctctcatgtctccagcagaccccacttcacccctgccctccccatcatctctctggcgcttgtgtttcaacattctccctcctcttcggtcttttcgtatccc

SEQ ID NO: 214915 - DNA, 445 bp, Homo Sapiens; identical to SEQ ID NO: 60455

SEQ ID NO: 214916 - DNA, 593 bp, Homo Sapiens; identical to SEQ ID NO: 59754
  misc_feature (351)..(351): n is a, c, g, or t

SEQ ID NO: 214917 - DNA, 549 bp, Homo Sapiens
  misc_feature (432)..(432): n is a, c, g, or t
aactatgatttatcagttagtaacaataaaaaagcaataaaaacaacaatgaaaagcatcactgtatttttctttgtactttcttccaaggccttaacagtacctagacttcttttattcctcctgcaaaattctgaaatctttcttcttgtttgaaaaataaacctaaagcctacttgaggctgctgtctgagttttctgaataaatctgaaaaactcaggactgaaatcagaagtgaacataatgaaaacaattaggcttcagtcaacaaatcactgatataacaaaactttatactattatgaattatttttatgaagggatagcaacatatttaggcttcaatctgtgtactacctcatgagagattcgccgctgttcaatatacgccataaactgtgaactaaggctgtctgggtctggtcccttgngctgtctcacctcggcctcctcttcctctgcggtgcagctgtctatgtagtcaatctgatccagatcatgttccactgtatacaccacacacacacccacacacacacacacaccag

SEQ ID NO: 214918 - DNA, 706 bp, Homo Sapiens
ttgcaggaactgaaaaagactatattgtttacccttccgtctgtggaacccacatccctgcaccccagctgtagtctgctctagaggctggccctggtgtggggctgctggtccccatcttccagacagagcctagcagtgcctgggcagaggcttgtgggagctgaggccacactcagtctgtcctcttgagcacgtggatgaagtagcagggaatgtaggtttggcctggcttgtaaggcttgaagtcgcccaggacgctgtgctggcacttacctccgaaggctgcttggagcagctccgtgaaggatgccagacagtgtgggtagtaggagagccggaactttactcagccaggagagccatcctggccagcccccggcacctgcaccgtatagtccagggtcaccatgtgggccttgttgttcactatcagcactgatgttgtgacgtccttggtcaagtcactcttatagtagatgttcttccctgggggtgcacagcctgtactgaggatgtggtcgtagttgcgatgatcaatgaccagtaggccccctgcccgcaccatgctcgcaatgtttttcagcgccagccggtgctcactctggtcccctttgcagtctggcaagtgagcgaaactgtttccaagggagatgacagcatcaaagccaacctctgctgactggggcacatctttgtccagagt

SEQ ID NO: 214919 - DNA, 436 bp, Homo Sapiens
taaatctgtatcatatttgtggagaatggagtgcaaggagtccatttagattagatggttattgtagtagctctggctaagaaaaaaatggaccaggatagaaaatgaaaagtagtatacggatttcaactgtctttggaggtagaacccaaaagacttactaatgggcttagcaaacaggttgggagtttttttatctgtatgaagaggagtgagtggtaagcattattctttggagtgcttctttaccatacctatggtttacttaggcatccatcctacatcccctgcatggtacctgtgctgcaagagatacattgtgttttccaacagagatcataaactatcaaagtgagaggaatttaatgaaataaggcaggttataaatacttcacctatgacataagcaactatttttctaataaattatttattg

SEQ ID NO: 214920 - DNA, 444 bp, Homo Sapiens; identical to SEQ ID NO: 58121

SEQ ID NO: 214921 - DNA, 441 bp, Homo Sapiens
tttttttctccaatttctatgcagggtgcacagttatattcaaaaaaaggttttctaaatcaatgccctggcaaaacacattctatctccatcatgtccttcacagttaattccaaatcctaatctctgagtgggtcaagaaactagtcttatttgtagtcccagcacctggcacagtgtctggcatacagatgatgctcattaaatgtctgctgaaggagtggctggatgaatcatcaccttacagaccctttggaatgggacgcactttcacctccacattcagagcatatgggttctcaccctgtgagcccggggcttccacccaggggagcattccagcaaagaggcaccagggacaccagggaaagtgccctgctgtcgtctgagaagcacacatccttccctgggtggggcaatggtctcattacacacagccaa

SEQ ID NO: 214922 - DNA, 371 bp, Homo Sapiens
ctcttaacaatttttattgaagaaaaaataggctgctttgcaccttaagtgctcctctgtcttctctcctccctccaaccaacccctgccagccccacactctcatcacaaaatgggggaatactgcagtttttaagatccataaattaattaccaaataatacacaagacctgggtgaggccacatgagaacactttggagaagtatcttttttttttttttttttttttttttttttttttttgaaacggagtcttgctctgtcccccaggctttgtctcaaaacaaaacaaaacaaaacaaaacaaaacaaaacaaaaccccaaatttttgctgaatgtcaagggaaataacaaatttgcagggagta

SEQ ID NO: 214923 - DNA, 442 bp, Homo Sapiens; identical to SEQ ID NO: 60375

SEQ ID NO: 214924 - DNA, 575 bp, Homo Sapiens; identical to SEQ ID NO: 61255

SEQ ID NO: 214925 - DNA, 467 bp, Homo Sapiens
ttttttttcatttatttaattttaaatacaagcaggttctccctatgttgcccaggctggtattgaactcctggcctcaagcaatcctcccacctcagccttccaaagtgctgaaattacaggcacaggccactgtgcccagcctagattttaaaaaaagaaaattcaaagaaggaggcaaaattacaggccaataatcacacccttggtatatatgatctcctatttgtttcacttttcattagaaatttcttgagcatattaaaggaaacaaaatgcaagcttcatatgaaggcagggattttttgggtctgtttactggacagatcccttacactattaaaacagtgcccaatacaaaggaggtacccaataaacatttgctaaatagaaattttattgtcttatgacaactaagtgtaatgtggtatgacaaatgggatcctagaatataaaaagaacaactg

SEQ ID NO: 214926 - DNA, 509 bp, Homo Sapiens
tgcctcggggttacgagtcggctgctatagctttcagaatcacactcacactaccacattcaaacgcaggaaatgtgagtggcagcaaaaagaggctttcttcacagaactgtctcccattctgatcaaaaaagaaaatctttccaagaaccctcccccaggagactttctttgattggccagaaccaatgagatgagaccagtctatgccagtcactgggattactaaagaattatcatgaaaggtttaagccaatgttaatacctcccctaagtgcattgttgcttactcaatatctgaacaaaattacggttcttgagcatgaaagaagcaggcaccagggaagactatcagttaggtaaccagtaatgcctgcctcactggccaacagaccagaaagtcgattcttgataaaaccaaagaatagtagaattcattctatttaatgggacgatcacacagatatcacagaaaacatgctccccttaagagctaacagccaggtgcg

SEQ ID NO: 214927 - DNA, 448 bp, Homo Sapiens
tatcttcatgtttagcactaggttctggatagggaaaattcttcccaggcttttggagttcttcaattccaacttcataagttggatcagcaatttcttttgcagtgcacaggttaatggagttgccagagtgtctcagatatgaaattgttgcctcgtaattatgtggttcttcaaattctgcattgaaaagcctctctggagacagggagccctcttccacagtcacttccccctgagtcttgggaacagcagctggctgcctctgaaaggcctggaggttcacgatgggaggtcttgaaggctttgggggaggaggacccagggagtcgatggagggcaatggctttgttttgggaaggtggtgatgcctgacatctggctgtttttctggggcctgactggcaagctcacactcatagatgggctggcaggggctgcttgccgg

SEQ ID NO: 214928 - DNA, 456 bp, Homo Sapiens
ttttttttttttttttcagcttgagaaatacttttattggtactctcattccaaaaaataactggatgagacattataaatatacgatgatgaaaatcatttggttacctgtagaagctgaactaatgtagcaagaatagtaatggtaaaacatagcaactcatccacctaaaaatagacacgcagattcattctatgaagtaattgatctatctgaatcaacagaggcatagtatatgggtattacacacaggagctctacagagatctgtaactacccctaaagtaacgggaccatctttctacatcacacatgagaattatatgtcggcattatacagagatttccaagtacccctaaagtaatgggaccatcattttatatcacatatgagtattatatacaggcattatagggagatttataactactcccaaagtaatgagaccattttt

SEQ ID NO: 214929 - DNA, 335 bp, Homo Sapiens
atggctgtgtagttaagaattaagaattgggttttttaaagttgtggagagtagctgatgaggagatgggacagcataatattcaactacggtatttctttttcaaagcttattcaggtaaaacagtttcattaaagggtagaggccctctttagcaacatgctagtggagaatacccccctttgcctgcccaagacatacagaaaagaaggattgtagaaggtcccacgaaaacattagaattaggaggctggaatttaaacttagcaaaggaaagcagtatcggaacagtggtttcaagaacccagtcacgtcgcacattctcaaggatgctg

SEQ ID NO: 214930 - DNA, 482 bp, Homo Sapiens
tttgatgaggggaaaacagctttcttttaaaaaaaaaatggggaggaggacggacaggaaaagtggcaggaaccagggagaccaaagtttctaaaacaatattcaaggattataaaccacactgacacccggaatctacctgagacagactcacgtcagacatcaatcacatggcttctgattcttagtctgcctttttctggatgtgactgagtggacttcccttctgcagctccagtaggtacagatggctgtatcacactggcttcaaatgcataaattaacagcaaactaatggttttcttccagctagcctataattacacatgtacacatttatccacctgggcaaaatttacaactggctgatttcccttcaacaccacaggacgagactaaaggaaggtgagtaagagtccagccatggtaaatctacagcaaaaggtaggactcaggcaaaatatgcatggcaaaagacagcc

SEQ ID NO: 214931 - DNA, 1000 bp, Homo Sapiens
ccctccctttcctgcctgtatggtctcagttcttcaaagcccatttcaaatgaaaacctttgctacgaaatcttccctgattcctctcacctatagtgcacccctttgaactcagacaccctctctgtatttctcttcaggtattttagctcactttatgttataattgtttttatgattgttgtttattcttattcaacagagtcactacctgagagcagtgaccttgtgttggtcacatgtgtcccctgaaggatacagctcagtgcttggggtagtaataattgatattcttgagtgctcactacatgccagttctattctaagcactatacatgtattcatcttggttgatcctcacaaaagcccttggagggaggtactgttattagccccattttacagataaggtaactgagatctaggctgagtaacttgcctaaggctacccaggtagcaagcagcagagctgggggtccacctgggccttctgaatccaggctctcaactagtaagccacatggcttctttcattagctacttgctcaatacatatctatcaagaaaagttgtactgaagttaagagatataggggagcaggaatgggttagtttaaaaacaaggagagggaagaagagaaggaaattagaatgggccagtaggaaaagaaaagaaaggagaagtgctaagaaaccaaggaacaggccaggcgcggtggctcacgcctgtaatcccagcaccttgggaggctgaggcatgtaaatcacttgaggtcagaagttcgagacagcctgaccaacatggagaaaccctgtctcgactaaaaatacaaaaactaaaaatacaaaaattagccggatatggtggtgtgcacctgtagtcccacactcaagaggctgaggcaggagaatcgcttgaaccagggaggcggaggttgcagtgagctgagattgtgccattgcactctaacctgggcaacaaagagtgaaactccatctc

SEQ ID NO: 214932 - DNA, 468 bp, Homo Sapiens
taggctgacaaataattttttaatagcaaaaatggaagctaaaagactacagaataatgctgtttccatcaattctattcaaatttgtcactttttaatatctcttatatcaaggtgtttattacaatcaatcaaaattatgaattgttgttggcccaggggctgctgtgacataatagttactgcctgcttacatgcaaacattaaaagcacctgtatcaaaacttgccaaactgatgacgatggattaacgggaaaaatttaggacaaaaaagtgaaattgtcatttaagaactattgcatcactaaggttttggtggtacataatacaatattatatagaaaaaaagagatatgaatggttccacaaatcaaagagactcaacaagaataattttaaaagaatgaggataaaataacttttcagaaaatgaaagacatcacagtttccctaatagaccattatta

SEQ ID NO: 214933 - DNA, 568 bp, Homo Sapiens
  misc_feature (373)..(373): n is a, c, g, or t
tttttttttttttggtaacaattttgttagctcaggacaattcaacaattaaccccccagctcggatatccccaaggccaaggtttaattccaagaactattatccaaactgaaaaaaaagaaaaagagaaaaaagtgtgtaaaactggtgaaaatatgccagtttaaaatacaatttgtaattctcaaagaatgaggataattgttccccttctctcaacttaagttttggctggaaggaatagttagcacaagagaaaaacaacggctccaaatacacttggcagtggtaaggccaatgctcagctttccctggtgggtgagaacctggcttctgctacttgtgagaatttatagaagcttaaccacctgngacagatgatcattgttttataatagccctagggaaagttaagtccattcttttctccataactggcaacaaagatctagaaagagagtccatgatgagtgccttctggggggatttgtaaattcagaaatggcacaaaggctcacacattcagagctggcttgagggagaaagggagcatgaaacagaaaaagg

SEQ ID NO: 214934 - DNA, 609 bp, Homo Sapiens
tttttttttttttttttttgctcaggtaataatttattaagtcaatttaaactaaacattactaccattgcaaaagcatttgctctgaaaagggactgaaaaatgcatcataaagttacatagttcagcaacaatatcaatattgattatataaagtaaaactactggcaaacgtcatttaagcttaccctgtaatttttaataactttataaggagcaaatgtgtcaccttaaaaatgtaccagtggcatttacaaattccttcaaactcatttacaaatacagtaataaaaattcctgagctcccttttcttacaccagtattcaccaatcaacatccatgcggtgttttatttgacccacatcctctttccttttcttaagaaaatattttatcacattcgtaaaagtatctgtgcttcaagtcagtttgtaagtatctgtttttaatgtgaacctgatgataacaagagaaaaatgcttaacattagcaggggcagcaggaattgaggggtggtgtgggggacagtggaggagatgtaaatacaagaattccagtttaggtgttgggacttccaaggtagaatacatctgacaatatcaaaaaca

SEQ ID NO: 214935 - DNA, 721 bp, Homo Sapiens
  misc_feature (667)..(667): n is a, c, g, or t
ttttttttctgaggttgcttttattccaagaactctgtgagctccgcccagataccattggcgcctgcttgtgtccccaggcagggaacggccacatcctcgggcagagccaagagtcaccgtctttcgtgggcctgggaccaggcccagccaggacgctaggaggctgcctctgctgccatgggctggatcaacatggtggtggcctgcagcgggtagtagcggccccgccaggtcttccagaagattcccttcttaagcttctgccgctgctgtgggatggagcggaagtactggccgttgaggttggaatggctgcaggtgccaaaccaccagcctccagagaggctcttggcgcagttcttgtccctgcggaggtcgtgatcctggtcccaagtggagaagggtacggagaggccgctgggtgggacggtggtggcgcccagctggccggccacgggtgcagtgagctgcaggctataggccgtgtcctcgccacccaggtgcacggagaactgcagcaactcggcgttgccatcccagtcccgcagctgcacggccaggcggctgttgcggtcccccatgatgctatgcaccttctccagacccagccagaactcgccgtggggatccccaaaccccgccttgtaggcttcccagggccggntgaagtcactgaaccatcgtggcgccttttgaatactgtccagcctccatctga

SEQ ID NO: 214936 - DNA, 470 bp, Homo Sapiens
aagatgagattcattccttttttgaaagaataaagactgagaattataggtaagaggggatagaaaaggaaaatggataagaattattaaaagttatgcaaatctctaatgtgaaaacttgggttcaaggaaaattctgtttgagccagtggtttaatttaagaaaaattaaaatctgcagagaaaagctttcctaatcatcctgatataaattactcaacagcactaagctgttcataatgtaccaggctgagaaatctgattgcagagaaggaaaaaaaaaaaaaaagacttctaaaataacgtcacttcttcagctttaacatttggctgtgcaaccctttttaaaaataataccagtttttttccagcagtttacacctacagtatgcaaacaaatatcagatgtttgtctcagtcagaaattcccacacattattacctaagactgagaaaagaaaaagtcattt

SEQ ID NO: 214937 - DNA, 567 bp, Homo Sapiens; identical to SEQ ID NO: 59929

SEQ ID NO: 214938 - DNA, 454 bp, Homo Sapiens
gtgttataattttatcttgcttggccctcttctctaattttaatctcagtattcttttcatatctagttggattcttcagggcttctttttctgacttctattcccagtctgcatgcctaacttgagtgatctttcatttccttttcttcaactttttaccttctctacttttccattctcagttctcaccatcccccacatgaactctaggctctagtcatagttgttctctaatacttcctgttccttcaggactgcatgtctttgttcatgttctttctttcatttggattgcccctttcatctttggcttcctgataaatagcttaaaaatcaccttaactgagtggctcggatagtcatctgctgctgcttttgtgctcttgtgagtctctgcatcacctaccatattcttttgtaacggacttctcttccagtagcatgtgtgcttca

SEQ ID NO: 214939 - DNA, 286 bp, Homo Sapiens
ccactggaacattaaacagcacccaagaacagctttagaaataaactctaacatctgggatgcagtggtagctgacaacctttttttttaagttatttgacttggaaagggtttttggagctgacagcttaaacacacttcatgtgtcccagaaaataagactgggtgtttaccacgttttgtttctaagaaactaagtaaacattcgttaaaacatatttaagatacacgtgctcctgagaacacatttactaccccgatgacaggaaacaattctaggcagtcc

SEQ ID NO: 214940 - DNA, 558 bp, Homo Sapiens
tttttttcaggcacataactttattatttccaatatgttctccagaagaactcggtttcaccatcctgaggtgatcagacttcttactcacagaacttaaagtgggatcacttgtaaaatagttttactaggaatcagtctctaaaaagtcggtcaccatttaggaagtcagagttacacagagtggctggcaaaagtctgcctcatgagaaatacgtccaagccaggagcagctgcccagaggtgaccctggacactgcggcagggacaatctgtcaactttgtgcaccatattaaaaacaaaggatatcttaagaaccaaattcctttgacaacttaaatgttatttttcaaaagcctctaagacccatgactcaaacctttttttaaacatatgaaaagcctgaggttttgaaaatctccttataataaagtcttaaaagttctgatcctatttgaaaccatttttctccctattataatactgtatgagatttaatatagtcatagctaacatctgatttatttaaaagattaaaatttttaaagaatttaaac

SEQ ID NO: 214941 - DNA, 511 bp, Homo Sapiens
aaaataacataaacaaatgattctaccaagtccagaatttctaggaggcaagacacagtcctttcaaggtagtatgctaggaatgccaagagctctgctgcatatgaaaaaggtcaccaatgagcaaggagcttccagctccaggtattctcaagccttccaggaccaccaccaggctttccacagtcccctaggccttcttccttactgaggcatatgcagccaggattcaactgagaccaacctgatcaaattcccaccaaaggaggactcaatgtatatgggaaccaaatagaataaaaactgtatttccacagttattgcaccatagatagctctccatacacttctatagcaaaaatactaagtccttactgctacaagagcctatcctgaaggatccttaaaagcagcattaccttattgcatttatcatcaaagcagtaaacacaaggcttggtacactggaagtgctcaataacatttgtggaatgaaagaacatggcaaaag

SEQ ID NO: 214942 - DNA, 483 bp, Homo Sapiens; identical to SEQ ID NO: 58751

SEQ ID NO: 214943 - DNA, 459 bp, Homo Sapiens
aatctgacacagaaaaaatgagctctgaatcttgaatcaagacattgtatcaattccggttatccccatgatggcaggtcattcaagcttggaccttagtcttcccatctacaaaatgggaaggtcaggggagatgtcctttaatggaccttgtgattctaaagtttgaaaaacttatgattcttagaatgaaaagaagtaatgtgtgtctatacatttatttagtcaaagaaactgggtcattgtcatcaagcaaaacagaaaccagagtcctgaatgtgtatcaacagaatcttgaggaagcagattacctgccatccaggatcttagggttaggagacggaaagcaatttcccccttcctatttgaggattgagtcatgccctgtcagagcacttaggcctggcttacacatggacaggtgacagaccaatactttgatcaatgatttgtagttga

SEQ ID NO: 214944 - DNA, 452 bp, Homo Sapiens
ttttttttattgaaaatacgtatttatttatttatgtctgtgaattttgcagggacacttctcagtccgtaacagccctatgtgtgttacctaacctttatcccttgtgaacgttctgatgttttaggaggttggagttgaaggtaaaaaattttccacagtcactacactcataaggcctttccccactgtgaattcgctggtgattagtgaggttagagctctggctaaaggattttccacattcactgcattcataaggcctttctccggtatgaactcttcggtgtttaacgaggctagagtggttactaaaggatttccaacactcactgcactcataaggcctttctccggtgtgacttctcctatgtctaatgaggctggagctctggctaaaaaacttcccacattcattgcactcataaggcctttctccagtgtgaactctc

SEQ ID NO: 214945 - DNA, 448 bp, Homo Sapiens; identical to SEQ ID NO: 61542

SEQ ID NO: 214946 - DNA, 500 bp, Homo Sapiens
  misc_feature (488)..(488): n is a, c, g, or t
aatgatgagattcagaataacttctttggaaatgttatttccttagaaaaagtaaaaaagatggaccaccatttatggtggatctgaatgctcataaagatttatgacagatggacagaaggaaggaagaaaaaaatatgtaggaggttatagtctaacaaaccactgactttaaaaaacaatggcctactttcttacacgtaagcttgtgataaagtatgggatcactgctaatacattacaatttcatatgcttttatgcagacaaatgactgatcttggcacacttagtggcagaaaaagatagagtaataagggcagcacaaagtatgtggggcaagatacattttaaactatttagtaggcaaaaaatgttctggcttataccaatcaaaggccaatagaatacattgcacaatttcaccgacaataatcaatacatattaaggcaatactttagtgtattcaacactaaaaacagataacanacacttcttact

SEQ ID NO: 214947 - DNA, 456 bp, Homo Sapiens
tatgttttttttctgtcagtttaatccattttattgacttctcaattaacaacaaaattcatttggacagtaaatcagaaaatactttctatggtggctttaaattacattttttaacccaaaaatgttatccagagccattttagacaacaaatgtatcttaagtacaaacggtaaaaattcacattcccttcagtaactctccttccacttagaacacaatgaacttcttaggtaggcagagttctcgttcacttaaccacaaccccattttagcacagaactgcagcaaaaagaattgaagaagtgattagaaaggatatgcattattaataaaccatatgctatgtgagtgttaggttcccacgaaatattttactgtatatttaaaaaaaaatcccttctcaagggcactgctttcattcaaggactgatttcattacctacttcattatc

SEQ ID NO: 214948 - DNA, 462 bp, Homo Sapiens
gctttttttttcctttttgtggagaacggggtctcactatattgcccgggctggtcttgaactgctgggcttacgctatcttcttgcctctgcctctctaagtgctgagattagaggcgtgacgactatgcctggcagttatgagactttacaatcctacagtcaactgtccgcagtagtctttgcttatgtcaaggactgagccttctccttttgttgtactctgtgtaatccctcggagatgactctgtacacagtgaagctcgcgctcttcatcctgagttgaaagcaatgagtgatacctctgcagcctggcattgagccaggtgagagacgttcaaggcaaggtcatcatataagtagcagtcacacactccaaaaacaagactgtgggtgcaaggctatgctcttaagaaaacaatatcttaatttgtggagagagaaatatattggtgccggggt

SEQ ID NO: 214949 - DNA, 421 bp, Homo Sapiens
ttttttttttttttcaatttggaaaacttttatcaatcaacaagttatcaaaacaagggtttgctttttgacagtgaatgtacaatattatatggtttgccattatttcctcttttggaagaaaggtaaaatgagaaatacattatataagtcattataagttcagtagatttttaaaacacttgagacacgagttagaaaaaatgcaattgaataaaccaattgtaagacccatctcaaaacaacaaatttaaatatgaaccacatattagatgatactaagtaattattgtttttgttaggagtaataatatcactgtggattttttaaaggccttactgaagtattataagtgaaataatttgtgtgatttgctttaaaatattccgattttaaaaattttgtgttggatggatgcag

SEQ ID NO: 214950 - DNA, 466 bp, Homo Sapiens
ttttttttttctgactcaagtccagcattttaataaactcaaatgtgatctacagtaaatgcgcctactgccaatgggatgttaggtcaagtgagaatgaagacaatgtagccacagtacttaagttcaattcacgccagccgcgagacattgatttaaatcaagtaacctgaactcaggtttgctcctaaggtacttggaattgtaactgcgctgagcttctacttatttactttaagtactctacagtagttctgagcccctgccagggaccccttccgaggctatcacgggcttcgaaggcctcgcctgggctggatggggcgcggggctgaggaggaccgcgcacctgcgtgcggagctcctggttgttgctttctgcgttctggtacagccgttctgtgtgatgcagcagcttctcgatctcccgcacctgccgcttgcagctccgcagttcacgttccaa

SEQ ID NO: 214951 - DNA, 531 bp, Homo Sapiens
  misc_feature (424)..(424): n is a, c, g, or t
ccacaaggaaaggaatttattggttcttgtaactgtcgaatccaagattgggactagcttcagaagtgctttgattctgaggctcaaacagtgccctcgggatctgctcactcacatgcactatctccttcaccttctgaagtttgggtggaggaaggagtagctccagatctcaaaccctctcagcttcggtttcatgcctctcttctcacatgttctagtgatattgcacttcattggctctacctaggtcatgtgcccacccctaaaaaaatcaccgtgaccagggaaatgtgaaggcagtaaatggcccatgtcccatgctccacccaacctcctctcaaagcacagggcagagtgaccaagcagtggagtcccagagaaagtgggattcagttgtaaaacaagggtgagggaatacctngctggaaatatcctaattacatgagggagcccacaagagcaaaggcatagaagttggaatgttcaggaaatgaaaagggagtggaggagtatgagggctggaagatg

SEQ ID NO: 214952 - DNA, 493 bp, Homo Sapiens; identical to SEQ ID NO: 60515

SEQ ID NO: 214953 - DNA, 434 bp, Homo Sapiens
tttttatttttggctatagaaggcaaaaacttgttaacctttgcgctgtgtttatttgttcaaataacagcggcaaggaatgaccaagaagatctgaactacagctcctgctggcccctgtctgctgctctctgtctatgtggtgtctttagaacagggaagtgggctgggggaagctgtgttctaccgttcttatttgccttgtacctgtcatagcacttggcatgtggcagaaatagaatggaattgcaaggggacagaggcagcctgtgaggcaaggacccagccctctgacccacaaggtctagcaggcttgctgcatgttaggctgggtttgtattctgggttccaagaaacgcaggaatcatttcctctttctctctttttaattgctatatattagcttagaaccagggtccaaattttggagattc

SEQ ID NO: 214954 - DNA, 408 bp, Homo Sapiens
tttacatttctaactgtagtgatctggcaatgaacattcattgcaatggtgttgatcctaatatatgatatacttcaactctaccagactttttcattctccagccaactgtctcctgtcagcctttgtttgaaatttcttaacttctggggattgctgccaaactcttaataccatgaaccccgcattatctctgtaaaatttaaatccctgcctgtatactccagctacccagctcatttctgaaccctatcaagtacaatgtttgtataagttgagactaaaaccgtttttttttttttttttttttgagacaggcttgctctgtcacataggctggagtgcagtggcacagtcatagctcgttgcagtcttgacctcccaggctcaagtaatcctccctcccat

SEQ ID NO: 214955 - DNA, 460 bp, Homo Sapiens
tttttttttttttttttttttttgagacgggtctcactgtcactgataggacagtatgaacaggtatttgctggaaggcagacaactacctcaaatcatcttttaagatctaccatttctttccctttttagttatcatcaaatataaccaggtaaacgtagatttttaccaaagggtttcagagagaaacacagtcaacacaggaagtaaaacattcaccactgcaaactgaacaaaaacagaagagtacaaagggcaaaccaagaggaggaaaagccttagcaaaaaaacggaacaggtgaactgctgtctaagcaggtatgaaagtttttcctgctcaactctgagatactcaacctctgacctagcaataaaaacaattgataggctcttgcaaaacacaagttatatccttgtgcaaaacacaagtcatatcctcacacaagagaacatttcctt

SEQ ID NO: 214956 - DNA, 503 bp, Homo Sapiens
ttttttaggtaacactgttcactgtatgattcttctcactttttgtaggtttgaacaattttataagatgccggagaaataagcttccaaatgactgtgatgattgggcaggtttgggaccatggatgtgggggaaggctccgtcggaaaatgtttggaggagtggttgccctctgccccctcgaaccccacccccaagctcccgtgaccagcctctggttccctcactttcacagaaaccccagaatctacagcagactgaacaaggcactgtcccttcccctgggttctagaggaagttcatctgccccttggggtctcctgttctctctgttgagcaggattagggggtccctaggctttgtcttattgggtgggtcatctgaggctggtccctgtgggggcatttatactaatgcgatgaagcagacccatggtgtggacttggggcagagcttggagaggtgaggctagaaattctcttggaaaaatctgaagccgaa

SEQ ID NO: 214957 - DNA, 474 bp, Homo Sapiens
ttttttttttttctacatgggcttctgatttattaaaaaccaaaaaactgaatcaatcacttttgtttgctataatcaataattcctacagagttctcttacgattcttaaagaatcatcagtgcaaaaataaccatctgctaatgctgcccacctttcttaggaaatcagagttagtgactgcactgccttcgagaatattttgataaaaaggattttggcatagacttcctcaaaagagttttattaacacaaataaatcactttcacaggctgtaaacaatatatcaaaaatgaagctctattttttgctttccttgctgtctttccctttgtcttccttttctgttctgtcttgttcatatttctctttgtctggctttgttacactatcatatgaaggtggagaggtggtggatgaagtggcatctgttttttctggacttgagttctcattaacattatcaaaagcca

SEQ ID NO: 214958 - DNA, 568 bp, Homo Sapiens
tttaatctctaaagcagctgtcttttactgggagaagagatcagtatcatgtcctatactttccaaagacctctagtattcttattcaatgaatatttttaaagccagaattctgactgagaatgtgctttaagctagatttttataagaataagattttgtggtgatttttaaatgactggaaattgcataattttcaggattataactgtgtatatttccctcatgtaaatattaagattccttagtctcctggagaagtcttaactttgtctctacttttagaataaagtcaaggatttattaactgcactgcaactaaaatattaaacagaagggcctttcacacacagattcagcgttaaaaagcctcaaatcaaaacaaatggagaaattggctttaagccagaaagaatcaattgtttttgggtcagttttggtttggggagcctaatgaagactgattgctcaacaagggctgtgattagtgcactgtcagtcattgctaatcactacagtacctcacattgcctgtcctgaatcaagacacctttgcctgcacaggcat

SEQ ID NO: 214959 - DNA, 465 bp, Homo Sapiens
  misc_feature (462)..(462): n is a, c, g, or t
ttttttatttaaaatttggttgatatattgacaataacggcaaagacttaaccgtttgatgatcacagaaaatcagaaggtatgattcaatgacatattaatcaatttaaaagacccattgatttaatacaacattaatggaggcaccaaaacaacgcattgttatcaaatcaggcctaaaataaccctgaaaaactcaatacaatatcaattaaatttggaatagtttttaaaacgcatctagaggagagcaaaagatactcaaagtcttctttattaggctactaataaagaaaagtaatacaaaaaggatatattaaaactacattaaggctcagattttaaaacaggagaaccaaggaaatccagttatggctattactgcgttcttatagtcttacagtgcctaagaagttaagcccttagagaatgaaaagcatgcacagttcattatgtacaagnatt

SEQ ID NO: 214960 - DNA, 675 bp, Homo Sapiens; identical to SEQ ID NO: 53416
  misc_feature (542)..(542): n is a, c, g, or t
  misc_feature (627)..(627): n is a, c, g, or t
  misc_feature (639)..(639): n is a, c, g, or t
  misc_feature (653)..(653): n is a, c, g, or t
  misc_feature (660)..(660): n is a, c, g, or t

SEQ ID NO: 214961 - DNA, 700 bp, Homo Sapiens; identical to SEQ ID NO: 47666
  misc_feature (3)..(3): n is a, c, g, or t
  misc_feature (5)..(6): n is a, c, g, or t
  misc_feature (676)..(676): n is a, c, g, or t

SEQ ID NO: 214962 - DNA, 700 bp, Homo Sapiens
  misc_feature (3)..(3): n is a, c, g, or t
  misc_feature (6)..(10): n is a, c, g, or t
  misc_feature (45)..(45): n is a, c, g, or t
  misc_feature (654)..(654): n is a, c, g, or t
  misc_feature (666)..(666): n is a, c, g, or t
  misc_feature (688)..(688): n is a, c, g, or t
  misc_feature (695)..(695): n is a, c, g, or t
ggntgnnnnntgtggccttttttgccttttttgttattctaaagnagatacatagcaattaaaatagagaacaaataatggatgtttcctcaccatttgtttcatttcaaataaatataaacacatttacagcaaaagtatatggacattttctctagtttggcaaaaaaaaaaaaaaaggtcaacacatcatcagttacaaatgttaagtggtcaactagaaatctgtgtcctaagaaatataaaatacaacaaagactggtacacagaaagattacatttaactccataaaaaagctacttcagttctcacttgcattttgaaggaaaaaaatgtgtatcttccattttagactgaagcattttggtcctcatgtgtagctggctgatgaactacacacacacacacacatatatatatatatacacacgcacacatatatgtgtgcatgtgtatgtgcataatttttaaagagtctcattcttctttttgtacagcggttccaggtgtggaacggggtccatttgacctagaagctttggcagagggagcagacacagtattcactatgttgatttcatcatcaagcaactgggcaatcggttttacatgctaaatcacccatttctactttctgctttcactttttttgntcctttttgcantcacacttttcactgacttggnatgaccntgact

SEQ ID NO: 214963 - DNA, 700 bp, Homo Sapiens
  misc_feature (2)..(3): n is a, c, g, or t
  misc_feature (5)..(5): n is a, c, g, or t
  misc_feature (16)..(16): n is a, c, g, or t
  misc_feature (580)..(580): n is a, c, g, or t
  misc_feature (591)..(591): n is a, c, g, or t
  misc_feature (598)..(598): n is a, c, g, or t
  misc_feature (623)..(623): n is a, c, g, or t
  misc_feature (657)..(657): n is a, c, g, or t
  misc_feature (666)..(666): n is a, c, g, or t
  misc_feature (679)..(679): n is a, c, g, or t
gnngnctttttttttngccctttttttagacaaaagtctctgtcacccaggctgggagtgcagtggcgcaatctcggctcactgcaacctccgccttccaggttcaagtgattcccctgcttcagcctcctgagtagctgggattacaggcgcctgctaccacgcccggctaattttttgtatttttagtggagacggggtttcaccatattagccaggatggtcttgatctccggacctcatgatccgcccgccttggcctcccaaagtgctgggatgacaggcgtgagccaccgcgactggcctcttcccaactttatgtccatgtgtacccaatgtttagctcccactttttaatttttttgagacaggacttgctctgtcacctaggacagagagcagttgtgcgatctctgctcactgcaacctcctcttctcaggttcaagcgattcttgtgcctcagccatcaagagtagcagggattacaggcatgcaccaccatgcctggctaattcctgtattttttatagaagaccaagatttaatcaatgttgcccaagctggactcaaactcctggnctcatttgatntgcccancttgggctcctaaaagtgctgagantataggagtgagccaaccgtgctcaaccctaacnttcaacttncaagagaacatgngttattccaaactttggtaat

SEQ ID NO: 214964 - DNA, 700 bp, Homo Sapiens
  misc_feature (29)..(29): n is a, c, g, or t
  misc_feature (39)..(39): n is a, c, g, or t
  misc_feature (50)..(50): n is a, c, g, or t
  misc_feature (620)..(620): n is a, c, g, or t
  misc_feature (651)..(651): n is a, c, g, or t
  misc_feature (683)..(683): n is a, c, g, or t
  misc_feature (690)..(690): n is a, c, g, or t
ggctggcttttaaagcgcgattttttttnatgagacccnggccctcttgnatcccaaacaggagtgcagtggtgtggtcccggcccgctggaaccttcgcctcccaggttcaaatgattcccctgcgtcagtctcccaagtagccgggattacaggcatgcaccaccacaccttgctcattttgtacttttagaagagacggtggtttcaccatattgtccaggctgctttcaaacccctgacctcaggtaatccacccgtctcagcatctcaaagtgctgggattacaggtgtgagccaccgcaccctgtcaagatttttctaaagctctcatttttctcctactgggtttttcctgtttgcgccctcaatctttctctgtctctttttgtgtacacctttttgtctaattctctctctctattgtatacctcaaacacaggaagcaagcttcaatgctatgagatgctccatgcaaagaccaacataacagagcctgagggggtgctcagaccaagtatagagaaggaaagtcaggctctccagccacactaaaccctgccaattttcacatgagtcagcttaaaggctcatgctttcccagtccagcttcagttaangaccacagtcccaatgtcataaaagacctanagggcagaggtaccaactgaactgtgtcaaantctgggncacataaatt

SEQ ID NO: 214965 - DNA, 700 bp, Homo Sapiens
  misc_feature (4)..(4): n is a, c, g, or t
  misc_feature (7)..(9): n is a, c, g, or t
  misc_feature (38)..(38): n is a, c, g, or t
  misc_feature (558)..(558): n is a, c, g, or t
  misc_feature (588)..(588): n is a, c, g, or t
  misc_feature (606)..(606): n is a, c, g, or t
  misc_feature (671)..(671): n is a, c, g, or t
gggntgnnntgggctttttttgggccttagatttttcnttcaggattttattataactttgggaaattagtggtaaaacatatggtttaaaaaacagtatgtggctgcacttaaattcacataaaaatagcatttttacaaccatattgaaatttaatccttttacacaggttaacaaaatgtatcacaagaaaaactaaacgttgggtttaacaaaacaatacttctgaagtaaaacaatgaaaaattttttcaaattttttacaaatggtcacctctgggtcaatttactaaactaggggaacaaagagatgttaaaatatagctgtgctcaactgagccacttatctgtactacagtatggtacttgaaatcaatcttaaggtcaagatttaaaaccattttaagaaacaagaccctatgtgttttatactacctcgataagaggtactcttccttcccaaaacagtcaaagcttaaaagattgactacacataagtttttttccccctcatatcttccattcaaaatactattatcattggtaatacggtctanatcctgtctgatctggatgatgtggtccangaagtggggtttgagaangcggaccctgcaatcgtggaggtggtggtgggcctcctggtgcaaggcatataccaaggactcantccccctggttgtgtaaatggaggggtca

SEQ ID NO: 214966 - DNA, 700 bp, Homo Sapiens; identical to SEQ ID NO: 55894
  misc_feature (9)..(9): n is a, c, g, or t
  misc_feature (16)..(16): n is a, c, g, or t
  misc_feature (546)..(546): n is a, c, g, or t
  misc_feature (625)..(625): n is a, c, g, or t
  misc_feature (650)..(650): n is a, c, g, or t
  misc_feature (691)..(691): n is a, c, g, or t

SEQ ID NO: 214967 - DNA, 700 bp, Homo Sapiens
  misc_feature (2)..(2): n is a, c, g, or t
  misc_feature (4)..(4): n is a, c, g, or t
  misc_feature (7)..(12): n is a, c, g, or t
  misc_feature (26)..(26): n is a, c, g, or t
  misc_feature (29)..(29): n is a, c, g, or t
  misc_feature (530)..(530): n is a, c, g, or t
  misc_feature (590)..(590): n is a, c, g, or t
  misc_feature (601)..(601): n is a, c, g, or t
  misc_feature (625)..(625): n is a, c, g, or t
  misc_feature (639)..(639): n is a, c, g, or t
gngntgnnnnnntgtggctttttttnggnttttaaaaaaaacatagtctcgctctgtcgcgcaggctgcagcgcagcggcgcgatctccactcactgcaacctctgaccctgggctcaagcaattcttgtacctcagcctttagagtggctgggactacaggtgtgcaccaccatgcccggcaaattttttgtaattttttttttttttttttaggagagacagggtttcaccatgttgcccagggtggtctcgaactcctgagctcaggcaatccacctgccttggcctcccaaagtgctagaattacaggcatgagccaccatgcccggccttctactgtattttaaaggcagatgcttctcttccagtcctgtgtacaatcttttttcactcaataaatgctgctgcttgacttaatgatactctaacatcagataaagtcaggctgtagtaaaggttttgatataatggggtaaagtctctagagaaaaaagaaattgaccttggggcaaggtgaagcactctaanctgggggtatgtgacaaccaagttacttcactcgcctttgggtccattagcagtgtcaancatctggtccntccgaaaacatgtgtgggttcaanacatacaagactanaagaatagaggaaaattagattatcctgtgcaatcccaattctggagggcccaaatcaaac

SEQ ID NO: 214968 - DNA, 700 bp, Homo Sapiens
  misc_feature (43)..(43): n is a, c, g, or t
  misc_feature (60)..(60): n is a, c, g, or t
  misc_feature (76)..(77): n is a, c, g, or t
  misc_feature (595)..(595): n is a, c, g, or t
  misc_feature (598)..(598): n is a, c, g, or t
  misc_feature (605)..(605): n is a, c, g, or t
  misc_feature (619)..(619): n is a, c, g, or t
  misc_feature (640)..(640): n is a, c, g, or t
  misc_feature (671)..(671): n is a, c, g, or t
  misc_feature (678)..(679): n is a, c, g, or t
  misc_feature (698)..(698): n is a, c, g, or t
cttcaagttggccaggctggtcttgaactcctgaccttgggtnttttgcttgtcttggtntcccaaagtgctgggnntacaggcatgagccactgctcctggcctcaggcatggttttctacaggcaattttttgttctttattaatctttcaccttataaaagggaacagtctgtaaatagcatttataagcatacttagtaatacagtccctatgatcatatggaaacaaataaatgaaagctggtgtaatggtaaatgtgattcagtctcccttgggtctgggccttttgggtttgggtccctctgtgcggccaaggcaggtcaagttgcagagagatggtccagaccttgccaaatggtttctatatgaggcttctgggtcaacactccctttcaataaagacctgggctatgatgactccagccgtgttctgcgccacagtgggtggagtgctcacagtgggtcctcgggccatgggagaccccattaaatacactgaacaacatgccatcaaagcacttccatctgacacttcccaaggcccatagaaagccacagcagcatcacaacctttgccagcacaaagcccantgncctttcnggttatctgggggnatgaagtacacacacttaagnttcgcctgtgcacacacttacaccatagtgnacactgnncacaagtggcactggctgnta

SEQ ID NO: 214969 - DNA, 700 bp, Homo Sapiens
  misc_feature (2)..(2): n is a, c, g, or t
  misc_feature (6)..(6): n is a, c, g, or t
  misc_feature (44)..(44): n is a, c, g, or t
  misc_feature (76)..(76): n is a, c, g, or t
  misc_feature (548)..(548): n is a, c, g, or t
  misc_feature (621)..(621): n is a, c, g, or t
  misc_feature (633)..(633): n is a, c, g, or t
  misc_feature (674)..(674): n is a, c, g, or t
anttgncctgaagcaaccctagttttcctgtggaacagttaatntttgccaaagtactgatttggtagctctcccngaattccctcatgttattcatgaaccttaaaaccttggaaaagaaagattgtaaacagatgcaccattggggtctacagtccccacctactgatttctttttctgataccagttgcagacaataatttatatggcttgctatgactaaatgtttctgaaggaaatatttgggtaaaactttgccatgaactgcaacatgggcctctgaattcctctcctttcctaattttattgtcacattctgagaaaataaacagggcatctattatgctaaagagaaagtataaactcataaacaactacattctatctgcctttaaccccccaccaggcaaaatacacacacacacacacatacacacacacacacacacacacacacacacagaatctcaaaaagtaaagtctacctgagaaataacatgaatcttccccaacagtcacaaatctttgccagagagaagaacactgntattttctttcacattcagagtgagaattttcttgccccaacttgctttcctttcattttaatttgacagttnctcaagctaatncaccatgggccccacataaacaagaagagtcttgatgctgngaagtgagagaaaaatacctgagcat

SEQ ID NO: 214970 - DNA, 700 bp, Homo Sapiens
  misc_feature (3)..(3): n is a, c, g, or t
  misc_feature (7)..(7): n is a, c, g, or t
  misc_feature (15)..(16): n is a, c, g, or t
  misc_feature (18)..(18): n is a, c, g, or t
  misc_feature (21)..(26): n is a, c, g, or t
  misc_feature (615)..(615): n is a, c, g, or t
  misc_feature (649)..(649): n is a, c, g, or t
  misc_feature (675)..(675): n is a, c, g, or t
ggngttnagttgagnncnttnnnnnnttggattccttggcctgttggcctactggatttacttgatataattttaatgagggcaaaaatcctttgaataatctcaatgaaagcagtttaagcctaatcctaataaatgaattcgtatactttttttgaccttggaaaaataccactttacacccagtgctacgtttgataagtcatagagaagcatgcacgcataaagtgaatggaaacagaaacgtttaaagattataagaacaattcaaataggaggaaaaacaaactgcaggaaactggataggaagttataaaaggaatgggagaaggaaaggcccagctcttctgtaaattagaatcctcaactaaaatagcaaatgagattgaagaaatttttattcagtggcccccaatggatcagtgttcatataggtacaggccaagtgttaactatgttataattgccatagaagtgtgtgtcaggagctgaattttactccaggatgacgttgttgaccacatttgtagctgtagtccgggaattggtttgaaaggaaattggcattttcatgttgccaaaaatcagatatggctattttggttatatacccgnccttaaaatattaactgctttttagaaaccaatnaaaagcttgtgaaatgttaaatgatnaaagttgatcattacatttggtacc

SEQ ID NO: 214971 - DNA, 700 bp, Homo Sapiens
  misc_feature (67)..(67): n is a, c, g, or t
  misc_feature (81)..(82): n is a, c, g, or t
  misc_feature (114)..(114): n is a, c, g, or t
  misc_feature (644)..(644): n is a, c, g, or t
  misc_feature (698)..(698): n is a, c, g, or t
ccttttgaagtgcccaaactaattctcagaaggtcaaaaagaaataatcagtcacagaaacagattnttatctaataggcnnttacccataacaaaggcaacatcttagacagnaccaagtcctcccagttaaaatgaaggctctcatcttcctcctactaacattgtttcataatattattgtgtgatggttaggaataaatacatgcattatcatatccccaaatagatagaaacccaaaaataatcttgttcaatagacagtaaccctatattgactgatgtaagccccaggaacttattcactgttatatcccaagcccctggtacagggattagcatacagagtactcaataaattctagttgatctgaaacgaactgaactaccttgtaaatagtaggcattgatagtagacaggaatgtagatacagatatacatgatacagatatacatggcaggggttggagggagaaactcgtttttgtccagaaagaagaaaacaaaaatcaagctacactaaaaatgacacaaataccaatggtttaagaaatagatggagttaacgcataatcatgattttaaaatattgcaattgcaccaattaccaaagtaaatctacacctaacaaaatgaagatgcngataattcactggacttgcaatctaaggtctttcaccggctaaggctctgaagngg

SEQ ID NO: 214972 - DNA, 700 bp, Homo Sapiens
  misc_feature (4)..(4): n is a, c, g, or t
  misc_feature (6)..(6): n is a, c, g, or t
  misc_feature (8)..(8): n is a, c, g, or t
  misc_feature (10)..(10): n is a, c, g, or t
  misc_feature (229)..(229): n is a, c, g, or t
  misc_feature (284)..(284): n is a, c, g, or t
  misc_feature (341)..(341): n is a, c, g, or t
  misc_feature (343)..(343): n is a, c, g, or t
  misc_feature (357)..(357): n is a, c, g, or t
  misc_feature (581)..(581): n is a, c, g, or t
  misc_feature (639)..(639): n is a, c, g, or t
  misc_feature (650)..(650): n is a, c, g, or t
  misc_feature (653)..(653): n is a, c, g, or t
  misc_feature (687)..(687): n is a, c, g, or t
  misc_feature (697)..(697): n is a, c, g, or t
tttntntncnttttttttttttttttgcttcacaaatgtcacattttattgacactagtgcacaactaaatacaataattgcaaaggaagtggaacgtgtcaaacagaaatggtgacaatgagttagaactgcagttgtttcaaggtactacactattatttaaaaaaaaaaaaaatcacaaaaagaaaaatgttatcactacaagtaggaattagaagagagaaattntggcagtctgtctagaggttaaaacatttcatgcatttgtgagttgctgttgganagttgttttttatttgtccaccgtaatctggcaacatccggggcttaccttcagctntngcactgtgcgtganatcgggtgaggcagttataagtgagagcatgctggacaccttgactttgcagtgacgtggaacagaaaaagcattcacctcatcattgaaagagttggagccgagaataaaaggtagttagaaggctagtgggaaggggagcggaggcaaggaaatagcaactaacaggccctaaacagcatccggcaacagagaggaaaagaactgcccttcggggcaagggnaaaagtagggtgagcacacttccgatacaggcaccttccacttttaaaaggcaacagngagcaccttgntgnacttgacctgggaacccccttttaggggacaaanccttgggaanaat

SEQ ID NO: 214973 - DNA, 629 bp, Homo Sapiens
tttttaaactgtattctatattttatttttcaaacagccagtgtccacatttaaaatgcagaatttgcaaatattagtctaataattcaatttaaagtaaagcaaaacaacttcctttagtatcacaatacataaaatggttttataaactccaaatggcaaagataactatatgacaatagtgttgaaagccgtgaaactcattaaacctcttatcaataggtcagtttaaagaacatctctatgttccatgactatgcatgaaacaagctgtcactgtattataaaggctcagcaattcattcatggcataatatagggtcaagcaagattttgtttttacaatgacaattaaaacatatttaaagaacaaaaaacctcccaattgtttaaaaacaattctatttggagagcaaaatatttaaaatatatcgacttaccaaatttcaattgtcaggctgctgactactgatgtaaaagtttatatttaaaaatatcacaaatctctttttatttaacactgaaaatttcaatgggataagtttcattgcaaagcaactgtcacctgagtagattttaaaatttaatgctcctattttttgggggaaaggggaaggaaagcccatttg

SEQ ID NO: 214974 - DNA, 700 bp, Homo Sapiens
  misc_feature (2)..(3): n is a, c, g, or t
  misc_feature (5)..(5): n is a, c, g, or t
  misc_feature (8)..(8): n is a, c, g, or t
  misc_feature (10)..(15): n is a, c, g, or t
  misc_feature (23)..(23): n is a, c, g, or t
  misc_feature (29)..(30): n is a, c, g, or t
  misc_feature (671)..(671): n is a, c, g, or t
  misc_feature (693)..(693): n is a, c, g, or t
gnngnggngnnnnnnttgggccntttttnnttttttttaagtgttccaggttatttcgaaaaaggagccaggttggaaaacccaagattgagattctaacgcccagatttagtaggtctggagtgggttataaaatgtgtattttttcatgtaaacatacagtttatgagtaaatgggctttatttttatgaaatgtatgctcataattatagtttaacaaatatagcaggggagtatttattaaagatatatactacaacaggcactttgaagtttttacaactttttataaaggaaatttctatcctgaataagtgtagtataactttggaacggaaggaaagggaagcgggtgggcgagagtaagaagataaggagaaaattaattcatgtaaatactggcagtgggcagtggggaggacagtgtttgtaggagattccttgatataaaaatattttaacacttccctttgtctcaagataaagaactaataattattgactctggctatagtccaggctttctacacccatgatctcaatcaatgctcccaacaggcctgcaaggaagcccttgctatccacaatctgcacaggatgcaatccacgcagaacacaaccaggctttacttcaagagactcaaagagggttagccatttgctctgctgntagctgtgctgacagaagaaanggacaga

SEQ ID NO: 214975 - DNA, 475 bp, Homo Sapiens
aattgcacatctgttcacagaggttggcaaaagacactggaagtgattgtgaaatccacattgtgattcctcaggaatcagatcctagaagggggtgcccagagctgtcggcacaccgtcccaggagtctgcctgtgcagctcccagccaggcaagaagccctgaaggcagagtcccaggtggacacagctggacgcctctctgacaatggtggctctggtggtgaacccctcggtgtctcttctgcacctctcaaggctgcaaagtgccaaatactcttttccaaccagctcccgaattcccccctccatctgggactgcatgtcctgcttagcgatttcaagcaatgatttcaccttttcatagacaaggacattgtcctcatcagggcttgcaccatcactctgatttccaatgctgacagccaagtggaggtttttaattcttaaaagaatgtggcattaaaaagaaaaac

SEQ ID NO: 214976 - DNA, 700 bp, Homo Sapiens
  misc_feature (615)..(615): n is a, c, g, or t
  misc_feature (670)..(670): n is a, c, g, or t
ttttactaagaaagccagtaactttactgaattgtctgcaaaatacaaattataccttatttccagcaggagaagcttttgaaaatttcccacttttattcactacagacagctgaattaagtcccttgagatacacagatgtggtttaacttagttataacatcttgtcatctagtggcgacaaagtccagcttatgccgctgtgagcctctatttgaatatttgttgcaaatgcttgtatgccctcatttacaagcgattttaattactctcatttaatggaaacaagtccccaggaaaagaaaaagaagaaaaatgatacagcaaaccatctgaagcaatccaagtcctatgcctacagtgacccaggtctactttgctcgaagagaacactggtactgcattcaaaccacaacagaatccgtcacttaactgacctctctgaattaaactgaggtatgaatcaatttgaggtatgaacagggaaggcaaaatgcaataccagattatgaaaataaccaaaatggaaaaatttgatgtagaagatatgtggcttggattgctccacatctttgggttaaaacatattaagaaaagcctttaattacatctgnagctgaagcattctaacagacaccagtatttcagcaatcttcaaaagatctgtantggcagggaaattaacgccataaaagtgac

SEQ ID NO: 214977 - DNA, 700 bp, Homo Sapiens
  misc_feature (2)..(3): n is a, c, g, or t
  misc_feature (5)..(5): n is a, c, g, or t
  misc_feature (8)..(9): n is a, c, g, or t
  misc_feature (16)..(16): n is a, c, g, or t
  misc_feature (29)..(29): n is a, c, g, or t
  misc_feature (663)..(663): n is a, c, g, or t
  misc_feature (696)..(696): n is a, c, g, or t
gnngntgnntgctttnagtccctttggantttccctttttttttttttttttttttgcaatcagataataactgcattctttgaaaaatacttcacttacacactttctgccccagttatgctaagtatctctcaagtctcccacctgtaaacatggtggaccaagaaaaatacacattaaagaaagggattacatctgattaacaaaggaatagaagaacaaacaaaaagatttccaagcaggtaaggaactagcttttacagaaaagtgctttaaatgtgcttctgcaaaaaatatgacttggaggcaattgtaaagttttgacacttacactttactcatagattgggcagttatacttctatgaggcaactaaattgaaatgtaaaacaaaagaactgttcaattatgatatcacaaagtcccagggaaaacctgggaataaaatctccctttgattaatgtttcccacttttaatgcaaagtgcaagagcaagggcttccaatggatgacacaggtgggaaagtcataagctcttcccccacatcccccaacttcattccccacacacaccacagatagtttatgagctaattctcaactctcctggtgcacgtatccaggactctattgaattacttatgaagtcaggcctcaattnccaatagtttaaagtaatgaaaaagaaaggatntgag

SEQ ID NO: 214978 - DNA, 700 bp, Homo Sapiens; identical to SEQ ID NO: 48117
  misc_feature (2)..(2): n is a, c, g, or t
  misc_feature (4)..(4): n is a, c, g, or t
  misc_feature (6)..(6): n is a, c, g, or t
  misc_feature (12)..(15): n is a, c, g, or t
  misc_feature (47)..(47): n is a, c, g, or t
  misc_feature (620)..(620): n is a, c, g, or t
  misc_feature (647)..(647): n is a, c, g, or t

SEQ ID NO: 214979 - DNA, 700 bp, Homo Sapiens
  misc_feature (2)..(4): n is a, c, g, or t
  misc_feature (19)..(20): n is a, c, g, or t
  misc_feature (29)..(29): n is a, c, g, or t
  misc_feature (670)..(670): n is a, c, g, or t
gnnntttgaggcccttttnntttttctgnttgtttttttttggttgttaagtctcccatgtttagtaattaacagaccccgccagagaggaacagaacaaaaatgagcatgcaaatgactaatcaaggaaagctggaatcaacaagatatgggtaaaaagatgctcctctgagcctggccatcatgcggcaggttctgcgcctctgatcacactgagctgcccaccttcccatgccctggaggtaaagctatgtagtcctaccctggtagcataggctgtgccactacacaattcagcatttgacttgaacaagaatgggatactttggatacttttttctttaaaatggttccagtctcccaaacacaagtatggttgtatgatgcattttaggaatttatttatcacactgtgaatttccacactgccttcttcataagaattcaaaatgcttgttcacatttctaaggcatctaatggggggcaagtattaaaatgcctccattttacagataaggtaaactgagcaaagtaatttatcccaggtcagaggcaaagcaagtataagccctgttccaatctcaccaagtcataccacctctgcaattcaaaatggctcctttaattttctcaaggtacccaaaaaaaaaacacattttcatatcttgnacaaactaaaaagctctacagtggttctat

SEQ ID NO: 214980 - DNA, 700 bp, Homo Sapiens
  misc_feature (2)..(9): n is a, c, g, or t
  misc_feature (12)..(22): n is a, c, g, or t
  misc_feature (629)..(629): n is a, c, g, or t
  misc_feature (648)..(648): n is a, c, g, or t
  misc_feature (654)..(654): n is a, c, g, or t
  misc_feature (656)..(656): n is a, c, g, or t
  misc_feature (659)..(664): n is a, c, g, or t
  misc_feature (669)..(670): n is a, c, g, or t
  misc_feature (677)..(679): n is a, c, g, or t
  misc_feature (681)..(681): n is a, c, g, or t
  misc_feature (688)..(688): n is a, c, g, or t
  misc_feature (694)..(694): n is a, c, g, or t
  misc_feature (698)..(698): n is a, c, g, or t
gnnnnnnnnttnnnnnnnnnnnttttgtggccttttttttttttttttctataaggatatcaacgaggtacttcttggttttattagatatgagaattatcaattcaagtcagaagtgccacaaccactgccatattagaaagattagtacccgagagcccagactgtcacccggctggaggcctctcgccgatggctcccagggaccactgacctaatcaagggcctcctccttcacacgccaccctccaccccaacccctttatgccttcttaaagtccttcagggaggggacccaccatcaagattgtcctttctggcacctaactcttctgtctgctagaagacagcaatgagactgtccctacaacgatgatgcttatggtggccacatctcaaagaagctgagagggatctcagccccgtattgtcacttgggaggcagaacccaaatcttagtaaatgaagactttctctcttgaaccattcacaggaatactgaaggtaatgaaaaaataatgtgtaaaccatcctttggagcagaggctacaaactcacatgcccgcctggaccagcaccgggcagacgtcttacatgagtgaagtgcagtgggggatgggaagggcggnggagggggtaaaggtggtnggggtnanccnnnnnnacttnngatgacnnntnccccatncttcanccanaa

SEQ ID NO: 214981 - DNA, 667 bp, Homo Sapiens
  misc_feature (644)..(647): n is a, c, g, or t
  misc_feature (651)..(651): n is a, c, g, or t
  misc_feature (653)..(654): n is a, c, g, or t
  misc_feature (656)..(657): n is a, c, g, or t
  misc_feature (659)..(661): n is a, c, g, or t
  misc_feature (663)..(663): n is a, c, g, or t
cctagattccgatacctgtccaatacaatttctagaactttttcacctccccatcatgtctgccttctagtgccccaaaattatgtgagatgctagaagttgtttgacctgtgattgttcttgcttccttggtccttacgtacgagtacatagcatgattgggccagaatccgtcttttgagctcttctagtaaagtaagttttgagataatacctaagaccacatggaaatttggttggtctaagtagaggacaagcacgtatttaactacctttggcaggggaaaaagtgaagtgggagagcttaccagtgctacctatgtgtaggctgacactctgaaacttcagtctccaggaatctccatatgttggcactattttgttgattatttttctataaggttatatttctttggaagatcagtaaacttgctgttctaacccaaattcagtgtagtcttcagcttctgaataaggaataaaggaatcgaatgtgctttggatgttcttttaacaatttcagaatgttggcatgccctttgagcatctaaacttccctcagcgaattggtatttatttatttatttagagatagaatcttgcactccagcctaggcaacaagagtggaaactcccgtcttcannnnaaanannanncnnntnggaa

SEQ ID NO: 214982 - DNA, 484 bp, Homo Sapiens
aaccgtgtcaagattgaaaatcctagttcacacaaatatgtagttgtgaatggtagtaacagcaatatactcttcctacttagcagtggaaagtcatctttaatcttaatccaaaatgctgataaacttaatatcttataataattctttagtgtgaatgatgaactgagctgcaataattcattctcttcttcaggctccaagtttaactcaattattgattctgggttttgaaaagcaaatggatctttcatccaaatattttcctttaatgattcaaatttctcttccggaaagtaataattaaaagtttgagacaaagaagtgagatgcaacaatatctctaattttatttcttttaagcagtcttcattaataatgttctcttcgatgtgttgcaataatgttggaacatatagtagctagggcggttacttttaagtcttgcttgcacaataataacgcttttggaatctagatatgt

SEQ ID NO: 214983 - DNA, 751 bp, Homo Sapiens; identical to SEQ ID NO: 51193
  misc_feature (747)..(747): n is a, c, g, or t

SEQ ID NO: 214984 - DNA, 909 bp, Homo Sapiens
  misc_feature (667)..(667): n is a, c, g, or t
  misc_feature (673)..(673): n is a, c, g, or t
  misc_feature (675)..(676): n is a, c, g, or t
  misc_feature (678)..(682): n is a, c, g, or t
  misc_feature (687)..(689): n is a, c, g, or t
  misc_feature (693)..(695): n is a, c, g, or t
  misc_feature (709)..(709): n is a, c, g, or t
  misc_feature (711)..(711): n is a, c, g, or t
  misc_feature (721)..(724): n is a, c, g, or t
  misc_feature (772)..(773): n is a, c, g, or t
  misc_feature (784)..(784): n is a, c, g, or t
ttgttggtccggtccgggattcccggggatattttaaaatgtaatatactttgtaccatttataaaaattgtgtgatgaatgaatcacatgttcgttgttataagtgttaaccttttttttgacaattttgtgggaaagacattctccactgaattttaactttccttgagactttcaagaatgcaggtctcgtttgatgaaaaaaccgacttcataacccaatgttactagttagcgacattgtgctgaatttctccttgaactttttaactttatatgtaaaataactttgatcttggtcatttgaaagatcatttccaggtctaaaattccatgattttgtatttaattcttcctgagaacagaagaggggaaagcaagagaggacggttttgtgtctttatgaactttgttacttaagtactccattggagacataatttttctaattagtggatctttttccactggaaagtgtgatagctcattgctaatttttcattcatagttcattgcttccatttgacctaagattggccatttgttggtgtgaaaatattttcttttcagaaatagtttactagtgattgaagtacttttcttatttttgcttcctattataaaatggcgtggggggaagggggaaggatggagatgggaggaganggttananntnnnnntctgnnntttnnngatttttttccctntnttggattttnnnnttaatgggtgtaatttgttttgtttttgggtgggttgttggatgtgtnntttgtgggagnttttgatttttgagtgggggggtttggaaaggagttaatttatattatttaatattttggtaatagaaatttaggagattgatgatattgaattaggataatttttgtaggataatggaaatttt

SEQ ID NO: 214985 - DNA, 759 bp, Homo Sapiens
  misc_feature (759)..(759): n is a, c, g, or t
gttttaatggaaagaaagtttgcttttaaactgaaagtagtttctttttgctaacaaatctaacttcatacataattggccatattagtaaaacacctcatgatagcagtgtatatatagtcttgtttgtagttggaagtcatcttttaggagttattctcaaatatatataatagctacccatgcatcattattaaaatccccaaattcaaaaaacctctgatatatatatataatttttttttttttttttttttggccaactgagattgaaatccaagtgctggtttctagttctgaacatcaactaaagagttttggaaatgacagcaatttataacaagttcatattgacttcctctctatggcaggaagacattctgtgctgttttgaacagattaaagatttgtgtagtttgtgggaaattgacgtttttgtttaaattccacccgcgtttgtcttttcctaccacctgtggccaggtgctcgctggccatcacagttgcgattccatgagtagctgctttatgactgctttttgtactatctggatgtgcccagagttacttctgtacaagctctgtatctatgtccgttgagaacattattttaacaagaagaacaccaacagtagcatgaaatataatactgttttataattctaaagctgctgttaatttatgaagtacataataatctaatgtaaactgcagaagtcagagcaagtgcctacatttttgtatttttggcattactan

SEQ ID NO: 214986 - DNA, 748 bp, Homo Sapiens; identical to SEQ ID NO: 43706

SEQ ID NO: 214987 - DNA, 790 bp, Homo Sapiens; identical to SEQ ID NO: 42403

SEQ ID NO: 214988 - DNA, 1000 bp, Homo Sapiens
  misc_feature (8)..(8): n is a, c, g, or t
cgattccncgggatgcctcactctgttgctcaggctggagtgcggtggtgtgatctcggctcatgtagcctcaacctccccggctcaagtgatcctcctgcctcagcctcccaagtagctgggactacaggcgttcactactacacccagctaatttttaagttttttatagagatgagggctccctatgttgcccaggttggtctcgaactcctggactcaaagtatcctcccgcctcggcctcccaaagtgttgggattataggagtgagccaccacaccggccaagatgcttttcaaactgatacagatgacaatgggagcctcataaagatggcttttgtttcttcccttcaaggtcatttacttgtacgagacagaaaaagatagcattggggacatgggatgggggagggagggcaatagtggaacgaactttccatgggaaactttcccttttgtaagttgagggccaggggtagggatattttttagtttgtgattttacatttatctgtacatactttttcaagattgatcatttttataaccatggttttcctgaaatcctcaattcatcaatatgaaggaaatgaaccacatagactttatgcaataaataacagtgcaagtgagtataactctaactgatgttccacaaaacatttttgatttcaggtttgtatgatgtagtttttaatcgtacattttcatatgcttcaaactaacacatttttaaagctttcccccacttttctctctatttgtattgttagccatcttgaagtgatgttgtttaacataaattgtactgttgaatttggctttacgggtgtaaacactgatggtatatcagtatctgagaccccaaactctccaaatactgatggtgcattttattcttgaagtgaaatctgtgcaataaaataacagactgtctgccaaaaaaaaaaaaaaaaaaaaaaaaaaaaaaaaaaaaaaaaaaaacaaaaaaaaaaaa

SEQ ID NO: 214989 - DNA, 953 bp, Homo Sapiens; identical to SEQ ID NO: 50823
  misc_feature (697)..(697): n is a, c, g, or t
  misc_feature (713)..(713): n is a, c, g, or t
  misc_feature (829)..(829): n is a, c, g, or t
  misc_feature (843)..(843): n is a, c, g, or t
  misc_feature (873)..(873): n is a, c, g, or t
  misc_feature (875)..(880): n is a, c, g, or t
  misc_feature (882)..(884): n is a, c, g, or t
  misc_feature (888)..(891): n is a, c, g, or t
  misc_feature (893)..(895): n is a, c, g, or t
  misc_feature (897)..(897): n is a, c, g, or t
  misc_feature (903)..(903): n is a, c, g, or t
  misc_feature (953)..(953): n is a, c, g, or t

SEQ ID NO: 214990 - DNA, 792 bp, Homo Sapiens; identical to SEQ ID NO: 52361

SEQ ID NO: 214991 - DNA, 544 bp, Homo Sapiens
tttttttttctttttagtgtggtttattgagttcagcagttctcatattctgtttaaataggtacagcattttcaagggcacagatacagagaagctggctttctaggtattgggcttccaagccaagagttttgtccttccacctgtattagttatctattgctgtgtaaaaaattaccctaaatttagtatgttaaaatagtaaacattatctgtcagtttctgtgggttaagaatttgggagtagtttaacatgatggttctggcccatggtatcatgaagttacagtcaagattgaacaggggctgcagtcagctggagctggagaaaccacttccaagttctctctttgtggccgttggcaggatgcctcagtttcttcccatgtgggtctctgcgtagggcagcatgagtgtcctcacaccatgacacctggcttctccctgagcagctgattccagagatcatggggcagggccaggagaaagctgcagtgccttttaagacatagtcttggaaaggacacaccggcacttcttatc

SEQ ID NO: 214992 - DNA, 557 bp, Homo Sapiens
ttttttttaacattacagaagacctaaaaccttatatttgatgaaggttctaagtacaaggatcaaactataatcgtgtcatttcttcaatactttcagtactgctccccgaccaggatttagtttgccaaattacgacatcattttcaaagtgctactaatcaacagagagggcaatgaatgaattcacccatatacatctgtcaggctattgagcgataaagcatggtattgagacatgtgtgttcttaccatctgcacacattacagcaatgcactgcacacatatatgtctgaacctaatgttacacgtgaaaaagaaaagcattcatgccaaccctcagtacaattcacatcacatcagttctacaattggtggctttatgttactctacatatacctatatgtcccgatttttttttcttgtgaaaaatgattaagacacagaatcagatatactctttaggagattagcttcaatcttatgctaacaaaatcgcagtcaccctcaaatggagttatggcaagcaaatttgctttctcagaactcataatt

SEQ ID NO: 214993 - DNA, 519 bp, Homo Sapiens
tgtcagccaatggtgatgctgggaaaaggtcatcagggaaactatctctacactgagttctctaatgccctgggaagagcattacactttcagcactgtggcaacgtgtactctcgttgaatggaaggctatcagaggccttataccaccatactaagaacatttctactgttttatgagaggcctgtgcccatcttagtataagaaaatgaacaagatttcagggaggttagtacgattgagtaaaagtaaagcttaagttgttagtcctggctagtcactcataacctatgaatttaaattatcttagggcctctattttttaatctgtaaaatgaggggatcaatgtgttacagattagttgatccttaaggttccttccaaatctaagcatgtcacttcctactcctgatagtgctggtggggagcagaaaggatacggccaggaatagaaaaaagggtaaagaaacttggttgacagagttggtttaggactagtggatggcatcatgtcaagt

SEQ ID NO: 214994 - DNA, 356 bp, Homo Sapiens
ttttttttattttttatatttatgtatatatttataattatttatttataacaagacttcaaaatatataaaaatatataaaactaaaattgacagaattacagggagaaattggtaagttcactagaatagaaaatttcaacacatctcagagtctgagagatcaagtagaagacaaaagaatagtaaaatggaaaaaatttgaactacaaaattaacaactttggtctaatggacatccaacaactaaaaaacaagcatagttttcaagcaatcatgaaacatttacaaaaacaggttataatctaggtcataaagcaaatctcaacaaatattaacagatcagtcttaacatg

SEQ ID NO: 214995 - DNA, 671 bp, Homo Sapiens; identical to SEQ ID NO: 48467

SEQ ID NO: 214996 - DNA, 584 bp, Homo Sapiens; identical to SEQ ID NO: 48560

SEQ ID NO: 214997 - DNA, 536 bp, Homo Sapiens
tttttttttttttttttttcagtaaacattccttttttattttaaaatacttcacaaagattgtatatgttcatgatgtacagttatgttttgatgtatatatatacattctgtaatggttaccacagtcaaattaacacattgatgaccacccatgctgtacattaaatctccagaacgtgttcaccttacaacttggtttttaacctttgaccaacatttctccattttccctaccttctggactctagtaaccaccgttcctccctctgcctcggagtttaagtttttaatattccacaattaagtgggatcatgaagtatttgcctatgtctgccttattttatagtgtccaccaggtttattcatgtgacaaatgtcaggatttcctttttacggctgagtaatattctgtttaaatatacatcacactttctttattcatccattaatggatgctaagtttgtttccatatgttgactattgtgaataatgctgtaatgaacatatgcgagtggcagatatctctttgaa

SEQ ID NO: 214998 - DNA, 527 bp, Homo Sapiens
tttttttttttttttttttccaattacaaaaaagttatctgattttatttcttatatatttggcacaaacagcagagactgaaagctactacacatgttgaactgctgacaggaaaagaacccagtagataaatctaggctttccactccatatattagctggggctgccataacaaaacatcatagactgggtggcttaaacaacaatttacttctcacagttctgaagtctggaagtctgagaacaggtcgccagcatggttaggttctcgtagggttctcttcctgttctgtagacagctggcttcttcctgcatcctcacatggtgcagagagcaagcaggctttctgatgtctttttgagacgtagtctcgctctgtcgcccagggtggagtacagtggcgtgatcctggctcactgcaacctccgcctcctgggttcaagcgattcttctccttcagcctcccgagtagctgggactacaggcacatgccactgtgcctggctaattttttgtattttttt

SEQ ID NO: 214999 - DNA, 716 bp, Homo Sapiens
tttttttttttttttttttaaagtttagtattttgttcaacaatttaaaaaacagatataataccagcataaaatattgcatagcaaataatagattatgtttgtacaaaatccagtaagaaaaacataattttctcatttaggatgattcataaaatacattttgagcaacagcgataacgagggtcccacatgcgtagatggcagcaccagagccagacccaccaccacggagttcgcgctcacggaacccaggcctgctgggtgtcagcagcagctaagctggatgcaggtactacaaaatgaccagcgctcggtctctgcttcctcagccaagtgcacaggtcagccaggtgggcactgaagtgaaaggctgcagagaggcggggaggacagcctgcagggcaggaggggcacagacaggccccagctgggtgccgcaggaaggacgtcaccctcaagccctcactggtagatgaccttcacgcaaaatgcctcttcgtttttgtcctcatggtcattgatgtagatcaggatctcctcctcacccactctctgactaggcgcaaactgcaagccgatggtgtaggtctctccacccccgacctggaaataagcatccaaatcccagcatccacccccgggctgtcccacgctctcaccagcaacctctctgcatggtcgtgtttatttccaaggggagctgacaaggcagg

SEQ ID NO: 215000 - DNA, 783 bp, Homo Sapiens
tttttttttttttttttttggagacagagtcttgctctattgcccaggctggagtgcagtggtgccatcctggctcactgcaacctcagcctcctgggttcaagcgattctcctgcctcagcctcccgagtagctgggattacaggcgcccactaccacacctggctaattttttttttttttgtatatttagtagagacgaggttaaatcatgttgaccaggctggtctcaaactcctgacctcacgtgatccacccaactcagtctcccaaagtgctgggactacaggcgtgagccaccatgcctggccactcagcagacatttcttgagcacctagcaccccctctaacaaaaacagtggatgtttgttgagtccttgccttatgcctggccttatgcacattatttacactacctcactcaatattcacctataagtagggtgaccatataacgtatcctccgaatcaggacacctatgagagtaaaaaggaacactactgataccactgaagtcctctgcaagttgacagttgcgctgctgggtggtggcctgagtaattaagggacactaacaatggcttcagcaggaagggtgcatgctggaggcaggtcaaagcatcctcctttaaggtcagtgaccctgccctgtcctgatcctcatgcttatccagcccatgaaaggttcccacacaagtttctgaagaagacctggtttcaccttcaacaccagctttccatttgaactacagagggatctccagctatgatgcaaagtcac

SEQ ID NO: 215001 - DNA, 703 bp, Homo Sapiens
ctttttattattatcttaaaataatagcattggaaggacatatgatttaaacaatcaatgttggaaacagtggctttaggattattatctggctgcccctcaacaataacaagtgattcgatcgacattccttagccaaaaacaaaaggcaaaacaaaaaaaaccaaaaaacaaaaaaaccccaaaaaactgtacaaatatgtatttttccctgagggatcaaggtacacccgcaagtgctctatgtacatattgcactagagaggaatgaagaacatgtgcaaaaaagcaacaatgagagaagcttacatactacttaaaccttttcatgaaagatactactaggttgttttgcattttggaatgtcggaacacaacaactagctattccttagtctaaaactaaaaacacacatttctactatggcacattcaatgaaataaaaagttttccaaagacagatagacaaattccatcaagaaaataatacaaagtttgtttgtttgtatttttttttttagaaaattacattactttctttctttgtttcacattacaaaatctttttttctttacacaaatcacattttattgcaggaatatttcaagtgccatcaaatatttatagaagggttaaaaaaatagaagtctctctaaagtggtccagacaaggctttgtatagaataaatctttttttcccc

SEQ ID NO: 215002 - DNA, 689 bp, Homo Sapiens; identical to SEQ ID NO: 40743

SEQ ID NO: 215003 - DNA, 731 bp, Homo Sapiens
ttttttttttttttttttcttaatttataaagaaaagacatttattttggctcacaattctgcaggctgtactggcatggcaccaacatttgctcagcttctggtgagggcctcaggaagcttacagtaaaggcggaaggtgaagggggagcaggcatatcacatggcgagaaagaggggagaggtctcagactcttttaaacaaccatatctatgtgaattgagtgagaactcactcatcaccaaggagatggtgctgagccattcatgaaggatcctctctcatgatccaaatacttcccaccaggctccacttccaacactgggaattacatttcaacatgagatttggaggggacgagcatccaaaccatatcagatggtgagacaggagaactttgtgtgtcccagctgcactggtctgaagatataactaagtccctggactttttctcccttaattggagaattcctaatgttccatgatcagcctgattgaccagtggctgactggtcctgagaggggagataaaaacagacacacagctttctccatagacaaatctcaacactttattcatcctgtggcagcaagaaggggacatggccccaagatagccaatcaggtgaggtggctggagtatgtgttatctttccagatagtacatacagactgatcatgcagaaacaggaagggaagcaataagttaaaagccacataagttatgaaa

SEQ ID NO: 215004 - DNA, 781 bp, Homo Sapiens
ccttaattattaatacttgctagaaaatggagtttgacattatttacaattataccaatattcacagaggccaactgtcacaggcattaagggcacaccagggccaggagacctcatttcagacttcccaaatatttttatattttagctattaagatcagttaccagagctcaacttgttcttaacaagcagaatttttatgtccattcaaagagtctcttatacctttctgggcctatttacttgcagagaacagtagaaactgtaaccaggctcttcatatcatgcattcacatgtgatgtccaatcttcatatgctgtccaatttctttaagataaatggagtgactcgcagcagggccacgtagatgagaaagttctgtatggagatcatatcctcgtgcatcttccgtttcatctccgtgaggtccagcttccgggcaaggcccccaatccggaagatcagctgcctcgctctgctctccctaatggcccccttacacccggaactcggcctatcccctcgccccagctaatttttgtatttttagtagaaatgggcgtggtggcaggcgcctgtaatcccatctactcaggaagctgaggctggagaatcgcttgaacccgggaggcggaggttgcagtgagcagagatcacgccactgcagtccagcctgggcaacagtgcgagactctgtctcaaaaaaaaaataaataaattacctgggtgtggcagcgcgtgcctgtaatcccagctacccaggaggctgaggcaagaga

SEQ ID NO: 215005 - DNA, 551 bp, Homo Sapiens
tttggtcttgacaatctttaattcagaaagaaaacatccagtaaattcacaaacataaatcatggttaaaatgtattactacaaaggaatacaaattaaatatgtgtatcagttgtgtgcagtttcagctgccagaaaaagacaatgttcactgaagaaataaacaacaaattacgtaagaattgactccaaataatatagggaaactgctgtctacaaatacactcctattgagactactcaagtactcttaattttggaaaaccttcctcttgaaatagatcatttctgtattcacttctaagtagttctgcttactgtttcatcctggatttcagttatgtgttgattttcaaacatcgtcaccctaaccgtacacatccaaaggagagtgaaggacagagtacatctttaatttggacagtgtgagatacacattagttgtagtccaaaatggaatttgaggagggttaaaaacactggccctagccaggtgcagaggctcacgcctgtaatcctagcactttgggaggccgaggtggatggatcac

SEQ ID NO: 215006 - DNA, 590 bp, Homo Sapiens; identical to SEQ ID NO: 52979

SEQ ID NO: 215007 - DNA, 625 bp, Homo Sapiens
tgactttttaaatactgtatgaaataaggatccaaatatgcatatctaatttttgaatttttagcaaaatttcccaccaacatttattgaaaagttcatatttgctcacataacttgatttttttacctgtaacatatatgaaatgtccatgagcaattatctggcctctcttccatcttcagttaacttatttacttttctgtactatgatgttaaaaagtaagtttcacttccagtatggtacaaatattgttctaacttcttcatttatttaataatatcttagctattcttgactaatgtgttatttaaaactttgaatcatcttattaacttccacaagcaaataaatgtttagtctcttgttgatattgtaataagcctccagatcaatgtggagagaactaaatgtttgacaatattgagatttccaatgcatgatcataatatgaatttcccacttattaatagccttttaataaatatataattaatttcataactttctctgttactgatggttttaatagtttttgataacttttcatttttgttttgtggattttctaatatatagaaatattaaaagaataatgcaccaaatcttcttacctacattcatca

SEQ ID NO: 215008 - DNA, 837 bp, Homo Sapiens; identical to SEQ ID NO: 53428

SEQ ID NO: 215009 - DNA, 507 bp, Homo Sapiens
ggaatgaccaagaaaatagaacggaagaaaaaaaatgtgttaatcattttcttttaatggtatgtcagcagaaggggttctgactgtaagctaatgtgcacttgtgcctgtcctctttgtcttaaactaaagttggtggtatgaatcgaaaaatgtgtattggtttaaaaagcagtttatgatatgaaacagtcttccagtttttatatcaactcctttgctttcaacagtcagttcaaagcaccatttattgatggtttactgtatgccagacactgtattttttctttacgtattaccctacttaatcctcaacacaattttatgaagtagttattgttagcctgaaactggcatttctccatccttttatggtgctgtctttgaaaagtctcagatgtgtaacatgtcctagaagtagataattatcaaaggaagactgcaactgcgactcacttccctctgagaaaggaatatccctgactagattacatatctagttccaga

SEQ ID NO: 215010 - DNA, 746 bp, Homo Sapiens
gttaatgatgagctctacctcaacggagccagcgtgctgccccacaagtctattggcgagtcagtgccagagcctcgtatcatcatgtgaggggatgcagtggggctggccgagccccggttttcccatcagcaaggggagtgctggcctgacacatcagaagaccctggacttgtcattatttgtctggggggcactgggtgaagctgaagctgttggacacctgccttctcatgtggacatcatctggcaggatccctgctgggcacaccccacaaaccccactccctcaagaagggccagggccagggctgtatggaataataatttaatgctcactgtggccctgactgaaagtcaagctcaggcacaattagggccatggctgggctcccaccaatgaggatacaggcaggcaaggaggttggatgtggtggtgtgggatacaggagaagggcaaagggagctcataaatagggcccagcctggctctgggttcaaaggtggaggctccaggatggcacaggctgtgagggctaggcagctgaggaggtagtactcgtattggctcccttctcccagtcctctacagacacgatggtggttttgcagaagaagcagtccttgttgttcatcaggtgctggttgatacaggctctacaacaggggaggggatgaggactgccctgcatgtacctactgctctccccacaccaagctgtggggcccacttacttgcaggactt

SEQ ID NO: 215011 - DNA, 787 bp, Homo Sapiens; identical to SEQ ID NO: 52967

SEQ ID NO: 215012 - DNA, 674 bp, Homo Sapiens
cgtggtggtgggcacctgtagtctcagctacttgggaggctgaggcaggagaatggtttgaacccgggaagcggagcttgcagtgagccgagattgtgccactgcactccagcctgggcaacacagcgagactgcatctcaaaaaaataaataaataaagtttcagttgggcaagatgaaaaagctctggagatctgttacataataaaagtacatttaacactactgaactgcacatttaaaaatgattaaggccaggtgcggtggctcacacctgtaatcccagtactttgggaggccgaggcaggaggatcacttgagcccaggagtttgagaccagcctgggcaacatggcaaaaccctgtgtctacaaaaaaaaatacaaaaattagctgggtgtggtggcatgtgcctgtagccccagctactcaggaggctgaggtggaaggatcacctgaacccaggatgttgagactgcaatgaactatgatcatgccactgcactccagcctggacaacagggagagaccatgagccccaaactccccacagaggtcacctttggaaaaggaaagaagaggagatggtgcaaagactttcgtcgtgttatatgacttttttccatatgtaatgattaacacagacctggctgcaaattggcaaaccccaaagct

SEQ ID NO: 215013 - DNA, 650 bp, Homo Sapiens
ctatttttattaattatatttataataaaatttttcttcatttttatccctttaactagactataaagttactgatttttcttttttgtctttgcatattcaatgcttagtatggtagcaaacttgttcaataagtattgtttaaataaatgaagagaagcaccactggaatgtaaatgacttactttagaagttcactagatgttttcattttcttattgtcattaagcagaaaaaggcatgacttagcaggatgatcagaaggcagaaggtttgggctttttgccagctgtcagaaatatctgaccataaaattcttttatggtcatgatcagaaattatagaaaagtcctagaatactttagagcaggaaggaaccacagaagtgatctggtacaatcatcttgttttacaaacaagaaaatttttaaaaattgaaattgaggaaattgcttgtctaacatctaagttagttagtggtagggcaagcaccagaattcaggtttttattctgcaattccatgttctcccctctacaccagagttaactacccaagagctatactttactgggtttttatgatgttcatgtaaacaaatatattggaaagtacttcagaaagtacaaaagggctaagcagtaatggaca

SEQ ID NO: 215014 - DNA, 571 bp, Homo Sapiens; identical to SEQ ID NO: 48624

SEQ ID NO: 215015 - DNA, 493 bp, Homo Sapiens; identical to SEQ ID NO: 40206

SEQ ID NO: 215016 - DNA, 448 bp, Homo Sapiens
ggccgggggtacatctgtggtttttaatctgtgctagacttcaaaactgtgatctcctgttattgtatgcaaccttgaactccacctctgcaggggttcttctgtgattaaataggttataattataagcaaaattcagagcaactgagtactgatctaaaaagattacctttggctggaggtgagctgcactgaaactttacgacaaaatgtctctggacaaagagagtcagagaagagaagcaaaaggacactaattcatctgtaatttactgttggtaagcctagcagtaaagagacattggtcaattgctctgaccctgatgaattattaaactgagatcattgtcgtttatgcttgcagatgttaaatggaaaagttatatatgcataaaccttttcttcctggatttggcagatatgtataattatattaaaatggttctag

SEQ ID NO: 215017 - DNA, 757 bp, Homo Sapiens
  misc_feature (706)..(706): n is a, c, g, or t
  misc_feature (754)..(754): n is a, c, g, or t
attctagaggctgaggcaggagaatctcttgaacccaggaggtggaggttgcagtgagcctagatcgcgccactgcactccagcctgggcaacagagtgagactgcatctaataaaaacaacaacaaaaaaaacttcaaactatagaatgattagctaaaaactgagtatggtagaaaaggagccaaaatcagaacaaactacaaagaaatgctttatgtttctttaaaagtaagaatggtaccatttttgaaaggtttaggtctctgcttctgtctattcacatgtctttttctttagggacctcccgaattccctggtaacagtgttcattctcttcaccttggatcattggtatgcactgcttcaggacgtctggaaggtgcctgaagtcagtcgcatcttcagcagcatctatttcatcctttggttgttgcttggctccattatctttcgaagtatcatagtagccatgatgggtaagcatagaggaggtgaaacttgtttgggaagtgtggttgggaaaaagttattctgaaagctgggattggtggcttatgggtataaagaacctagtgtagcaggaaggcttgggttctggattggatatttcacttggattctccccacccaagccctcttcccaagtctagtcattaccatctcccagctcctaatggccctttggggcagttactaactttcanaatatcaggaaagagctgaatgaggagatggcccgtcgggaggttcanctc

SEQ ID NO: 215018 - DNA, 587 bp, Homo Sapiens; identical to SEQ ID NO: 50146

SEQ ID NO: 215019 - DNA, 656 bp, Homo Sapiens
ccgtgactttaacaccaataaatgcaaaggttttggatttgtgactatgacaaactatgatgaggctgccatggcgatagctagcctcaatggataccgtctgggagacagagtactgcaggtctcctttaagacaaacaaaacgcacaaagcctaatgagctcttgtcctcagtccatttatatatgaaaactatacaacaaaggcaagttaagagaaactttatacattagtaaatgtctttgtaagtcagtgttgagatggggataaaatgactacttagcatcctaagaaatatgtgagattttttattgctagtatttgaattaaaacttcttaaatatcttttatgtttgaatatggacaagaggtacagggtttttacctgtcacattgcattctattgccttctttgaagaaggtggaccttttaaagtgtttcagctaagggaagacatttcttttctttttacataactgccttgaacctgtgagtaaatattgaggctttgtgttgtaattcttcagttggttgtgtcttttttttcccccctttttttcctttttctgattagctttgtgtttggtttacatttaaagcattgctgttatgtctgtttaagaaagtattttgaagtttacatttttatttatga

SEQ ID NO: 215020 - DNA, 606 bp, Homo Sapiens; identical to SEQ ID NO: 40056
  misc_feature (565)..(565): n is a, c, g, or t

SEQ ID NO: 215021 - DNA, 771 bp, Homo Sapiens
  misc_feature (733)..(733): n is a, c, g, or t
gaaacagatggtatgaccaagtgggagagagactctgtctgcaaaactgggagagcttcactctgactgggggtggaagaggaatgaacaagtccaccccagcgtaaaaataagatgaaaatataaaagaatgtcagtgttgaaggttactccttttgattttgccaatatcccggaaccatgtgagcacatgaacattccaaagaagaagatacctccaggttcttcagatgagtctcactctgttgcccaggctggaatacactggcaccgtctcagctcactgcaacctccgactccctggttcaagcgattctcctgcctcagcctcccaagtagccgggattacagataagaatatggaatgctcactccacaacattgtttgtgaaaatcttcagatttattttattgaacaaggctataaaagtatttacagaggagagggaaggagagcacagtggagagatgccttgggagagagctgttactggccatggtgtcattcttcttccacagggagaagcagatccaaactgagaagggagaagatgtgatagttgatatcacaacaagcttgagttttgattaatatcttggacaggacattctatgttccaaatagagattgtgtgttacaaagtgactgcgggaccaaaaatgagtagtaaattcatgaacctcttagatttttttaatttaggacatgatgagattactgccagtgactcancttttaaatacagggatactaataaataaagtaaattg

SEQ ID NO: 215022 - DNA, 596 bp, Homo Sapiens
cctgtttgccattaagtcacaacattttatcaaaatatacacacagcacaaatacctttaaaatgtatggttggaattctaattcaactcaattgactgctgcaaacagcatgcatgggccattgatcttgaatgatgcctacggaggggcttatgagtcatgaaatcaccagtcatggcacgagaaggggttaaggttcttttcccaggagacttatgcacttcatttcttttcttgttatagtgtgagaatggcagtgagtgactgtgccaatactggagtctgctgagaatgggtggatggaaaggtttttactggcaagggtgaaatgatactatcttttctatcttgacaagataacaagcgaaggtgtctagcaaaccttccctctcactttccacttgtcctcttgaccatggatttcatgcccaatcaggatgaatggatttgtagatctcaagttacaagctatgtttattgtaaagaattcccataaaaacctatccagggctggccccccagccatttacacatccacagataggaatagaataaaacgggttagtgattacttgtctgcggctgagtgagatcc

SEQ ID NO: 215023 - DNA, 735 bp, Homo Sapiens; identical to SEQ ID NO: 52891

SEQ ID NO: 215024 - DNA, 673 bp, Homo Sapiens
tttttttttttttttttttatcatggtaacgtgaaagtttatttttgtctgaaagctttcataagtatttaaatcaacacagtaatcaactatttaattgctgcaatcggtcaaaatttacaaaagccacacacaaatttctctccttctacacgtagctccatacactgccccttgccaaacacccttccgggaaccaatcagcatgacattcctgggcagttaatgtgagaagcgagggcagggcaccgtccaggtggactttatccttcagggagggccgtatcctctcctcttacactctgtgtgtgtttaattttctaaagaaacaaccatttattcattagctatactcagccatcttctcttattttctaaacatgcccatttgacctggcagagaacgctgcagcttttgcaggttgataaaagatgtttcacttaatgaccactgggcgttttaactcctttcagccatgggctcctgcatccagctcatgatgctggtacgacaggttcttttacttcataaaaaggtggaggaaaccctaacattttcaaattcaagtaaatgaaaacatttgccactgttgttccacataaaagtatctgcaaagaaaagcccatggagacgacctggacacatgtatttctagggaacagatgcttagtt

SEQ ID NO: 215025 - DNA, 348 bp, Homo Sapiens; identical to SEQ ID NO: 40675

SEQ ID NO: 215026 - DNA, 354 bp, Homo Sapiens
gagggtcccattcagatccggcttggacaggcacctgagatggtgccaaagtgcagctgactcttcccacgacagccctgcccttcccatgaggcaggctcttcagtgagtgtttgaacgtaattatgtagttttctgtttaattgaaaaagagagctatgcctttttttctttttggaagtaaagcagctaaaaacatgtttctataggtgagtgttggacctcacaccctccccttccctgtacatttgtctttggtgctggacgtggccatgtgaggccaggttgaggccctttgtagacaacatacagttgctcagcctggccccatgtagccaggtgcttttgtagatc

SEQ ID NO: 215027 - DNA, 590 bp, Homo Sapiens
tttttttttttttttttggaagatgaaacaattttattttctttgtagggacagtctatattggccaggctggtctccaactcctggactcaagtaatcctccactctcagcctcctaaagtactgggattacttacaggtgtgagccaccagtacctagccaaagttagttttaatgtgagagtcaaggactacagtggcatgctgaggtaacaactgcaggagcatcgaggtaacagcaaaaatcttttactccaattgggtcaatccagttaaccatgtaagaaactcctcacctagggtcagtatgttacttctgtatttctgcaagcacaatccactgacataaaagtctaataattagactttattgtaagtctaatgtatcttgtacatgataaaatgtatgaactttggatcaatatggcaagctgaagacacctgtcatgtggggggactattttgtttgggtttttttcccccttcctcatgttacctggtctaagaaggaaagttttttggttttctttttgctatgattgtctaacttttcctaatcaagttttacttgggtttttttataccaatga

SEQ ID NO: 215028 - DNA, 495 bp, Homo Sapiens
tttttttttttttttttcaacatcacagtcacaaatgtttatttggaggacctgacagccaggtctcaattgctaaagtgttgccacaagaaggaagtattaggcttgtcctgtgtggttcctgagggcaaggccaggtttgatgggcaagggtgacaagaaacccattttagctcaaggtgaaggaggatgttcaggttgaagctgcccaggagaggaacaggattgctgataaagaagtgtcctgtccctgcatgggttccagcagaggccaggtatgcagggacgggcactgctcaagtgctttccctccctgcttgtgcttaaagtctgattctagggaagactctggggctggtgcctcctggaggccctctgcctctgtccctacatcatttcctctggaactccggcctcactggtttctgcgggaggcgcttacgtgcaacaagcctggcccgcatccttgtctcaagaccgtggggctgtctctag

SEQ ID NO: 215029 - DNA, 577 bp, Homo Sapiens
tttttttttttttttttcatttctcatgattttttttaatttaacatatatagtacatgtaaacaactggcataaaattcataaaaatacaatactcctatgcaatatcactttattcctgatacatactttcattttctcattaatatcactggcctattttaacactatattttttttgccaagcatttttagaggcttatctttttaaagaaatacagccccaactttgttttcgaaaatgttgtagcaatagctattttgatcacttctttgcccatccttactttcctcatactaaagcaaaaatatttgtaaatgctaacaatatgcaaaacactgagctttaatactgttttgtacgcctatggaacctgctaccaatctgcattgccatcaaaggtgtggatgctccacagtgcttgggctgcgagctgtggccacggctgcatagcagggaccttcaggcctctgctccaaactggctcccctaatatatagccatattttgctgggggttacattcataaacactgctacaaaaggatccttctggaaaaagctaatttatattact

SEQ ID NO: 215030 - DNA, 556 bp, Homo Sapiens
tttttttttttttttttaaatttcaagggataaatttattattttcactactgggaggtaggtaatctcagtataagcattctttttctcctttcttgaaatctgtaaacagcaccctgctgtatgtacaaaaggctgtctcagtgaaatacattttttgatgtggttggttttgctcttattcctgaataaactaagtctctcacctaatccatctttcatttcaaatatcaatttgcttagcaaaccctttttgtgcattttacacaggcgaatctcagtcctagctccctccccacccggtcaacacacctcgcataaatgcagacatgcctttagccaggcatggtggtgtgcacctgtagtcccagctactcagcaggctgaggtgggaggatcacttgagccaggagttcaagacgcaagtgagctatgatcatgccactgcactctagcctgggtgacagagtgagactctgtctcaaaaaaataaatataaatataaatataaatgtagacatgtaagacacagggctgcttctgccgagcactcgca

SEQ ID NO: 215031 - DNA, 501 bp, Homo Sapiens
tttttttttttttttttaccattgaaactgttttaatgttgttgcaactccaaaatgcaacaatcatcagcttgtaaaagacccaaatttcaaaaattcattttaattactcctttatacctattttacaaaataaaggtaagacacatttaaatcctccttgtcctaattggctatgttcctaacttgttttctatcactacagtgaatgctgcaatactgatataagaaaaaataaaataaaatagtaacctctgcttcaatgtacagtttccagaatctgccagaactggggaactgggcaacaaggcgttcataagtcttccgtgctttgtctataggttgattctaaaattgaaaaccaataaacagcatttacaatgttaggattatgaaaatattattcactgcagaaccaagtagtgtgattggacccatagagaaggaaatgtaatcctatatcactaaacctgtgcctctcgaatgagaatgctccaagca

SEQ ID NO: 215032 - DNA, 405 bp, Homo Sapiens
  misc_feature (400)..(400): n is a, c, g, or t
tttttttttttttttttacttcaattgtaattttagttccagagaaggcagtgctgtcttaaaggcttggacaagattttctttttctcttactccaggaagatcacttaacaacaaatatttgaggtttcttaaatgacgcaaagcaatgatgcctttgtctgtgatattcccacaggatattatttccatttccaatatggttttttgtaaattttcaagttgactaagtctcagcaaacagtcatcctcgatataatgacacttgcacagccttattttttcaacatgctctaggccctccatgtgatcaaatccaatgctcatgatacaagagtcggtggcgtcgatcgcctgaatcttgtatttgtccaaagggcctgttggaaggtggttgtantcctt

SEQ ID NO: 215033 - DNA, 475 bp, Homo Sapiens
tttttttttttgcttttaatttttattttatcaaagagaatcacttaagtcagaattcatttgagcaatctggcttaaattggggaatagtcaacactggattgccattttaagtttccagattaatacaaaattagtgtcaatagtatacgttaagctgaaaacttttatagtcaggagtacggtgagactcagttttacctattaaatcagtttaatctgtaaatctgattttgccgtaaaatcacgctaatattacacacttcaaaaaaacatgcttttcctttgagaaactttccacatctcagccaaaatgccttaatttcataaaataaatgttacaatacaaaaatcttttgtaaaaatatcaactatatatgaattaaaatcaatctcttcttttgttaaaagttacctgtaattaagaatgtcagaagaaccgagcctccattctaaagtttctgtggggaagtca

SEQ ID NO: 215034 - DNA, 639 bp, Homo Sapiens
  misc_feature (627)..(627): n is a, c, g, or t
ttttttttttttttgttcagtaatttgcttttattaggcctttacagagcattcaacttcccttgggaacaattttacatagcaactggtataaacaggtttaggaacctgcaaacgcattcttggtaggcattgtgacactcagtggttagaagaagcatgcaggggtgcccactagacatgggataactgactgttttacagaggtaatggagagcattggacaatcaaggaagtcagttaaggaggttttagagcaattattgttgttgatgatttatcaatcagaccttctcagttttctagattacagctctgttgggaatgctgtgtttgttatcaatttgtatttggcattggcattgtgtaccatacttattaggtgtatgtgaaaaacaacaaaataagttgatgaaataatgtattttctttacagattgcatccaagacttatcagtctttatggaggaagcatggaagaaatgattccaaagtaacatgtaattgtttctaaaagaaatgtacaaactagaattttaatataaagaaatgtggccatgctttaaacctgtggtccccaccctttttgggaccagtttcatggaagacaatttttctgtggatggnggaatgggttca

SEQ ID NO: 215035 - DNA, 604 bp, Homo Sapiens
ttttttttttttttgttatcacactaagtatattttattgtgcattaattagatgaaagttagtaatatgcattgaccaaaacatttgattgacaagaccataaaggataactgagagttttctttaatataattgttgtacagcaaggattcctgctgtatagagtatatagaagatgacatactctaggaattagaacaatatatattcaatacaataacaaaactatatagtactttaagaactctttcacatatatgaacactcttacttagaacttcagctgtttaaagtaagcaatatgcaagcctataaagtacacaccaaaaaaatctaacctacaaaacacccaaagcaaatgttagcatatctctattatcaagaatatcttctcaccatcgtttctttcaaaaatatgtgaaaaagttctttctttccttatgagtggcaatttttaaaagtcccctcttctgaaattcagatatgtttcaaatcacactatcatcttcttaaagaaaaatgaaaaccactcctggcttttagatgctgggaacatagtttaccacatattccctttgtcctattgcaaggtagtgtgatata

SEQ ID NO: 215036 - DNA, 595 bp, Homo Sapiens
  misc_feature (516)..(516): n is a, c, g, or t
ttttttttttttttattaatacaaatttatatagtggcatatactattggagaaatcagaaattcataacacacaaattcatattggaaatacaaaaatcatttgagagtcaagaaatcaggttgacagcaccacaaatgtttactcagtctgagcaggtgtgtagtatccaagaataacaaatacctatagcagactgagactgaatatcataagactgtgcaaacacattccaacactatttcccacccaacaatagaatctgcaggagtcctctaggaggcctggggtacaataaaagggcagcaaagcagaaaaaatggtacagaccattctttcttttaaccttcacagccagcatataaaagcaagtagtaaccactgagagttgtttgttccttctcacttgaaggcaagatataaaaggttagtaaaacacacataaggcattagtgagcaaatcagagaaattgaaagcagagctttgactgaaatataatccacattagtcatcanattacttgattcctataatgaagtatgaaacaaaccacatgaataattctacatcaaaggggtatatctcatctccaca

SEQ ID NO: 215037 - DNA, 609 bp, Homo Sapiens
tttttttttttttttttaataaaaaaaaaattttaaaaagaaaggtaattaaatttaagaaggacttcccttattatatcaagaggttaatactcaaaatggtggtgtgtcatttttaagaattttccttcagaatgaaattctaatgatctggtaagcagttagttagaatttggttctgccctaaggctcctttctcttaataagattaaaaattgagggtaaataggaaacttaaacaaaatctgagatgtgccattcatttcaagttaagctcaataacccccaaatgtaaaagtccttcctgacataacacacatatcaagaaccaagatttctcagagagaatctgatgcccactctctctctagaggctaagctcccactgtaggggcaatgttacctgttaactttagctcttttttctctctctggcttttatctcacaggtctgttccttagtctctgttgaggtgaaactccaatatctgaacccaccagccaaataagcaacctgtgtacaagccaagttaaaatttcactcccgtaatggatgaggagaaaccagaagacatttctcatgcacagggagtgcatgaatcccctgaa

SEQ ID NO: 215038 - DNA, 566 bp, Homo Sapiens
tttttttttttttttctcatccaaagcagaatttttactcagcaaggcaaggttagagtcaaccagttttggttgattcatttttcagaagcccaagggatagtatctctaatttggggtccttttatgtgctcaagaagtaaacaaaccaacaaaatgtaaatcagttctcaagagccattattagggaattcagaacatagtgctaacatgagatctgagaaataaaagaaggtaaagcataaaacagagaagagcaccaggccctcccctaaataaacaaacaacacaaggccttgcactcagaagacccttggaatgtaggtctgtctctctttctttgaatacttaaatctgaagggatggaaagaccacctaaaaatcctagttttttggcatgatgggggtctaattccttgttcactccaaagagctgatggcacatgttccctgtaaggatctccttgtgctaaaagtctgcagtggcctttagtttataggactgtgttcaggcttccccacttcgcagacagccatgaagtcagctgtcattcaactcaacgctt

SEQ ID NO: 215039 - DNA, 411 bp, Homo Sapiens
ttttttttttttttttttaaggactgctagttttttattttgaaggaaggaaaactgcttaacatgaacgggaccccgtcttgaagcactgtggagctttcatctatcagtttagttctatcctgccatgaaccaatccttggcaattctcactagcaagctggagagcctgaacatgaacgaagtcagccataggaggaggccattgttgactctttcccaaagggcacagtcagtgacaggggtcttcggcaggcacctggcacacagtcacatccactacaggaagtcagcggggagaccttacaggaaggttctgggagggggtcttctctactctctcaggcggactgcgaggactctcaacaaagaatatcccaggatgtcacggcttcactggtgaatttcatc

SEQ ID NO: 215040 - DNA, 518 bp, Homo Sapiens
ttttttttttttttttttaggacaaataaaatttatttttctctgtaaattcatttaaaagtatgttatctatgattatcctatcaaggtcagaaatgtcagatcttactccaagataggtaaacgcctttgaaacgcaacaaaaagagacgatgatcttatgagctcatttatgttcatgcatgaaagtgtgaaggtcactagctttgctgtgtttctacaagtttccttgactgtaaaaacagtcaaaatgtaaccaacctaattcaagatgttaaattaattaagttaaataaaattagccaaagcactgtaaattaaatgacataatacttaagttctgtactgatgacaccctttgatcaaaaggatggtgacccactaaggtgcttctggaggttattacttctctaattccgaatttatcatcactgactctttaggcataataaaatgtagagtgtaaataggttggtgacaatttatttaatttaggttgagctacttataaatacctg

SEQ ID NO: 215041 - DNA, 589 bp, Homo Sapiens
  misc_feature (485)..(485): n is a, c, g, or t
  misc_feature (500)..(500): n is a, c, g, or t
ttttttttttttttttttcattagaaggttctgaattcatctaatggctggttatttttacagatgccaagtttacaaaacatacaagtgcacagacaggtgtgggaggtagctcgaaatatacagagtgttcgcaacactagagacgtcttctggctgccatcaggggactcggaggtagggtaggcttggtgaggcccgtggcttgtgtccgtggcacagcctcctgcaaaggggctgccctgctcccctgttcccatggtgccaggccgtgctccccaggtgcctccggggtgctgaagatcttttcatagtactcgatcagcagttcagtgaacatgttcaggggcacaagggcactcagggaggagaccccctgggatggccagatcaaattcagcccgaagacacaggccaggttagagctgttcattttgttgaagatgctctcccgggacaccgcatgcaggaagcccatgaggtancggaggacgacgtanttgtgctctgggaggctccgtaagatctggcggcagcgagtgacacgcaggctgctctccacacaggtgatcccaagaatctgctcgta

SEQ ID NO: 215042 - DNA, 670 bp, Homo Sapiens
  misc_feature (662)..(662): n is a, c, g, or t
ttttttttttttttttttaaagcaaagtatccaatttttattgattctataacatatatatgtgcatatattgtagtatctttatcaatcaggatttacttgctgataacagaaaccactgcaacctagtttagacacaatgtgcttttgttagtttctggccatgcacagaagcctcctgcttacaagatgaatggaaaggctgaaggagcagcctttagtctgacttccaggaatgactctcagaacactatcacataactggctgtccagaagagatgctatctctgcttacagcctggaagctggaaagtcatgaagatgctgcccattgctggctccagagccacattattttagccacaatccccaccagcaaaatggatgctcctcgtcctgccacaccacaccctggggtctctgttattgctcttctagaaaaataaaatgctctgtggctgtttgttggcagaaacattacctctatctcatttggccttcccagtttcaagtaggtacatctgcatagaggaagctaagtcacatttggaattcaagctgaaaggggctctgggaaatgtaggcttcagctttttttggattcaccagtgagtcacggcacacctgtgtgcacaaatgggttacaagtgtgttaagagaanccatcttg

SEQ ID NO: 215043 - DNA, 570 bp, Homo Sapiens
ttttttttttttttttttcagttttaaacatactgtttagtgaaaaatattcttttacaacaaaaacgattgttaccagcttcatataattaaaactgaaaaccaaattgtgtaacaggtagcataacatgtcagtttatattattttaaaaccaaatgttattccataatcatttatgcaacaaccccaaatttcaaacaatattgaacacaatacaaatttttcataaaacaaaacttttgggtctgagtaggcagtactggaatttaaactacaattaagagcctaaggggatgcttgctctattttaagtgattgtaacgcaggagtgtttaacagaaccacttgagcagctgtttcaaaacacatatacactccatctccagagatgttgatttagtaagctgaggtggctaccaggcctatggaatctctaaaatgctccccagcaatttctaatgaacaatactgtttaagaactattttctatgaaataggcttgacatgctttcagcttatatgtatgtgtatttttaagtatcttaagcattgccactattttgaaagac

SEQ ID NO: 215044 - DNA, 615 bp, Homo Sapiens
ttttttttttttttttttagagagcttaggattttatttttcgtttacacagggaatccaagaaaggagacagacaaagtgagtctcaaggatgagagcagagaaaagctcgagataagagctgtgcagccgggtcaggaagtgatcggtctaggtcggaacaggagaatcagttagacacaacggatgtgtttgagcctttggaaaacggtatcgttaggcatgtggcaaaaacgttggggtacttgaaaaaaaggctggccatgggttagtaaaaagctagatatgtgaaaatattaggtaattattaactcaaaagaaaaaaaaagattgtacaggaattgtggcatggttttatactgtagcagtgaacagcaggtactcaatcatgaagagctaagcctgatttcatcacgacagctgtgaaagttgcaggtaccaaaatggaactacttccaccaatccctaaacaaatggagtcgggaggccacgaagggggagctctcatgcaggaatacctgcagcaggcctcctcacaagacgctcctgcacgtcctgcacgtttgcctgtaaccggacttactgcagggaaattcctcaggactgcagtattct

SEQ ID NO: 215045 - DNA, 709 bp, Homo Sapiens
  misc_feature (572)..(572): n is a, c, g, or t
  misc_feature (592)..(592): n is a, c, g, or t
ttttttttttttttttttcatgggcaatttaaaaaaatagctttattgaggtatactttgacatgccataaaattcacccattgtatgtgtacaattcaattacttcatttatacaactgttcaattatcaccatattccagcttaatggtcaatatttgctttgtcatttgatcttttctctatggtaagcaaaaatctattatttgaaaggttccttcactgaaagctgggtggagttgaactctaaaattacctacaaaattactttctatctagtcatctatgtctaattcttcaatttgacacatgcatgttactagcacaagctgcattttaaaggcagcaggaaggtcttttactatcattagaagttaactttaaggattgagcaggcacgatacagcatagattgtttcgtgtgctatatagtaaggtcaatattcttgctccttctacaaataaaaaaaattccacagaataacaattacaggtggagttcccaacggaaatgcaggtactgaatacaaccaactgcaactgtttctctgctcctcaatcctgctggcgtantacgcgagctgccgacgtcncccaacccaccaggtaagccggccgctcctgtccctaggctgtgaggggttcagaggtaagacttcggtgtattcacttagctccctacggaaaactgcagagaagcaaagcaggta

SEQ ID NO: 215046 - DNA, 510 bp, Homo Sapiens
ttttttttttttttttttcattttgaaaaagctatttactttttttccaaatattatcccaaataggtgttttacagataagggtcaatacgaagtcaaacattctacagaagaaaatcgtttttacagacattaagaataattttaacagaagaaaaagctcacatctatctagatgtggctatgttccatgggaaaaatttcagcatccaaagtgcaaagaaaaaatgactgtagcttttcttaccacaaaatattgacaatcttcccttatagcctactctttattgttagttgggatgccaaaggatgatatattgacctttagaagttgggctccactggacaaggttgggggtatgggggccaagcatcagaatgaattcaattttaaaagaaaaactggctttgaccccaaatgaacccaaagttcagccagcggcacatcagagataaatacgagttgtactttcacatttacaaggttgtgccactcaacactattaaaga

SEQ ID NO: 215047 - DNA, 498 bp, Homo Sapiens
ttttttttttttttttttcccggagaggtaaaaatttattgatttctatcatatcagcatgttatgatatggtcacgcctgctcatacagctgacttcttagagccaaaagagaattttttttccttttaaaaatacatttgttcagcaggaaaaaacattttaaaaacaagcattttcatattaagtggaaattaaaaacaatggctttccccccgccaactcatgaggaatagggctggtcagcaatagatctctgagtgcttccaatttgttttcaggcctctgtccccagtctgttccttgtcttccacagaaagtagttccaggggaaaaagaaattagaatctcaccaaaacagcagcctaaatacagatagaaaaataagaggtagacacgactgtaacgatttaactcatttggtagactgtgcaagatattttaatatttaaatttttcagtgggatttaaacaattgtttaaacatcaataaaacact

SEQ ID NO: 215048 - DNA, 493 bp, Homo Sapiens
ttttttttttttttttctgtatgaagtgtatcttttttcttttaatatttttcgtcgttttgatagataacgcatacaaagagtagtaaaacgcaaacagcacaaaagggaaaggaagtttccttccaagggcggttcccctcccctagggcagtttcctgtgttcctttgcagagatactcagtatgtttacaagcgtgtgtgtttattcgtctcaggtagagaccagagaaatatagaaggggtcctcccaactgctccaggctgtgatcaagggtgaaattcgtgcgaagggatctgggtaggaaggggtccctgggcttcgaccgtcaccttaaagctccccgggaccggtcctttcagccggctctgggctccctcccctcctctcggggatttccgtctgtgatagggcacctccccgcttaaggcttttcgaggatcccttcaaggccaccggttagcgctgaaagagaagcgtctgtgacatcac

SEQ ID NO: 215049 - DNA, 512 bp, Homo Sapiens; identical to SEQ ID NO: 44770
  misc_feature (498)..(498): n is a, c, g, or t

SEQ ID NO: 215050 - DNA, 398 bp, Homo Sapiens
ttttttttttttttttttacgagatttaaatattttattccaacctgtgtaataggggtctcctcctccttgaactgtcccgattggctggggtcacgtggtgagggtcctgggtgaccaggcctagccttggccacatgagtccacacagtggaaaaggcttggctcctgtggtcggcacacacgagactctggttgcgcctgctgggtgtggaacaggcgcaccatcgccatgcctgcagctcacaaagctcctgctggcctgggatgcactgggagcagctgccatgggtccgtcagctgaagtgaaggaagtcctggccctcctgcaagtgcagtgacctcaggttgtcctcaaaggcgccccctgtgaggtccagcttcacgcagatgacgaa

SEQ ID NO: 215051 - DNA, 549 bp, Homo Sapiens
ttttttttttttttttttacttgtaaatttcatatttattgtaacaaaaattatgacatgtccatttgtgcattctgcttgagtataactctgggtatgtaaatggcctaatggggcactatacaaccatgctgattgtggcagcagtaaggaacacagttaaaagtgtctgtcaaagtgggaaggctgggacaggggaggaaaatgggttcagggcccttgggtgcaggttcttgtccagtggcctaagatccatttcctccggacagaaacactgcagctgctcagcctcctcattcagtgaagtgagggtgagttgtgaggcaggcaggctcctcagaggggagggggaggggaaacgtcagttacttgggctgtgtccttacgccaagactacaaaacatcgtaagcctcactatacaacactgagctatttacaatggaaattctcaatcagctgttctctcagagaaaattagtgaatcccagtgacttaagtcacctgacagagtaaagcaactcctaggagttagtctccatattctacaa

SEQ ID NO: 215052 - DNA, 645 bp, Homo Sapiens
  misc_feature (556)..(556): n is a, c, g, or t
ttttttttttttttttttaggttgtactaattgttctattttattatgagttattgtttttaatctcctgtgcctagtttatacactcactttatgataggtaaggatgtacaggaaaaatcataggatacatagagtttgttattatctgtggtttcaagcatcctctgggggtcttgggatacatcctccatggatatggggaaactactatatataaaaagtcggtaaaatgacaaatagagaagaaaagcagacatcattttacatatgctgaagaaggctaatcacgagttcaatccatccttcattgctcaggtccttcactcacaggatttgagtctacaggtgatgccaatgtttttattattttacgtctttcttccctgtgtagccaaatgttggcactttctatgcctccttttttgtctctccacttctaaagccaatcaccaattccaggtttctgcaagtctggccatcctttttctccagcgcacatggtctgtttcctcttggccacgtactgcctcttccatctggaatacttcactcncctccatttcgtttattcaacttcgtcctatttattatgttcctaagctgaatgaaggtctgttgtttttgctcttttctttctgaagc

SEQ ID NO: 215053 - DNA, 653 bp, Homo Sapiens
ttttttttttttttttttaaacattcaaacatttattgatctttttatcaaactatgtgaaggaatggaagattaaaaagaaaggaaatcctttctcatttaagagtagaaatggagctctagtagtcaaaacgaccctcaagttaaaagagtccctaaattgttcagaatcagctactgagatttggtaacagcaaaccacatggtctttcctctggtatatgattaggacagaaaccttcttgttgggccaatgactgcgcaggttttgatgacatgaggaatacaataagttggccattgtatgaaagggaggcagcaggacctgagcttgtgcccttgtcactttctgtatgaggccaggagggtggagcttgatgacatctcctaacaatacccacatgcacatctctgtcatccttaaatcactgagtcttggacttcaggttctccttgtgccggtccacaagggaaccaacccactccaccgttttctgcttggcttcctcccagctgtagagtggcttatacgccagatctcgctgagccttcttataagagaaggtgaatacgctatttgacaatgtgactatgtggcggttgaagggcggtcgataggtgtaaattggcctgagtaggaagctcactatttc

SEQ ID NO: 215054 - DNA, 718 bp, Homo Sapiens
  misc_feature (700)..(700): n is a, c, g, or t
ttttttttttttttttctgtgtttttgtgtttattttaaaaagttcacacaccttccccatctttgtcccagcactggttttggtgactccacccctactcccctatgagtcagcccagaatgtgaagccagtggccccagggcaggagatggccacccctcagccccaccgcagggtgaagctgggcccgaagctcctcctgtcctagggccacgctggctgcagtgaggcggcggggacggaatgtgagtgggtggagagctcctggcaggaaggccaggtagcacctctgccctcatggcactgataaggagccaggaagcagggcaggtggggcataggccgtggcagggtacctacatgtcaatcacacgtgatgggtgggcctgggtagctgcatgccagactgggcaccagactgtggcacacagctcaagggtaaccttgcatccaggcccttctgtgagagtaggatgggagggagttgcacccatctcctgtccgcccccccccaaaaatatatatgtatgtcgatatataatatagaggtatatacacctgtacataaaattgttgccaccaaccactaaatggttacactacaccaagacactaaaatggcagggagccctgggatcctggggttggcagacacagggaatagggggtagaggccaggctaatttctccttcacaganagcagggagagaaaggag

SEQ ID NO: 215055 - DNA, 686 bp, Homo Sapiens
ttttttttttttttttttaaaagagcatatgataaagttgatttaatgaatgcaactgactacataaaccaatatagccgtatgcatcagaatctggagcaagctcttacagatgactggagacgcacccagtgtggtgctgcctgagaccaaatgccatcccacgacaagggcctcctgcttcatgagaacacttaccgtcattcgaatctctttgagattaatgtgataatagacactatacattgcatatgcactgggcctcagcagatccttccaacttttcaaagtgaaaaaggacaaacgtaagtgagtttttaaagaggtggcgctcatcgatttttcccgctgtcctgtgtgcaggttctgctgaacacgcacctcccaatcagtatgttctgagaggggagggagacagacaaaactccctccctccccatcccaagtctatccagctcacaaggggcaaggtctgctggagtggtggggcggggcggggcggggctgggctgggaatgttcactggaagaggcactgtcacaagcgtcagagagctgggcatgaggtctgcatggccctgcgggctcttcctacctagaacgcccttccaaggtgaactccacactgcagtcctagacagaggggtgtttctggttggactgtgacatcccagaaagctgtcactc

SEQ ID NO: 215056 - DNA, 654 bp, Homo Sapiens
ttttttttttttttttttgggagttctaattcataaagaaaaaatcatttactggaatgagctaaaatgctagagagaaatccacagcaataattatccaaatatatgaacaatcccatcttcaaagatcattattccaacattctctgaggtgcaactaataattgctaacttggctgtgactttacagtgcctgtcaatgtgatttcaaggatcccataagctatctaatcacagtggatgcacagtacatgtgatgtgatcagatgaaggtttgatcatgaactcaattaaaaaactgaaatataagagagaaggaaactgatggggaaacactcaagagctttggcaagattagaaaggttaaaggcaggatggggaagaaaagcaaggacatctaagagtacagagagaaacctaatcaaaggttacaagtacatacaacaatactgcatgggaaggaaggttccgctggtaatttggacagacggcacctaaagccattctgtttatccatcgcacctgagggcatgggtgtgcggagtgctgacccctcaagctcttctgaagtccacctgcctgccccactttcccacagactgcaaccatgccagggtggactcaaagcgagagactccctggaagtcatctggt

SEQ ID NO: 215057 - DNA, 683 bp, Homo Sapiens
  misc_feature (601)..(601): n is a, c, g, or t
ttttttttttttttttttccaagcttcccaagctttatttattgccaaatttgggcggcctcgcccgcacggcaccctccgagtccccgccgcgtctgcaccatcccgcgatggcgtttctcgtgtttttcttttctggatgatataaatattgaccgcacactcctgcttgctccgggttttctctggggtcccaagagcgcagtggccttgggggagaggtgagggtcctgccctccggccgggccgccaaagcagggtgacccgagagcgcaaaggcggccgcgacgtgagcccgaccccacagcccccctgccacccagcagctcccaaacacccctcacagccacagctcaaatccaccttttattttttcttaaaaaaaaaaagaaaaaaagaaaatggaaccaaccaaacaaaaaaccaaagcggccgcgcggcttccaggtggcgctgcatgcatggcggggtcaggagcctggtctccacacccgccagctggtctgcggcggggccgccggacggcgctgggcgccctgcggagcacgaggccacgggcggggccagtagtctccacataaagtgcatggaggccgcctcnctcctcccacgcccgcccgggaaggctccgcccggggctgcgaagtcaacaagccgcgtgcactgccgggcggccgaggggg

SEQ ID NO: 215058 - DNA, 600 bp, Homo Sapiens
ttttttttttttttttttcacacaaatcatcggcatttatttcctgggtcctaggtgtcacttatcctggtggacagggcagaggtggtcagatcgttttgagccaaaatcccttccctaaaaatggatctgtggagctccatgagggaacctcagagatgcacaatgacagtttagctaaaatggcttaaaaaatgtgaattgattgtcagctctctccatatctgctgaaaaaaggtttaaaatttttaaaaagtttaaaagtgttttctaaaaaagggacaagcaggtctggacccagaagattgggctggagaggaggtgttggtgttgggacagggtccctgcccgggccgctcgcgagaggagcgttcctgtgtgggctgctcactgtagggcaggccccgcccaagtcccggcgccagctcaataaataacatcttgtggttacagtgtcttgaaagtgtacctgggcacggtgcgaaggtggtgggaatgtgaagcctgtgggtgtgggcagagggctttcccggagtggaggccacagaggcctctggggagccttctcagtctggcctggtttatctgggacatggagct

SEQ ID NO: 215059 - DNA, 634 bp, Homo Sapiens
ttttttttttttttttttggattacttttctttatttaggctaaaatttagacttaaaaaaagaatatgctaacgcatagtatatacagtattgctccttgagggtaacactggcacataattcttcttagcatccccaaatcaatttgttggagattagcacatagtaggcactcaatagatattagtatgtgttccttgttcaatacaaacatgttcatcagtaaaagaaaccatactgctaataattttatttcttgatttagaagcaaaatataggcgcctaatattaatctcttcaattttaggttctaattcacaacagtccaagtttagcaagtctagtagttttcatataaatacctcatacagttgcaagcagatggcatctatgaacccaacttgcatacttgggattttgtttttcttctccctgttcattagatcagtgggttctatgttgagttcttttctctctctgtctccttgatcaaaaaattcagttgctacaagttctgctatccgttgttgaataggccagggttttgtaattgcagaaagatcacaagctgtcatcagcattgccaaaaacaactccttttgatgaggatcttccacattgaattgatttttt

SEQ ID NO: 215060 - DNA, 666 bp, Homo Sapiens
ttttttttttttttttttgagatggacaaatatctttatttacagcaacagatagaacagaccctccctcccttcccttcctttccccttccagtcttttccatactgttccccctcccgccccaccccaggctctcgcctagccctgccctctggggtcactgcgtgggttaggcccccaaaaaagcctaggaaaggagactggagagggctggctgagggtgggtggggcgtctcttcacatttttctgtcctctaagcctggggtggaggagagaggcaggcaccaggagcagggagaggtagagagctacggccccaccggcccaccctccccaagtaactttcacagtgttccccagccctggctgccctctgcggcccccaccccagccctgcccctaggttgtcctgtcaggtcctcagcaatgtatgaacctggtaacccagtaaagagttcaggcttctctgccatgggcccaccacccacggctgaggaggtggcccctctgagtgccccccactattttcaaggctggggttctgagaggacatgggtgggtaggagaggaccagggagagggggcttctcaagccttgtgtgacagtcctgggcctggccccactcagagggaccctgctggaatctgcaggggcgccaggctg

SEQ ID NO: 215061 - DNA, 607 bp, Homo Sapiens
ttttttttttttttttttaatctttcaaaagctgacgatttttaatttaacagaaaagaaaatgaaattaatttttataaaaatgatccaagtgttcaatgcacaaatttttctctcaaacagcagaataagatgcacccaggaattctcatataccgcaatagaatgaagaaacagtactttcagagaattatctttaggtgaagaaattcaaactgtcaagagtaatatactgtacataaacatatacataaaaagtctaaaaaccaagctgtgacaagggacctagaactgaaacaaaatttgagaaaaacttacttaaaagcatttgtttcctgtaatctctacaaataattttagaagcagagatttctgcactcaactgttatgactaatacaaccaaaaacttcacttaatggcattttgtgtaatggtgccgatatccttggtgtattaattttttgacttatttcctttttctttttcaaattcagctatctgattaaatatattcagtaaattctgaggtaaatttttcttaacactgctttctgagtgttctttgctacttagtgcatcttcttctggaacctctgttttgatatc

SEQ ID NO: 215062 - DNA, 659 bp, Homo Sapiens
  misc_feature (584)..(584): n is a, c, g, or t
  misc_feature (604)..(604): n is a, c, g, or t
ttttttttttttttttttaaatcttttctagctttccttctgacaaactttgctggagtcctactccttttctctccttcttgagaaaaatgcaaattttgctccatgttttggtatagcagggaagcttccatctttttttactgaagcataacatcagggcctacattccatctcaaacggcttgtcaaggtccttccacaaataagatgttcctccaaagatgatgtacagatgccaagttggatatagctagagaaatctcatggctaccccaatcaggagagaggttgctgtttctcagaagtcctcctccccacttccagggtcatcattgtctctcaacaactttgtggggatataaaaaccctcgcggaactggttttctgagaggtgtttgaagcaggaatatattatgcaggggatggagcagccattccctggctagatgaccacatcactgttgcacactgattgtttgctaaaggcacaatgctttcctgaccagaaatgaaaaatgcctgctgctcaattattgtcaatctaactggaatagagtcaggcctcgtcagatggtttcccanacacccagatggtctcttanattctggatggtcagtgtggtagttctttccattacatccttgagattctgctgt

SEQ ID NO: 215063 - DNA, 674 bp, Homo Sapiens
  misc_feature (21)..(21): n is a, c, g, or t
ttttttttttttttttttagnaaatgaaatttcttgggaagttcaaaaaaagatctttcaaatcttttcatcacaatagagtggaaatccgtctgtcttcagagttgtcgaacttttctttctgtgctttttatgttgacatctaacttgtccactttggttgtcagccggtcaagaatgtcatcttgctcctcaatttctgtctgcatccccagggctatgtccttcagacgacccagtcccatggacagctcatctaggttgctgtcgatcttctggtgataggctcgaaggtgtgggttctttgggtaagcatcagtactcatggcagaaccagcccctctggggacagggtctgtatcatccagctttctaaggtttgggtggctggcctggtactttgcttcctgttctttacttgtacttatagcttctttcaatctgttgttgggctgggaggtgagggtgccattctgttcaggtggggtctctactggtttggatttgaagtaattgaccagccccccaaacacgctcttaatgctattgatgtgtttctggctgatcttcaaatcttggtccatcttgtccaccatcttctctgtgcgctccaggactcctcgctgacgggcgagctcctcggaagaggcgacccaaccttctcggactcgtac

SEQ ID NO: 215064 - DNA, 884 bp, Homo Sapiens
  misc_feature (18)..(18): n is a, c, g, or t
aaggcttgggtaccggtnctcggaattcccgggatcaacatgcaacgcaatgtccaggaaattagataaacttactgtgctaaggatggctgttcagcacatgaaaacattaagaggtgccaccaatccatacacagaagcaaactacaaaccaacttttctatcagacgatgaattgaaacacctcattctcagggcagcagatggatttttgtttgtcgtaggatgtgaccgagggaagatactctttgtctcagagtctgtcttcaagatcctcaactacagccagaatgatctgattggtcagagtttgtttgactacctgcatcctaaagatattgccaaagtcaaggagcagctctcctcctctgacaccgcaccccgggagcggctcatagatgcaaaaactggacttccagttaaaacagatataacccctgggccatctcgattatgttctggagcacgacgttctttcttctgtaggatgaagtgtaacaggccttcagtaaaggttgaagacaaggacttcccctctacctgctcaaagaaaaaagcagatcgaaaaagcttctgcacaatccacagcacaggctatttgaaaagctggccacccacaaagatggggctggatgaagacaacgaaccagacaatgaggggtgtaacctcagctgcctcgtcgcaattggacgactgcattctcatgtagttccacaaccagtgaacgggggaaatcagggtgaaatctatggaatatgtttctcggcacgcgatagatggaaagtttgtttttgtagaccagagggcaacagctattttggcatatttaccacaagaacttctaggcacatcgtgttatgaatattttcaccaaagatgacat

SEQ ID NO: 215065 - DNA, 887 bp, Homo Sapiens; identical to SEQ ID NO: 45451

SEQ ID NO: 215066 - DNA, 874 bp, Homo Sapiens; identical to SEQ ID NO: 54344

SEQ ID NO: 215067 - DNA, 872 bp, Homo Sapiens; identical to SEQ ID NO: 54899

SEQ ID NO: 215068 - DNA, 888 bp, Homo Sapiens; identical to SEQ ID NO: 49215

SEQ ID NO: 215069 - DNA, 619 bp, Homo Sapiens
ttgaagattaataagttttaatattggtgaaaagtgacctttcacatcagcaaagctaatctgaagtgctgtaagagcaaccaagtcactcagagaatgctaggagaataactaagtcaactccagctgctaagaggtcaagcttgtactaggccaagagcaccggcagcaacagagatgaaagcagctccagactgactaccaggcagcaaatgaagagcagcaggagagaaatgttcaaggtgaagggagaatactggaaggcttcatgttgcagaattacttctgaatagagctcaaagtcaaaagtcacttttattagccacacatttgactcccccgacccccagcccctgccaagcgaagtctgggaggctaggaatattcaaattccttcactaagccattctgtgagcgtttatttattacagccagcccttgctttcgttaatcaaatgaacctaagtgatatatttgaacattcatttacaagccaataaatacatggagaagtatcacagtggggccttggtgactctgtgagacctgtcacctgatacgtcaattaagaaactgttgcaagaagttagtacaataactagctatcccccccgcactg

SEQ ID NO: 215070 - DNA, 524 bp, Homo Sapiens
ttttttactttcatggaaactacatgtccttttagtaaaagtctgtcaaagaaatttacaaaaacaaaatagacaacaaacaaaacaacttcaagtcataaactctaaatttaaattgccttgttttccttccaactgctcgggccctttccccaccatgtttccgggcactgcgcaggctgagctcaagggaaatttctttgaacgatggctttttctctagccttgtttctgtccagcgtcattacagacctggctgaaatcacagtggatttcagagaaagccagaattaaacacgataaaaatttaaaaaataactacttcataaatatttattatttacattaggggcaatcttttagtctgaagagtttttatacaagttgatgaaatgtacaagcagtgagaagagactccagcagtttaaagaagggcaaaattagaatgcaacgaagatataaaatacattaaacaaaaataatttgcacaaaagcaaacaggacatgatagaaacctttttctt

SEQ ID NO: 215071 - DNA, 560 bp, Homo Sapiens
tttttgagacagagttcactctgtcgaccaggctggagtgtagcgggggcaatctctgctcactgcaacctccaccccaatactttcatttttaaatattatttatggcatccagatttgcataagatggactgggtcaatggccatgccctttataaatcaatattcttaagttctgcaaattcagtttcctaaagagccaaatcacatcctactcatcagcaaggcaggtagacatcattttcacaatgacttctaattttccaccattgtaaaaaaaaaaaatatgtaatcactttcttattgtaaaataaacaatttacttttccaggactttctgcctccctgctccccttttttttttttcaaacaatcttgaatcctttgtcatgagtctggtgccaagagaagcctgtttgttggtttgagagcagttcatgcagacacagaccacttcctctgagaattcatttgcttccccaggatggaatctggctgggcctctgaccttgctggtcacgtgggccggggcctccatcagtcataccctggactcctat

SEQ ID NO: 215072 - DNA, 463 bp, Homo Sapiens
ttttagggactcacttggaagtttattggtggaagtagagaagcaccttgttggaaacaccatcttacctctcccaaggtcacttggctcacagtggaaaaggagcattataagaggtggtagcaagtacacgtatgcaaggaagagcatgttttgcctaggtgtcaggctcccaagaagtgctctcctaggtaactggctatatgaacttgtagaaggtgctcattccagtcctcttgttcccagaggctgtggctcaaggcagctctcatgggtatattcaaattgattggagatgccactggagagggtatcttgtagctgctgcagttgtctatttcaatggcagtgtcattgttcctgtctgctgtgagctggggctttcctgagagctgtgagaaactgccactggtctgctcagccgccagcagcacgaggggctcgcttggctggggggatgaca

SEQ ID NO: 215073 - DNA, 470 bp, Homo Sapiens
ttttttattttttaaatattccatgatattctttttatttccaggtgtggcatataaaactgacagcttacagtaagaaatatttcttatgatcaaacacttcatatgcactttattgcttttagttttgaattatttcaaggtatgttagaaaatgaaaaaataaaagatcgtaagtatatgtaagattagatgaactaagttgcttaagtcagtggtttccatatcaacaatgtgactacaagttaaaagttctgaagtcctaaatgtctcttcctgagaaatttcccatttggggctcaacagcacaaaacttttattagcgcttctctggggaatcacttggcattcctcgttctctgcaaactggacagcaggttcctttcaccaattcaggactgggacagggagccgggggacaaatctccaccacacaggtgacctggccactctcacaaatgcagtgagtg

SEQ ID NO: 215074 - DNA, 490 bp, Homo Sapiens; identical to SEQ ID NO: 60859

SEQ ID NO: 215075 - DNA, 455 bp, Homo Sapiens
tttttcaggttgagaaatacatttatttgtactctcattccagaaaataactggatgagacattataaatatacgataatgaaaatcatttggttacctgtagaagctgaactaatgtagcaagaatagtaatggtaaaacatagcaactcatccacctaaaaatagacacgcagattcattctatgaagtaattgatctatctgaatcaacagaggcatagtatatgggtattacacacaggagctctacagagatctgtgactacccctaaagtaacgggaccatctttctacatcacacatgagaattatatgtcggcattatacagagatttacaagtacccctaaagtaatgggaccatcattttatatcacatatgagcattatatacaggcattatagggagatttataactactcccaaagtaatgagaccatctttctatatcaca

SEQ ID NO: 215076 - DNA, 449 bp, Homo Sapiens
aagatacagggtctcaccctgtcgctcagtctggaggtgtggcatacagccttgaactactggcctcaagctagtctcctgctgcagcctcccaaagcactgagattacaggtgtcagccattgcacctggcctttctctatccttctttaagaatggtaatttactgctccagggaattttgggaaaaacaggtgatttttggtgagttacggatcactgggaagagaccctaaacacatatacacgcatgcattcgagcacacacacgcacacatgtgcatagacaaataaaattaggcaaggagacaaaatattattgaaaacaaagtacccacacagacaataacagatgcagcacatctttgtgtggctttccatgctaccaagtccccaatggggacttcacaactgctgatgacacaagcccaaggaagtgacatgccagat

SEQ ID NO: 215077 - DNA, 757 bp, Homo Sapiens; identical to SEQ ID NO: 46874
  misc_feature (593)..(593): n is a, c, g, or t
  misc_feature (675)..(675): n is a, c, g, or t
  misc_feature (722)..(722): n is a, c, g, or t

SEQ ID NO: 215078 - DNA, 870 bp, Homo Sapiens
gggatatgaggcaagaaggcttcctggctcatcccagcagaacagaaggctgtatgtttgaaaagggccccaggcagttttatgatgacacctgtgttgtcccagaaaaattcgatggagacatcaaacaagagccaggaatgtatcgggaaggacccacataccaacggcgaggatcacttcagctctggcagtttttggtagctcttctggatgacccttcaaattctcattttattgcctggactggtcgaggcatggaatttaaactgattgagcctgaagaggtggcccgacgttggggcattcagaaaaacaggccagctatgaactatgataaacttagccgttcactccgctattactatgagaaaggaattatgcaaaaggtggctggagagagatatgtctacaagtttgtgtgtgatccagaagcccttttctccatggcctttccagataatcagcgtccactgctgaagacagacatggaacgtcacatcaacgaggaggacacagtgcctctttctcactttgatgagagcatggcctacatgccggaaaggggctgctgcaacccccacccctacaacgaaggctacgtgtattaacacaagtgacagtcaagcagggcgtttttgcgcttttccttttttctgcaagatacagaaaaattgcttgaatctttgttttaatttccgttgctttgaattttaattttttaaataataatacccccaaaagggggcttttccccggttgcctttatttctatggggcctgcccatgggactggtgccactttttatatttaaaagatggggtgggggaattatatcctaaaacatttttatttctcgggggagaaaa

SEQ ID NO: 215079 - DNA, 1000 bp, Homo Sapiens
  misc_feature (630)..(630): n is a, c, g, or t
  misc_feature (635)..(635): n is a, c, g, or t
ccgtctgtagacaataagcagaatttgtcttagaacttttgtcccagatatcttaatttcctgtttttaacaacattaaatcagaagacatgttctgattttttggatcatggaacaagaaatctaaaactctagaatttggcagtaaacaataaaaggtaaagattttctaatttgtaaataacacagaaattacacaggtgattttttttttttaatcactggcaaaagctaaaggactttagaaaggtatactattcagctgggcgtaatggctcacacctgtaatcccagcgcttttggagggccgaggtgggtggatcacccgtgtcagggagattgaaacccatcgtgtgcttaacacagttgaaaacccctgttctcttggttaaaaaatttaaccaaaaaaaatttatccccggcgttgggtgggccaaaaccgccccctataatttccccaagcttacatcttttttaagggcccgtaaaggtcaaggggaaaaaaattcccctctttggaaaacacccaccactaaatgaggcaagaagagaggttttgtccacattttgggaagtcccccccaaagagatatccatatgtttcccaccctttggcgaactttctcttangtccncctgtgagggttgggatacaaagcaaaaatccgcttagaacaatctcatttgtgtcctccccgtagttatgtcaacgttcggttgttgggtaagtactagaaagggaggacgcgtggttttcttctagaaaccccgtgggtgtaaaaaatatatcccaaaaacggggtggagaaaaaaataaatatcttcaacagtggggtgtgtaaagatatagcctttactctgaatacatgagagcagaatatatgcgatcggcagactaagccactcacttcagagagggggctctctccaagaggagaaaaagatacactcttttatgtgggggggggaccttacttttccactacactttctatctctc

SEQ ID NO: 215080 - DNA, 459 bp, Homo Sapiens
  misc_feature (458)..(458): n is a, c, g, or t
tagtaaacatcagctttcctcaggtgttctgctttattattcccgtgtagccacagcaacagaactggccccatgtctctcaatcagggaggtccccagccagctttggaaagacacccatcaaaaagagtgagcaagcctaaagaagggttcaatagggaaggtaccagcggccggctgcagaggggctccattcccctgaccctcagtcacttcccagaaaccacacagaggagcccgggtgtgccagaaacagcctttcataatacaagatggacaggaaagaggccaagggcaggcagttcccaatctccacaagggcaagaaggtagagtccatacttctttcttgtctttttctttttttgaaacaggatctggctccgtcatccaggctggagcacagtggcactatctcggctcactgcaacctccacctcctgggctcaagccatcttnc

SEQ ID NO: 215081 - DNA, 420 bp, Homo Sapiens
tagaaataggggtctcaccatgttacccaagctggtcttgaactcctggcctcaagcaatcctcctgcctaggccttgcaaagcactgggattaaaggcatgagccactgcaaccggcctgaacctcatttataaaaacacagttaaaacacaggccatttctagtaaattcaatcataatttttcaaaatcaacattatcgtgtagtcaagaatttcatgttgcccaaagagaggtctggcctttgctgtggttgagtgagccctctctttcttaaagatctgtcactggaagtgccctcccacttaaacacacaaataatgagagaggccttctgtatcctctctatggtgccacggcagtgcctgcagtcagaggaaatgcaggcaggataggatacaagttcctggacagaacaca

SEQ ID NO: 215082 - DNA, 497 bp, Homo Sapiens
ttttttttttaccacgctaaaggaataaaacacgttttatttggagatgagcaagaatgctttatgggcttccagtataccacaaataagccggaaggagaggaaatagtaaagcagaaagactgaggatacctggagggcaattccaggatatgagagcctcctggatttgtgcttccggtttggatgtccctggttgaagccccatctcctttctaggatgctgctggctttgattcctctacctgctgtccttaacattcacaagcagcagttttcaacagtgcagatgacataggctgagcatggctcacaagtgttgctcgaggtgcatgtggtcgaacatgggctacaggaaagcctgctgtcctcgctgtccagcaggccccagtacgtgttgatctcaccctccagccgggccttcacgtccaggagcacctggtactcctggttctgtcgctccaggtcgcagcggatctcggccagctggttctcca

SEQ ID NO: 215083 - DNA, 598 bp, Homo Sapiens; identical to SEQ ID NO: 60251

SEQ ID NO: 215084 - DNA, 454 bp, Homo Sapiens
aacgcagagtctcactcactctgtgacccaggctggagtgcagtggcgtgatctcagctcactgcaacctctgccttctgggttcaagcagttagcttgcctcagcctcctgagtagctgggactacaggtgccaaccactatgcacagctaatttttgtatttttagtagagatggggtttcaccatgttggccgggctggtctcaaactcctgacctcaagtgatctaaagtgctgggattacaggcgtgagccactgcgcccggccttctttcccttttacaagtacagaacaagtggacttcaaaagtccaaagcatttgattaaaaaaaaaaaaaaaaaaaaagaatcactgcttcaaatggaatgttctatttgtgtttaacccactccctccaggactggagcaggggttgtgagtggagacagtggccaatgacctacagagcagt

SEQ ID NO: 215085 - DNA, 629 bp, Homo Sapiens
  misc_feature (467)..(467): n is a, c, g, or t
  misc_feature (553)..(553): n is a, c, g, or t
tttcgtgacatataccttggaggcattttgtatatttggaaattctcatttgcatttttagacaatggagtaactcttttgcaggttgtactaaaacacaaacacaccactgaagaaaccagactaggaatttcagcattcattcgatgtttctgggacagggctccttcttgaatttaagttttgagaatccaaaatctcttctgtttgcccatctgcttctacctctattttgttctgaatctcttttgcatcttcactaaggcaagttcttatgctctcgtcctcctctaggactctctggactgtgatggcagcactcggagaactaacagtagtggcagcagcaggaacaatgactggagtgtgaggaggagaagctggaggagttggaggagttggaggaagggaagaactgtggaagggtgatgggagctgggatacactccagtttcatttcttctggnggattttcgagaatctccaattcaagagtcaatggcaatacttcctgttttactatttccacaatgctctccgtggctgataattnttcgctaactccatttatttcattaattaggttagtactagaaaccagtggaatatcattaggtgctacactacag

SEQ ID NO: 215086 - DNA, 482 bp, Homo Sapiens
tttgaagctttttttttagtttttaatcctatctcaataaaagtaaatacataaggattacacataaaccaaatctgaagtaatatagattgggggaacctcaagagggtcaggagataatgaagattatacctcaatattgggattatgatgttagttctttatttcaataaaagtggatagagatctttcatatcagggacagggcttagctgtaaggacgaaagtaatcttccgggaattatgcatacaggcttgacatcatttttattggatggctgatgaactggaaaactccaggatagccaggctttaatttgtaatcttaattttcatataaatcggtacatttcagggggaggcagagggggatgtggggacattgatgcttgccggccttgtggtaataagacagctctgaagcacaggcagcagtactaactcatccagtatctgattctgtcttttcctctatccatctg

SEQ ID NO: 215087 - DNA, 544 bp, Homo Sapiens
ttttttttatcttaataatataagtaattaattaaacaagtgttagagaattggaaacataaaaagagccaggaggtaacataaaaccatccaccacatatacacacacacaaagttaacagtagttctcttctggtagtaagattatggctaatttttctacaaggcatatatatttatttacacatataaatttttttttaatgtaaagcttaagtgaacacatacctgatcccacctccattaaaacaaataccaccacttatgttagagtctaacagtaatacttacttttaagtcagttactgcattagatagtaggaacagaattctctagaaaatggttatatggcctatgagatttaaccactggagttgcaggttcaagaagagactgccaaggattctaacactggcaccattaatacacctctctacctaaggagccccagaaaaatcactttccagggacaaagaagtccttaaagtgtatatggaaggtttcacatcttagcttcagtaccttgtatcaaacaccaatatt

SEQ ID NO: 215088 - DNA, 528 bp, Homo Sapiens
tttgctttattttgctttatcattttattggtaaaatttatttcaatgcaaaacatatacagagacaagtacacggtggtaaatgtatagctcaataaatctaatgaaataaacacaccaatgtaacagatcaagaaagaggacattactagcttccagatgccctatcatgtggcttcccagtttagttccctcaaggataatgaatattctgactattaatgtcatagatcagttttatcttcttttgaagtttatgtaagtggaatcttttctgtctggtcaatatcatgtttccgagattcatctatattgttgcctttagttggagactgttcattctcattactggatggccatcctgtgaatatacttgggcagttaatatttgatcaattaatttcttccctcaagggtagctcaaaagttgaccatggcctccctacaccgtccctgatttcaatctgaatccacaggaagagtctcaccttactctaatgacttgcattgaatatcagaacacagaag

SEQ ID NO: 215089 - DNA, 510 bp, Homo Sapiens; identical to SEQ ID NO: 60858

SEQ ID NO: 215090 - DNA, 460 bp, Homo Sapiens
tttttgcaccaaacgaatgtcaagctttcagatgaaaggccctattaccagtacaaagtatcatttaattacactgctgatccagctccagttatctgcttcccagctcctaactcccactgggcagattctgaaactgcataggagattaagtcaagagaggagaacaggagagacattctctccttgaactttcttaaatggaagagggagggaaaaatgaaaagaaaggcctattttccaaggaggaggctggggcaatgatctttccattaggcagacctgcataagaatctatagattatttaacgccgggggtggctgtggagtgaaataaaggaagctttgtgcaatgccagccacagctccctcagctctccccacagtcaggcatttcacccaaccctttaaatcatcaagctctaatgcaccccatctgtgtaccggcctgagccaatga

SEQ ID NO: 215091 - DNA, 494 bp, Homo Sapiens
ttttttttccaggttaggatgaaggttactagcattgcagaccccctgattagccttgaattgaactatcaaaaccaccacctagcctctccattaaatacatcacagtgaaaatattcattatgatcacatttctttatttgaagcaaacctgacatgatacgccactgaaagggaggacattatagatgttgataaatgtgaaggaaatacataggagctaaggatttttatatgtatcaccaaaatgctaaagtggtagataaacaactcttagctgttatatagtgtaagcaactccagctactctgaactgtcactatcctttgttttctcttagtctgataactctttcacatccaaaatctggcctgacaaaaacaatgaaacttggtgctctaccaaacctcagttctctgtttgactaagctgccattgttactgtaaagggtgtggagccaaagggatggtagggagtgggctgcacctagtgt

SEQ ID NO: 215092 - DNA, 483 bp, Homo Sapiens; identical to SEQ ID NO: 59884

SEQ ID NO: 215093 - DNA, 491 bp, Homo Sapiens
tttgcattgtattttcaactttattaaataagcaaaaaaaaaacaactggataaaaagtaattttgcaaagtctattaagctcccatttgtttgtggaggtgttggctagttgtctagatccttgagtaactgacctttttagtttgtttttatgttgcttgttttcagcttttgtccacaacaggcagtcacttcagaccaggaagtctctaaaagcaccgagactcttcggaggttaatgctttcggccaacatcatggatggggaggacacagggctttaccatcagcacttctcttggtacctcactatcaacaggatgatggcccataggagcaaaggcaccagttttcatgcactgcccagtttacccattttggcaaatccttcctcctggcctcctgactatgacaccacccagatgtccatattttctgccaggaaaagcctgctggggacaaagcttcttacttcatgtttatcttctctc

SEQ ID NO: 215094 - DNA, 427 bp, Homo Sapiens
atctgtaagaaaatgtttattcttttgaaccccacaggaaaaaaaaaaagaatgcagccaagaccagtatttaacgaagtgtcccaaaaggcagcaaaatgggggaaacctcaaaacaaagtcagtgacaattttccatgtttttgcacaaagaagagaaaatctatgacaattctgagtaacactttcatggtgacaattacacaagatgattcaaaaatgcaaaatggcagcaacatgcacacctggctaaagctagaagtattttttttaatctcaaaataagatctgtgatttaaaggatgattctttttaatacttctattttactgacttgcttgtcctacttaatttgctttaaatgagacgtacatgccaattaacaggaaattttagaagaactatgtccttccagaatccatggcaa

SEQ ID NO: 215095 - DNA, 399 bp, Homo Sapiens
tttttttaattatcccccggcatagcactttatttaaaagtccctcattttatgatgaggaaatggggcctccaggagggcaatgggcagagtgtgaccatcctacccactgcctctcaggagccccttgtatctgccacgagtggcctgcctcactgcaagctgtggcacagatacgtagttagacatggttaataaaaatcattgtgatttaataaacagtgtggtgtttctgtacaggcccctccctgtctgtcccacagccagcgggaacgctggatggatgtgggcctgggtccctggagcccacgaggttcctgcagctttcctaagaggaaaaactgatccggtgatggaaggctgcggcctcctaaaagtctcccctgacgaggagacacg

SEQ ID NO: 215096 - DNA, 364 bp, Homo Sapiens
tttttttttttttttttttttttttaaattttatttttaattttaaacatgagggtcttgctatgttgaccaggctgaagtggctactgacaggcacgatgtggcactgcagcctggaactcttgggcttaagtgatccttcctgctttttctatcttaaaaaaaaaaagttacgcttgcttgttaaaatatttttaaaatgctgggtttaaactaaaaagtaaatatccaccccacctttgacttctaaaaattatctaaagtatgactggtaagatttttacctttaatcccacataagtctaaaatttgtgttcatttccaacaaccaaagggggtcacttttataccaaaattttgtcct

SEQ ID NO: 215097 - DNA, 373 bp, Homo Sapiens
tttttaaaaatggcacagtggtttaatctctagaatctcagacaacagatttgaggtattcattcctataggatctggctgtgcttcctacactgaccaaaaaagattcatgtgttcagatacaacaaagctagctttctaacttactaacttacaatgtatatgcatatgcacatgcctgtgtgtttcccgccatgtatttattcttcatgcttggttttctagcattttcaagtttgcagtaaaaggttcaatacacatttatttctctagtctgcagtggagcaggtaacatatcctaaggagacaagagtttttttttttttgtttgtttgtttgtttgagatgggttcttgttctgttgcccaggttg

SEQ ID NO: 215098 - DNA, 465 bp, Homo Sapiens
tttagagacttgaattgtggtttattagaagctgggaaggctagtgggaggagaggagagggagaggttgatacaaaattgcagctcaataagttctagtgctctgtagtatttcaaggtaaatatacttaacaacaatctattgtatattttcaaaaagctagaagagagaattctgaatgttcccaacacaaagaaatgataaacatctgaggtgatggatatgctgattactgtgctttgatcattacacgttgtatacatgtactgaaatatcactttgtatcccacaaatgtgttattatgtattaactaaaaataaaagggagaaaaagaacacaaaagtatttttttaagttgtccatggttgcatacaaatgagtggtacacatattaaaaagcagttaaaattattacaaacttcaacgaaattaaacattgtgccactaaacatacaaaaaagct

SEQ ID NO: 215099 - DNA, 544 bp, Homo Sapiens; identical to SEQ ID NO: 58950

SEQ ID NO: 215100 - DNA, 408 bp, Homo Sapiens
ttttttttttttttaaggcagactaataaggcattgattttaatgactggccatccatccagccccagagcaacctccactctgtttggttttgatgaacaaaatagaagcaacaatcaagacatcaggaaattacatgaaaaaacatttaaatcttaaaatctttcacaggacaacagtattgatattggactcaaaactgacaagaaggaagaaaacttccgtgtgctcatatttttgagatgaccacgttgagaacagatgactgactccgagttccattttctttaagatattttgagcctggccgctctccatgcgtggcttccttctctccagctggtgtccctggaggctgcagccagagccacaggcccatcctggctactgcactggtgttcggtggcc

SEQ ID NO: 215101 - DNA, 443 bp, Homo Sapiens
tttttttttttataggtgaaatgacatgatgtccaggatttgctttaatatacagcacttcaaaaaaaaatgcagaaagggatacatgaaatgagaaaggcagcaaactgttgttgaagttggatgatgagtacagccctccgttattatccaagggggataattcctggacccctacggataccaaaatccaggtatgctcaagttctttatgaaagttcattgtaattattctattatataaaagtttcgaaattctgttgataaaatgtatttttagtagagacgggggtttcaccttgttggcccaactggtctcgaatttctaacctcagatgatccaccagtcttggccgcccaaagtgttggcattacaggcgtgagccaccgcgcccgcctggccttgataaaaacagttttaaccttccgttgcttcgattcca

SEQ ID NO: 215102 - DNA, 363 bp, Homo Sapiens
ttttgagacgaaatttcactcttgttgcctaggctggagtgcaatggcatgctatcagctcactgcaacctctgccttgcaggttgaagcgattctcctgcctcagcctcccaagtagctggcattacaggcatgcgccaacaagcccggctagtttttttgtatttttagtacagacgggatttctccatgtggtcaggctggtctcgaactcctgacctcaggtgatcctcccgcctctgcctaccaaagtgctgggattacaggcctgagccactgtgcccggcctaattttgtatttttagtagagaaggggtttattcgtgttggtcaggctgatcttgaactcccgaccacagggga

SEQ ID NO: 215103 - DNA, 466 bp, Homo Sapiens
caccgaatatatgatagcattttaaattgaaaaagcactaatgactacaatggattataaaacatcaaatacataaaattcttaagttcctcctaataccaaatacaaagcacattggtctttggtttttacttgggcaccaatgcatgctgaaaaagagtcagacttcattttttagagtagttttaggttcacagcaaaattgagcagaaggtagagttctcatgtgtctctttgctcctccccctgcccccagcctccccactatcaacacccccacactacagtggtagatttattacaatccctgaacccacagtgacacatcactatcacccaaagttcatagcgtacagcagggttcactcttgggctgtacattccatgggtttggataaatgtgtaatgatgtctccaccatcacagcatcaggcagagtagtttcactgctctaacaaaatcctct

SEQ ID NO: 215104 - DNA, 400 bp, Homo Sapiens
accttgaaaatagcgaatcctacctcatttttgttagagggaaatggcataacttaccgtcagttttaaaattagagcatttacaagacttgtaccctctgcattttctcctcctcctctgccagcccatccctttctcccggactacagtcagacgcactctttttccgcagcctcagcatgcttacgtgacagaagcggttggatgcttctgtgttcctcactctgactctgccttagcttttcaaaagcggctgcagtagaagaatcccctttgtgtaccggaagctctttcaaacctgtttcctgagccatcaataaagtttataccctgcatatccctgcatgtaagtctagatttcttttgaaatcactgactcttcctaagaatcttctagaa

SEQ ID NO: 215105 - DNA, 547 bp, Homo Sapiens
atggagtcagtgcttttattagaacgaataatcttagccaatttgatttaatcatcagtgtagatcttacttgtatccaataatgtcaaggccactgctgatacatcagcattctttataagctattaaatgggagtcttatttcctagacatttatattaaacttataagaaaggaaaactcttaggcaataagacatgtatttaacaaatacaatttagcatttgtaaacattaatataaggaatcatttctaagtaaccacagaatgccttagaacttcagtcagacagatagaatttaaatgtgtttggagacaaagtggaaatgtcaaagtttactaaattactaatttactctaaaactcatgcacccaaaaaactaactttattttctaaatatgaacttagcttgttccagataaaacaaaacaaaaaccttaagctgatcacaggagatgattgtcttcctaaataaaatagtctcgtccaattaaattcagtgtcttgtggctcttcaatatagattcaatagttacacttattgca

SEQ ID NO: 215106 - DNA, 450 bp, Homo Sapiens; identical to SEQ ID NO: 60721

SEQ ID NO: 215107 - DNA, 488 bp, Homo Sapiens
ggactctctcaactgttgtttgctcaattgtcggtacagataggtaggattccagtctggagaaacccctaaaccactacaccctgcctcagagtagggaagaattttcagtatgtatgtggagacaggctggattagggagccttttgagtggcttctctaggatacctttcttgctaacatgagcaaggttcccctccaggcctgataaagcctgaagaggttagttatttccctactagttctggaagcatcttattcatgccaccataggaggctgtcttcccctgctcctccctgaatcaccacctagattttagtgctttctgagttgatgatggaaaccagttcctgttcaggtgccagaaacttttttttttttgagattgagtctcgctctttcatgctggagtgagaccctatctcattaaaagaaaaaaaaaaaaagctacaggttgagaatggggaggaacaatatagaaagaacc

SEQ ID NO: 215108 - DNA, 710 bp, Homo Sapiens; identical to SEQ ID NO: 59918

SEQ ID NO: 215109 - DNA, 511 bp, Homo Sapiens
gaagacacgaatggaagaatttatattttaaatgaaaatcaagaagttgtccctctgaactgtgaatctctgaaagttggaacttttgataaaggccgaggctgccttaagtaaaaactagagaaagaaaatgtaaagatcataacaccgtagccgttccagttcattgtagaatagaattggtgtgattcctcctcaggaaatttaaactattttgattttctgaatttccgcaaacacaactcagaaacagggttgagactaggttgctgccaagctgaaagactgagctgggaaccaatcagcgcgcagcgtgtctgtgtgtgacacacacgtaatcacagacacactcgcagcctgactttttttttttttaactgttagatatccaaacctacaatcatgtccgaaactgtacatgccgtgactcctggtctatctcccaagtcaaagactgaagtaaagaaaaaggttgcaagtccgaagttgcagtgaagtgcaagatgtccag

SEQ ID NO: 215110 - DNA, 331 bp, Homo Sapiens
tgaccttacaagtcattttcctttattttcttaacatataatgaaattccaactccaaagagacatatatgcagaggcgtgtggcgacagtcatgcccctggggaaagaacacagggcaagtggaaagagcagccctggtctagaccacgtcttctggacccatgctgtgtttgcacttaggggctgcaggcctgtagagctctgccggtccctgccactttgcagaaggaggtcactgaggccctgatatagggacgattccaaggtcaggcagtaagtccgagcgggtcaggggctttgggagcaagcagaactgaaggagcaaagctt

SEQ ID NO: 215111 - DNA, 504 bp, Homo Sapiens; identical to SEQ ID NO: 61662
  misc_feature (409)..(409): n is a, c, g, or t
  misc_feature (432)..(432): n is a, c, g, or t
  misc_feature (460)..(460): n is a, c, g, or t
  misc_feature (462)..(462): n is a, c, g, or t
  misc_feature (467)..(467): n is a, c, g, or t

SEQ ID NO: 215112 - DNA, 476 bp, Homo Sapiens; identical to SEQ ID NO: 59565

SEQ ID NO: 215113 - DNA, 479 bp, Homo Sapiens
ttacattgcatcttttaaattttatttagcaaagttaaacatacatatattttaaaagagaaaaagaggaactcacccaaccctcatatccaagagcttaaaatcacaggaactcaagacccatcctcaacttcaaatgccagtcattattttagaggtaactcagatttctaagtaatgcttctgtttctcgatttatcaaatagacattatgtattttgttttcctacatgagaattgagtagttaacagaatacccatctcttatcagtaacaaagatttacaaaataacttttgtttttcataattacaaaagcaatacattattattgaagaacatgttttaaaaaaagacaaaaagtaacaaaactctccattatcccaacaggcagaggaagttattaccattttaatgcatatccttaacacatacatgtaaaagatacatatacacataaaaatataaatgtttaacaga

SEQ ID NO: 215114 - DNA, 1000 bp, Homo Sapiens
caacttcatggtctaccaaccaaccccgtgggaggcagcctcagactcgatgaaacgactacaaagtgccatgacagaaggtggtgtggttctacgggaacctcagagaatctatgaataaatggaagcattaattgttttgaacatgtaaatataaatctgtcagccactacagccatcaaaagagagcatctggaagaacagccagcttggaagttttacagcaataatgttgcagtggaatattatttgtagttaaggtcatcctcctcccctttctgtttttttaaatcaagaactacgttctgcccctctcttgggcttcagaagcatctaagaaaagcagtcatcaattataattaactttcaaagggcaagtcagaagttgtttataaattacaaaataaaggcatattatgaactctttttgaggaaatgtttggtgttgggagagtgggtgggagactaatagtgatgggttctttttagcgggccggggttgtttacctttaaggaacggtttataagttcaggggcccccttctagttgtggggtgtttatttttaaacttttattgaaaaaaggggggcaagcgagtttgtggggggtgtatttcccagaatacttttctgcggtttatttctcctccacaccttttcccccctattttgcttatgacgtgttaatttttgttgctctattaccccggtgtctgtgttccggcccccccccttatatataactcccgtgatacggtaaaaaaattacaaaatagataagtccaaattatcaagttacgttgttgaatatgcaaaccccaaccatacggtcattattgagccaccacacccggtgtgttctccaaagactcggcccgttgagatttcttttctttcaatgtgaagtctattcttccctctcccaacactcaactcatgtttactcgctaacagacagtcggctgatacggtataaatccttctcacattttattatcgc

SEQ ID NO: 215115 - DNA, 866 bp, Homo Sapiens; identical to SEQ ID NO: 42296

SEQ ID NO: 215116 - DNA, 1000 bp, Homo Sapiens
tatgcctttgtcaactacattttctttggaagaggccctcaaaggcagaagaagcttgcagaaaagacagccaaggcaaagaatgaccgttcaaagagcgaaagcaaccgggtggatgctcatggaaatattctgttgacatcgctggaagttcacaatgaaatgaatgaggtctcaggcggcattggcgataccaggaattcagcaatatcctttgacaactcaggaatccagtacaggaaacagagcatgcctcgagaagggcatgggcgattcctgggggacagaagcctcccgcacaagaagacccatctacggaggaggtcttcacagctcaaaattaaaatacctgatctaaccgatgtgaatgccatagacagatggtccaggatcgtgtttccattcactttttctcttttcaacttagtttactggctgtactatgttaactgagtgactgtacttgatttttcaaagacttcatttaacactgagtgaaatattactctgcctgtcaagtttttatacctgtacacacacagacacacaagcagacacacacatatatacatacgcaattgtatatatatgtgaactttctcagcatatatataaaatacacgtgtatatgaggatgtatgtgtatatgtttatacacacaggagtcagtgcccatgtgtatggaagacaaatacacatacatatatacattttgcagctatggacaatttaccacaggatgcatattaaagaaagtcatagtttttttcttttttaattgaaagggacaagtatcatctaaatattatgccttgagaatgagggcgtgaaacacaatatcatccccaaatgtgtcttgtattatcataagttagatgttttagttttaaaatccggaaggccttcttaggttatactttggaaaactcctaccgttgggtttggctaggtttataatgggttcacttacttcatatcctccggttcgttttggtaggtg

SEQ ID NO: 215117 - DNA, 1000 bp, Homo Sapiens
agagacctgatgccggagccccctcactgttcttctccaggaagtggctggggtcggggaacagatgaatatttcatccggaagccgccaagtgattttctcttccccaaacccaataggttccagcctgaactgtctgcccctgatctgcggcgatttatcgatggtccaaaccgggctgtggccctgcttccggagctacgggaggtcgtctcctctatcagctacatcgctcgacagctgcaggaacaggaggaccacgatgcgctgaaggaggactggcagtttgtggccatggtagtggaccgcctcttcctgtggactttcatcatcttcaccagcgttgggaccctagtcatcttcctggacgccacgtaccacttgccccctccagacccctttccttgaagactggagggttgagacccaggccccctgccagttgaagtgagagtttggtgatactgtcaagccccatccttctctgcctcttaactccttcacgaggaatctgggcctcttatttcgtttctggggactgcattggactgagggctgggtaggcaggtgtcttggacccacctgaaatgcagtatcatctgatttactctttgggatcttgaagaagctcttttgggtatcaacacctaggtcgccagtgaaatagaacacagaacaggaactagattataagccttatgaggtcaagaaatgtgacttggccgggcgcggtggctcacgcctgtaatcccagcactttgggaggccaaggcgggcggatcacctgaggtcgggagtttgagaccagcccgaccaacatggagaaaccctgtctctactaaaaatacaaaattagccaggtgtggtggtacatgcctgtaatcccagctactagggaggctgaggcaggagaatcactcgaacccgggaggcagaggttgcagtgagtcaagatcacgccattgcactccagcctgggcaacaagagcgaaactccatc

SEQ ID NO: 215118 - DNA, 863 bp, Homo Sapiens
cgtgtcaccgagaagctgatgtagagagagacacagaaggagacagaaagcaagagaccagagtcccgggaaagtcctgccgcgcctcgggacaattataaaaatgtggccccctgggtcagcctcccagccaccgccctcacctgccgcggccacaggtctgcatccagcggctcgccctgtgtccctgcagtgccggctcagcatgtgtccagcgcgcagcctcctccttgtggctaccctggtcctcctggaccacctcagtttggccagagacctccccgtggccactccagacccaggaatgttcccatgccttcaccactcccaaaacctgctgagggccgtcagcaacatgctccagaagaatgagagttgcctaaattccagagagacctctttcataactaatgggagttgcctggcctccagaaagacctcttttatgatggccctgtgccttagtagtatttatgaagacttgaagatgtaccaggtggagttcaagaccatgaatgcaaagcttctgatggatcctaagaggcagatctttctagatcaaaacatgctggcagttattgatgagctgatgcaggccctgaatttcaacagtgagactgtgccacaaaaatcctcccttgaagaaccggatttttataaaactaaaatcaagctctgcatacttcttcatgctttcagaattcgggcagtgactattgatagagtgatgagctatctgaatgcttcctaaaaagcgaggtccctccaaaccgttgtcatttttataaaactttgaaatgaggaaactttgataggatgtggattaagaactagggagggggaaagaaggatgggactattac

SEQ ID NO: 215119 - DNA, 1000 bp, Homo Sapiens
gcagattcattcaactttaatccccacaaatggctattggtgaattttgactgttctgccatgtgggtgaaaaagagaacagacttaacgggagcctttagactggaccccacttacctgaagcacagccatcaggattcagggcttatcactgactaccggcattggcagataccactgggcagaagatttcgctctttgaaaatgtggtttgtatttaggatgtatggagtcaaaggactgcaggcttatatccgcaagcatgtccagctgtcccatgagtttgagtcactggtgcgccaggatccccgctttgaaatctgtgtggaagtcattctggggcttgtctgctttcggctaaagggttccaacaaagtgaatgaagctcttctgcaaagaataaacagtgccaaaaaaatccacttggttccatgtcacctcagggacaagtttgtcctgcgctttgccatctgttctcgcacggtggaatctgcccatgtgcagcgggcctgggaacacatcaaagagctggcggccgacgtgctgcgagcagagagggagtaggagtgaagccagctgcaggaatcaaaaattgaagagagatatatctgaaaactggaataagaagcaaataaatatcatcctgccttcatggaactcagctgtctgtggcttcccatgtctttctccaaagttatccagagggttgtgattttgtctgcttagtatctcatcaacaaagaaatattatttgctaattaaaaagttaatcttcatggccatagcttttattcattagctgtgatttttgttgattaaaacattatagattttcatgttcttgcagtcatcagaagtggtaggaaagcctcactgatatattttccagggcaatcaatgttcacgcaacttgaaattatatctgtggtcttcaaattgtcttttgtcatgtggctaaatgcctaataaacaattcaagtgaaataaaaaaaaaaaaaaa

SEQ ID NO: 215120 - DNA, 1000 bp, Homo Sapiens
aacaacccacacctgggacccccagtgcataagcatggaaggcaaaatcccctattttcatgctggtggatccaaatgttcaacatggcccttaccacagcccagccagcacaaccccagatcctcttaccacaatattactgatgtgtgtgagctggctgtgggccctgcaggtgcaccggccactctgttgaatgaagcaggtaaagatgctttaaaatcctctcaaaccattaagtctagagaagagggaaaggcaacccagcagagggaggtagaaagcttccattctgagactgaccaggatacgccctggctgctgccccaggagaaaaccccctttggctccgctaaacccttggattatgtggagattcacaaggtcaacaaagatggtgcattatcattgctaccaaaacagagagagaacagcggcaagcccaagaagcccgggactcctgagaacaataaggagtatgccaaggtgtccggggtcatggataacaacatcctggtgttggtgccagatccacatgctaaaaacgtggcttgctttgaagaatcagccaaagaggccccaccatcacttgaacagaatcaagctgagaaagccctggccaacttcactgcaacatcaagcaagtgcaggctccagctgggtggtttggattacctggatcccgcatgttttacacactcctttcactgatagcttgactaatggaatgattggttaaaatgtgatttttcttcaggtaacactacagagtacgtgaaatgctcaagaatgtagtcagactgacactactaaagctcccagctcctttcatgctccatttttaaccacttgcctctttctccagcagctgattccagaacaaatcattatgtttcctaactgtgatttgtagatttactttttgctgttagttataaaactatgtgttcaatgaaataaaagcacactgcttagtattcttgagggacaatgccaataggt

SEQ ID NO: 215121 - DNA, 1000 bp, Homo Sapiens
tattttgaggacaacactctcacggagcgcttttgggagagctacatctacaatggcaaaggagggcgtggacgagtggatgtggccagcctggctgtggggctgacaggtggcatcctgctcattgtcctggccggcctgggagccttttggtatctgcgctggcgacagcaccgaggccagcagccctgtccccaagaggccgggctcattagccctctgagtcctttgaaccctctgggcccaccgacgcccctgcctccacccccacccccacccccaggcctccccacctatgagcaggcgctggcagcctctggggtacacgacgcacctccacccccctacaccagcctcaggaggcctcactgaagagctgctttcgagacccggctctccgaaccgtgcccctgattcataccggattccggaagccgctaggcctcatagacgccgaagctggacttggagtggggaatggtgggagtaggggtcatccggcccgaggcctgccctggcacacgcgtttccgccgcgtatggatatacacatgttttcggcaacgtgttcccgtgtcctggcccctcacgggcccccacactctcctgaccgtgagggcactggtcagttccgcccccgtggtaggcagacgcgcggggaaattcggacccaggagcccagccccggctgtgccatcttgtgtatgggcagatatgacctgacagccccctccagtgccacagggtacgcacacgcagagccccgcctgtgcacacgcgtgtcttcgtgcactccccgtgcggtacaggggcacttcgtaacccagggaaagggcggggggcatatttgcaagcgcgctcggtgcgggcagctcgcattgcacccagggagctggagttgggctgttcccctaaataaaaaccttcggaaaggagaccaaaaaaagcagaaataatgcaaaaaataataaatgaaatgaactgcgaaaaaaaaaaaaaaa

SEQ ID NO: 215122 - DNA, 1000 bp, Homo Sapiens
ccccctcgagtgtacaaaccctgcttcgtctgccaggacaaatcatcagggtaccactatggggtcagcgcctgtgagggatgtaagggctttttccgcagaagtattcagaagaatatgatttacacttgtcaccgagataagaactgtgttattaataaagtcaccaggaatcgatgccaatactgtcgactccagaagtgctttgaagtgggaatgtccaaagaataattccagtgctgaccatcgagtccgactggacctgggcctctgggacaaattcagtgaactggccaccaagtgcattattaagatcgtggagtttgctaaacgtctgcctggtttcactggcttgaccatcgcagaccaaattaccctgctgaaggccgcctgcctggacatcctgattcttagaatttgcaccaggtataccccagaacaagacaccatgactttctcagacggccttaccctaaatcgaactcagatgcacaatgctggatttggtcctctgactgaccttgtgttcacctttgccaaccagctcctgcctttggaaatggatgacacagaaacaggccttctcagtgccatctgcttaatctgtggagaccgccaggaccttgaggaaccgacaaaagtagataagctacaagaaccattgctggaagcactaaaaatttatatcagaaaaagacgacccagcaagcctcacatgtttccaaagatcttaatgaaaatcacagatctccgtagcatcagtgctaaaggtgcagagcgtgtaattaccttgaaaatggaaattcctggatcaatgccacctctcattcaagaaatgctggagaattctgaaggacatgaacccttgaccccaagttcaagtgggaacacagcagagcacagtcctagcatctcacccagctcagtggaaaacagtggggtcagtcagtcaccactcgtgcaataagacattttctagctacttcaaacattccccagt

SEQ ID NO: 215123 - DNA, 996 bp, Homo Sapiens; identical to SEQ ID NO: 51716

SEQ ID NO: 215124 - DNA, 1000 bp, Homo Sapiens
atcctcgggggaccctgcaggatggcaccaggaggttcacctgcagcgggaagcccatccaccacttcgtcggcgtcagcaccttctcccagtacacagtggtggatgagaatgcagtggccaaaattgatgcagcctcgcccctggagaaagtctgcctcattggctgtggattttcgactggttatgggtctgcagtcaaagttgccaaggtcaccccagggtctacctgtgctgtgtttggcctgggaggggtcggcctatctgttgttatgggctgtaaagcagctggagcagccagaatcattgctgtggacatcaacaaggacaaatttgcaaaggctaaagagttgggggccactgaatgcatcaaccctcaagactacaagaaacccattcaggaagtgctaaaggaaatgactgatggagatggcttccctgttatgttgtcatgaggcatgtggcacaagtgtcattgtaggggtacctcctgattcccagaacctctcaataaaccctatgctgctactgactggacgcacgtggaaaggagctatttttggaggctttaagagtaaagaatctgtcccgaaacttgtggctgactttatggctaagaagttttcactggatgcattaataacaaatattttaccttttgaaaaaataaatgaaggatttgacctgcttcgctctggaaagagtatccgtaccgtcctgacgttttgaaacaatacagatgccttcccttgtagcagttttcagcctcctctaccctacatgatctggagcaacagctaggaaatatcattaattctgctcttcagagatgttaaaaataaattacacgtgggagctttccaaagaaatggaaattgatgggaaattatttgtcaagcaaatgtttaaaatccaaatgagaactaaataaagtgttgaacatcaactggggaattgaagccaataaaccttccttcttaaccattcaaaaaaaaaaaaa

SEQ ID NO: 215125 - DNA, 1000 bp, Homo Sapiens
gtggccagaatggatgggagtgatgcatggctatgaaattgaatttgtctttggtttacctctggaaagaagagataattacacaaaagccgaggaaattttgagtagatccatagtgaaacggtgggcaaattttgcaaaatatggctgttcttcctcaaccatactaaactacgttcttgaaacagaacctgtggttttgatttgatattcattgaagtactatatgggaatccaaatgagactcagaacaatagcacaagctggcctgtcttcaaaagcactgaacaaaaatatctaaccttgaatacagagtcaacaagaataatgacgaaactacgtgctcaacaatgtcgattctggacatcattttttccaaaagtcttggaaatgacaggaaatattgatgaagcagaatgggagtggaaagcaggattccatcgctggaacaattacatgatggactggaaaaatcaatttaacgattacactagcaagaaagaaagttgtgtgggtctctaattaatagatttaccctttatagaacatattttcctttagatcaaggcaaaaatatcaggagcttttttacacacctactaaaaaagttattatgtagctgaaacaaaaatgccagaaggataatattgattcctcacatctttaacttagtattttacctagcatttcaaaacccaaatggctagaacatgtttaattaaatttcacaatataaagttctacagttaattatgtgcatattaaaacaatggcctggttcaatttctttctttccttaataaatttaagttttttccccccaaaattatcagtgctctgcttttagtcacgtgtattttcattaccactcgtaaaaaggtatcttttttaaatgaattaaatattgaaacactgtacaccatagtttacaatattatgtttcctaattaaaataagaattgaatgtcaatatgagatattaaaataagcacagaaaatc

SEQ ID NO: 215126 - DNA, 1000 bp, Homo Sapiens
gcaccccgagaccatggggaagctcgtggcgctggtcctgctgggggtcggcctgtccttagtcggggagatgttcctggcgtttagggctgggttttatcttctacagagaaagggtgaatgcctctcgagaagtggagccagtagaacctgaaaactgccaccttattgaggaacttgaaagtggctctgaagatattgatatacttcctagtgggctggcttttatctccagtggattaaaatatccaggcatgccaaactttgcgccagatgaaccaggaaaaatcttcttgatggatctgaatgaacaaaacccaagggcacaagcgctagaaatcagtggtggatttgacaaagaattatttaatccacatgggatcagtattttcatcgacaaagtgtgaatgacattgtggttcttggaccagaacagttctatgccaccagagaccactattttaccaactccctcctgtcattttttgagatgatcttggatcttcgctggacttatgttcttttctacagcccaagggaggttaaagtggtggccaaaggattttgtagtgccaatgggatcacagtctcagcagaccagaagtatgtctatgtagctgatgtagcagctaagaacattcacataatggaaaaacatgataactgggatttaactcaactgaaggtgatacagttgggcaccttagtggataacctgactgtcgatcctgccacaggagacattttggcaggatgccatcctaatcctatgaagctactgaactataaccctgaggaccctccaggatcagaagtacttcgcatccagaatgttttgtctgagaagcccagggtgagcaccgtgtatgccaacaatggctctgtgcttcagggcacctctgtggcttctgtgtaccatgggaaaattctcataggcaccgtatttcacaaaactctgtactgtgagctctagactctagatagtaaaaaaaaaaaaaaa

SEQ ID NO: 215127 - DNA, 390 bp, Homo Sapiens
  misc_feature (333)..(333): n is a, c, g, or t
atgaagtcgcccgggctgcaggtcagtggtgcaatctcagctcactgcaagctctgcctcccgggttccagcggttgtcttgtctcagcctcctgagtagctgggattataggcacgcaccatcatacccgactaatttttgtatttgtagtagagatggggttttgccgcgttggccgggctggtcttgaactcctgaccttagggtgatccacccatcttggcctccagaagtgctgggattacaggcatgagccactgcactcggctgtaccgtgattattagttcaaggttctctttcactggggtaaagaccttaagagagcagcttntgggctttatattctcaatttcccgcacagtgcctagcacatagcaaggactcaaca

SEQ ID NO: 215128 - DNA, 378 bp, Homo Sapiens; identical to SEQ ID NO: 60305
  misc_feature (327)..(327): n is a, c, g, or t

SEQ ID NO: 215129 - DNA, 449 bp, Homo Sapiens
tttcatactaaagagaattttcatatttattcataaaataaatgagatatatttccagctgatctcttccaaagttctttatatggttgtttaaaaataaatcaaaacataacagatacatttgatgggtaataagcattttacattctgtaataaattttagaagatattaggggcaattctaaaaaaaaataagtttatctaggattccttcaaggtttcctattttgcttctcccatttttaagttaagaacacaacaaaaatgctttgaacaaaagcaaagacagagtagtgtagcagtgggaggagggggagatgctactttacatagggtggccttcccttaccattcctatgtaaaatagcatacaacatcactcctgcattccctttttttccattatttttcttcacagtactcatcacttcatttatctgtctcctctg

SEQ ID NO: 215130 - DNA, 440 bp, Homo Sapiens
tttcaaatagtagccatcctaatatttgtgaagtgggaaaatgaagtttcagccattaaacttatttatttattgtttcctagtggactctattaggaaggcttattatggaactatctaagggatccttacatagttccaaggaaggggctgtcacatcaaaaagcccaaacatgtgattagagattggaaatttcaaacccaccccattcccctaacttcctaggaggagagaagaactggagattaagttcagtcatatggccaattatttaatcaatcatgcctacataatgaaacctcattaaaaaccctggacaccatgctcaggggagcttcctgatactaagagggcggcacaccctgactctgtggaagcagaggctcctgtgctcatgacccttccagtcctcctcccatgtacctcttcatctggctga

SEQ ID NO: 215131 - DNA, 377 bp, Homo Sapiens
tttgctgattaagtaaagaaggctcagagaaattaacctgtaaactcacagtagaactaggatcagaaccaaagcgtatgtgaagccaaagccaatgaagggcatagtgttaagcatggaagctacatcagcttatttaatctcggcaagaaaaaagtattaagtactaactaggcaaagtttttgttgctactattatacgtatgaggtacaaaaataatcccattttctacaaaatgaaactaaagctgagggaagtaatttgctcataggtagtggataaggggaaaatccaggcaatctaacacccatctttttaaaagcaaacagggctatatttgtgccaaattctaataaaattaaaaataagctaaata

SEQ ID NO: 215132 - DNA, 434 bp, Homo Sapiens; identical to SEQ ID NO: 60311
  misc_feature (372)..(372): n is a, c, g, or t

SEQ ID NO: 215133 - DNA, 496 bp, Homo Sapiens; identical to SEQ ID NO: 59743
  misc_feature (442)..(442): n is a, c, g, or t
  misc_feature (489)..(489): n is a, c, g, or t

SEQ ID NO: 215134 - DNA, 465 bp, Homo Sapiens
ttttgaagggagaagtgaaaatatacactttacaaattgattctttacatcttgaagatggatttacaacagtattactttatacaaattcctactttatacaattttttgtttaggcagcttttcagtaacatttctataataagttacacatgaagcctcccaaaagaaagctgagaagcttaaaatagccacatgcaaaggattgatgacagaggggcaaagagggcgaagccatcacactgctgcttcatagtcactaggagttgagggaccctgaccctcatacatagctcaataaaggccgacactgggatcttcattgctttcctcagcttgtcttcccaagaagcaatgtttcatcagaagggattgggttttcgccagcactatggcaaggaaagactattttaatataggctgacactagcatggactagtatgtagttagtctgataatgaata

SEQ ID NO: 215135 - DNA, 498 bp, Homo Sapiens
tttaaatagctgggttacacatacctagaatcacagaacagtggatctggaagggaaattagggatcctcaacttcaacctgttcatgttaaagattaggaaagctgtggatgtgaggggtcaggtgatgtgatggaggcctcacagaatgagtggcagagagggccccagaaatagcttactctgttttcctatcatttgtaggtagcaaagtatataattaccacttttgtcattagacagttgttacataaaagagtagtcttgcaggtaaaaataattctaataagatattcacttacaattaaataattctaacagtgtgaaggttcacttatgatttttttaaaaattatcatgaaataacaaacatgtagccatgttgaggtgggagaaaaggggtccttacgtctaaacagcaagagaaaaaacacacaagaagagccaatctgtcaccacgagagctgcactgagtccttcaatcttgagaataaacat

SEQ ID NO: 215136 - DNA, 432 bp, Homo Sapiens; identical to SEQ ID NO: 60733

SEQ ID NO: 215137 - DNA, 410 bp, Homo Sapiens
tgaatggatagcttctgtataagggataggaaagcagacttaactatttaacctgaccttgtatattaatttgtgctcttttggggagaaacacagcctattcattccaggcatgcagtgaatgctaaaaaaatatccacaaacaacatagaacagtgattttcagaagaagggatctagtgtgttctctgtgttcttaaagacagtgctttgtctgatatttttgcaaaaaagttgagtcttaagtatggtgcttggcaaaagttgctttatggaaaatggaaggcaaataagcaaaaagagatcatgccaaaatactccctgttttcagggcagattgttattccatatggggaaagaatatgaaaaagttctcccacccaagaccatgaaatttaagccttcattca

SEQ ID NO: 215138 - DNA, 448 bp, Homo Sapiens
ccattaacattttatttaaaggctttgggactctgaagtataatgtttgtgaaatgctatgagccagaccctccacactgaaaattcccagtgtaaattaatttgttaaatgctcttagaattcctgcaataaagaacacctatctaaccttagttatccctgtgtttcccaaatatatcttactttggagcactttttttttagtaccgatttacatcctgggaaatggtgtttaccatgctttaaaaaaaaactgtggtaaaataaagataagatttaccatcttaaccattttagagtgtacagttgagttggcatacagcattcacataacttaactgtgcaaccaatccacaggactttttatcttgcaaaactgaaacactatacccattaaacaactcctcatttcctcctcccccagtccttggcaactaccattctact

SEQ ID NO: 215139 - DNA, 456 bp, Homo Sapiens; identical to SEQ ID NO: 61460

SEQ ID NO: 215140 - DNA, 442 bp, Homo Sapiens
tcaagggcttgaatatatttttatattgatattctgtgtcgttctaccctaaaataatacattattgattacatacaggatgaggtgaggtatttgtaaaatatctggtaaaaaataattaatatacagtattctacatgagatggaatcttatgactccttaggtcttctgcagtgttaaaagtgatcatctaaattaaactgctctgaatggacttacagttgttccctaaaaccatgttaaaaaatgaaggcttttacattttcccagaatttgtgcagaaaagggaaagtacatataattggcatttatttctcacatccaaaataatgcattcacacaaaaccaggatctcccatgtttagcataaaaagaaaaaaaatactggattagagatataaaatctcagagtaatggtaggtaatccactacaccaaagaa

SEQ ID NO: 215141 - DNA, 438 bp, Homo Sapiens
ataaaatttatttaatttcaactgaacaaaacccagactgtaggcaactgcagtaagtggaacagtatttgactatcgcaatgaagtctgtcatgaaaactatgagtacgtggagccattttgaaatccgcaaaatcgagaagttctgccgccagtatagggtcacttggtgaaaggcaagggatgtcctccaggatacactgttctaataagatgcagggaagagggggatttcatcttccaaagagttgtcactgggaatttacaaaggcccctggaaataagctcagggtatccactaaaggaggtggagccccctttcacacacttttccttcctcttccttccttcctgcacgccctatttccctcacttccagtctcaggttctttaaaaaacataaaattatataaataagtagaatagtattcttgggct

SEQ ID NO: 215142 - DNA, 460 bp, Homo Sapiens
ccactgaatataaaatttgtcctgaatttactaaatcttctacaccctgaggaataacaacagactaataaaagtaacgtcagggttagctttctggacaatagaatcatccagaaagcacaaattatatatagctaatattcttggaagcacaaggtttcatcagcagactaaactactgccctgtattgttcttagcaaagagtttggttttacagtgttaacatggcctggtgagagtagagaagtcaaagttgggagcctgaggtttcctctcccacctgagatccacaactgattcattggttttctgtcttcaccatgaacatggcatattgctgccctttaggaatatattattcaacagttctctgtaaaagcactttggaatctttagctatatatttctatgaaattatatttgctatcttgaaatatggaattcctatccctcccttct

SEQ ID NO: 215143 - DNA, 440 bp, Homo Sapiens
tttaaaacgaggatttggccattcaagaaacaacaacaacaacaacaaagcaaaatcccaccacatacaagaagaaaaagagaggcatgctttacaaaacagctatttcaaagtcatgatttttaaaaaaactatacagaatgtggaacgaaggggaaaaaaaagtctcatgtgggttgcgtcggcgctgcagctgctcctcattaaagctcctctttactccctctgggctagtttccagcagaaaattctttaaacagaactttgctttcaacccactttcttcttgcactgggcctcttggccccccaatccgcagtggcagcctgccctagctgagctctagaggggggagctgtcgttaaggtaaatgaggtaagggcaggggaaaaaactaacaaaacccagaaaccaaattaagcatcggtcagtaacaaagg

SEQ ID NO: 215144 - DNA, 400 bp, Homo Sapiens
aattctctgtacttctcttcagtcttaaatttttctcaaggaaaggaaaaacaaaaaaagtttgtatgaccatattgttttcaattgtaatataatcaaaagttataatccctatcctattattctttaatttgggtatataaaaactgaaagatatctttatagaaggcttgtttttacgaacatcattttaacaacaaaaaatcctaaaaaagttttccaagggttgactgtatctatcacgcttctaactaaaacacagaaagtttggaaaataaataataaagtaggtttaatgggtttgtcctttcctcggacatacagaaatttgcagtttggggataaatacctgagagatgacatatctatcaaccttctcccccagacactctgagatagt

SEQ ID NO: 215145 - DNA, 441 bp, Homo Sapiens; identical to SEQ ID NO: 60558

SEQ ID NO: 215146 - DNA, 472 bp, Homo Sapiens
ctggttcaggtttgagcattgataaacactctttaaagagaaacattttaatgttttggaagtgctttccatagtaataagcctgtcctcccttgactcctcagccgagctgactagcctagctaggaaagagccagtcaggctgacagttaataagaactcaagctcatgcctgaaattcacagtgctttaggaggctgaggtgggaggatcacttgaggcccttaggtcaagaccaacctgggcaacatagccagaccccattctctaacaacaacaacaataacaaaaattagcagggggtggtaggaggctgaggcaggaggatcacttgaacccaggagttcaaggttgcagtgagctatgatcacaccaccgcaatacagcctgtgcaacagcctgtacaaccctgtctccaaaaaaagaacccaagttttcaatatgcatagccacatataaactagaacttaag

SEQ ID NO: 215147 - DNA, 438 bp, Homo Sapiens
tttttttgggtttgaaaacatgtattattagaggcacatgtttaaaaacaagtacagtatgaaatcttccttttcagtgagccagtgaattttcattcgtttgtttgtttctatgaatatttggtttacttccttcttctgggtaagattagtatgcaattctcattagcaagtcaaaaacctacagacctaaactatatgaaaacttaagttggtattgttagatgaagacaggtaagctaacaccaaaagaacaactgtactaaattttaacactattctttaatagttccattttcctgagtttgtgtttgttctttggcattggtttaggatataatccattttttcagaaggcgttgcttgctggggccaatttgggcaccatgctaaatctggaaagagcataaagcttcaagagggcgaagcaaagtctct

SEQ ID NO: 215148 - DNA, 702 bp, Homo Sapiens
  misc_feature (627)..(627): n is a, c, g, or t
  misc_feature (681)..(681): n is a, c, g, or t
ctttttatccctctgtatagacatcctagagttgccaatgtctgtgatgttgaaagaaagaatgcttcttattgtctcttcttttcagtgttggtatgatttgggtttcttgtttgtgtgttctgagaaaaacaaaaagagatgaaaagacaatactttaaaaaactgtattcaatcctagtgatccacttccacatgtttgagtttaatagtactctttatatgtcaagcaaatcttaatgaattgaaagtttactgtcaataacatatacatacacacatatatatatatttagagaaaagggctcatttgaaaaatatataccactttataagtaactacgcatctaattacactctacaggtttgctcttaaaagtttatgtaaggctgggtgtggtggctcacgcttgtaaacataaaattttatattgaaaataaaagcaggggtcaggcatggtgtctcatgcttgtaatcccagcacttcaggaggccgaggaaggcagatcacttgagcccaggagttcaagatcagcctggacaacatggcatgacctcgtttctactaaaaatacaaaaaaaattagccgggcatggcagcgggtgcctgtaatcccagcttctcngggaagctgaggcatgagaatggcatgagcccaggaggtggagcttgcagtgangcgatatcgtgccactgcact

SEQ ID NO: 215149 - DNA, 741 bp, Homo Sapiens
tgtccctgtatcctcatgctcatcatctcagcaggcctgagaggctgggtcagtttgggtgttcatcatgaggattgcttctgccatggagctgatggacatgggcaggttgctgagaaggtggggtgaaagtgagtgccgggggtgggtgagtgccctggtcttgttcataggggagcctttccctagcagtggaacgctgtggtcattttctctagcatattcccttgggaagtctagatttgctattaatctggctgagaatctaagttctgtgccttagagacagtttgcactttcccatattgtgcctgggacagccatatgattttttttcccaccaaacaagtatgcaaacagaaaccagttcaaagggggatggagtaaaagatgaggcagtagaaatgcctttgaatggttttctgtagctaattctctttaaattttgtcctgctttttttctttatgcagtgctaggtgttttaagttttctagtagtattgcttttgagttacagtataacctgagttactcctctgctctaacattgttgcagaagaactagtttattgttagccaggttgcttgaaaggttgagagtggagtggtttggcatttctgttttaaataaacatttaagctcttaatcagtactgtgcttcagtaagcctgtgcatggaccttagtctctggggataaacatccagattctaagcctccgtgaatctttgattctgtgag

SEQ ID NO: 215150 - DNA, 807 bp, Homo Sapiens
  misc_feature (754)..(754): n is a, c, g, or t
  misc_feature (777)..(777): n is a, c, g, or t
ttttttttttttttttttaaaaaactgattcagagcttgcagtggctgcttacttactctggctatctttcagaaatttagctgccttatctatagctcatttaactaacagtgaattaggtactagtttataggtataaagaaatagttacttagttgagaattcaatatatgagaacatactagagtaagtttcctgaggtaaaagtatgccttaaagaatgatgtgcaatctataaaactgtagcattttctcttgggtagcaacacaatgacccccaagtctggatttttaaattaacaggctaagaaaactaaggacacattgatatagagaaataaaataacaatgctgaagtcaaagaaatattgacagctgagatatcaattcaaaaggaggcatgaaggggaacagaggaacagaaggaggctgtattttaaagtgcttaggtaggttagaagatgaatttgaaatgcctccagggatttctaacaagtttaaaaagtgttacttcttggtgactcagatgttgaagacatggcttttctttaataatagctattcaaactttttattcttttttgaaaaacaagattctctataaaaacgttttagccattgtaattattctgctagctgttactctcactaatgtattttgaaatcctaactggctgaagatttttaataaggttgaactacaaagcacacatttgcaccaagaatttacattaatgcatagatgtctgtganattctgcatgaagttagtgccanaaaaactttccattgcagatcatgctttat

SEQ ID NO: 215151 - DNA, 757 bp, Homo Sapiens
  misc_feature (659)..(659): n is a, c, g, or t
ttttttttttttttttttaatcaacaaacatttatttctcatggtttgggaggctgggaagtccaatatcaaggcactggcatagtccatgtctggtaagggcctgcttcccggttcaaagatagctatcttctcactgcaccctctcatggtgaagggcaaagctagctctctagggattcctatcaggaaactaatcccaattacaaggcctccatcttcatgatgtcctccaatcctaaaaaccaccagagacagggcctccaaataccatcacattgtgggggagagggggggcacgggggtaaggtttcaacatatgaatctgaggtggcatacactcagccaaaacattacacctctggcccccaaaatccatgtcatcacatgtaaaatatattcatctcatcccaaaggcctcaaaagtctcagttaattccagcatgaagcctaatgtttaaactcaaactccaaagtgtcatctcaatatcacatcactcagatatggatgagactcaattcatgctgaggcaaaattcttcttcagctccgaaccggtgaaaaccaaactagtcatgtatttccaaaatatgagacaggcacaggatagagattcctattccaaaagtgagaaacaggagaaaggggtgagctcccanacaagtctgaaacccagaaagcaaactgaagactttccatattctttagatatgtagatacttgtagacctgtcctccactattcattttcacaggta

SEQ ID NO: 215152 - DNA, 684 bp, Homo Sapiens; identical to SEQ ID NO: 40790
  misc_feature (621)..(621): n is a, c, g, or t

SEQ ID NO: 215153 - DNA, 390 bp, Homo Sapiens
  misc_feature (311)..(311): n is a, c, g, or t
ttttttttagtcagccaataaatatttattgaatgaacgaataaattaatggaaggtgttccagatcctggtaggcgagagtcagtcggagggagtgcttgttcttggtgcactcacaatggagaatcaaggaattcaccttggacgggctcatttctccctctcctaggccccgtgcagcctcttctcagacttactagttctgaggggctcctggctgcctcacaccaacagcagtggccagtggacactggcgatggtgtcctgacattttggtttgtgaagagtttgtgctccgagtcaaatcctgngaggagtggggagggcatccgctttaattaattagaggtgtctctattcatctccgtatctgcaacatctagcacaaga

SEQ ID NO: 215154 - DNA, 389 bp, Homo Sapiens
tgcattaagagtattgaggctttggaacacctgaagtgagaagcacactaggaaatcaacacaaaatgaatcaatgaatcacaggaatgtaaaactgcaatatgatctggttgaagttagtgtcactttaacatgattctttttttattccccctggaggcaggacatctctctattgcccacgctggagtgcagtggcataatcacggctcactgcagccttgacctcctgggctcaagtgatcctctcacctcagcctcctgagtagctggaactacaggtgcacaccaccatgcctggctatttaaatttttttttttttttggtagagatgagatctcactattttacccaggttggtctcgaactcctgggctcaaggatcctg

SEQ ID NO: 215155 - DNA, 310 bp, Homo Sapiens
catgtttatatttcaaaataaataacacagctttccataaattggtgttgcaacagtagcagctaagattcctaacagatctaagccctgttataaaacattctttagcaatgtagcagatgctatcttagagttacaacccagcgtttttcaacagtgagctctgtgtagtcaggccattctgtaagtttttctactgtgatacttgctatataggttggtaacaaatacaagcataagcaaaaccaaggccagctttgctggcacccaggtcatatggaacctggcccagtgccatgccatctgcctc

SEQ ID NO: 215156 - DNA, 438 bp, Homo Sapiens
tttgacagagttctgaatgtttcagagtagtccaagtgcacccaaaagcacaataattaaatgaggggcaggagagtggtttagaagaagattgtttttctggattcagctccaacaaagtttgtcctgcaggtcttggtgcggtgccatggtccttctcgccaataatattcagcctggataccccgctgtggctctaccagggaggaaaatattttcctgccactgccctgagcctcctgactgaccccagctgccttagacatcccagcttttgggactaccccagacctccctataaccagcaatcagaggctggcacagcaagggtgctttggaaacctgcctggtgctccagggtgacaggcagcacctgctgtcatttgtcagtgtctgtgcagtatttgctagagttttgtgatctcagccttgaaatct

SEQ ID NO: 215157 - DNA, 468 bp, Homo Sapiens
tggtatttcttgtagagatggggtttcaccacagttgccaaattggtcttgaactcctaggctcaagagattcacccacttcagcctcccgaagtgctgggattacagatgtgagccactgcacccagcctggattttggctcttaaacattaatacacacatatgaaaaggacacaggaaccagccagcaggagtttccactggccatatctgaaatcaagtgagcagcagaaaaccccatgactgtgactacaacacaatgaatagtcagttggcacacagtgattcacaaaggaaggatggagggaaagaagcagaggagtgaaaggaaaacactgatttccacaactataggtgactatcttcctttcaaatggataaaggacagaatgaaacattgaccctgcttttttagaagaatctatgatgttctcttattgatgataagaagtttctttacagaatgc

SEQ ID NO: 215158 - DNA, 497 bp, Homo Sapiens
ttttttttaatgatagggacacatcggggaactaaaaaaagtccagataaatttgatcaataaggtgcaccataaatctcaagaattcaggccccaagctttttcttggcgagagcgccacatttaaggagcaaagcttaatttgagatgcaatccaaagccttcccccagcaccatccctctcagacaaacctgcttgtggctcctcggccgacagatgaaatcttgtctcaccatttttggtgaggagggacccagtcgtctgtggagctgagaccctttctctgcgcgcagggttcggggctacggtgaagtgggagggggagggaagaatgtggagctggccttggccgccgtgtgcaccggcagctgcgccatggccagaggtgagctggcacaggcgccggctagtgggggctccccaagctgtgttttcgtttttccgggtctggccggaaaaccgaagaggctcaaagccctggctgagcagggcggag

SEQ ID NO: 215159 - DNA, 579 bp, Homo Sapiens
tgattctattacttttattaaatagtgggtttccacacatggctttttaaataatccaggcaggagaagagaggagggcacacttggaactcccctccccacaatacgtgattatttacattttagtaattggacaatcccggctcaggaggaggttgcaagaatctgcaaaagttggagggagcgccccaggagaacaaacagcaagccttatttcccctagcccatcccccaaaaaaccatccatcccatcctagtgtctggtggtgtccggtggtgtccatcttccattccttcccaaattatggaagtaaggttcttctcaccagaataagagcacttgggataacagagtagggtcccctcacccaaaaaaaaaaaaaaaaaaaaagaagccttggggtaacaacagggcattacctcccccagaataaagaatcctgggctgaggcaggtaagcagcttgacccaatatgggaccctaggctaggggaaagggtccctttactaaaataaaagctactggggtattggaaggaaagcacccttgcccaagtaagagcatatgaactaagtttg

SEQ ID NO: 215160 - DNA, 396 bp, Homo Sapiens
gcttctttatgttgatttttaaataatggatgttttagttgtataatttttaaattgttaagtggaaagttttcttaacctctaatggcaaatttgggttatatgcagcaggaatttccttaaccagtgtagccacacagtataacaagcatattactcttatgtgcactgactgctctcatttctcctatttttacctctctctatccagcctttttcttttactgatacatgatattttacatatttatgggtacatgtatttgttacacgtataaaatgtataataatgtcagagtatttggggtatccatcctcttgagtattcatcatttctatgggttggtaacatttcctgtcctctcttctagctacattgaaatatacaatatattg

SEQ ID NO: 215161 - DNA, 357 bp, Homo Sapiens
ttttcgagatggggtctccctctgccacccaggctagagtgcagtgatgtgactatggccactgcagtctcaatgccaacatgcctggcgtattttttgtattttttgtagatgtgggatttcgccatgttgcccagtctggaaaaaaggggtattttggctaactgtatctaaatctagtactcaaataaaaaaatctgattgatgatttaatctgtcatatgtctggagggaaatctgtaataaaactttggccaggcaatctcatttctagtaatttatcttaaagaaataattaagaacatgttcaaagatttagtttcaaggatattcatggtaatgctgtttataatagtg

SEQ ID NO: 215162 - DNA, 594 bp, Homo Sapiens; identical to SEQ ID NO: 149032
  misc_feature (502)..(503): n is a, c, g, or t

SEQ ID NO: 215163 - DNA, 378 bp, Homo Sapiens
tttgctgcactgcttagaatttccagtacaaggttaaagagtaacgggttaaattttgctattattatagcaaaaatgtcatgtttgtgatattaataaacatcagctaagttttcattgatacacctgctagactaacactaaaaagtaattgcaaattagatatttaaggatctataaatatcttttataagtagaatgtattaactagaataaatttgttaggtatgctcattatgtcaatttcatgtataaatttctcttcctttctaggtgattgacatatccttttgtcataaaatcaaatttcaaatgccaagacctattatttcaatgtagcagtaaaagctagcaatcactgaagggaagccaagttcc

SEQ ID NO: 215164 - DNA, 400 bp, Homo Sapiens
ctggctgcaggcgctaaggtagttcacacaggtctgtcagacaagaggaaggacccctaaaagtgaattttaaaatatatttggaagaatgatcaaaagttacctaggtcaggggtgggagggaggagaactaggaagactacacgtgacagaagcaggtacaaaggccagaggttgcagattattcgagaacttcaaagtggatcagtgtagctacaggccctaggaagagccacgggaaacaaggcatccgaagtaggccaagttcaggtctgcagtgtttctgggccataaccatcatttcagactttatcctgggggtaatggagggccatggaaagatctgaagcagaagagtaaatctcatgagatttacattttagaaaaattgcccttccag

SEQ ID NO: 215165 - DNA, 420 bp, Homo Sapiens
  misc_feature (343)..(343): n is a, c, g, or t
  misc_feature (409)..(409): n is a, c, g, or t
ggaatggtctcactctgttgtccaagctgaagtgcagtggctattcacaggcacaatcccactactgatcagcacaggagttttgacctgctccactgaggatttttaaacttataataaacatattacctatgagtagctagagtacagaaataagatactttttactgtatactcttttacattttatttttgaaccatgtgaatttattacctattcaaaaattaattttttataaaaaataaattctggacaatcaaaaagtaatttaaaaaaacattaaataacttactgccagcaatattaactagcaaaattagtactcaatgtggatatcaaatntatgtttaaacaatattttaagattttaaaaatgtcaactaaaacaaagaattttaatttacatanctctttcaact

SEQ ID NO: 215166 - DNA, 448 bp, Homo Sapiens
ttttttttttttatgtagagggtggtctccctatgttgcccaggctggtctggaagttctgggctcaagggatcctcccactttggcatccaaaagcgctgggattccgggggtgagctaccacatccagcccacagtggctttttttttttagggaataattcattctccattccactgtctgtacattttttttttgaaaggagattcctcctctgtattactttgagcatccattggatgtcagcactgttccttccaaaagtctgctcactacaaactcaatcttaaaaaatttccattgacactatgccaatcgattattacaactgaaaatgacattagccctatgaaaatggaaaatactcagtagagaatataaaacatttgtctaatatgaagtggtatctgagtcaaagtactggaaggaaaaatgtacttcagcact

SEQ ID NO: 215167 - DNA, 372 bp, Homo Sapiens
ctgcacctcagcttccctctctactttctgatgcaaacaattctttataatgaacacactcttggaaatgctaatgtcataaaccacactgaggggtcacagggtgggaggtaaaatctgcaaaaccaaaggtacacttttaattgctaaaaacaatttagtggaagagtgtctacatttgcactcagttttatataggtaattctgtggcctgtgatgcaacacctgggacgtgtgacccaatgtaacttttaattctaccagatgaagcctaagccagcagagcagctcaacctggagctcaccaagagagaagctcatagaatataaaactaagataaaatacagcaggttcccaagataagaaaatct

SEQ ID NO: 215168 - DNA, 417 bp, Homo Sapiens
ttttgcttcttgtgccattttaattttcaatggagagattaatgacacataactgtttagtaatcaaaacttgaaagaatttcatacaaggctcaaatcacaagttacataaatctttgacaacaatattttgatggaaggcaggtctaaactaacagagtagagaactaaatttagcattcagggtgaaatatgccttttctagaaacagccccaaagggaattaagaacatgttggggggtcagtgttgtggctgctttttctttatttgtcagaattatctgaatcctgtctcagttttgtttcaatttgtttgtacggttatcactaacattttggtggcattgattcctacacaaaatatttttgaccatcaatacttttcacgttatttgaactatgcaaggtcttcaata

SEQ ID NO: 215169 - DNA, 553 bp, Homo Sapiens
  misc_feature (434)..(434): n is a, c, g, or t
aaagagacgtgatctggctgtcgcccagactggagtgcagtggggcgaccatggctcactgcagcctcaaattcctgggcgcaggcaatcctctgaccttagcttcctgaatagctgagaccacagacacatactatcatgctcagctacttttacttctttctagaggtctcactctgctgcccaggctggtctcgaaattctagccacaagcaatcctccagcctgagcctcccaaggtcctgggatttataggcgtgagtcaccacacctggcaaaaagcaactttttgtatatgcttaccagctaataacatcttgtcatgcttaaatatctatagtttcttttatcataaaacaaatcacaattttatcatgaaaacaaaccacaaacaaatataagactacgttataaaagtgaatgtgactcttcanactgcagattccacctgctctgccggaccctggagcacacacttctcacaaagggagccatgaaatctgtgcttccaaatcactgtctaagcagccttcagctcctactcactcgtgcc

SEQ ID NO: 215170 - DNA, 432 bp, Homo Sapiens; identical to SEQ ID NO: 61620
  misc_feature (355)..(355): n is a, c, g, or t

SEQ ID NO: 215171 - DNA, 386 bp, Homo Sapiens
tttttgtccttaggggatggtaaatttgacagggctgtaagtgagcacttgttgtctgctgaacactgggtggtcaagagacccactgagattggttagttggaacagaacatgaagagtggataccttaatctgcttgggctgctataacaaaataccatagactgggtggcttaaacaatggaagtttatttctcatagtactgaaagctgcgaagtccaaaatcaatgtactggcagattaagttcttggtgaggaccctcttcctggctcgtaaatggctgacttctcactgtatccttacatgacagggagagaaacagctcaggtgtttcctcttccaagggcactaatcccattgtgtgggctccaccctcatgacctc

SEQ ID NO: 215172 - DNA, 543 bp, Homo Sapiens
  misc_feature (460)..(460): n is a, c, g, or t
  misc_feature (516)..(517): n is a, c, g, or t
acattcatctgtaaatactttatttcatttcctgtcttaaaagatgaaactgattacacgatcagttgataatttttttttaagtttgataatatcccattcaagtttagttgaatggtgaagatggcttccattgttgtcattgaagaatcttctgtctatcgagttgtttttcctttgtgtgttttcctggggttcttcaaagaaacagaaccaagagggcatgtgtgtgagggacatctgctgctgtgtttcaccaaacactgggacccatggcccagccaagcacatataacaaccatcatgagtggtctatagtttttctctgattgtctcttcaatttcagatgaaatcagttccttatagagagaagttaaaaaaatcattatgaagagagcaatagcccagtagaaaaatgttcaaaaagcacatacggaattataaccacctgaattcttnctgcctgctgcataaagaccatggcattatagtggagaaaaagttaagagacccanngcttgtcatgcccacatggagacaga

SEQ ID NO: 215173 - DNA, 448 bp, Homo Sapiens
ttttatcaatttacattttcctagtcaactgaaaatccatttctttctcaaatgttcctccaacaaaatgataaggaggaaggggaatctgattccaggataagagatcttacctaggaccatttcaaagattttctaaggtctgcttattacttctctcatggttatccttctcctcagttacagcccatgttctctggcttcttggtggtggcagagcaaccaccactgagtgaaatggcttcccacacaagctccaattgtgctagagctgacaaactactgataccaaagggtttactgagcaccactcagggggaactttttcacagagtagaatttatttttaaaagtggattatgttttatattgtccatctctctctttggaagaacgtgtccttaaattgctcataaagaaaaccacatgggttttccaggaatttctg

SEQ ID NO: 215174 - DNA, 378 bp, Homo Sapiens
tgagatggagtctcgctctgtcatcaggcaggagtgcagtggtgcaatctcggctcactgcaacctctgcttcccagattcaaacaattctcctgcctcagcctcctgattacctgggactacaggcgagcgctactacgctcagctaatttttgtacttttagcggagatggggtttcaccatgttggccagaatggtctcgatctcttgacctcgtgatccgcctgcctcagcctcccaaagttcaactactataattcttatgcttgtagagcttggagtccagggagagcttagagttcagagatagttaaacagtaaatcataaagtttcataggcagtatggaattttagtaaggacctgatatgatttagt

SEQ ID NO: 215175 - DNA, 434 bp, Homo Sapiens; identical to SEQ ID NO: 61983
  misc_feature (404)..(404): n is a, c, g, or t

SEQ ID NO: 215176 - DNA, 406 bp, Homo Sapiens
tttttttaaccaaactgttacatgtggctggccccagtaagctgacctggttgccatcttgagaccagacttaaatccccaaaaccaaatccacatttcaagtatcagtgaacaggtaatttttctgagaattttgaaaggagttagaagagagcttttccttggagtcacacaaaattacttaataaaacatcctaattagacgtttctgtcctgccccctagttcctaaagtcccctacagaatccagaagccccctcccacatctctagggtcctgcctctctccttcccttatgctgagcaaatcaacttctggcaggcagagaacaaggttgacagatggtacttgctggataaatacttttctcctgtcacagtattagggctcagaaaatgatacccca

SEQ ID NO: 215177 - DNA, 295 bp, Homo Sapiens
gcgtggtcgcggccgaggtacacttgagccttttccaagcttccatggttgtatattctcttatttggagtggtctgttcatgtcctatggtcactgatttgtaggagatctttatgccaaagttactgatctttcttcactgcaaatacttgttccagtcattacttttttattggaaagcgtcagattatacacagaaattccaggcagactaaaatgttttccaaaataatagaaaatttgaagagaaccaagtttcaaattcttaatagctgttagaagaaacaattttaa

SEQ ID NO: 215178 - DNA, 832 bp, Homo Sapiens; identical to SEQ ID NO: 44173

SEQ ID NO: 215179 - DNA, 725 bp, Homo Sapiens; identical to SEQ ID NO: 50270

SEQ ID NO: 215180 - DNA, 836 bp, Homo Sapiens; identical to SEQ ID NO: 41966

SEQ ID NO: 215181 - DNA, 828 bp, Homo Sapiens; identical to SEQ ID NO: 47034

SEQ ID NO: 215182 - DNA, 815 bp, Homo Sapiens; identical to SEQ ID NO: 50856

SEQ ID NO: 215183 - DNA, 800 bp, Homo Sapiens
cacgaggaaggatcagagcaaattggcatgtgtacatggtatcaaagggaccagtatttcttcagaagtaaacctaactgaaagaaacgaaaatcaagaagagagctctcaggaggttcacatgttgtcagttgctccagttgcttcctctgagacagggccctgcacacttggtttggataggggtcttggtgaaaattctgttgaagagccccagataaaggactctaaaggagacagtgtgcttacacttcctgtgccagagtatacaccaacaagtattccagaagtccaacaagagaatataatcaatcctcaagacctaacagtgaatctagttgctaatgtacctcaagatggagaagatgaacaagcctttattttaactctggtggaaatcccagccaatgcagtagaagaatttactgatgccactgcacagttcatgccaaaccctttactgccagctcccatattggtcaaatcagtgaataccgaagaaaggggtgacatgagtatttgtttaccagcaacttcagttggtcaagatgccatgggtttatctatttctggaagagataattctaaaaagcctcctgataatttggatcttgtatctaggaagagatttcaatgcaggcttgataaaaatgaccacattcctcctgccaaaaacgttcactcacttaagagatgactgtcaagaaataccactgaggtgcactcaaaggatttacaaatgttttgaggaacaggggatctcacaaggacaaatatttctactcaggagccacgacact

SEQ ID NO: 215184 - DNA, 801 bp, Homo Sapiens
cacgagggctgataagagtagagtttcaaaatctctttaaaccttcctaaagcaatgattgttttatgtttaaagctatttctagtatgaggaaaaaaagtgatttggcaatagacgtcaagagtctttaaaatgttccttctccctgattctgtcatctgcttctgaaatcttgtcctaaggacataatttaaagtttaggaaactactttctgcacaaaaaatgtcctcagtgctatttagtaatagtgaaaacctggaaatgacccaaatgtatagcaacagaggtgagacgtccactccagtctcaccccatcacagcagtgtctacggggactatatgatgtgacaaatgcctctgctattattagtgaacaaaaagagaacaccaagttgaatatatgatcccagctgtttcaggaaaaggacccccaaaccctgtgtatagaaaaagattataaagggctgggcacggtggcccacacctttaatcccagcactttgggaggccgaggcgtgtggatcatgaggtcaagagatggagaccatcctggccaaccaacatagtaaaaccccgtctctactaaaaatacaaaaattagctgggcatagtggcacacgcctatagctactcaggaggctgaggcagaagaatcgcttgaacccgggaggtggaggttgcagtgagccgagatccagcccttgcactcagcccaggcaacaaaacaagacttgtctcaaaaacaaccagcaaccaaaaaaaaaaaaaaaaagaaaaaagagaaatgattgtaagaatcc

SEQ ID NO: 215185 - DNA, 794 bp, Homo Sapiens; identical to SEQ ID NO: 41172
  misc_feature (794)..(794): n is a, c, g, or t

SEQ ID NO: 215186 - DNA, 783 bp, Homo Sapiens; identical to SEQ ID NO: 49995

SEQ ID NO: 215187 - DNA, 813 bp, Homo Sapiens
cacgagggtcttctcccagtcactcccttatgcactgaaaggagaatttgactcccttgcacttcaaggccaggtgcctctccactagacagtcagacaaaggcaaataatggaggatagagagacaggtgttcattaggctggccatagggagaggaagggggtgacagcaggggaaaagaaactgtagtatcagttgtcacaagtagagctcggcccagctttccctcccttcccagccaccctagaattgagagtcccagtgcccctagtgtcgactttctatgtacatcctaggggtgagggagtgcggggcaatgggtaggatataaagcgtaaaggacaaattgccgcagtcttctaattgatgcttccaaactcaggaagggcttatccagtgtaaaatagccccaagcccagcaaccttctagagggctctggctgggcagatagcttttgtttttgagtctccagccctcagtcaaggaaaatataccatagctgctttcttgtcagtggcctttgagagaaagagaaaacaaatctagaattctgttcatctgatagaccgggggagctttgctatggtaggaggtttaggaagggcctttcacgcatagaaaccattgttgatattgccactcccctctcctctgcctcacagaactcctgattctgtcttctttctctctctatatatatattttaaaaaatgttaaatggctctaatttttttgttttgaattttgaatttacccttttgagttctctcatgtgaatctacttgttagattgtattatgagtgttctggt

SEQ ID NO: 215188 - DNA, 785 bp, Homo Sapiens; identical to SEQ ID NO: 55458

SEQ ID NO: 215189 - DNA, 660 bp, Homo Sapiens; identical to SEQ ID NO: 43900
  misc_feature (660)..(660): n is a, c, g, or t

SEQ ID NO: 215190 - DNA, 670 bp, Homo Sapiens; identical to SEQ ID NO: 40697

SEQ ID NO: 215191 - DNA, 619 bp, Homo Sapiens; identical to SEQ ID NO: 42796

SEQ ID NO: 215192 - DNA, 684 bp, Homo Sapiens; identical to SEQ ID NO: 40951

SEQ ID NO: 215193 - DNA, 653 bp, Homo Sapiens; identical to SEQ ID NO: 40410

SEQ ID NO: 215194 - DNA, 677 bp, Homo Sapiens; identical to SEQ ID NO: 50385
  misc_feature (602)..(602): n is a, c, g, or t
  misc_feature (613)..(613): n is a, c, g, or t
  misc_feature (631)..(631): n is a, c, g, or t
  misc_feature (641)..(641): n is a, c, g, or t

SEQ ID NO: 215195 - DNA, 674 bp, Homo Sapiens; identical to SEQ ID NO: 41187

SEQ ID NO: 215196 - DNA, 687 bp, Homo Sapiens; identical to SEQ ID NO: 42267

SEQ ID NO: 215197 - DNA, 668 bp, Homo Sapiens
ggggcatttattttgttttatttttttgagatggagtttcgttcttgttgcccaacctggagtgcaatggtgcaatctcagctcactgcaacctctgcctcccaggttcaggtgattctcctgcctcagcctcctgagtagctgggattacaggtgtgcgccaccacgcccagctaattttttgtatttttagtagagacagggtttcaccatgttggtcaggctgatctcgagctcctgacctcaggtgatctacccacctcggcctcccaaagtgctgggattacaggcgtgagccactgcacctggcctgacattctttatgaaatttagaattgttgaagaactataacatttcagtagggttcaaggtggtcccaaaagttatataaaagattagtttttactataaacccttgtcttttactcagatcctagcatcccttttcacatggtttctccatgtatataacagaatcaagaaacaaattttaattaaacattctgtaacagaatcaagaaacaaatcatttttattaaacaatctatatggaacaacattcccaaatttctagaataaatttttcttttagtttttaaaaaaagcaaaaaaataaaaaaccacaataaaaagatataaaattagatacctctctcgtcctccctct

SEQ ID NO: 215198 - DNA, 629 bp, Homo Sapiens; identical to SEQ ID NO: 46437

SEQ ID NO: 215199 - DNA, 672 bp, Homo Sapiens; identical to SEQ ID NO: 55090
  misc_feature (505)..(505): n is a, c, g, or t
  misc_feature (529)..(529): n is a, c, g, or t
  misc_feature (672)..(672): n is a, c, g, or t

SEQ ID NO: 215200 - DNA, 486 bp, Homo Sapiens; identical to SEQ ID NO: 40499
  misc_feature (486)..(486): n is a, c, g, or t

SEQ ID NO: 215201 - DNA, 638 bp, Homo Sapiens; identical to SEQ ID NO: 53666

SEQ ID NO: 215202 - DNA, 652 bp, Homo Sapiens
  misc_feature (630)..(630): n is a, c, g, or t
ggagggaaccctgagtgccctactcttttcccaagaagggtaaagcctacaatatcatcagggggcatgaagcacattaatttgcagtggctgcttcatatgaggaggtatggtggacaggctaatttttccttgaaaatgtggcttcttcaactcctttcaaatttaggatggaatacttcctgaaataaaactgggctttatgcaggattctctttgaaaattcttgtatgtccagaacaaaagataaaactaattgtattcctcacattcacaatccccattggtctgaagtcacgtagcacagagcatctatagcacatagtgtttaaagactaatgaatgcaaaaagataaaatcttcaactaatttttgaattgtttctcatatatgctactagaaaatgccttgttgatgaagcacattttgggtagttgaggtcttttgttttcgcctttagctttctaagctttcttacaatgtggactgattactgtaacatttcacgtgtaaaataactggatattctttatatactggaaataacctgtgaatccaatatttcactaagtgttttaacttttgtgtatatatctctcatcaataaatgtggattttcatttaaaaaanaaaaaaaaaaaaaaaaaaaaaa

SEQ ID NO: 215203 - DNA, 522 bp, Homo Sapiens; identical to SEQ ID NO: 55803
  misc_feature (522)..(522): n is a, c, g, or t

SEQ ID NO: 215204 - DNA, 646 bp, Homo Sapiens; identical to SEQ ID NO: 50069
  misc_feature (594)..(594): n is a, c, g, or t
  misc_feature (616)..(616): n is a, c, g, or t
  misc_feature (634)..(634): n is a, c, g, or t

SEQ ID NO: 215205 - DNA, 656 bp, Homo Sapiens; identical to SEQ ID NO: 49790

SEQ ID NO: 215206 - DNA, 685 bp, Homo Sapiens
ggtctggaaatcagccagggagcactgggcagtgcggtttgaggctctgtacccctggcccccacagctcagccacagcaccctctagcttgggggactagtccagggccaaaatgggataacccttccccatataagcagtaggatggcgtcccccctggtggagagaggaaggaggcctagagggtgtggggcagcttcgaagcgcggggagccgggggtctccaagcaccttctcctggacatgccagccttgaatgggggatgtgcagggcttcaaacccacctggcaggagccctgtggcagggcagagggaccctgctccaaattctctgttggctgcgcttttgtatccaatgcttttcagagtgtattcactcacccacagaaatagagccctgtgctttaggggtgactgtcatatgccttattcttaataaaatctctgaaaaacgaaccaccaaccctaaacaaagagaaaaaactgtcggccgctcggcctcgagagcttctagaccatcgtttgcgcgcggcccgtagtagtgacatgtcatactgtttctagaatctgtctgatatgcttgatctcacataaaccccgcgcacgacgtcgacatcgaggatctagtctctgtctcaagatcacgataatcatacccgctccctcctcgtatctactcgcag

SEQ ID NO: 215207 - DNA, 720 bp, Homo Sapiens
  misc_feature (563)..(563): n is a, c, g, or t
  misc_feature (591)..(591): n is a, c, g, or t
  misc_feature (613)..(614): n is a, c, g, or t
  misc_feature (629)..(629): n is a, c, g, or t
  misc_feature (652)..(652): n is a, c, g, or t
ggagcagtgacatggaagcagatatggccatggaaaccctaccagatggaaccaaacgatcaaggaggcagattaaggaaccagtgaaatttgttccacaggatgtgccaccagaacccaagaagattccgataagaaacacgagaaccagaggacgaaaacgaagcttcgttcctgaggaagaaaaacatgaggaaagagttcctagagagagaagacaaagacagtctgtgttgcaaaagaagcccaaggctgaagatttaagaactgaatgtgcaacttgcaagggaactggagacaatgaaaatcttgtcaggtgtgatgaatgcagactctgctaccattttggctgtttggatcctcctttgaaaaagtctcctaaacagacaggctacggatggatatgtcaggaatgtgattcttcatcttccaaggaagatgaaaatgaagctgaaagaaaaaatatatctcaggagctcaacatggaacagaaaaatccaaagaaataaaagattttctgtagtgtttttgaaaagtttgcagcttatgtaatagcagataanatttctaattgtaaaatgttaattgtanaatctaatttgcaaaatgttcnntcataagtcattcanaatgaaaaaaaaaaaaaaaaaanagaaaaaaaaaaaaaaaaaaaaaaaaaaaaaaaaaaaaaaagcttaaaaaaaaaaaaaaaaaaaaaac

SEQ ID NO: 215208 - DNA, 715 bp, Homo Sapiens; identical to SEQ ID NO: 48223
  misc_feature (643)..(643): n is a, c, g, or t
  misc_feature (696)..(696): n is a, c, g, or t

SEQ ID NO: 215209 - DNA, 650 bp, Homo Sapiens; identical to SEQ ID NO: 49085
  misc_feature (619)..(619): n is a, c, g, or t

SEQ ID NO: 215210 - DNA, 555 bp, Homo Sapiens; identical to SEQ ID NO: 54235

SEQ ID NO: 215211 - DNA, 538 bp, Homo Sapiens; identical to SEQ ID NO: 50714
  misc_feature (530)..(531): n is a, c, g, or t

SEQ ID NO: 215212 - DNA, 691 bp, Homo Sapiens; identical to SEQ ID NO: 49254

SEQ ID NO: 215213 - DNA, 719 bp, Homo Sapiens
ggaaggtgtcagcgttttctgaccccaccccaaccaggacctgcccagacgcctcagaggcccccaaaaggatgagctgaagtccttcatcctgcagaagtacatgatggtggatagcgcagaggatcagaagattcaccggcccatggctcccaaggaggcccccaagaagctgatccgatacatcgacaaccaggtagtgagcaccaaaggggagcgattcaaagatgtgcggaaccctgaggccgaggagatgaaggccacatacatcaacctcaagccagccagaaagtaccgcttccattgaggcactcgccggactctgcccgagccttctaggctcagatcccagagggatgcaggagccctatacccctacacaggggccccctaactcctgtcccccttctctactcctttgctccatagtgttaacctactctcggagctgcctccatgggcacagtaaaggtggcctcagggaaaaataaaaaaaatggaaaaaactttgcaccccgtcatctcgaagcggccccgaatgcatgacggcttccaagaggattgcctggagaattcctggatgtgaagctcacacactggtggggctcctcacgcccagcaatgaagaggtgatttccctgccccccccccgccctgaatcctcccacaatttttgacgacggccaagaagaatacagggcgcttcttccctaaatctg

SEQ ID NO: 215214 - DNA, 608 bp, Homo Sapiens
  misc_feature (572)..(572): n is a, c, g, or t
ggatttctagtttgtgtatttgtatgttgtaagcgtttcctaatctgtgtatatctagatgtttttaataagatgttctattttaaactatgtaaattgactgagatataggagagctgataatatattatacggtaaatatagtatcgtctgcattccagcaaaaatatcaactcgtaaggcactagtacagttaaactgacatcttaaaggacaacttaaacctgagctttctattgaatcatttgagtaccaagataaacttacaccacatacttggtgggtgaatccaattttgtagaattcctacacaggcaaaatagcatgatctgagcagcagcatccaggctgacctcaaggaagcatagccacaaaacagaatagcacctgtctgtacatatttacaaagctaaaataatggcttcactcttatatttgaggaagcaactgaacaggagtcaatgatttcatattactgcatatagaataacaacaaggtgttccgtgtgtgtgtgtgtgtgtgtgtgtgtgtgtgtgcacatttgtttggggatggggggagagaagctagngagagagtcaacattatgaatattgctgactattca

SEQ ID NO: 215215 - DNA, 807 bp, Homo Sapiens
cagaggtcagaagctttggggactaggtaccccattctagcggggcacagcacaaagctcatagggggatggggtcaccaggaaagcaaagacaccatggtggctgggccggggctgtccagtgggcaccgagaagctgaagtgctgcagcagggaggtgaagaagaggaagagctccatgcgggccaggggctccccgaggcatgcacggcggcctgctgagaaaggcaggaaggcctccggcttcacaaagtggccctgggcatccaggaagtgttcggggtggaagcggaagggcttctcccagacggcctcatccttcagcaccgatgacaggttggtgatgagtgtcgttcccttagggatgcggaagccctgtacttcgatgtcacgggatgtcatatgggtcacacccagggggacgatgtccccaaagcgctgcacctcatgaatcacggcagtggtgtagggcatgtgagcctggtcacccatctctggtcgccgcacctgccctatcacgtcgtcgatctcctgttggacacggtgctgcacatccggatgtaggatcatgagcaggaggccccaggccagcgtggtcgaggtggtcaccatcccggcagagaacaggtcagccaccactatgcacaggttctcatcattgaagctgctctcagggttccccttggccttctccatctctgccaggaaggcctcatcaggtctcgggggggctgggcgggtcccagtctcctgtgctcattagcactctccactgggtcagaaaccttttgagctagaactgcaggt

SEQ ID NO: 215216 - DNA, 742 bp, Homo Sapiens; identical to SEQ ID NO: 50368

SEQ ID NO: 215217 - DNA, 503 bp, Homo Sapiens
aaaattctttggattttttattggattcacataaagcaaaaaacttactcacttggaccgagaatatattgtaatgttccataagtcataacttaaggaccgagaatatattgcaatgttccataagtcataatttaatgtgcagtaagaacccatgaagttgtctgaccaaaagtaacactcttctgttgggaaagattttacatccttttattctggatgaatcctgaattctagatgttgggtttaatgcttcacacaatggcacatttacaagaggtacaaaacacttattgagctttcagggccactgtaaggggcttgcagaatagcctctttgcaacccagagaattaatctgattcctctttcctcagcccacgcctacctccaacttcaattttacaggagtagtttcccaagagtccccaccccctccatttgcagaattaaggaagtggaaggactggagagttcagtgtgtaaaaacgtgtggagtaatct

SEQ ID NO: 215218 - DNA, 386 bp, Homo Sapiens
tttttttttgacaacaaacgaggggcatccagcctttttttttttctttttctcctgtttgtactgagcttctaacatacggaagacaggaaatataggagcttacatttagagagtaaaaaactatcaaaacaaaacaaaaaaaaaaatttggcaacttattgctcttctgctgtccagcatggagatgggggtatttaattttgttcctaatatttatttttttatacagcaaccagagtcccaaggtttagattctggcaccggctctgtcatcttagagctgcttgccagagggggacttcccacttttgactttggtcagttcaattgcttctccaggccttccccacatactggttttcagacatggggccaatctcatc

SEQ ID NO: 215219 - DNA, 455 bp, Homo Sapiens
aaaaaaagaggcttggtaagtttttgatacttagttgacttttagcattatccagcatttgtattatgaaccagtgagtactgtaatttttctttccctttcagaaagactcaaagggaacatataaatgtttcctatttttaatgtggcaatagtgtagctaacactggtacagacggaataaacacacctctaatattctcctgaagatttggtgatccagtttcaaataaggtatgggaaaaacagatgttttcattatcgccacttaatccttacttccgattataattatacatgtttggctgtaataactatactaaagcatgcttgtgaaagtagacttctacaaggacagaaaacccacaacaacaaagatcgatcacgaaagacaaggcatattcattcattaatttacttctcttagacccgggacatgtgggacaaatactttt

SEQ ID NO: 215220 - DNA, 476 bp, Homo Sapiens; identical to SEQ ID NO: 55241

SEQ ID NO: 215221 - DNA, 624 bp, Homo Sapiens
atgctttttttttttttttttttcaaatcatatatttaatacaggactcatatccagaatatgaaatacacttacaactacgcaacaaaaagataaataacccaattttaaaataggcaaaatatttgaataaccatttcatcaaaaaggtgtaggaatagacaataaaatacatgaaaagatggtcagcatcatcagtcagcagggacatgcaaatcaaaactacagtgagacaccacttcttacccactagaatgctataataaaaaaggacagtaacacctgggggaagtgaaataatgacgtggaaaaactaaaacactcacgcattgttgatgggacatgcagtcacgttggaaaccagtttggcagtatcttaaaatgttgaagatatatttaccatatgacctagcactatcacttctagctatctacccagaagaaaaaaacctatgtccacacaacacatgaatgtgaatattcatagcaactttatccataattgtccataaagtagaaacactcaaatatgtatctactgataaatgaataaactaatgggagctatccatacaatttaataggatttgtcccctaacaggattaaaatattgatatgtgctg

SEQ ID NO: 215222 - DNA, 503 bp, Homo Sapiens
gacgttttaaaaaacttttaatgttgagttgacaggaaacaaaagctgaaaatgctaaatactagaaaatgaccatgatacaaactccccatgaaagaatttgagagcttgtagtacacagatgaaaagttagaacctcgcctgtttacaacattaagcaagaaagaatgaaaataaatggaatgaacattcaactcgagaagtcatcctgtgtggggagagtgggtatcacatgaaactccagaaaagcaggtggaggaaattaatgcattgaaaattgagaaatgatttgccaaataatttaaacattatctgagaaaactaaagtagacgaagataacaaactaaaataatgacagcacaaaacaagaagaatgcgagcttctccatacacttggaggatgcggaagaattataaacaactactttgttctaatctgcactgtgatatttgaaaacttaagtaaatacgaatgactttccaatgaagaagtagaaataca

SEQ ID NO: 215223 - DNA, 590 bp, Homo Sapiens
gtttgtcagaaatttttatttatttaaagaaataacattggttattgattagatatatatcatggtggtttatggtatgagatatagtgtccaatgtggtattattagtttaatatatatctacttgtggcaatagtgaacagtttcaagagatgaatacataatttaaagggggagaacgacataactgcacgttcatttcaatgtctgagtttgataaccaaaagtactttcattttttagataaaaattttctatttcccaaatctcaagacctggatacaaaatgtagagctgcagatttaaggcctgaatggctggagtagcaggtgttacctgaacatttgtgaacattttaccaagagaaaaaaggggaaagtggagattctcatgtctacatgtgtactcaatgaacacatgttactctgattaggtttgtgggccccatggtctccgaatcagtttcaggtctgaagataacaagagtcattgagggaaataaaacgattgattgttgcccagtgaagttggtagaaattaggatgaactatgtatgacatggtgctgtaaattcttctacttgtggacta

SEQ ID NO: 215224 - DNA, 556 bp, Homo Sapiens; identical to SEQ ID NO: 60260

SEQ ID NO: 215225 - DNA, 557 bp, Homo Sapiens
aaaggtaaatcatttttattgccacaaattgttaaattgttgtgaaaaaaagagaaactggcacacatgaaataacacaaacataagaagatataagaccaaaatagatttgaattatgtctcccaggctggattgcagtggggcgatctcagctcactgcaacctctgcctcccaggttcaagcaattctcatgcctcagcctccaagtagctgggattacaggcatgcaccaccatgcctggataatttttgtattttatttagtagagatggggttttgccatgttggccaggctggccttgaactcttgacccaagtgatctgcccgccctggcctcccaaagtgctgggattataggtgtcagcctgtgcccctggcctaaactctgacttttgaaaaggttttctaaaactttatttttaaacaatcaacaataagtatttcactgtgcacctattagtatgtctaacacaatgctaagtaaggggaattatgagaagattataagcttatcacgtgatcttgtctttaaatagtttataacctagctacc

SEQ ID NO: 215226 - DNA, 1000 bp, Homo Sapiens
attggcccagtgcataaaaaagatgttatgaaggcttcagtgatgttggaacatgaccctcagtatgcagtaattttggccttcgatgtgagaattgaacgagatgcacaagaaatggctgatagtttaggagttagaatttttagtgcagaaattatttatcatttatttgatgcctttacaaaatatagacaagactacaagaaacagaaacaagaagaatttaagcacatagcagtatttccctgcaagataaaaatcctccctcagtacatttttaattctcgagatccgatagtgatgggggtgacggtggaagcaggtcaggtgaaacaggggacacccatgtgtgtcccaagcaaaaattttgttgacatcggaatagtaacaagtattgaaataaaccataaacaagtggatgttgcaaaaaaaggacaagaagtttgtgtaaaaatagaacctatccctggtgagtcacccaaaatgtttggaagacattttgaagctacagatattcttgttagtaagatcagccggcagtccattgatgcactcaaagactggttcagagatgaaatgcagaagagtgactggcagcttattgtggagctgaagaaagtatttgaaatcatctaattttttcacatggagcaggaactggagtaaatgcaatactgtgttgtaatatcccaacaaaaatcagacaaaaaatggaacagacgtatttggacactgatggacttaagtatggaaggaagaaaaataggtgtataaaatgttttccatgagaaaccaagaaacttacactggtttgacagtggtcagttacatgtccccacagttccaatgtgcctgttcactcacctctcccttccccaacccttctctacttggctgctgttttaaagtttgcccttccccaaatttggatttttattacagatctaaagctctttcgattttatactgattaaatcagtactgcagtatttgattaacc

SEQ ID NO: 215227 - DNA, 558 bp, Homo Sapiens
gcgtggtcgcggccgaggtacaatctgctaagcaaaaatgccatcaagttcgccaaaagagataggagagaacaagcagctgatcataaatctttaaacagaatgtatccactgtagttcctatataaacacttcacaaatgctggttctttcaatcccagaagtgaaaagaatcttgcctctaatccactcttgttttgcagatgaagaacaaggccatagaaagaaagccacgagctcaaactgaagatggggcgggaattaggattcaaatccaggtctccggatccacaagacagcgtcttttccacaaggccactgcagccatccatcaatttagacatgaacctgttacctatgtggtcacaatcatgccatatacaaactttagccaagtagcactttgttcctcttagtgctttctcactcagaatcaaattaattcctcaataaagttataaatccaacaacttcagttgcacaattcacagcattaaaaagctagctcaaacccacactgagtccttaaaatttgatgtggtaattatgatcaccctg

SEQ ID NO: 215228 - DNA, 424 bp, Homo Sapiens
cgagcggccgcccgggcaggtacacagcatctgaggtcaaaatggaatctggctgttaaccttacaaaaatcaccccctcacccaaaaaaaaagtggtaaaaatgagtgaatagttgcaaaaagttaacagcctatgagcttctagtttctgcgagatatatgtgttaataaaggtgcttccaaattctcaggcaggagttttatcttttcctttctttttcctcttgcataccttctataccatattcaacccacaggagtttggaagaaccgattgctaacttatgctacattcatgtcagaagaggtgggaaaattcttacaacaggagccatactcataggaaatcaagttgctataaataaaactaactagcaatatatggataagtgatttattggggggacactgattaaataattt

SEQ ID NO: 215229 - DNA, 633 bp, Homo Sapiens
attaagtgggttgttttagatgtatagagtattgatatgagttaacactttttagtagatggcaaagtgggcttgatgttcaaaagtaatgttcgagttagggttcatggtccctttctcagtaatttttttttaataaaagtaaacactggttcaaagacaaatagcaagtattccctcctgtgctatttatagagggctcaattcgtagaaaggcataccctccaatgcaattctgtggctgtcccttacagtggtttcagaatcacgaaaaaacagctagtaaataggatagaaacaataaaagaaagagtttagaagttccctgtgagcaatctgtgtgtcttcagcgagcttgaaccaaagtcttcatatcctgacccactgaattataagcaattgctacttgcccatcttgccaaagtagtccaaacacacttcaatgaggacagttatatttagcaggtcctcacccctgcaagagacagcatatcctcactattattattcatgtgttattggcaaaaacatagcttgcatctttccagaggcagagtttcaaagacagggttttctttgagacataagcacattgcttaagtacataacaaggttattaacacttgcactcag

SEQ ID NO: 215230 - DNA, 447 bp, Homo Sapiens; identical to SEQ ID NO: 59496

SEQ ID NO: 215231 - DNA, 458 bp, Homo Sapiens
tttttttaaaatcacacagccagtgcttttaattcaaaacgaaaaatatgtcatccaggctagactgctcacattcatctgacagcaacttctctccctgcagatgagggaaggctgtgatgactttatctcgagcctgcctggtgggaacgggcttggcacaaaaggagctgcagaatcctgctgctgattggcagatgcatttctgaactcagcgggggctggacactgagcaggaccttgttgataatactgcctaagtgggcacaaagccaggggctgtggcctgccagcatgcaggcacagctcctccaccctcaggggagtctgagaccccttttgtgtttcgatgactgggggatttttttttttttttttttttttgagatggagtctcactctgttgcccaggctggagtgaagtggcgcactctcggctcactgcaaactctgcctcc

SEQ ID NO: 215232 - DNA, 483 bp, Homo Sapiens
gcggccgcctgacccagtccacctgcaccagtggggtgtggcatcagttaagcaaaggacccttaggcctatgcaacatttctgcccctaagttagagaaccaccttttagagtggcgatctcatgggagtggcagcttgactctgcaggaaatgtgggtgctatgagtgcagaacagaaactcttacgcgttctgatataaaaacaatacatgaaaggatgtggatttagccgcaaaatcacgctgtttcaattgaataaaggcaccgctgggattcgaacccaggatctcctgtttactagacaggcgctttaaccaactaagccacggcgccgaagctgccataaaggttcctgaaattcatctacaagaatatagagctaggaacccggaccgagctttttcagatctttctagaactaatttggtaactcaactggctcttgcatcacttgtccattcctcggatttccttcaatgtc

SEQ ID NO: 215233 - DNA, 443 bp, Homo Sapiens
tttttttttttgataaattggaatattttcagagtaaaaagttagagataaaaagacatgttcaacatagagctcttttggataatttgccattgttgtacccatactgaaagccaaaatccagattttgtcaactttactccaacaataatacagcaaaatccacatacagattctatctgaaactgcctccttccagatcaatattaaaccaagtagagggtgagccttcaggcctgcaggctagagaattaggggttaccacttgtgccattaggaaagagaacttcatttttatttaatactttttggatcataattatgcactgagtactcttctaactttctaaatgccaattcatttacttcttataaaaacccatcttgtaggtactattattatccccactttgcatttaaagaacccaaggcacttgcccaac

SEQ ID NO: 215234 - DNA, 478 bp, Homo Sapiens
aacagccttgagatgagatcacacaaactttcaaatgtagcttctaggggaggggagaacccaggaggctgggctttctcttctcttctcaccactggaagggaggagtaaccagaaggagcggaagctaaaacacgctgtccagagaggggagctgtggtcagtgggacgtcagtgagtcagtcatagggtttgtcctgatggtggtggtggcaggtggtaagggttggggaaaaatgaagaattagaggaaacccccaacaccagcaggcaggctgtactgtgactggactctccctcaacatcccccactctgctcaaagctgagggacagaggtggatagtgctgggagggaagagaagagagggggaggagaaggagagagggaaaggggcagtggagagaacaaggccatttctgtttcttttccagggacctgaccagagctgggtggagggaaagcgtgtgtgtgggact

SEQ ID NO: 215235 - DNA, 385 bp, Homo Sapiens
ttttttattgtagaaacttaatgtttattttaaatccatgagttttggtaaatattgataaactttctgagcagttatcatttcttgatgtggttggattgtaggaaaaatgtggagggatgattctgggctgcaaaggccaaggatgcttgtatctttgaaatgtttcacaaccatttatataagggttacccgtgattttctcattggattcttaacaactctgaggtgtatattcattcatccctgtttatagatgacagcactgagaatctggagttaagtgacttgcttacggtcacacagctacacagcctttcagtgatacagtcagaatttaaactagttcttttttttccgagatgggggactcactctgtcaccc

SEQ ID NO: 215236 - DNA, 440 bp, Homo Sapiens
  misc_feature (403)..(403): n is a, c, g, or t
tttttttttttctgtttcaataaaactttattcacaaaaacaggtggcagggtagatttggtctctgtactgtagttcactgacccctgatctaaaagattacatactttgaaaacagcaatgccaaaccttgaatccaggtccgatattttccagcaatcgtgatgcttctctgatcaactgaatgaaacagttataaatgtactggctaaatttagctttatgcacttgttttgtcccctattacagtataaacttttggtgaatagggattttcaaattaattaaagcacttatttttatacccaatacacacaaatacagaactttactatagcagatttttgaccccaatttagtgtgctatctgaataaaaggcttagtaactaaaaaaagtgctgncttagatttctgaactatttttttttttttttttgga

SEQ ID NO: 215237 - DNA, 520 bp, Homo Sapiens
  misc_feature (458)..(458): n is a, c, g, or t
tttagctttttaaacatttttaatttataccattctttagtagtttctgtcgtttttctaattcctttgagatcactcagaaacatcaggacacagttttcatctgcctggaggaatgtttttctggtgtgctttcattatctgtgggaggttatctggttcactttctccccgcaatatctttgtacagggtgtgatcagcatcttttcctgttctttcagcaggatgttctacgtacgggcagttgtgggtcagagtagctttctgaactccacagctggagaggcctttcccctgctgtggtcggtctgtgtagtccttgctcctgtactttctgggattggccacctctttcttgtatctaaagcttttctcctttaccccaagtgttcctgctctgttcaatcccagtcctttttttcttggggtgagctcttgtctttcagaagagaagttnttgttaagggcatgggtttccctcacattcttgatctttcctcagccgtataatacgtcagc

SEQ ID NO: 215238 - DNA, 442 bp, Homo Sapiens
  misc_feature (442)..(442): n is a, c, g, or t
ccctattaaaatatgtttattaatgtgccaaatatttatgaatgatgagaacatcactgcttaagttaatagcaatcccaaagcaagaatcatattattctatgaaaccaggctcttcaggatatcagacaacacacttatacagtttcatacctcatctcaagtttaactttcaaattacattttcacttgctgtgatctttttaaacatgaggacaagcctaaagcaagctcactcattgtctcccttgcttccccactgcacataagactggtcacaaaacttcctttatgttcagtaggctatatattctaattagatacttctttcacttattcttcttatcaagttttcattgactcattcccttattttcataccaagcttcatctcctcttctaaaagcaaagagccattctttaaaaaaaaaaaaaaatcttn

SEQ ID NO: 215239 - DNA, 465 bp, Homo Sapiens
ttttttttttttaagatttccaatgacctttatttttgaatgtaaaaattcagatagtaaaaataaatctaaaggatatctcttaattttacgattttcacagaaattagaaatgatgatatggtctggctgtgtccccacccaaaatctcatcttgaattgtaaaccaagttgtgattcccaggtgctggggtggaaccttgtgggaggtgatcagatcacgggggcagtcccccagtgctgttctcctgataatgagtgagttcccacgagatctgatggttttataaggggcttttccccgcttcgctctgcacttctctctcctgccaccatgtgaaggatgtgtttgcttccccttctgccatgattataagtttcctggggcctcccagccatgcagaactctgagtcaattaaacctctttcctttatacattacccagtctcgggtagtcctttata

SEQ ID NO: 215240 - DNA, 400 bp, Homo Sapiens
ttttctggttccattttattaaaaaacaaaaccaaaagaaattttgcagtgaaatttcctggaattcacaaccctcatttaaaaatccttatagttgcaatattttttttttagccagtacgtaagaacacgattgcacttatttacatgatagtcttctatataacaaaaataaccatgttgtaatgactgtttccaactatcacccttgtttcatcactagcccattatgagacaagttgattacgctctccaagtacaaagagaatagaataaagcaaaataaaagtctgtgtctcctaatagaagacaaattcctttaaagacagttacttttttttttttttcaatttctttgtatttcaagagggatataaagtgctttgaaaggagtagggta

SEQ ID NO: 215241 - DNA, 427 bp, Homo Sapiens
tttttcacagtgtacactttatttcagactacaggtttctgaacataataaaatctttggcttgtagcggcggttcagtctcgcagtctgtggggtcgtatttctcaacaagtctccggaaaacgaaaggggggcagaacagacagaccgacagaagggacccgggaggtgggggagaagaggtgggcagacacgaaaggaaacacactctcgcacacaaagaaaagtcccagagaaaccagggccggcgatgcgggtcgggaggcaccggagaagcaatgacattcaaatgaaaaaggcaacgaaaacgaaactgggcgggggcagcgaggcggtgggggaggggataaaataattataataattataataattataacaataataataaaggagattaataaaaatgtccagcaaatagagatcg

SEQ ID NO: 215242 - DNA, 445 bp, Homo Sapiens
tttgaaaatgtaataagttacaaataggataacatacagcttaaattactggaatttaaactagtcctgagatttgataattatgaattactgtacttaagtaaataattacacactgcatacaaaaggagtttggagaattacctttcatttcacttgctgaagaataattttgaaacttgatttctaaggatttcattataactaagcttgctgctctaaggatcacatgatctggactagtgataagttcacattcaggttgaacttcatcacctccaaaaaaggaatgtttttcataaacagacagtgtcttcaacaaccccgaattcacagcttgcaaaacagcattagctaaagccagcatgtccaccgctacatgatggtctggcggcattaaggcaggcacagatccacgacagaggtcttcacccactttacagag

SEQ ID NO: 215243 - DNA, 455 bp, Homo Sapiens
aactttaagaagcgaacttttgctattgcacatacctgctgcctccaaagcgccacgccactgattgttttccttgtttcgtggaaggaagacaaaacttgttccagctcaacaaggcttcctatatcttttgccccatcagtttgtaattgtccccaaattccaatatctgattcatcaatagttgattttccttctaatttcagaaacacctcattcaaagttgttatggaaacaccataatcctcaatgccttggttagaacatctatcaagatccctgttaagttctggaaatttgtttgtcctttccaaaggcaaaatatatacaagttcttcttcactttgagctgtcaatttggcatcagagatgtgctgcttaaccagtgatgttatactctctggatcacacctttcattcagatgcaaacttaaatggtagcctatgccccattt

SEQ ID NO: 215244 - DNA, 492 bp, Homo Sapiens
gcctaataacatttcatttattacaggactaaaagttcattattgtttgtaaaggatgaattcataacctctgcagagttatagttcatacacagttgatttccatttataaaggcagaaagtccttgttttctctaaatgtcaagctttgactgaaaactcccgtttttccagtcactggagtgtgtgcgtatgaaagaaaatctttagcaattagatgggagagaagggaaatagtacttgaaatgtaggttgtttttttttttttttttgacaggttctttctctgtcactcaggctggagtgtagtggcacagtcacagctcactgcagccttaccttctgggctcaagtgatccttccacctcagcctcctgagtagctgggactacaggtatgtgtcactacaactgactaatttttaatttttttatagagacacaggatctcactatattacccaggctggtcttgaactcctgagctcaagcg

SEQ ID NO: 215245 - DNA, 536 bp, Homo Sapiens
  misc_feature (345)..(345): n is a, c, g, or t
  misc_feature (358)..(358): n is a, c, g, or t
  misc_feature (421)..(421): n is a, c, g, or t
ttttttttttttcaggacaacaggctttttattgcggacttaagccatacaatatctatcttgtatctgtatctactttctcctaagtttgaacatcctacttctcaaggatattggggctaacagaattatactatcatctaattactcatttaccttctcacacattatatgcccaatcatcatatccagcacaacactatcaccaaaaataggataattgcaaacagtgtgaacattcttctgcagtaattttttttagggatagaatgtcaaattactatgtattcaagtcacttgcaatagtgctgatgccaccaactagaaacatatttacattaattngtttcattgattntcagttctgggggattgctttttaaaactaatttttctttatgatatctaaatattaactagntccaaactcaattggtaaacaggtaccttcaagagcctactttcatcagcttggtttaagaaccattaactcatatttctaattgcttttaaaaaggccccttttggtcacccat

SEQ ID NO: 215246 - DNA, 410 bp, Homo Sapiens
ctcatacctctcaggaatgaatgaagtttttgattataataactgtagtagcagaaatagtgacaacaaaagtagttgctgggctaacatttatcaaatgtatcttatctcgtttaattcttattgcccttcctgtctgtgttcatgaagtatttttatatttggaaacctaaaacaagtttaagatggcattattggaaacttcattactaaaatcatcctttgccttaaatttctagaaatagatggaccatagttaacatcacacgtttggagtaagatatgctgtaagtcactgtaatgattaaaccttcaagttttttttttaacagtgaactggtaagtttaaatgtgttactccaggagtttctttcttttctttttttctttccctcttttcctttctcctt

SEQ ID NO: 215247 - DNA, 455 bp, Homo Sapiens
tttcatttagaagaatttccttggcaactccgtctctccttagtcaacatcagctaacttcatcctccccctttatcaagacattgtttagagtaaataattcattaactggtacagcaatttcagaaccctttcacatagtttcttaaggggaccgtttcccttgaagaatggggtacaccagaggacttaggaagagaagcgcccactggggcttggtcagactctgccaggagacaggcagctgtctgttaactgaccctacccagtaccttctgggattggattaacaaaaggggagttggttaggctggagcattgcaactcatttcttccctgcagtctctctcctgaggtggcccaggtatgtgtttgaggcctgggacttgctgccagcatgagacaagctccagtggggtccatccccctgattcctcagtgccccagcaccacct

SEQ ID NO: 215248 - DNA, 596 bp, Homo Sapiens; identical to SEQ ID NO: 60193
  misc_feature (491)..(491): n is a, c, g, or t
  misc_feature (515)..(515): n is a, c, g, or t

SEQ ID NO: 215249 - DNA, 428 bp, Homo Sapiens
tttatttattttattttttatttttatttttattttatttatggggtcttgctatgttgcccaggctgatctcacacttctggcctcaagtgatgctccccacctcagcctcccaaagtgctgggattacaggtgtaagccaccacacctagcctgtttctgggttctctaattttatctatttgttcttttgctaataattgcaaaattttaactatagtagtttctaaattttaatagctggtgggataagtctcgtttttttaaactgtccttgttatagttacataccaaacaaactttataggcttctcaaattcatacaaaaattcctttgggattttggttaaagtttcactgaatttataaatcaattagggggaaaagtgacatctttatcgggctatcctacccataaacaccctatg

SEQ ID NO: 215250 - DNA, 273 bp, Homo Sapiens; identical to SEQ ID NO: 61505

SEQ ID NO: 215251 - DNA, 461 bp, Homo Sapiens
  misc_feature (447)..(447): n is a, c, g, or t
tttttttttttgaaagataagctagaagtttatttcaacacaaagaatgtgaaagaatgtagaattcattcagcagaaaaatgttaaccatcttttgcttcccatatgtcctagttaaggagctttctttagccacatggctgctcacctttccttcctgtaactcaaaaatagtcacttgctggtaagggttcacagtgctgaatatgacacagactcaaaaagagagaagaatatttacttgtcattttcccccttttctttttttcttttttgagatggagtctcgcactgtcacccagggttggagtgcaatggcgtgatctcggctcactgcactccagtctgggtgacagagtgagactctgtctcaaaaaaataaaagattaaaaaaaaaaaagggtaggaactttcagcctgggcagagcctttattcttgtcacccancaggggtgataagg

SEQ ID NO: 215252 - DNA, 468 bp, Homo Sapiens
ttttttttccagtagtgaactatttaatacattatgtacagtcggatttaaaggaacacaaataggtttaaataatttgaaaattttaaagtaacttagactttcctacattaaataagaaagtagaacccgattgaggaagcctaacataaaaaaaaaaataggagaggcaatatcttaattttgatgtgaactacataacatttaatagaaatgcttctaacctctcactgcaaaataaaaaggaacaagtgctgttattacaatattcctggcaatcctaaccaatgcaacaggaaaaggataaaaattaagaggcttacattttagcaaagagaaaaactcatgtgtagatgtcatgactgcttatttagaaaatcaaagtgtgttatcaattaaaaactatgggagtggccgggcgcgatggcccacacctgtaatcccagcactttgggaggccgaggcggg

SEQ ID NO: 215253 - DNA, 434 bp, Homo Sapiens
tttcatattgaacttttatttctgtgcggtagtcagttaaattcttcatggcatatagtaattatcaggccatttgagaatattttacaagcaggttggaacagagaacaggtagtaggaaaccaaatcttatctctttgagactcattttgaattaactacccctcacctctcattcgaaggcactatattttgcagagaaaaactcacacaacccaaatgtttaatcagaagccatgtaataactgaaacacatgttcagtttctcaataatgcttatttctaaagagaacattaaaaacttggtggcgccggggtggggcttaaaaccattgaatcactggtccccaacttttttggcaccaaggaccagtttcctggaagacaatttttccagactcgggggtggggatggttcaggatgaaactgttcc

SEQ ID NO: 215254 - DNA, 485 bp, Homo Sapiens
  misc_feature (416)..(416): n is a, c, g, or t
  misc_feature (456)..(456): n is a, c, g, or t
ttttttttttttttttctttttcttacataacagcttttattcaagtgtaggggtagagggagacaggcaatgagcaaaataaagagtatgtaataaaataggtcataaattctatggaaaaaaaaaataggagaggataagagaccaaaaatgtgcagtaagggagggcgggggattgcaattttaaataaagtagggggcacagcaggcttcactgacaaagtgatacttgaacagacttcatatatgagaaactaaggaaggtggatctccaggaaagaccctgctagcagaaagaactgccaatgtaaatctcctaacatagaagcatatgtgaggggtccactcttctcaagaagaggggttaagagatgtaactggagacatgacgtggtagagtcttgtaagtcattgngagcactagctttttcttttcttttcttttgagatggagncttgctttgtcacccaggctggaacgcag

SEQ ID NO: 215255 - DNA, 547 bp, Homo Sapiens; identical to SEQ ID NO: 60220
  misc_feature (381)..(381): n is a, c, g, or t

SEQ ID NO: 215256 - DNA, 508 bp, Homo Sapiens
gcggccgcctgctgccctatctggccgaggtcgagctgcgcgccgcttgcgctcccggcccgctctgctggggggcgctggcggcgcagcttgcgctgctgggccttgggctgctgcacgcgttgctgctggtgctgctgctgtgccgcctgcggaggctgcgggcccgggcccgcgctcgcgccgcagcccggctgtcgctgaccgacccgctggtggccgagcgagccggaaccgacgagtcctgaggagagaaccggtgcgtcctgaggagagaaccggcgctgggcaacacgggcctgcaaactcgacaggaccctgcccgaggggccctcgcgccaacctggaccggtccccgcctcctccgctgcccaatctctcagacccaccccacctgcaggcccagaccacgtgggacagaactcctgcccaccctaccccgagggaggcgaacccgcacttccaggcttgggaggaccatggggcacaatgcggtccagaccctgct

SEQ ID NO: 215257 - DNA, 455 bp, Homo Sapiens
attaatttttgaagtcatcattaagaaatcaactttaaattgaagagaaaagatggcaggatgtcaggattttatttatttatttgtttttttgaggcagagtcttgctcagtcacccaggctggagtgcagtcgcatgagctcagctcactgcaacctccacctcccaggctcaagcaattctcatgcctcagcctcccaagcagccaggaccacaggcatgcatcatcacacccagctcacttttgtatctttagtagagacagtgtcccaccacgctggccaggctggtcctgacctcccggtctcaagagatccacccgcctggacctcccaaagtgctgggattacaggcggaaccgccgtgcccagccctgatgtctggatctttagtatatacatatataattttctttctcttccatttccatctttatcaagaatctaaacacttt

SEQ ID NO: 215258 - DNA, 528 bp, Homo Sapiens
ttttttttagagtttgacacaatattattctgcccatatgaaattctggtagccagggtgccaggtgtattcataatccagatgctgtcaattttaagcctgaagccccaagaggcgagcagtgtttaatacatcatctcttgttaaatagcagccacacagttggcggtagccagtgaagcattccctgccatgtaggacacgccagttgtctataaataggaccctgccaggctttagtttgacccaaaactcattctcaggtctcctcaactctatcgttagagtccggtgtgctgtataccagcgatggacgacatcataaggaacggtattgatgacagcccggtcatagttgttgtacctgatcaaatacagctctttattccatgggtagatatttaagactggcccaatcccaatcatgtggttgtgacattctccaacatcttcaatatattcatgcttcaatggcactttactgaggagttcaaattcctcaggtgccttttgaagtacctgttctgg

SEQ ID NO: 215259 - DNA, 419 bp, Homo Sapiens
tttcatttattaatcttttatttttcattacattttagtacagcaaagcaaatacaggtaaacatcagtattcttcatacaatagcagacagaaagggaagccagccacaatttagagtgccttttcagttgttgttatatttgtttgttagtttatcactttaagctagattattttactggcgaatttttttcaagctttcaaggaaaagcctatatctatagctatatgctatattcttttctagataatgcaacaagatggaaagatttccaaaacattttatagagctatcaaaactcataccaaaatacaacagagacagcaagtggtcaatcacatttacccaatcagacaatatattaaaacagttgaaacatttccagacaccacaccagaactaaatatgaaaagacat

SEQ ID NO: 215260 - DNA, 457 bp, Homo Sapiens
tttgagacaaagtctcagcttgtcacccaggctggagggcaatggcatgatcttggctcactaaaacctccacctcccaggttcaagtgatcctcttgcctcagcctcccgagtagttgggattacaggggcctgccaccatgcccggctaatgtttgtgtttttactagagatggggtttcatcatgttggccaggcttgtctcgaactcctgacctcaggtgatccactcaccttggtctcccaaagtactgggattacaggcatgagccaccatacccagcctttttttcttctaggtaccagcttttatttatcagattggtataaatgttagaaagcgtgcaatgaaatgggcattttcacagtcgtggcagaaagtataattatctttgactttctagaaagcagtctggcattctagaaacttgcctaacctcttcccatttagacaaga

SEQ ID NO: 215261 - DNA, 419 bp, Homo Sapiens; identical to SEQ ID NO: 59689

SEQ ID NO: 215262 - DNA, 360 bp, Homo Sapiens; identical to SEQ ID NO: 49073

SEQ ID NO: 215263 - DNA, 467 bp, Homo Sapiens; identical to SEQ ID NO: 52232

SEQ ID NO: 215264 - DNA, 639 bp, Homo Sapiens
  misc_feature (490)..(490): n is a, c, g, or t
gatggacgttaggccacctcgcggcagctggaagcggctggtcacctgcagtgtgctcacattccacaccagcaccatgccgtccatgctgcacgagtacacgttgctgggtgcctcctgtccgtcctgcacaatcaaatccgtgacactggagcagtgggctgtgagctgcttgttgcaggacatgctgtggacgttgatgatgtagatgacggagtcttccgagccaacccacacctggttctggtcggccatcaccatgcagttcacttttgcagtgcccactttaaaggagtgctggtggatggtccatgaagaagcattgaacacggtcaccttgccttcgctcagagcacaccataacttggggtgagcatcttcaactttttcggctgggtcaagatgccctggagtgtagagcagcacgtccaccgcttgtgggaacgcctcccccgccgaggggttgattttatgcttcagtgtttccagngttgtctccggaagcgtcatgggcatttcgttactcatcttatcaaagtaggataacttggaggcagcgtagatggcgcctggtgactgcagtgtgcccacgacggcgtccatcagcaagacgttggtcagcgcctgctggacgtagtg

SEQ ID NO: 215265 - DNA, 454 bp, Homo Sapiens
tttcctttttctgtaggactctcagcttcatggatacactccacattaaaccacagggaaacactgaaaccttctgataggtgtggccagcagttttgccccagcaacggcaggtggactggggctatgtgccaagatgaaagcagccgatggggaaaactctctctatcagcctctttcttgctccgtgaaactcgtgctcttctcaataaacccatggccttactgtttaaaatcccaggatacttttgtgatgaaacaccgttgcttaaatttggagcgtgcagtaaagggaaggttagatactgtgaagggctcatagtagtatcactttcaataattttcagaatacccagaagaagaattttttgtacaagggagatttctccagaaatattctcaaagaaagggttagctcttctgaaaacatggttcttgaactcatcaaagatac

SEQ ID NO: 215266 - DNA, 450 bp, Homo Sapiens
ttttgggtttgtcttatattattatgtctatcagaatacacaaagatacaatttattctttgaatagcagcagattttagtctaaaacagaaaagatacaaaaaaaagtaatgtgtgttttctagcttctcccaaatagaaaaaaaataaaatatatatgtataaaatgataacaaaaatatttggctttaagccctcatcacaggaattcttggaaccctctctcttccgacagatgtaagaggcagtataaacatctttgtatgtgtcagtatgtatttgtgtgtgttgggttctcatctgataccaaaaagactaccatattactcataaatatataaacagagacatatacatttaataaattcaagatagattttaaaatagggcaatagaaaaataagaatagaagatataaaagttcacaaaatatacttcactataaaatgc

SEQ ID NO: 215267 - DNA, 710 bp, Homo Sapiens
  misc_feature (554)..(554): n is a, c, g, or t
  misc_feature (640)..(640): n is a, c, g, or t
gaatagtgcaattttggcaagagcaaagaatatcgatggccttttaaaggtcaggcagtgaaaaaaccattggacaaagtgtggactgttgctttgacatagtactagcactatgatgtctcccagaaggaggctggtcgtgtgtccacctcatcatcagcgttatcttctgatgacaacagagaaggatacggagcgacacattttacgttcacataagtagcgttcacatggacatagtgctccccaatgaaagtagagaagatcgctgatatccgggacaccagttcagaaaaggatgggcgcatttcggctttagggtgccagcattttagcattacttcatataaggggtctgggcagtattcgggttgtaggagtcttctcccttgcaacaagtaaacagttatatcaaaggtgtttacgtcaggataaggtggggctcctcttgtcatcagctcccagaggagcacgccaaaggaccacacatctgacttggtggtaaacttttgagtttgcagactttccaaagccatccacttcactggcagctntgcacctgttttggtgtgtacactatagtattctttatcatacatgtctctggcaagaccaaaatcagcaaccttgactgtgaatntttcatccagcatacagtttcttgcagccaagtctctgtggacaaacttttttgctgcaagatatttcat

SEQ ID NO: 215268 - DNA, 542 bp, Homo Sapiens
  misc_feature (396)..(396): n is a, c, g, or t
  misc_feature (428)..(428): n is a, c, g, or t
  misc_feature (496)..(496): n is a, c, g, or t
gcggccgcgggacgcgctggggccgggcagccgggaagcggggcgctgacggtgagtgggcctggccccgggccggtgggtccccgcggggcggccgggcgaggagagaggcagcttcccttcccggagcccgcctggggcgtggaggctcagcgtccctatcctccatcccgccccgggacggcggaaccgggcctcagctggggacctcaccagggggcggggcctcccgcggtccccggcgctgctcccaggactggaggggcgtccgcgcccgggagaggggttccccccgacagggccccgggccgccacgaagttagggaagcgctctctccagggtggaacctgggcccgcggctcccgggagaggagctgcccgcggaaggggtcggngtgggctccaggctgggagaaggatctgactntgctgacctcgcaggctggtaggggaagctgccccccagagcagcatggatgccccgcgaagggacantggagttgctcagcaacagcctggctgcctacgcgcacatccgcgg

SEQ ID NO: 215269 - DNA, 585 bp, Homo Sapiens
tttttttttttcacggtcactatttattctttgttcctttttctttttgtaagaaacattcacaaaaaccagtgcaaaaccatcagtgtgggcgtcctgttttatattacaaaacttcctctggatatatcatataaaagggggggtctcacaggagagaaacgtgataaattagctctgcaatctacggcaaggaacatagtttttaaaatagactttcaacatatgacccatgggggaaggaggagggggcttctggggagacggcgggtgctggggcctcggctggtttgggaaatcctgtccgggccccttaagcatggatagagacatagacaagggaggctgtggacaggcctgagcaccaaggccagaaattaacagggaccctggggaggggccctcacccccagcccataaagagctattccctttctctaagaggcagtagcttcagagcaggaaagtggctttcgatacaggcagggtttgtgatgagcggtgtagtcttcttgttccttgccctgttagtggggtccgaggaagtctctgttatgggctgttgtatttcggggtgaaaagaaa

SEQ ID NO: 215270 - DNA, 673 bp, Homo Sapiens
tttttttttttttttgttgttggaaaaacatttattgcaattcagtgtcaaaagttttttacaaaaatatgccaccgtctggtacaaacaactataaaaaatcagttcatcatgcaagaaaagtgtgcaaataatttatacagaaggactcagctcacacaatattaaataaacatctctgcatgtaattggtctaactttatgctttagttacaatgttcaaccccctctaatacttttcatttaaaaaagtacattaaagcttctaagcttaggacacaggctgtaatatacgcccactttagccatggtgattggcacttggtagaataaagatggcaccaaggattcccaagtatagaatacagcttggagccttctgcttaacagacttgtgcttcgttaattaaacaaacacatctatactcaaagacagaaaaagtcatgtttaaactccagaaataatgtagcagatggagttttaagaagttcagagttttggagcagccatcatttttggccaaatggagcagggcctaagttttgagagattctccagaaagctttgtttgctgagtgaattcaaggacactttgaaaaatgcccagcagacacagtcatgaatatcatggccccttgctcctgggtgcctcatggaataatccccctttgc

SEQ ID NO: 215271 - DNA, 688 bp, Homo Sapiens
ttttttttttttttttttgagctacaaaagggtctatttccttccagccacgcgggcaccacacagctgatttacattccaggctgggggtgcaggaaggtccactgacgtcgcccaggagaggggatgtccctgagttggtgccctgcgcccaccctctgtccttcctctgcatggcccagagcaggcagggctcagaggccaaggcctgatctggagccccaccagctctgaggtttctgagagcaccgggcaagtgggccactgctccagggatcagaggccatccccaggtcggccagaggtcttgtccagaaagttcaggtgctcctccatgatgggcgcccaagagcagaggcatggccgtggggaggagggtccatggaacccgggcgtctgctctgatggatgccttgggatgcaagccccagccaaggtcaaggtggcaacgagagtcccctctcaggtggaaggtgaaggtggtcctcactgccaccccggagcccagagatcttcacagaggcgtctccttggagaccctggcccccagctgccggggaggcttgaagctgagcacctctttgtaagtaacacgcttccattcatccagtgtgcggtcaacgtcgtcaaaggagtcatcatacttctggacctggggctcatcttccgtgtcgtgcagggactcgaa

SEQ ID NO: 215272 - DNA, 658 bp, Homo Sapiens
ttttttttttttttttataaagaaaaagtttattttcatcacaagaagcacacacactatatacaatacacaccaacagaagtaaaaaaaaagtgcattctgcatcttctactgcaaattcacagtacaaaagatactgcctttaaatatattatttaaaaaaacaagaagaaaaacaataaaaaaaatcatcgatatcttaacgcaattcacgggaacccactggcagcttctggaaaaccaaacaactcatggtgtggagctcctgattggggaagggacagggattggtctgtacctacattttgttgcaaaagagctcaggacactaacagagaggaaaactagggtggtctaggtggtaataaaatctctatgaaagaagagtatgattgtgtgactggggaatgggcaggtgctggactctggtgcagaggctgcctggcctgcgccaccccacggctggctagcagaccaagctacgttctttcattggctcctatgggacacagcatgggccaatgcctgcctggcctgcaggaaccgccagtgttgtttctagcaaggctccttggaatagatgtgaacacacaatgtaaaactgcatagcaggataaacacgtatggagtaggacaagctcacaacatccctcgtgcc

SEQ ID NO: 215273 - DNA, 514 bp, Homo Sapiens
  misc_feature (26)..(26): n is a, c, g, or t
  misc_feature (67)..(67): n is a, c, g, or t
ttttttttttttttttttaacacctntcactggtttattataaaggatgttacaaaggatccagatnaagcaatgtgcaggttgaggtgctggggaggggcctggaactcccattcatccctgtggtgtcaccctctggggacacacacgagttgaactaaccctgtctccaaaccgtcctgtagggttttgtcagcatgcctttcccagggaacagggtggggccctctctggggagggtcttaagactcccaatcagaaaggcccggggaagattggagtcctgctttggggcacgtgaaaggagaagacagattgtttcccaggtctaacacacccaaaagacacaagggccttccccatcataacacaacaccctgtctggggtggggagtgatgggaataaaaggtagacagacgctgggcgtggtggctcacgcctgtaatctcagcaccccgggaggctgaggcaggtggatcacaagctcaggggttcgagaccagccctcgtgcc

SEQ ID NO: 215274 - DNA, 585 bp, Homo Sapiens
ttttttttgattttttttcctttgcagatttttttttaagtagacatagtcttttttttttttttttagtagacatagtctttttttctttctcattttacagcaaacattgcaaatatagaaatatttttttctgtacaatagaacgactacagtgtacatgggggctgggctgggggacgtgcctcccagcccttggccgtcctggccaccccggccgtccacaggcacagcctccacccaccctgagtccagcagggctccaggacctgtcccggaggccacttggccgccggcattcactctgcccctctgcagtggactccggaggcggcaatgaagagacggaccggacagagaatccacagaaaaccacggaccgaggagatcacgtgaggggccccgaggtggccacgccggccacaccccccacggatggcattttatgtctttttaaaataacttgtcttttattagatttttttaaaaaaggaagaaagtaaagagatagagaggaaaagaaaaggcagagaagactcaaaagaggaaagataatgaaaaaaaaaacgcgggcggcctcgtgcc

SEQ ID NO: 215275 - DNA, 429 bp, Homo Sapiens
  misc_feature (61)..(61): n is a, c, g, or t
ttttttttttttttttttcctccttcttgatgtattttttttttttaaggaaacatccctngagtggatacagtgcaacatctgcatcaagcagtgattgtcatttatgaagcacgaagtgagaagcccagattgtggattttttcttccagtgcacacttgatcatgattgttgtgaacatttgttagtcctcatggggaaggaaccaagttctgggattgtaggtacaaaataccttgacatgcagtcataggagatcttcgaagggcagctttttaaggctttttaccattgaaaacatgactggattctctttaaagggaaggttgggcaactgtaacccaaactagaaatctcttctctcaactaagtgggatgagtatgtcctggttgccattgttttgctctggttcagatgccctcgttcc

SEQ ID NO: 215276 - DNA, 501 bp, Homo Sapiens
ttttttttttttttttttcatatatccctttatttcttgctaccatgcacttaaaggactcccaacagcgggtcaacccggaaagtctgacaatgctgccccccacagcacagcgctcggcacagcgttagggacagaagtcatcggagttttagcacagggcagcggtcccaggctggctgtgtcctccggaagagaggagaagcatcgggtgtagtcctcgcagggcaatgctcgccggggtagggacaatgggcagggggcacccgaggggttgctacagaggaggcagcggcccgtcccagatggtcgccaaggaccagggggcgattgagcggcagcgggcgtcccgctggcctcgggctgggctgtggttcggtccagagccgaccggcccatagtcaggtcggccacctgctgatgaggttgaactgcttcttcaaggcagcggcggcggcagcccgcggggcgccgcctggcaggtagggctaccctcgtgcc

SEQ ID NO: 215277 - DNA, 435 bp, Homo Sapiens
ttttttttttttttttttccgttacacattttaattagacataacttctctttgaaagaacacacagatcatttggtgaagtttttccgttgaaacaccccataattggtgcaaggtttgcagaacaattttgtccttatgaaatcaacacctgccagttcacacatacacacacatatgcacgcatatgaaatatatatgcaaattatatatccttatggatgaataagcgcaaaggaggaaaaagcgcatctaccaaatgagctgactggactacggaagagaaatgctgcctcttcagttttgtttttggaatgtccaggtcaattgtgatgccttcgaacttcattccaaagtcaagtctgaagcaagcgaaattagaaagtacaatctcaacccctccccgcaaaagtccttcctttttaacctcgtgcc

SEQ ID NO: 215278 - DNA, 628 bp, Homo Sapiens
ttttttttttttttttgtgaaatgagtcctttattttctctacttttggaagtttttccaggggtgggggaagaatggtgttggggatcgcggttgagagatgcccagcaactctctagaggtgcgggtgaggcgtgtgcacttccttctcctggctggggctggtgctatgttttgaagaagctcctgtggctgacattcatctagtctaggatgtcgccacattccaggttgtccagttcgctctgcatgtggtcgatgtactgattgatctccttcacgcgcttgcggttcctcatgatctcatccttgtgaatcctgtctattaaacgtgtacaccaagagttgattctggtcaccagctcatcttctcgattgtcaatcttcaggaggtggatgtcgtgcgatgccccgacagcattaacaatcgtatctttatcgacaaaaagcgcgcgcaggtcgttaggcaggtcctcgtccaggtcgccctcgacaatcttctccagggtgctgatagagatctccaggagcttctcgtggtggtgattctccaggtcccggcactgagccatcaggctttggacattttcgataaacagtcctaccatgtcaacaatgtcctcgtgcc

SEQ ID NO: 215279 - DNA, 579 bp, Homo Sapiens
ttttttttttttttttttagtttgaaatttgcattttaatcagcgtttggctaacaatatgagataaactattagagaagtgtaggtcattctggcaaatagaaagttccatcatttcacacttagaaagctgccacgaagagcttattcttggagtataaaatgcagaatttaggttaagccagtcattttgtagatgaaattgtacactggcaatttcttatggttcaacctaatagtaaaacatttataaacaattgtatcattacaaatacatttagacatcgttttctgctaaactcagtattttcctttccatcctgatcaaagaaacattattgcagtaagccacattataattcagcacgatttcttctaaaaaggctccgagttcctttgagcttgttattgtacagtggatttttcatttgcaaagacgttaagccctccaaatgtgcaaatcatgaagtcagttgttgttccagcaaggtttgcccagcggtaaaaaacaagataaaactaatgcactagctgaaaccaggtggggagaccatgtgtggtagtgcttggcctcgtgcc

SEQ ID NO: 215280 - DNA, 344 bp, Homo Sapiens
ttttttttttttttttttacatttttctaaagaaatatttaattggtagtcttctagaaagaaggcttttcatatagtacaaaaacatgcagtcggaagcactgagaaaactgggcaacataagagaagcatgagatgtgacatgaagcagctgatagtctatgtaagtcaaaaataaaattctaagcacacaaccaactgaatcgacccttccacttggccaagagcattctaaagtaaacctgaaacactagctcaggccatgatgggaatgggtggtcagacatacctcattataccttcctctctttggaattcaggcacagtggaccagccctcgtgcc

SEQ ID NO: 215281 - DNA, 513 bp, Homo Sapiens
ttttttttttttttttttgaagtttaagacctttttattaataaaaaagtacaataattaaactgaacaagattgcttagtccccaagcacacaccctgcatggatgccatagtggagggtctctgaagtagaacagagtaatctctaagtggccatgctaacagaggcaaatcttgagtatctccaggtgcataacagacttgtttatgagagattgctcatgattctagcctcaaagccatgcctctggagcaagaactagtataaaatagaggaaaaacaaggtgttgctctaaagcactaaaataatggggcacaaacataagagttacagagactaaagcttaatatactgtcttataatttatttaaacaaactaacaatgacaaaaaatccaactgatcctttcactgcaggctcctttccccaacacaaaaaagagaaccagtttctggcactgctcacctgtgtgactgcctgtcaaaaaacagggatggacacccctcgtgcc

SEQ ID NO: 215282 - DNA, 710 bp, Homo Sapiens
ttttttttttttttttttgtgtttttggaagtttattatatgaagatggtatacaaaatacattcatcatgactagaaatataggaccaaaccatgtctgtcttatatctgtagcatatattcttggtttgtataaaagtaactttaaaattccagtttccttaaatagttatgcacaaaacacacatacacccacacacacacacacacacacacacacacatacagttacaccactgtcggccaaagatgcactcctcctttaatcaatttaaatgaggctagcgagtatctgtttgatgtttgcattcttgtgggctaggaaacaaggcacgggtccctaaaattaacatctcggtgtcacttcttggactgacaagacacagacttgcacatggtttcagccccattccacccagactgttccacgtacattatctcagaaactctgaaaggaagtgctcgttctttgttagtgccaaccatttttgtcataaatggcaaatgattggaatattatcagttaattcatgtttcaattttcagtgctattttaatgaacaagcactttgtaactagctcattattacaagtctccatttttctttctacattaagactccagatggaaccattctttgactgatggatggactcatgtatgctacaaacctgagtttgaaggagctaagtacctcgtgccgaattct

SEQ ID NO: 215283 - DNA, 485 bp, Homo Sapiens
  misc_feature (448)..(448): n is a, c, g, or t
ttttttttttttttttttgcatgtgaagccttttattggacagggaacagacaagtgcattctgactccctcagacaagtggcagatctatgaggtaaccataggtcacttgttggtcaccattccattttaccaacagggaaacagaatgagaaagaggaaggaaatgcccaaaaactacacagtgagttgcaaagagctaggatacttggcagatttatttgagatggctcttctccaatggtttcaataaaaatccagggattgacgcttcactggtaatccgggccctggaaatctgggcccagggtagcccctgaagccaggaaatgagtcagccctaaccaaattccctagaaaggagtggttccccaaaaccaaagaggtattttccataaggggatatggatgtcttcctcaatccattatcctctctccctcccacggnatcccacagaacaggatttaccagtccccctcgtgcc

SEQ ID NO: 215284 - DNA, 679 bp, Homo Sapiens
ttttttttttttttttttacagcttacaaaacataattttatttaaatttgtatagataaaaatctaccaaaatttaaacaaaaattttatccaaatcctttcccacaacaaaattggacatcatggaaaaaaaaaaacacattcaaataaggttcccatctttctaccataaactggtagattctgggaggatgaggagtaagagagaaacgaggagagaagatagtgatactaaacacaatttgatcttcagtgttgtctcatcttgaaatatcttaataacagagatttccataagaatcaggattcatttttgacacaaaaatggaagcttccactcccaaaatcacaaataaggcttctggttttctttttagtgtgaggtaaacagtatattcaatattaaggcaaatggtaaaaacacatggatggtatattaatgcagatattccattattaaatatattttggaatactcacggatttttcaaacatatgttagaattagaaacctgtaaaatctgcagtagtgtgtaatagctatttgcttgaatgtcttagcagtgcctttttagtagctaatatgttcagtgtaatcttgtgcctttttagtaattaatatattaaatataatcttgtctgagtttttagatggtctgtttttctttttcattatgt

SEQ ID NO: 215285 - DNA, 761 bp, Homo Sapiens
ttttttttttttttttttgaaaataatgatgctttatttgattgacatcacatcatcataaatggcatctaatttcagaaaacaaagttcaagtccgcaaaaaatgcatgtacaaatctaaggagataggtctacagaaatagacacgtggctctgtggtctgtaaggtgcagtcaggaacctcacatcctagggtctgtctgggttcaatgttccagtggcgtgagacaaccaaggaaacagacaccccaaagagccgatgttatttttgaatatatatatatgtatatacatgtacatatgtaaatatgttgccttcatctgtaacagtgcaaacctctcacagcgtgcaaagcaacagtgtttcctacagtcaagtaactaaatcagtgaaaagttatccacacagcattataaaaacattatataattacatagcagatatatatgcacgcctttgcacgctgattagagttacttgcattgacttttgctttagaagaaataaaaaaggaaaatctttaaatagttcttcatcaaataaaaggtaacaatttgtaacagattcaactatgaacaggtattgcatcaatatgtctacaatagaaaaacataaatatataaaaacaaaggcaaaggggtcagctacacatattaacttaccaaacatacatgttctattgaaaaactgatccccattcacaccctccaggtgggaggatacgactataaaaatgggaagcagcgtgtgggtgtgctcg

SEQ ID NO: 215286 - DNA, 727 bp, Homo Sapiens
ttttttttttttttttttctgcattgagtttatttatttatttattacttgtttgtttggatgctctttccagcagactcatgtcaggaggctaggaagggattccttggggaccactggatgctggtagttaaatgccaggaggctgaatggacctgaagatggaggagactctgcagtcttggtcagccacccttgggtgcttgccaccctgcactctagcaggattgatggtctctggatttgtagctgtgaccggtcatggtggaatgctcggtggtttgcactggagaggcccacatggtggcgactgaggccctgtggggtgaggttggctcatgatagctctgaaagttgatggcacaattgagacaaggacgtggagttctggaactttcccagggtccttgcagcccgagatgaagccctccaacattgcagctcactgctgtgaaggctgaaaggggagacaggaggctgctgggtacctcaggtgccaggcatgaggttctccgctgtctggagtcttgctttgggagtgctacacctgtgggagtgccccaggcaccacccaaaggcggggctctggctcaagcttgcatggtttacagagcctcacatgatgtcctttcaggtttgttgagttggggctagggactcggtggcagcagagcctggttctcctgcctgaccaggccttggcaggacgcctcttcccttctgtgga

SEQ ID NO: 215287 - DNA, 734 bp, Homo Sapiens
ttttttttttttttttctggttgatgtattatttattatgtaacagttctgagaaaaaatccaattcaaaacatattactgaggattctgtattagtatattttagaaatcgtataatccaaagctgattttctaatatattttcttatataacacttaaggaatttttcactcccattatttggctctagaaaatcttatgggaaacatttgttacactagaaaacaaaatttaagtacagttgttaggcacggttaaaagggatgatacacacaaactataataattacaaatcagtacttcttttgaatacacatttgaatgtaaacttttaaaatcagtgttttagataaatataaaacatacttcaagaacttattttaacatctcctttactttctaatgctcttcagaaaaaattcctttctgattcattcagtagcaagagcccaaaaatggtgttccaagccaagattcaccttgtcctcttcagaaatgacctgaagagcttttgggttggttaaaaatattgcccgaaggtatcttagggtaaactcgaagagctaaaagcactgaatccagagatcaggtctctcggctgtgctggggacaccatcaaccacttggggttgaattctattgctatgaatgagaggtgactctgaggggctttaaccaggccggggctaatgacagggtttcaaacatcagtaataacaggcctcgtgccgaa

SEQ ID NO: 215288 - DNA, 616 bp, Homo Sapiens
  misc_feature (583)..(583): n is a, c, g, or t
ttttttttttttttttttgcacaggaagctgctttattcttgctgagagacaggggctgctgcccacacacagaccctgtgtccaccctgcagaaaaggccaggagggcctgcagagctgggaagcgccacccaagggtctcagtcaccaagactgcaggagaggcaaggccatgtcaggcctggcagctgtggctggggccaggagggagggaccaggcccatgtgggaacaggacaaatgcccaaggccacatccttcgtccacagtcctgaggctcctgccaggctgacaggaaacagcccagagctgaggtctttgagccggtcattccaacattgcaagcaccacccagtcctcctggctgaagttgagtgaggtaagaagggcccgtggccagggacagggagggccctcaggaggctcccagggctgctgctgaggccgggcagcgtcctaggcctcaaggacactcctttctccccgctgccccaagccaccatggcagcagcatcagggctgtgccgcctcatccccatccctgtctgggcagatgtgaagggtgaccgtctcccccactgtcncgaagttgacggtctgggtggaaagctctcctc

SEQ ID NO: 215289 - DNA, 564 bp, Homo Sapiens
ttttttttttttttttttaaagaattgaattctttatttgtgatatccataaacgttgctattctctatttctatccagaaaggcaattttcacctattatcacttttgttcttctcttataaacaacaacttgaatgctattgcaggaaagggctacaaatatacatttgttaaccaagcagaatacacagatattttgctttacaacttgcacctaaaataccagtatacgtagctggttcattagttgtcatagcaatttagggctattgcccaagctatgcatagcagtttacattttcaaacctcatatagaaagggctattgtgatatgaactggcaactacattcctgtgaagcccatctcagttacaagcaaatgtgttaacttccaattctgcaaagaattttgatggcaaaacttccaaatctgatgcaattgtcttaagcaagtttttaaacaaattgtttcgcagctactctgccattctgccagtagatggtgctacaaagatcgggaaagggatttccatgaggccaacaattcagaaaataggaaaaaa

SEQ ID NO: 215290 - DNA, 587 bp, Homo Sapiens
ttttttttttttttttttgaatacaagaatatgacaaaaatgttttcagtggaaacaggcagtagactgtgaaatcgcactagccacaaaacggtctaccagaaagctagcccagtttagtgctcagtttcaaatgcatagaatgtttgccctgcaaacaatgatatacaacataattaaataaataatgcctaaccagagtgagacctaattgtgtttctttccacacctttcagatcatgcatgatttcagtcttgttaatcggcaggttttttttcttttctcatttgttctgttttcaatgttttagttatgattaaaggatggtaacaaaccatctctacgagagatccaaagagtatcttgtacacaaagcaggcattttacctaaccaccttcaactatcttaattttttaaaatccaccagcagcttgtaaggtacctgattattactatgaaatactatacatgattttctatttgggagactggtagtgcaaattaaagttcttgctacccaacatttatcccctgtaataaatgactcttgaataataagaacaagtaaaaggacgccctcgtgcc

SEQ ID NO: 215291 - DNA, 507 bp, Homo Sapiens
ttttttttttttttttttaaaatgtcttggttttaatttatatcatcataaacatgaagagacagaacgcacataagcaaacgctcttaggggcagacaatactttttagggttataaagcttcactggagaggcactcctcacccacatcccctatgacgcaggaaggagatgcagcgcggtgctgtcctgtgtgtgagaccccaggcccctgccacgcctgtgtcctgcaggagccagaccccaggccagaccccagaccccaggccagaccccagatcccaggcccctgccacgtccacgtcctgcaggagccagcgatcctcacaccgtgttctcgggcctgcagttgggggagttccaggaacagatgtacgtccacctgccccacgagccacacttcctcctgggcatgcaccctagagaaacctcgccaagatgtattcttggtgtacacaccaggaaacacctgcgcacccctcagtcccctcacaagcgcctcgtgcc

SEQ ID NO: 215292 - DNA, 625 bp, Homo Sapiens
ttttttttttttttttttacatttaaattgaattcttttattttaaatattcacattacaggaattcattaggtcagaatagaacatcattatttacacattcaaggaataactccagtgctaaatcagcgaggtacttacactgaatttaggaaatatgactgaagagagagtttcttcttacacatacaggctcaaatcctttatacatttatttctgccttggaatcttagtacatattgctgaaatcactattaattgctgaataaaatttcacaaaattatagcaatcacaccatatatttataagcctagaaagacatccatgagaaggaatccatgttgtgacagcatgtttaagggaagaaaatttcaaatgacatctccagtttaatttgtggaaaacacgagttctccaaatagctgaatatacagattttctctggcatcttgcctttcatggcttattaaaatatttgcttagctgccttaaagtgttatgttatttacagtttcaatcaatgaagggaacaatgtggtagcaaactaagtgcctagatcaatgttagctgaatgtcacacacatacaatatcttggttggtaaagtcggcgtctacagtgct

SEQ ID NO: 215293 - DNA, 685 bp, Homo Sapiens
ttttttttttttttttttcccttccactatttgattcctgggagcagttttctcagattcgcatttggatcccaaccttggtctggaaagcaaagccagctttggagcagcttgccctgcagtctccccagctgcagctctccccaccttcctgggtcccctctggggtcccagccatgctcagggggcgtccctccagctggcctctgcctacctgaagacagcaggctgccgctgctgccgctgatgatcttccccttgctacccatgttggccagcttcgaggtcttcagcgtccccgtctcggtcaggtcgatggcgatctcactcaggctgcgtgctgcatggattttggacttactctgctttctgtccagatagaactggtgttggcttatggccatagcccagatggacttgatcaatgccggacatgcataccacgtgtgcactgcaatgccgctgtgcccaaacgtcctccttgtcactgaagccctgcgtgggtcatgaacttccacggaaaacttcttttctctgaagtacaggttttccaactgtctccattggaatatctggacagaaaacagtgtagtttaaaactcaggaggggctggctcctgggccatcttcccctctctgctggttaactttcgacagctggcagtttccttatcaacctcgtgcc

SEQ ID NO: 215294 - DNA, 643 bp, Homo Sapiens
  misc_feature (603)..(603): n is a, c, g, or t
ttttttttttttttttttgagctgcagagcactgagctttatttacaaacttccacagaatccctcaccctccaccccagggtcctccctctctggaactcaggcagcagacaagcttgggtccacccacctgcccaacctaggacagctgggcctgagctgggcgggcaggggattccatctcctgggtgcgcctgccagaggggagaggctggaggcggcgggaatgctgttctcccccaggagtcagtcctcagggcttctgccgtgggacgtggggccgagggacctggggcactgaccaggtcggggtcgggggcagcatctgcattggtgaggccgggtgaaaagggctgctggtgccggacagcttctggtgctgggcctcagcggagacagaggaccagaggtccaggttcctgggggctgagcttttctcagacttcggaggaaaaatgtcccagcccagcaggcagtgccggggcagggccagtgtgtcagaggcgtcaaagctctttcgccggtggatgtggtaccggtgcgggggctccaggatcgacagcgggatgctcaccctgacgtgcgctggctgcgccagggtcncagggccctgctggtctcgcggtgtcctgcacaggcggca

SEQ ID NO: 215295 - DNA, 638 bp, Homo Sapiens
ttttttttttttttttttagcaagtaaaacttttattaaataaatttttagttgtttttttttttttttttttttctccagaccaaagagaggcgttttgaacattaagacgctttgctgcttctcacctgaaacacgtaacaggaacaccaacctcttcagccgcgggaaatcttctttgacacaaaactcaaaccgagtcaacccaaagttccaagttctttgctttctcttctgtgtgtgtgttggtttgtcccaaaagtcagtttgcaagttgaaacttcatgaaattactcgtagcagaaataaagtacattgtacaaatcacgcaggtctgcgatgtggagtataaaaatggtatttacagccagtaaacatggaccagaaagacacgtacaactgcacaccggcacacactcccaagcaggccctcgggggcctcggcgggcgccgcggacacgggtgaggccccctcgaggcagattggcatggcacacgcttgcacacggggacacacggaacacaggcacgctagaggagagtctcgaaacaattatcacactctggaatatcgaaacaagttggttcagaagatttttttttttcttttcgatttttttttcttttttcctcgtgcc

SEQ ID NO: 215296 - DNA, 467 bp, Homo Sapiens
ttttttttttttttttttagtgcaatggtcatactgttccatgtcatacacagcaaggggagaatgcattattctctcaatggatgcctttcgaaagatatgcttaaagcaagtgccctcctgctgctacaaagtgcaaggctgcctgtgtcaggactaaaggaagaataccgagaaccccaagttatatccttgttgcccctgctgggtggaacagggcagagcgatgtgggtgtggattagcgccctctggttgctgaaagtgaattcacagtttgttctagtccccagttagatgacgttggaaatgataaaattacagtagttaagatagtcaatggcatattttcaaacatcccgatgttctttctctccaactgccataactagtcctaggtctggacttttcctctcaatgcattcagataaacttttatcagcaggcctgctattttatccctcgtgcc

SEQ ID NO: 215297 - DNA, 683 bp, Homo Sapiens
ttttttttttttttttttgatttttagcatctttatttgagaagtcaattctgcagatgggtaacaattccaagtgttgatatatctcaacctttctatacagaaaataacaaaactcaaccagccagcctccccacatatgcttccaaccacatctggagtgtccaccatcagtccccttggctactttcaaaccagagctcaaatgcagaccgttttccttaggaatcattcccctgacccaggttttcagagttctttttccaggacagaattatagccccaggtgaagactaggtggatataggacaagaaccatcctaggcctggctcacagccaaagtccatcatccattttcagcactgaagagcaagatcttcaccaattcttgtttttgtagcccccatccagggacagcaccactgaaagtttgcaagacagctgggttcagtgaagtgtttgaaaacagaatatagcaccattggaaaacaaaggcctacagccacacttgatcacctccacgttagacagataggaattaggatcaggaacacagatcagtacagaaggccagaacaaaacctttggctaatatataaaaccagcagtgctccaaggcagattcagccaataattaagaaaaaaaccatcagagcctcaacctttgcttacaatcttcctc

SEQ ID NO: 215298 - DNA, 663 bp, Homo Sapiens
ttttttttttttttttttacattttggtgtgcattttatttttgactggaatcatatccatatgaagggaaattgtgaaagtatcctttactcttttgaaagcttggcctttgccttactgtgtcaaaggaaagcaaaactaagccagtaatgatggagatgtccctgtttccatatgcacactgacaggcgaggagctgcctaggaaatgctttttgattgatgaacagaggagggtctacacacattaaatacaaatggaaacacatcagcacacacaagtcattagcctggtcctctggcatccactggcatgcatctttccaaagtatcacttattcagtggtagcagcactatgtctcgttatgccttttatcagcaaatacctttttattccagaatggaaaacaaactaggaattaaatacatccaatattgatgctttatttccataagtcaccaataagagaatgaatttaattttaatacatttatttttgtgtgattcttaataaaacactttcaaaacattctgtacatttcaagccactcagaaccgcattacatttctacaaatgtgatttgttgggatgaggtgccaagatgtctctgtacaaagatgtacaatatgtacaatcactgtaagtgcaagctgtgcaaag

SEQ ID NO: 215299 - DNA, 587 bp, Homo Sapiens
tttttcttttttttttttattttaatatatatatttcattttaatgaagagtgctttcttgtagacattgatgcagtacatagggctggtaaggaagtagtaacagtgcggagggggtaagtatgtcagtctggcatgttttcttctaaattaatattcaaaaaggtgccattcaaggaacacttttggtcataccttgcaaccagtactgagacatgacataaagttaaaactccaggtgcctttttgagataagtgtgaatccacattcacaacctgggttgagaaaggtcacacttctctacttactaaaatggagtccttcaatcttaagtcagcccagcaattcagttgtattgacctgatggaggccatccgaggtttcactgccattaggagcagggcttgttttatgcgctccgtgcatgctgatggtgcagggagtggtggaagatgtgccacctcaaatctggataattcctttaatcccttccttcaatacaacctgctcttaaaactgaacactgattttcattcttttcatgattagtgtttcgccacccttatctttgcattcacctcgtgcc

SEQ ID NO: 215300 - DNA, 616 bp, Homo Sapiens
tttttttttttttttcttccttctataagatttatttttagtaattctaacaattatcataaaaataatgtatttagtaagcaaatacgatgtgccagatgcctttccaagtatttatattctatattaactagtttaatcttcactatagcatcataatagtgacaacagtaaaaatgtgccatggctaaaggctttccctctcattacattaagagtctctcaccatggtgaaatctttgatgttgactaagttgatagcaatgactaaaggccttaccacattctttgcatttctgtggtttcacaccagtatgaattgtctcatgttgagtaagtcgatcactgcgattaaaggccttatcacattctttacattcatagggtttttcaccagtatgaattctcttatgttgagaaagacctgagatagaacgaaaggccttcttacattctttacatacatagggtttcaaaccagtatgaattgtctgatgataaattagttgagaattaagtctaaaggtttttccacattccttacattcatagggtttctccccagcatgaattgattgatgtgtcttaaggtctccaacaccctcgtgccgaattc

SEQ ID NO: 215301 - DNA, 545 bp, Homo Sapiens
ttttttttttttttttttggtttgaaataatctttattttgtaaacatctgtgtttaaaatagatgaaccctgctcacaattcatatatggacccgagacacagtacacgaagttcacccgtcacagggagatagtggaggctcaggagcaggtggcgtgcctggggctggatggagtctcaagacagcaggtgcagaggtggtgacgagtaaacaggccagcagagcctgcttaacagtctgggcctcaagacatgccccaggccaccaaaagtttagggtgagcgtagctgcaccctaaaatcccaattctccttctgctcccataccttttcccagtcatggcccttgtggatagggcctatcagtctatagaatcctgattccatgttttcccttccagaacccctagggtacagtacaaatatagtccttctttcctgagggggctaggagagaaagacaatgaatggcaccctgcctgatcttcagggaaagctgaaatactggtccacagattggagccactgcccaatataacttct

SEQ ID NO: 215302 - DNA, 727 bp, Homo Sapiens
ttttttttttttttttttgaaagtatcactgtttatttcacatttaaaaaaatcatcggcagaaactaggtagctgtgaaaatagaatagtccactggtagagtttcaattgtgcaaacagacgtttggtccatcatttttcttctctgaacatttcttcatctgcaaatgggggagtgcctgtgcaggtgacaacagggtggtgaagggccacccttaaacctgctgcagcccttacctttcacatctgaacaggcagactcaaacttcattgggtggccacaaagacttggaagctcaaaatttgaaacatcaaaattaaacacagacccaatttctttgcatttttagtcctgtattctatgtttgacaaaatcactgtaaaataaagcagcagtaagaaaagaagcagattcagaggactaaaagcaggaacagatgggaaaaaaaggctggaaatccattcgtttatttactgagcctggtccaatgtcaacagaactaggattaactaggttaagagttggcaaaggacaggaaagcaaagtaataaaatttaaaagctgaattggtacagtgttatgaagaagtgtttatttagtatttatagtaccagattacagtcacttgttgatttagatatgaattttcatatgttagaagactcagggaaataacaggatcccaaggagtgagactgagatttctgggtctattagctgtactt

SEQ ID NO: 215303 - DNA, 610 bp, Homo Sapiens
  misc_feature (20)..(20): n is a, c, g, or t
  misc_feature (574)..(574): n is a, c, g, or t
tttttttttttttttattanacaattctgtatttagcgactcgtttacagaacgtgttcctttttttaaaattttaaacaaagttcatcaatctctcatagaaacggtttgtgtatgtgtgtgtgtgttttttaaccgttataggacgtgaacctgacaaagttgttcacgggtccgctagctttaagtacaacaggatttccgtgttcaaaagactatactaagtgcttaatcaaatcccgtcacactaaagccaaatttagttctctaggaatcggagtctgcgtataagcctggatttcaacgttgtgttggtttcaacagtaaaaagtggtgtgttcccccacggttgtcttaattgcaacagggtggtggtggctaaaagatgtttcatttgttccagatttgattactctgaaaatggtcactgtttcctattgtcaaaatataaaaataccttcatctggataaaaatgtatacagtggaaaactcttcaatgcatagcctgggtgtatggaaaaggttttccttcagggtttgtgttttgttgactgtttggtgtggagactgcancctgggctgggtgtgagagttgggatttctggaacg

SEQ ID NO: 215304 - DNA, 668 bp, Homo Sapiens
ttttttttttttttttttgcacagaagccccacaggtttaaatctagactcaaagtttaaatctagagaggcataagggtaagggagtgaagaaatacagcagatttgagaactgagtcacaaaaaagaactgagtgtggcttctggcccatgttactgattgcaatcaatcaggtaaaattcctactacatttttgaagcttattctgacaaaaataaaacaaactcacaagcccaggttccagaagtgtctgttcaaaacttaaaatattccttgggtctccaatcgcctagaggatgaggattgagaaggctgcacaacctccaagaaattcttgaatgtctcttttgggtgtggccgaaaaggaggatggaaagggaggataatggaaatgaaagaacctagcagagggtgaagccagaggccacagaggacaatggaatggggagacccctgctaaagaatggaacccagtcctaaacaagcaacatctgccagcctaggtgaagtggccccacagtggctgcctactgggattttggaattgctacgggccaggaatggcaaggtttcacattcctccctgttctaatgattcctgttgcttatcaggtgggatgttgggcagacaacccgagttttcttaggtctaacagaggagctgcct

SEQ ID NO: 215305 - DNA, 409 bp, Homo Sapiens
ttttttttttttttttttagttttattccacatttaatgtacgtaaaagggtgtttttgtaaatgcaaagattaaatcagacagcctctgaattgtagtcttgaaaacattagcaagttcttttaggtccagggtagatactgcagttcacttagccaactttctgcattgagacatccttgccagggatcctgtcagttatgcgaagatgcggcacgagataattcctcttgctgtgatggttcgtcctcaatgacaggtcccttatagtatttaggtacaacaaggtcttttgtgcttggaatgcccttgaaaaagctgcctcacctgtttgtgaagggaaccccaaagagaaagggagaggaagggctgggtgcagtggctcacatctataatcccacctcgtgcc

SEQ ID NO: 215306 - DNA, 551 bp, Homo Sapiens
ttttttttttttttttttggaaaagatagaaagctttactgaaatacacttaaagacataagtaaatggagacatactatttttatgaataggaagactcataaaaatatctgttttttcaaaatctacaaattccatgtaagtccaatgaaaatactaacaggctttttcctggaacctgatggttgaataaacaatttatatggaagagtaaaggaacaagaaaagttaaagtgatttttgatggataagaagagcaggaagaattgacatacaaatggtgcaggcttattaaaaacatcagtgaacgaggcagtgtggcaccagcacagggatacacaaacagataaagggaggagactggagaacccagtaacagccccccacgtatgacaatatgtgacagcagtgacatcataatcagtaggggtggggtaaggatggactagtcagtcaatgatggttatttaaatagaaaaaagaattggatctttgactaaagaacaacaaaaacccaaacaaaaaatccaggtggattaaagcctcgtgcc

SEQ ID NO: 215307 - DNA, 698 bp, Homo Sapiens
ttttttttttttttttatattaaagtgatcttttattaaactatttactgcttagtctaaattcaggtagagcagtcaaagaaagttatccatcaactttgttgaattcatatctttcattttagaataacagcagactttaagcatgtattatttttccagtgttcagcttagtctaagactgtgtgagtctggtttgatccattgccgtgaagaatacacagacagcagctgtaatgagcaggtgcattccctcgtagagaagttttggagaaaatacactccatataaataaatgataacgcagagatgtcaccaaaacgatgtacgtgaaaactggaatagaacaaatcagtgcgtagcagaagcaagcatgactcagtgctgaaccactgcgtgtttctgagctcaggaagtgcactaagtggctggcccacagcacaggccctgcgtacgtcccaaacgctgtcaggagcacggctgggatttccacgtaggtgtctaagcccacgaagcctgcggagatgtccacggtggcaatgttgttggagttgccctgaaaatagaagaatgcttgaccaaaccaataatgcatcacagtaatctcagctgcatcgtgtctcaggggcttccagatgaatttagtcattagagtctgaatcaagaggctaaatgctaagaccggaagattatgtggt

SEQ ID NO: 215308 - DNA, 470 bp, Homo Sapiens
ttttttttttttttttttaaacatctgagtatattttattcgtaagaaaaaaaggaagaaataaccacaaatattgcttaagaaaataaattcagctgacttggctacaagagacggagcttgttactcagggtcttcctccggtgggaccacttccattagcatctgaaggtgcatggtaatcggctttgagattttctgagcccatccaaacttgtagtggacaaacaggaagtaaaataaaaggccgcttaatataaacagcacacagtagaggtactcccaggtgggcttgctgatgattggagccagaaccaaaaacacagagatgagtgtcatcaagacgggaatgactacgggcaccttgataggcctttccagctctttccttgtaaatctcatcacgatgagtcctagaatcgtcaggccataaaacagccatgcggcaaagctgaaataatcctcgtgcc

SEQ ID NO: 215309 - DNA, 596 bp, Homo Sapiens
ttttttttttttttttttcaaacaacctgtttatttgggcttatgatttactaactgcaggtctatgtgcaggaaggccagcatcccctcctgccgttgtcacccacatccacagagcagccctagtgccaggtgcagccactgccacccacggcacacgggaacaggacccatgctgcaggcctgctctcctgcccagggagatgccacgtgtgtctgtccggcagcttcatgacacagttaccaagcagctagggagggcttagatttgttggtgtccccaggcctctccctcgggggcttgggcgcatccccacagcccccaagggatgggggctctgccacggggcccaattccacagctccacggctggcgcccctcccgtgcccatggggcagagccaagtatttccagaggtggcttggaggccctggggtggcggggagaggaacagggagagcatgagacagacccacagggctgaggccaaccctgcttttatttcacaagagcttctcgatggctgacaggagctcgggtttcaggatggagtccggctcggcccccgcggccttgatgtcctccacctcgtgcc

SEQ ID NO: 215310 - DNA, 400 bp, Homo Sapiens
ttttttttttttttttttaagaaaagcaattctttatttttatccaaatatatcagacttcataatttagtttcaacaaaaacttcaccatatatcatccaaaccaagacattgtaagagtgaaagggagtgctaccaataattacacaggtacaacaggtataaactggaattttcctgggtaaactgggacctatgatcaacctagaaataagggttaaactgcaattacatgcagaaatcatacctttcccacgcatgtgtggaaaagataaaaaaaataccattcactcagataaggtaattttgacaacagtagcactttctcatgagatagatttctgttcacatattatccccgtcctaagccagtcacattttctaaaataatcctcgtgcc

SEQ ID NO: 215311 - DNA, 360 bp, Homo Sapiens
ttttttttttttttttttggagttgcagcatttttcggcctctttatttagaacccggcggacgaggggccggggcagtggtacagacggctcaggaaccattttaacagacttgtcttcaagtttcagataaacacagtcataataagagagacagcgaaagcgcgaagagactgcaagctagatgggcatgtatggcagctacagcttgtgagtgacccccttccccagagtccgcgatgaaaataaagttacacttgtcaataaccagatgtgggagatggagagtgcctttggcataaccaataaccgagctagtgcgtggcagagcggtccacgcctggacataaacctcgtgcc

SEQ ID NO: 215312 - DNA, 685 bp, Homo Sapiens
ttttttttttttttttttggctttagagaggcattaagaagtagggcatgaaggcacaaaaagggaacctgaaatccaattgcaataattactcatgcaattggcctctttctatgtggcattatagaaacctcctgagtaacacagtttatggttttacaaaagagaactcctacatcattgcatggcatggctaccgcttccttagaccattcagagaatgatccccaagtatttttcataaaccccatagggtttcctacattaaaataaagtgacagagatcacgccttgaataatttcacaattccagcaatgagttgtactacttccaaatgacgaattttctgctccaaataatgggacaaagggcatcatcacatggacacagtcaatttcacagtgatggactcacacaggtggatgatctgaggcacaagctgtgattggtcttaagaaaatgaaaggtagagttgggttcaaaatccacatctcacgatttctggtccttattcatccaaaaagttgaactgcttcatatcagtgtattagacacattttaaatctttctcaagagttgctctgggtgcagcatgataaggaaaaccaggtatttggcttgatagcagatattcaaggtataggtgccaagcttatggtaagcttctcaccgtaggatatctga

SEQ ID NO: 215313 - DNA, 576 bp, Homo Sapiens
  misc_feature (44)..(44): n is a, c, g, or t
ttttttttttttttttgtaccacacgatccaatcacattttatntgtggggaggtcgggacctgaaggggcggcaggcacgatgggccccaggcttggacggcagcagattgaggcaagactccacgcaggacttccctaggacaagcggtgctggacggtggctgcagaggccgggagaggtgggctggccagtctcgagggaggggcggccgtgagccctggcgccaggctgtgggggctgtgggggctgagcgtccgggggcctggaggagggcagccgtcagtcatggttgcagaggctggtctggcagcaagcgatggatacgtaggggcccaggcccaggctggggatatcggggcagcctatgtggcacatcttggtgaccagaggcaaatcctcggtgttgctgaggacccgggtggcagtggtgacacagtgggtggagtccctcaggcatctggatccatgggagcaccctccgaagcccgtgcactggtgacaccatatggcttcggctgcagccagctgcaggctcaggacggcggccagcaggagcccagtgcccctcgtgcc

SEQ ID NO: 215314 - DNA, 408 bp, Homo Sapiens
ttttttttttttttttgtccacaagtaaagctttattgaaatacattcacgttcattcatttatatattgtcaagggctgcttttgcactacatatggtcagagtgggtagttatgacagattgaatggcccacaaggcctaaactatttgctatctgatcccttacagtaagtaaagttagccaacttgtgatttagacagtagaggaatcaaatgaaatagcatcaaaaagttgtaggatcattgggccattctaaccctaagtcagaggaagaaatggaatgggaagtagagggtgaacagaaagaacacaatacatctgagtgggacgcacacatgttgagtagtaaaaatctctgaggacttcttgttaggggatgccaaaaagtgggcctaccaagaagata

SEQ ID NO: 215315 - DNA, 720 bp, Homo Sapiens; identical to SEQ ID NO: 43936

SEQ ID NO: 215316 - DNA, 781 bp, Homo Sapiens
ttttttttttttttttttagtcaaaagaacacaattttaatgactttatcaagccttaggacagagatgagagaaacacctttccaatgatgcatcaagttaacgtctaagcaaaagatcagcagagatcagagattgttgggtacacacgtatcttgtgatgtcttctgagaaccaacttattcctctttctctgagaagaacttgacccctcgccccggggctgagtgcttggcagccacatttgtgttgagatcttgattcctgctctaactacacagggctgggatggacacctgctccaagtttggccagtcatttatttttccagtaatttaaagctgtgactaggagacacagcctctgtgggttgtgagggttgagatgatataaactcaggagctgtcgggtggacatgttcactgagaaggacagtcagtccacagagagagaacaccgctaacatgcaggggggtctagagaacacagaccatgtggatccgagagtgttggaggggcagctctagcttctctgggcttttcggatccgagttctgttcctgggaggcctggctaaaatctacccttgggccctgcactcctccccatggctatattgcaaatatcctatactttgcatgtgatcacacaaagagggtttctgttactggcacacaaaaagtttgcctgagatgattctcctccacttccatcagggtcttctggtcattgatttcaacttattctctcttaagaagccattgagtcccatactcgtgcc

SEQ ID NO: 215317 - DNA, 753 bp, Homo Sapiens
ttttttttttttttttttactgaagagacatacttttatttcatacttgcaggagtgtggtagcatcagtatttagtgcatgaggtcacagaaaacttataaaaagcaattccgaacaaaccaaaattcataacttctcaaggctccccgttaacgcatccaatactggagagaaaaaacccagcagtacaaacaaaacaccaaatacgtatcaggaacctaatactggccaatgtaatttttttaaaaagttatttattcagtttagattatttcagtaataaataagcatcttttttaaaaaaaattaaacataacacaatattgacatcatcaggtaatgtgaacatccctcaagttccctaatcctcaggactaaaagtaattatatttgcattacttgtgcacattccttgactacagaaataaaagaagctcagtgacatcacagattatgggtcatgctgattatgtgaagatgatctgtcttcaggtccttcagtataactctggtaagcacctactcagcagatcttaatccccagcaccctacacacccctacaactcaccccagagactcaagggcctggggaattcctgacacgagctgttcagctccaggatgccagagacccaatcctcttagcctgcaagcaccctgaggctgagggaacatggatagaggcaaggggagagggaaggggatggaagggtatttgcataacacgggcttctgagaccttcagttcata

SEQ ID NO: 215318 - DNA, 560 bp, Homo Sapiens
ttttttttttttttttttgcagaaacctcctcaactttaatttgtagtcagctatggcaatggaacacatttttcatagggaactttggatggattctctggtgctacagaaaaaaacagtaaatggtccttcaagtgtatcagtgtagaactgagagagaagaggtaaaactgaaaaagaataatgaatttgttttaagattgaagaccttcctgaaataattcagttactttggtactgcctagccctgtaagcattttgcttgaaatttaaccttttaagcaccatatgctaaccatcaccatgtatctgggggcaaaaaagaagccttaactaccattccctcactctgtccccgtcatgacaacaggagctaagtcttgaactgggggttacacagcactcttaagtaggcgtgataagttttgcaaaatgttcagtatctcctcagtgtcttgtccttaggtagagacaggtccagagctacaaatgcacccatgtggaagagatttgattcagcagaacagcaattatgtagtgccctggggcgcctcgtgcc

SEQ ID NO: 215319 - DNA, 578 bp, Homo Sapiens
ttttttttttttttttttgggatttccctcctttattaagttcttattttaggacataccaattcgtattcctcgtaagaggcatagcattaaaaaaacaaagatgagtttccaggctcccatttccaaaattcttatcagtctccctagatgattatagcaaaggaaaaagtaacatgtacaatacgtcatcacatttcccaattgagttcttttccaaatggtaattttataaattaaagtaactaagtaaatccatgatcagcaaacagttgctaggtgatgaagaatttaaacaaagcatgtaaataatttggcaactcaaccatgtaactcaaacctagtaacaggtaaaaaactaaatattctaagttataatgtgggagtatatgtatacttatgtatatgtgtatacacacattatacatgcatgggttgttttggggttttttttgtcatctctgccaagatcagccaagaggaagaacggtaattcgtttaaaagttaggaactgggcatacctttaaaatttcaacagcatatttcctttatattgtattacagtaaccctcgtgcc

SEQ ID NO: 215320 - DNA, 686 bp, Homo Sapiens
ttttttttttttttttttaagaacacaaaaacaatttttataaggcaggagttcccacccatgcttagtaccctgactgccaaatcacattccttcctcagagactctgactttaatatattctaagaaagggagacatgtcgtggggggagctacttgtccccttaaattttgggcagactgcctgctggtgccagaatgatgccaaagacatagaaaagtcccagcaggaggttgagcttggcagtcctctggggcagtttgttgaaggcctggcttcgaaactgtctctcaagggagaaggccatgggaatggtaagcagggggagtgccaggctgatggtgcagtgtgtggccaggatgctgaagaccaggtagggcaggaagagcagtgtgttgtagagaatgtaggagaacgtggggccgatgaggatggccagcgtgacgataccagcctcccggtcggactccatgtccctggtgttgttggaatggagaatggcctcggtgctgagggcgagggggatggcatagaccagtgggaagatggccagggaccccacctggatggcgtaggcgaacatcacagccagcgggccaaaagtgatgaggatgatgaggtctcccagagccacgtacttgaatccaattcctcctgtgtagagaaaggagccagacaggcctcc

SEQ ID NO: 215321 - DNA, 734 bp, Homo Sapiens
  misc_feature (59)..(60): n is a, c, g, or t
ttttttttttttttttttgagatgggaagaacttgggtcctccttgctccacccacccnntgcatggtgagaatgggtggagcaggaaaggcaaaggggacctgatggagtgtctctcctgccagggctccctccttccggctgccacccgatcccagcttgccctgcatcctggtgggtccaggcactggcattgcccccttccggggattctggcaggagcggctgcatgacattgagagcaaaggtgaggctggggactaaaggactgcctgaagggagtcacacaatctagggagagaggggtggggctggaaggcaggaaataggaaagagagggcaggaaacaaagtccacaaagctgaaaagacgctcatgagaccaaggggagggcaggtaccaaaggcaagggctgggccctgagcttctggcttcctggtgcctggtacatagtaggtgttgactggattgaggacaaaggaaaatagaattttcaaagggattagggctaagactcaaagaagaactgcccaaggtggattcttgactgtgccagagctgaccgaggtctgtccaagacctaaggatgctacaaggtgttcatattgagcatggggtgcccagggtggtctgtcaatcaaaagaagagggctgtgactgggaggagagttataagtatgggagaatatgaagtgggagcggggaaggggactgcgatgtcacacacctcgtgc

SEQ ID NO: 215322 - DNA, 703 bp, Homo Sapiens
  misc_feature (648)..(648): n is a, c, g, or t
ttttttttttttttttttggaaaatagtttattaattcattataaggacagatacatgaatcaatgccttagcttaacactaaagagtatcatatttgtaaggagaaaaaaaaaacgctggaaggataattaaatagtacagcataaactaaatacagacaaataaatgagcaagtactgattacacttgtcatgcatcaagaaaaggaagatttttaattgagactcagaaaacttaaggcatcaatggtaggtgacaaagggattaataccctgtaaaaggccaatagattcttttctaataaaaatactgctacaaagacacaaacctaacacttccaaattacccagagcccaaatcatatataatgctagtgagaaatggccactttcttatcaactgtgagttataggcagataccagatttattacttatttgcttttgagaaacaattttccacccaacctaatgggttataaattgtctcatttgcagctatttaatttaaaccagaacctcagtgcctgttaaacaagaacatgaaaaatgactatgtggtataatgctaagagcctactgttaaaacagccatttaattcagggcagtttttttttcttctttacaaaaaaaaaatcaaaccagcanaataaaatgaggcttttgaccttcagagcaatgatgaaacatacacagtggtgtt

SEQ ID NO: 215323 - DNA, 624 bp, Homo Sapiens
ttttttttttttttttttccccaggagctggtttattgaaagctgcttcacgttccaggatcagtcctccatctctcgctgggccacctgatgtctccatcccaggtgtggtgacatgagggtgtgcaggggcagagcttatgttccaaggcctgggtgggcccttgtcccctgcaacacaggccagcgccaacccccacctggtctgggcctgatcaagtggggagaggagcctttgcaggctgaattttcgcagcatggacccctcccccggctggcctgaccttcagggacacacactggcccttatctgaacacagggtgggcggagtccctgccctctccaaggaactgactcactgctgtatctctgtttgctttcatgcctgctgtgctcagctggccctcggaggggaagtgtggccggcgtcagcccgtggccagtacggtgcccgtctgccgcagggtgaatggggtcctgctcacagactttcctgctgggctggcctcctccaggagctgtccttgggcgctggtgtccttgggttcagctagtgtctgggcagcagtgcagccatggactctggcagggtcaggcctctgggtagccctggttgtgggttc

SEQ ID NO: 215324 - DNA, 605 bp, Homo Sapiens
tttttttttgctaataacagtcttttattatttatattcctgcaatagtaatagcaacatactgtacttgcatatatcacattttatccaaggacctcaaagtcattctatcaagcagcacggtgttggaaactcaagattccacagcatgttaggtatacttacttatggaataggaaatagattcccaacaatagagccaaaataaaagaccaaagagacaagcctatatatttctcgtggtttataagtttctgaatttccaaatttgccactggtattttaacctacctacaatgttgactctactaaaattgatttttacatgtcaggaataagatgaggatcaacgaacaaatgcacagtctgtcttttctatagttcaatagtccatctttgaatagcacataatggaatgtcagaagtggttttttaataatgtatgtttacacttcattgatttataacaatcatggctatggttcttgggtagaggagaatgttttatactggaatgacatacatatgtaggtaaaatatgatagatctatatattttagcacatctacatttaacacaaaagcaaaagtgcctcaatccattga

SEQ ID NO: 215325 - DNA, 437 bp, Homo Sapiens
tttttctatctcatactttaatatcaaataaaaaatgaaatgtataaagggtcactttgtaggattaggcatcctccttctacctacttaaaccaggggtttgggattcagaattctccatataaccaagaccgaaagtcactggaagactttaaaattagtattttaaccaccacacccagagtcaggtatggaaataaacctatagcatggattctttctatgcataatctcaaaatttaactacccaaataagtaagtttttaaaaactaatttaaaatttgccattgaggaaaatatcacctccatccttaattgtgactcctcatttcagctaaaaccttttctaatactttaaaaaaacaaaatgaaaaacaaactcctagataaagtcataaacactgaaatcagagatgtgattcttgttaaatgttag

SEQ ID NO: 215326 - DNA, 429 bp, Homo Sapiens
ttttttttaaggctgaattttatgttgctttcacttaaaagatactttaagattggtttggatactgccataaacttatgggagatcaagcaaaatatatgacacaaagaagacaaaggcaaatacactagatactgatgttttcctaaaaatgaaatctgttgaagcaaagaaaagcttccttattcatggtttcagtttcacagatcagaggcgtgctcagagcagcacatgctcctgcaatacagtgcgatgatggtttgtgtccatgttcttgttcactaaataagctgaatgtgcctgccacaggaactttctatggcttcttcaggaggcaggtgagagcagttattttaaatggtgatgatatctgactggtgaaggagtaaggaaagcaatgagctgggaagatgatggggcaggtcaaac

SEQ ID NO: 215327 - DNA, 440 bp, Homo Sapiens
tttaagtattgagaccaggtcttgctttgttgcctaggctagccacaaactcatggcctcaagtaatcctcctgcctcggcctctcaaaagtgctgggatgacaggcatgaaccaatgcacccggcctaaattacttaatttcatcatctatattatgaaatgataaagttcaataaaaaggctatgagaagtaactaaaattataccttagcacagaccccagtgcatataaaatattcaaatttaccacccactttgtattctatctagagaaagtaaagagagaactctgagcaaggaatgcaagttcctaactttatttcagttccagcttccactgagctgcagccgctttcagggcaaaaacgctttcttcgaaattgatttgagaaaaaaagacaactagcaaaggaccatatcacagtacacaattttcaat

SEQ ID NO: 215328 - DNA, 564 bp, Homo Sapiens
tttgtagggatcctaatgtcttttatcatataaatattacacaaagaaaacttacattaggtatcaaaaaactttacaatctgtacatttgtttttttcttgcatttctatattatacattttgagacagaaattcacaacggtcagtaaaaaggtaagtcagcaaagaaaatgagaagtgaccctgctgttaatacaacaagatttgtccttgttttggcagataaatacctggccaaactaaagtcgtgtgagatgcagaaatttacactaggcttgataagccaaagccttttttttttttttccagatttctgtgatcccactagccccatgttggtcaacacaaatctattaacttgtatactatacctctttggcccttgctggactgtaaaaacctgtgactaaactatttcctcttatccatttcagtgataaattctgcagtacttgatactgtttagccattgctaatttgactaattaagtggactgtgacaccttttgaatccctatagattatttatataaaaactaactggggatctttacttcgaatgg

SEQ ID NO: 215329 - DNA, 227 bp, Homo Sapiens; identical to SEQ ID NO: 46597

SEQ ID NO: 215330 - DNA, 772 bp, Homo Sapiens
aggtgggaacggaggctccttgattcctgccccttagctgcctctggccagtttctcctacagaacaggccagtgcatcctcaacctctctccttccatccgtctcagagcagatgctctcctctccttaagcttggtcctggggctgcaccaccaacatctaagacaagcagactcccctgcctcaccgcagaagcccaagcaccttctcccagcccaggtggctcctctgcagtctcagcctccccaggacctgcccagccctgaagcgctggactgctcatgggatggtcaggcaggtgggggctcagaacactgttgcctctagacacctggtccctccgtaggacccttgccctcccaggcctcctgcagggcccagaggtgtagggtagttaactcctagtggagggaccacactctgtgggtatctcttcagagcctcccccatgcccccagccaacagcccagctggggcaggctcagggagacccctggggcagcgggcatgtgaggactggactgagaccccactggatgtgggctggtgggagcggaaggcggggtctagtcatcaggcctctcttctgggagatcctcgtcaatgggaggtgcaggctggcagcggaaatggtcattccaaatcttaaggaaggtgacgcggaacttctggatgcggaaggatagacaatggggttcatggccgagttgccgtgcgtgaggaagatggaatgtagtaaggatgctgggcttgtggcaggacgggcagaag

SEQ ID NO: 215331 - DNA, 612 bp, Homo Sapiens; identical to SEQ ID NO: 46100
  misc_feature (506)..(529): n is a, c, g, or t

SEQ ID NO: 215332 - DNA, 443 bp, Homo Sapiens
agagtttgtagtgtttggtgccaagaaggttccgggcacctgttcctcgtagttctcttttcttggctcctgggttgactacctcaggcttccccataaagcagggtcaagaggactcttccagggcgttgaccacttgctctaggatgtcgggacaatggtctgctatctgctgaagaatggcgttggcaaactcctgcagttctgcattgtcccgttcacctttctctaactcatcctgaagctgcccccgggtcatcttctgcagctcattctcccaagccgcctggtcatcgtccaagttataggaagctggtggagtgagtccacggaggatcagggggtctcggtcatggcagagggttgtcaggtgtccaatgtacaactttaatttacttctattttggtcaagttctaagcgagttggaacactgtcaggagga

SEQ ID NO: 215333 - DNA, 664 bp, Homo Sapiens; identical to SEQ ID NO: 51118

SEQ ID NO: 215334 - DNA, 630 bp, Homo Sapiens
tttgctgggttacctacctcaggacctgattggaacatcgatcctaagctacctgcaccctgaagatcgttctctgatggttgccatacaccaaaaagttttgaagtatgcagggcatcctccctttgaacattctcccattcgattttgtactcaaaacggagactacatcatactggattccagtggtccagctttgtgaatccctggagccggaagatttctttcatcattggtcggcataaagttcgaacgagcccactaaatgaggatgttttgctaccaaaattaaaaagatgaacgataatgacaaagacataacagaattacaggaacaaatttacaaacttctcttacagccagttcacgtgagcgtgtccagcggctacgggagcctggggagcagcgggtcgcaggagcagcttgtcagcatcgcctcctccagtgaggccagcgggcaccgtgtggaggagacgaaggcggagcagatgaccttgcagcaggtctatgccagtgtgaacaaaattaaaaatctgggtcagcagctctacattgagtcaatgaccaaatcatcattcaagccagtgacggggacacgcacagaaccgaatggtggtggtgaatgtaaga

SEQ ID NO: 215335 - DNA, 716 bp, Homo Sapiens
cagttttgttcccttgctggcaaggaggccgtgacctcaggacggctacaccgctctgcacctggctgcccgcaacggacacctggccactgtcaagctgcttgtcgaggagaaggccgatgtgctggcccggggacccctgaaccagacggcgctgcacctggctgccgcccacgggcactcggaggtggtggaggagttggtcagcgccgatgtcattgacctgttcgacgagcaggggctcagcgcgctgcacctggccgcccagggccggcacgcacagacggtggagactctgctcaggcatggggcccacatcaacctgcagagcctcaagttccagggcggccatggccccgccgccacgctcctgcggcgaagcaagacctagctggctgcctgcggagaccgggggtccacgtggggctcttgtcctgtcctgtgttcctcgtggggatggaacgatcctgcgtggggccctgttgtggcttacctaaatgttaaccaagcagaggtgacatggtgccatcaggaggcggctgctgctgaccggagtgtcccctccaggtgaagctggctcaggtgcacatgcccgctccatcatcgatctaggcacctgctgtctgaagggaccgtgggtcagaatcatttcgttgtgctcctaatgggtcgctgaggctggtctctcagtgatgaagccccaggcgtggaagcct

SEQ ID NO: 215336 - DNA, 694 bp, Homo Sapiens
caaattaattatttctttaattcccaatgggtaaatagtgaatggggcagaggagcaaagattttcttttccttcttcctacgctggataaacaagaacagaaaacagccagttatatgtgaccctctaatcttcactcacacatgcttgccttctcacttatgtcataactgcccaatctgaaacagtacatcacagatgacagatgcaaccagagagttcaggacagctgatatcgagatatccagcaaccggccctcgtgcaaaaggaattccgagcggttttcgtccactctggccatggctagcaaagccttggccgccctgcacatcatgtctacgctaggtggttccaggggcgggggctgcatgtgcatgaggttgtgctggctctgctggtactgggccatcgtgaccccatcctctaggaagcttatcaagtttccaatgcttcctttctgcacagctatggcccttgctgctagtgcgtccccttgggcaaggtccgataaaagcgccatggacatttctcgacagacctggtttttgcgatccccaacgtacctaactaatgtagcatagaatttctcctgacgactaaatggaggagtggccaagatcaggtccacattattgtcctggatactgagttacagagggtctccagcacaagtctctgaggcgaacaggaccg

SEQ ID NO: 215337 - DNA, 674 bp, Homo Sapiens
aagcagctctgagggacctggttccagcacaaaggagtctgtggacaggcaggggcagaatcctggagggagcgcctgagccaccatcccatgtggcagctgctggcgtagcagtgcctcgggctggcatcgttttggaagcaagtgggttcagtgaagtgtgttgccacgaatagcacccgctgcttttggctttattaacgtggcaaggagaaattcaaaattaagtatgtctcgaattctgtttgtggcagatggtgcggctctggagctcagccctcggcggcctgattcccaggggtccaagccaccctcattctctgagtcagggttgggcagccacttgtgtcctgagaaggtgccagaaggcctgaagcccaggcaaggggaacgggcagtgcctgtgcctcgggggtacctccagcatggcctggagcacatccagccatccccttcccccaaactccagcccttctcagaggggctctgggggtcattcaagggggacttctagcttctctctggaaccctttgtccagagcaaagccaggtttccaaggtccccacggcaaggctgttgggtgctggcagcaagaggtacacagcagttctcccagctcacagcagtgacctcagatctccagcagcaagggccgcactctcgtgccacaagg

SEQ ID NO: 215338 - DNA, 888 bp, Homo Sapiens
gacgtaggtccttgctgtctgagtaacctgggaaggcaaggcgtggtaatgactcccaaggatttattctgtcttcctgcggctgggcctccctttcttcatttattctacatggagatgccatccttctaagttacccaccaaaatccaatctctcttttccattttaaatgcctctgttctgaaggggggatttctttgtccctgtttctggtcatggaatgctgccttcctaacctggcatgaagcttctttgctaatatttgcagggcacaggaaggacaaaagggagccatgccagatgtttgggggaatcacagatagggtttactcagtagagggaaatagtgtgcagttactaatgtcccacttagccgaccccttaacacacttcatttagccccacttttgcatggagggactcagcctgcaagaggcaattggagatccaaacccagacccagactggccagccagttgactcctagaagcaatttggtccctctgttctaaactgtgcaggggtaaaaggctctgcaaagaagtgaactgggcatttagaagcaagttgcttacaaattcaggctctgtgggctgggggttagcgcagccaatggtcaagggaacatttttgggtcaaccaggtgaggacccctcgaaacttctctggagtggtcaacacccagaaacagatctctttaatcagaagagactggcagggggagaaaccaagattgctttctggcccatagtgagtcccgaggacccgcgtttgcagctcccattcttcttgaggccaacaaaccaattcttctctgcatgcttctgggatatataggtgtcgtactggtctcctccagccttccaggaacaacattcctcatttgg

SEQ ID NO: 215339 - DNA, 666 bp, Homo Sapiens; identical to SEQ ID NO: 45455

SEQ ID NO: 215340 - DNA, 651 bp, Homo Sapiens; identical to SEQ ID NO: 42743

SEQ ID NO: 215341 - DNA, 579 bp, Homo Sapiens
tttttttttttttgatcgagctgtggacatccttcttaattcgattctgaggatttgtttaactaaaaagttcccaaacacagaaagggcctccccacctgctttggggagctgtctgtgctgggagtgccaggcatcccatgggacccatcactgccagtgtctgtgcctcccagaggtcagccgtgtctgccctggctctgtctcctctgtgacagggcagagcatttctggtcagtttctccatggtgcctcccacccctttgtaaagtggatggacatgatggaattcagttgtctcaccctgatagcctgggtgttgatattcactttacccgcactcagacacaggcgaccttgaagcagttctcggtgtgtagagtccacgtgacagtccccacagcctccccagatagctgtgtgcctgtgcgctactgctgtgccattttcccaacttggcgtttcactaaatgcagctgatctctctctctgtgcactcgtgatccatgttgaacaatacatgtaggttctttttccacgcaatgtaagaacatgatatactgtacgttggaaagcatt

SEQ ID NO: 215342 - DNA, 590 bp, Homo Sapiens
cgagcggctgcccttttttttttttttttttgaatataaaaatttatttttaagtcaaagtatgcaacaaataaacctacagaaaacattttcccatcacaatctgttgctttaccaaataatattttgaaaacacattccttcagtcattataaagttcttaaaatacaaaagaaattaaatctgtaagaaagtctagtagaccagatgctgttgtcaagacttgtatgttggtgtttttgctttcagtacatcccacgccatccacctccactcatgccgccttgcccatagtaacctccactgcctccaccaccacggccataaccacccaaaccatcaggagtaccatatcctccactgtaattgttccccattcccattcttccaactgatccatagcctccctgattatctttaaaaagaaaaaagaaaaaaaattgagactcatcgataagcagctaaccctgcatattttaaaaactttacatacccattccatctcttccgtagcctcccattccagaacctcccatgccagagccgcctccaggagtagaattcaagaagagttcaatatatcgatgttc

SEQ ID NO: 215343 - DNA, 634 bp, Homo Sapiens; identical to SEQ ID NO: 53808

SEQ ID NO: 215344 - DNA, 621 bp, Homo Sapiens
gcagtactgactctatgttagagaaaagcttgcttgcttgagtataattattgttttgcctgagtttgtaaactattcactaaaaacagccacagaaaaaaacaggaccttcttcaacagataaaacacacagacccgcagctttgggaacaggctgatggcccctgcacagtctagtcacaaggcattgaccaagaaagtaatgactaactgcccatctgagactgtgcatgattcacaagaatgtttctttgttttgttttttgagacagtcttggtctgtctcccaggctggagtgcagtgatgttggttcgctgtagcctctgcctcctgagtagctgggactacaggcgtgtgccaccgcacctggctaatttttgtatttttagtagagatgatgtttgactatgttggccaggatggtctcgaactcctgacctcaagtgatccacctgcctcggcctcccaaattgctggggttacgagcatgagccaccgctcctggcccacaagaatgttttgatcattatttctcctaattttccttaaaatccctggatctagaggcacaactgagaaaggtggtctttgaatgctagtgcactgccttttgcaggttg

SEQ ID NO: 215345 - DNA, 618 bp, Homo Sapiens; identical to SEQ ID NO: 40842

SEQ ID NO: 215346 - DNA, 496 bp, Homo Sapiens; identical to SEQ ID NO: 45038

SEQ ID NO: 215347 - DNA, 603 bp, Homo Sapiens
  misc_feature (19)..(19): n is a, c, g, or t
  misc_feature (48)..(48): n is a, c, g, or t
gatgaattgacttagccgnggtcctgcaggtgatgagtggcagcactntgctcttatcaccagctcttgagcgtgctgcatcctctcatttgtcgttggtctcccctagtgttcagtactgtgccttgcacgtgtttatactcagtagcttttgaatgacagacttacattgcaaatacaacagatttccatgtcttattagaaactgcttttcttgaattactacatgtaacttgaaggattggtgaatatttacagatgttgaaatacaaaaacaggtggctgaacttagaaaccaccaagtggcaggtgactttgcctgacatccgtgttcacagacctccacagcccctggtgaaaaccacttcttcatgtcccatgtccatctaattacatgtgttattttttgtcatttgcagagtcaacggttgcaggaaagtttgaagaaagtgaattacatcaaaatcttggtatagtatataatttcatctgttttcaaaatataactttttttgaacctcagcaactttgaatgattttagaactttagaatgattttctccacatttcagtggaattgtggcagctccagtaaaaaaaaaa

SEQ ID NO: 215348 - DNA, 551 bp, Homo Sapiens
tgcagattctgtggttatactcactcctcatcccaaagaatgaaatttaccactctcctcttcttggcagctgtagcaggggccctggtctatgctgaagatgcctcctctgactcgacgggtgctgatcctgcccaggaagctgggacctctaagcctaatgaagagatctcaggtccagcagaaccagcttcacccccagagacaaccacaacagcccaggagacttcggcggcagcagttcaggggacagccaaggtcacctcaagcaggcaggaactaaaccccctgaaatccatagtggagaaaagtatcttactaacagaacaagcccttgcaaaagcaggaaaaggaatgcacggaggcgtgccaggtggaaaacaattcatcgaaaatggaagtgaatttgcacaaaaattactgaagaaattcagtctattaaaaccatgggcatgagaagctgaaaagaatgggatcattggacttaaagccttaaatacccttgtagcccagagctattaaaacgaaagcatccaaaaaaaaaaaaaaag

SEQ ID NO: 215349 - DNA, 637 bp, Homo Sapiens
ttctcttccctttgtcccagggcgagttccaccatcttctttctctcgatttagccaagcagtcattctatctcaactctttccattggaatctattagacaacctcgactctttccgggttatccaaacctacatttcccactaagaccttactatgtaggacctattaggatattaaaacccccatttcctcctattcctttttttcttgctatttaccttcctatctctaaccctgagccccaaataaacatcaccaccgcagatacaacaatcaccacaaatccccccaccactgcaacagcaaccaccagcacttccacaaaacccacaatgacgatcagctcctcaacagtacctatctcttcaacaccagagcctgccacctccatatcagcagcaacccccgcagcatctactgaaaatactactcaaattctcgccaaccgtcctcacacagtattgctcaatgccactgtccaagttacgacttccaaccaaactatattaagcagcccagcctttaaaagtttttggcaaaaactctttgccatttttggttgaacatgcaataaatgatattttccaaactgctctgatatcttagaagaaataaactgcaatgattttgatgga

SEQ ID NO: 215350 - DNA, 458 bp, Homo Sapiens; identical to SEQ ID NO: 61553

SEQ ID NO: 215351 - DNA, 483 bp, Homo Sapiens; identical to SEQ ID NO: 61250

SEQ ID NO: 215352 - DNA, 443 bp, Homo Sapiens
ctaagatagttagcaagcaaatatcttcaagcagcttttaatcaagcttttagtactgtatattaccttcccttctcaaactaacttaaaatcaccttaattccacactcactgcatcatactcaaaagcatagctaattttctgggttttttaaatcttttttttttgcctcatgctgtgctaatttaacctcatcttggtaaacaagaaaatggtcctagtttgacagactctagctgcagcaactgcagctggcctatatgcaaaccaattttgttcattctttatcctggcagggagccctgccctagaattgttttagggctaatcagcattaaacctgcgtcagaaatgttgctgaaagcagccctagagcaagaccacagcaacaaagctcttcaggaaagggatgacaaatgcagcagctatgtaaaaatctatg

SEQ ID NO: 215353 - DNA, 482 bp, Homo Sapiens
ttcacatacattatctttttaatgttcacactactaccacaaatataagtattattctccgcatgttataaatgagaaaatggagactcagagaaaatgtgatttgcacaaggcaacaacatctgataaaagggagaaccaagatgccaatacagatctgttttgcttcaaacaccacgttctttttattctctaaccctgccatgtagcacctttgaataattcttaaatgtatcattacagggttgttcaatttttagctgcaatgcttaatatttcttaatgactctattattaccagtgaataatcctattctttatttaacgtggaagtgaactgaacaaaactgaaggtattgcttatgaacagacttatttctattcttgaggaaaactggaagtaactacaaaaagccatttattccacttgaatgaagtaaatattgatactagaccttacatttaaagagaccagtctagca

SEQ ID NO: 215354 - DNA, 540 bp, Homo Sapiens
tcaattttttgcaaagcagcatagcaacaatcgtgattgtagcacttgcctgaggttgtggtcacaaccaacgtagtaaacatcatttgcatatcagtaagaaaaagaaaacaggaggagatgagttcttacaaaacaaagcagattctagagatttcactgtgtctgcattgctccttccacgcaagttctcccttagctgaccgcaatcttgttttcttccaggaagtgaggaaactggtgtttgggaacgccgtcagtagcacttggtttttccacatctgcactgatacccgactgggagccatccatcttggagacagtggcgttattcacaacggaggtggcccccaaggaaaccgggagggtaggaacccccccactctggatcacagagatctcattggtcttcacggccagaccgccattgagcatgctggtgtactggttccacacaacagggtccacattcactgaaggggccaggatttccttgggaaagatttctgagactctttttccgtccgtacctaacagagc

SEQ ID NO: 215355 - DNA, 425 bp, Homo Sapiens
aaagcatgaagcctccaagaggatttgagcttgaagtgggcagctttaggcttagggtaagcagaatagtggagtcaggagcacaggcttgtagttggacagaccagggttttgagaataagactcttgacacttattagctatgtgatcttcgaaaagtcatgtaacttgtccaagctctataacctcatcaatataatgaaaataaacaggcttgttgcagggactgaaggagccagaccacaaaactagctaggacagacacctgaaggatacagtaaagtatggtggttagtgtagctgtgatggtagctatgcctccagattcttctcagctattaggggtgctttggggagaaaagctgggaagtcactatcttggtgtatctcatctctacaatggagcaagcctgccagagtcactc

SEQ ID NO: 215356 - DNA, 474 bp, Homo Sapiens
tcaggctacaattctgtttatttctttcataaaaaatcacgggcaaatggatgaaaatccaagttttggacaatgcagaggatcagctttcagcactcacctgagtaggatgtcaaggtagccaggacttctgtagaaaagggtcagctctagcatccatgggcatacagggaggaatgcatgcatgcatgtgtatgtgtgcagagatatgcacagatgggctcatgggtggtggagcagtccccttagttacttaaagtactgcggaaggctcctcttgctgtctctttgctacatacctggccccttttaactagatattttcttgagaaagtaaacattaccattaggccttctcccacttcatgacgtgaaataggaatttttaaagccccattcaaacatcagggagcggttaactcttcattattaatatttaggtttcctgtgtggatattattatttgcaagaagt

SEQ ID NO: 215357 - DNA, 475 bp, Homo Sapiens
gtctgtaacctcaatttaatttgaaaataaatatgaaacacaggaagaaacaaacttgactataatgaaatgggcaaaaaggacatacctatgactataatcgtgagtcaactgcaacaaaatggtcactgcaaatcatctgcattttctattagcaaaacgatagggtagttacccatgtgatcaaatccaatgctcatgatacaagagtcggtggcgtcgatcgcctgaatcttgtatttgtccagagggcctgttggaaggtggttgtagtccttctgccacctctcctggccatggtagcgcaccatggccccacagcgcagcaaccactcggatgccgccctgtcagggccaacatccctgatgcgatcataatccaccttattaaacactgcattcaaccagccccagaagtatctggagtcacatgaccatgggagttttttacgccacacaactgctgggaattttt

SEQ ID NO: 215358 - DNA, 473 bp, Homo Sapiens; identical to SEQ ID NO: 60221

SEQ ID NO: 215359 - DNA, 429 bp, Homo Sapiens; identical to SEQ ID NO: 49435

SEQ ID NO: 215360 - DNA, 447 bp, Homo Sapiens
tttactgctaaacaattctagcaattttattaagcaatacctttattatttttgaatattcttaacagactggaacgaaacattttttttcaaaacaaaatatgcatactgtacgcatgtcgcagggttaagtatgatgcagaggttaaagtctgtttgaacaaaaacaaatgcccggggaaatttcatagctataaagttaataactaaattttgttcactaagaggaccttttctatggatttccttcatctctcagtcacactgcaaacttatctgaagtgcacttcccaagtgtagttagagaataggaaggaatgtaaaatttttttttaattatttgttttggttgtttgtttgtttttttaaaaacagcccttattaactcttccttccactgattctactgtaaactcataaaagccttttatagaaagcaaattcatg

SEQ ID NO: 215361 - DNA, 412 bp, Homo Sapiens
ttttttagaatggctcttaagtaaacatttattttgtgtgtactattgggtatatccatgcatgctcaatggatagaaattacaggtaggctgcaagtcacatggattctagatgtacataatacgcactttaatatttaccctccatgtgtactcttaggcctgattccaaatctattggctgtgtgaacacagatcctgagaaaggtcccagatatctatgacgaaagttttgaaactctaccactctacccgtattttatatgaaacaattctgtagaccacagccactggctgtaagagacaagttggccaacttagaaaacttacatttgccaagggagagacactaaattagaccacattgtttaacaggctgcaactcttttaactggaaggggcaactccctct

SEQ ID NO: 215362 - DNA, 498 bp, Homo Sapiens
tggtcatttcctttttatctgtcaggcagccagctctgactttctctctgtttctgtcatctctcccccacataccaacttcttcaccatgatgattataccaataatacagttccttatatgaggggctctggaaaattagacagtgaagcatgttgcagattacatgttaaacaggtctaattcacaatgaatgacaacctgagacaatatgagacagttttcagacaacagttttgtggcaggtaggggactcctttctctgcatactcttcttggctgaggttgtgttgcactggctgaggttgctgaaacagtggcccatggatggagatgtagaatcagaagcaaggagacacagttctccgctggagtcttctaaagaaatcaagcctgcccatacttttgattttggccttctggtctccagaacatagtgaatgagttctcctgaaatcttgtttaaaagtgtgttgcatctcctcttctctctctcgc

SEQ ID NO: 215363 - DNA, 502 bp, Homo Sapiens
gacaccacatcatataattttattggtaaataattctttagcaaccagataaaaattaagagagactcatgttctctccctgtgtgcacaatgggggcctccagtacaggctctggcacatgaaaaaatgctcaataaatgctcactttatgaaaaagtgaatcagtcaatgtacagaccaattctctcataagtagaatagttgacagaccacctaaattctatggacctcccttacacatgaataagaagagcttattatctatccctacaatgacagataccaatccaaccacctgttcatggagaatgttcagttcataagtggatcttcatcatctcacaaactgacctttgaggaccaagacaattaacatcattccagccccatcttttgggtgatttacgaaaatttagcacaacgcagcgctcattgggatcactgggctcacgtggatgccagaatgtggaactttcattgtatggtgtctgatcaacccat

SEQ ID NO: 215364 - DNA, 457 bp, Homo Sapiens
  misc_feature (325)..(325): n is a, c, g, or t
gaaaaactgaacacatttattcaatttccaacaatcaccaattagaaatgggcttaaatgacaatacaaagaaagctataagcaaacattttgacagggggatgtgaagaattagaacaaactgcttaggaaactacagtgtgtgcctgtgtttgtgtcgtgtgtgtgtgtgtgtgtgtgtgtgtgtgtgtgtctgtgatgttatcgttcttttcccctccttctaaaattaggtaaaacatttcctaaagatacagagcaaggtaagatttcttcttcaggtaatttccagcagtggttctcggggttgatgagaaaatcttangaggaaaatgcacttcattttatttttaattttaggtattggagatgtacctccataattaagaagttttttcatctaaatactttttttcctgtataaaagggcctttatgtaatgcataccttttataat

SEQ ID NO: 215365 - DNA, 459 bp, Homo Sapiens
ttttggaaaagaggtacttaatgtcacaaagtagactgtgcaaaaaaaaaaaaaagtacacccattaagttttcgtcattacctggcaagcccatggggtataatttttagaagaatacggaggaaaatctgttaacagtaatgttgggtagcaatttggaatgtttactagtagacagaactcctaattaggtaaatgtgtattagaaatgaccttaaagtcttcagagtggaaggtaagtaatttgaacatgaatacttagttggtaaataacattttaagaattctatttaggtttcacagactgagcattaggtaaccctgtgactagcctttaacattattatagttaaccttcttaaaaaccaaaggtgtacattttgacattgcctcccctcctcctaaaactggataaaacccagtaaagtgcaacttgacagtgatctctctcagattct

SEQ ID NO: 215366 - DNA, 457 bp, Homo Sapiens
gttgacatattaatcctttattagaaattggaaatgagtaattatatcaacacctgaggaccaaactacaacagaatattccataggctcaagattttgagacattctggaaagagttttctgtaaggtatatcctttccgtggcatggcaacatcatcattctttaaaaaggtgactggacagacatcatttccaccatcaccaatataaacaatttgtgtataattcactccctgttgtaactgtttatctacaaattctatcaaaactacctttttgcaaagattctttgggcatctattgcaagaatgagtatgataattttcaacagtgagatgaccattgctattaaaagctgctggatttgtaaacactttatcaaatatgtcatgaaaactggcagcttctaaaacccaatctatgaagaccgaatttgaatctgaaataataatgcag

SEQ ID NO: 215367 - DNA, 488 bp, Homo Sapiens
tgagaaaaaaattgggcttttattggcaattacaaaagtaatagattttcttacataatacgttccttcagtaatatatttttcaagtattttaccgtagaatttctaaagtactttgtcattgaccccataatttattataaagtaggtcccataatcacattttttggaagttgctgaaattgagataaaaaatattgtttttttatgagaaaaactggacaaaatacagaatggccaaaactagattaactggctcagttatgtctactaggtgaaagaaaatacagaatctgttattgtagaaattttaagaggttttgagtcagttccagtataaaaataaggccaaagttctcctgtaaaatcatcattaaaagtacagagaagagatctatcattcaaattataaaaggaaacctcattcatttcacagtctaaaaaaatgccaatcttactaggtgttacttttggcagcagaataattc

SEQ ID NO: 215368 - DNA, 480 bp, Homo Sapiens
ttttcaaccagctaactttttattgtccttaaaatgcttgttcacatcgtttcacgagtaggagaagaaaatacaaccagtctcagaataaccatttagatataaaacacataatccaagaatatctttcttcaaaccagtaggacactgtcactggtgatgagaatgttgttatatgaagcaatcgtatattcttccataatgtaatatgcaactgaggcgttatgttaaatgtatcaaggaagaagcctatcaaatgctaagtgattatagaaatactgattgaataaatgtatttagaaatgggataatctaagggatagagtttaatccacaggtcagtagaccaaagcccaaagactacctttccttcctgtggaatacttgacaagggatttcaggcttctccacttctctggcacaagcataatctgtctggcaagccatagttcctagctgcttcttagtgatgctccaggg

SEQ ID NO: 215369 - DNA, 445 bp, Homo Sapiens
aaagagacaggatcttgctatgttgcctaggctagattcaaacgcctcggctcaagcaatcctcctgccacagcctaagtagctgggacttacaggcacatgccactaattccagctcacaacttcttaattagggttttatatttcctaactggaaagaaccaccttgtgagtttattagcaagaaattgaaattaaactcttaaattgggtaagtgatgtcttaagaatactaattgcatagtggatggtattgaaacacagagcacagactgctgagcagctcatctcaccaaacctaagaaggaaactggaacagagattagaatcatattccacatttaatagcaggcccactgatttccacttgcccatgttagaacacctcctaaggagactgcctgattctgacatgaaagaaaatagtagttaattctttaaaatc

SEQ ID NO: 215370 - DNA, 453 bp, Homo Sapiens
aggtctgctttttattggccacgcatccagccgccagcctcagggcacacacctggcagggggcaggctcgggtaggctgccctcgctgggtgggcagtgagggggcagcggctgctgggtgtcaccctgcagcccctcaggtggacctgtattgtccccagggcctgcccacgctgggcagctggcactgggaggggttttctgttgatgtgatggccaagtttcagctgcagggcagaggcctggcagtggcagcaaaggcagaccgccccccactccaacttcaggggctggacatgctggaacgggggccagaccccatgggaggggaccctggcctgccatggcactgcctgccagcttacccctgcctagggcccccaactcagccacctccaagcagtaaagacttgcaaagcattgcattttgattaaaccttgctgggctgaag

SEQ ID NO: 215371 - DNA, 406 bp, Homo Sapiens
gagataggagtctcactctgttgcccaggctgcactgccattgtgtgatcacggctcactgcagcctcaaactcctgggctcaagtgatcttcccatgctagcctcttgagtagctgggactataggcactcaccaccatgcttggctaattttttattttttgtagagacgagatctcactatggtcaggaactcctgggctcaagcaatcccacctaagcctcccaaagtgctgggattgcaggtgtgagccactgcccccagccttgcatattggttttctgaagctgaaaaattaattctgaggcttctggccctaaggtttcagataaaatatctgtactaactttaacaaattactaagtctgaaatatactgagatcttttgctagactctctattctg

SEQ ID NO: 215372 - DNA, 609 bp, Homo Sapiens
ttgagatagggtcttgctctatcacccaggctggagtgcagcggtacgatctttgctcaccactacctccgcctcctgggttcaagcaattctcctgcctcagcctcccgagtagctaggattacaggtgtgcgccaccatgcccggctagtttttgcatttttagtagagacagggtttcaccaggttggccaggctggtcttgaactcctgacctcaagtgatctgcctgcctgggcttcccaaagtgctgggattacaggcctgagccaccaagcctggccaccttttggctttttggacagaactctttcaattgtaagtcagaaaaccaacacaaaccggccttaatcaaattaacaacaggaatctgtctcacataattgagacatctaaacagtgttactagatctttgattctcttggctgtttcctttgttgccttcattctttgctggctttctctaggtagtaggaaaagatggccaccggcagtcccatgattatgtgacccttacagctccagatcaaaacagaaagcctttcctgatacctctgagaacaagtccagggcagtccagggctggctcacaggctattcctagagcc

SEQ ID NO: 215373 - DNA, 402 bp, Homo Sapiens
  misc_feature (285)..(285): n is a, c, g, or t
tttggctgtgtgggagaccggagttttattattacccaaatcagtctacccgagcatttggggagcagactttttaaggacaacttggtgggtagggggaagccagtgagcccaggagtgctgattggtcagggatgaaatcatagggagttgaagctgtctccttgtgctgattaagttcctgggtggggaccacaagatcacatgagccagttaatcagtctgggtggtgccagctgatccatcaagtgcagggtctgcaaaatatctcaagcactgatatcnatgcagtttttcatcagggaaccactgtctccacaagccaaatgctgttgtaggccaatcagactctgaaatccatgcacctttgttagcaggtcatcgtggaggatgcacccatcg

SEQ ID NO: 215374 - DNA, 490 bp, Homo Sapiens; identical to SEQ ID NO: 8949
  misc_feature (471)..(471): n is a, c, g, or t

SEQ ID NO: 215375 - DNA, 569 bp, Homo Sapiens
tttaacataggatttttaatgtggaaatgtaaggaacatttacatccccagtaatgaaagagactcaagagtagaggcttcttagaagtcaatgagagaagaatccggacaagaaacagcttaatcctttctacggcagagaaacatatgctcagaattctttggtttcattttcatgtaataatttcagttcagaatatagtttatgttctaaaaaagtcttatttgcatttttagtgaggtgctttgatcatcttcaagaagactgctgggaaacatcagattcctggaaccataccacaaaggatccgagactttcacagggaggttctgcaggcaggaagtgtgctgggatgccacacaagcaaacagccctgaggagctctgtggctccattttcagctgcagggagaacaggcacagtcagttctcagatgtgctgctggtgggcagggcccactcacctgcaactttcagtgtcaccatctcactgcgctgggcctccagaccattgtctgcctcacaggagtagattccagaatgttctgtagtcagagagaggttgaagg

SEQ ID NO: 215376 - DNA, 659 bp, Homo Sapiens
tttttttgtataattatttggataccaaactcactgtttaaactacctattatctgctgacaggccgccctcaacttcttacaaaggacaggatgttaaattccatttcgtatcagtctagcccatatcctcagtcactcactatcccctaactttattattcgtcatggtccttaccagcggaaattacattatttactagcttactgtttgtctctaccaccagaataaaagctccatagcagcactgacttcatctggttctctaacacctagaacagccccacaggaagcaattaataaatatttctgaataaatgaatcatcttcagctctctagaccaagccttctccttttgagcttagactaacagacacctctacttatctcctaggcaccttaacctcaacatgtttctatactaaattcatactctccccttccccgatcttctcttcttcctctttccccttctcaataaatttcacagccatccacctaaatcagaaacatggacatctttccttgctgcttccttctatctcacctcccacaaccaattgatcaccaggtttcctgtagattcaaccctcctaaatgtactcccccatccctctaccattgcaatagtaaaccctagtcacctttgtgacttaac

SEQ ID NO: 215377 - DNA, 476 bp, Homo Sapiens
tgctttttaaacaatttattgcataaaataaggtatgtatttgaatatatttcatgctatagtgaaaaaaatctaaattactgaagaaattgcactgctggaggatgagggcagcactgcatgatactggatccataaatgcatgtgttcattttctcataaactatgcagcctaagagtagcagagtaactcaaaataacaagtcagaaatgctggaacttaatcttccctatcttatcttccatccaaaagtctccaaaagcttcagcgatgcactgctatttgatgcaaactcctgcaacaataatgacttttttgatttacgtaagttggtaaaatgttaggctacgtccccaaatatcttttcttggatgcttctggggaccactccaggatattccttgggcctgattacaatccacaggtgaaaagacaacatacagaacttcacgtaaaacagttcccttgtaaatat

SEQ ID NO: 215378 - DNA, 409 bp, Homo Sapiens
gtgtgagcaacatggctgtttattcacttgtgtgtgagtgggctgagtccgagaaaggggtcagcaaaaggtggtgggattatcattggttcttataggtttgggataggcggtgtagtcaggagcaattttttacaggcaggggatggatattacaaagtacattctcaagggtggggaggatgttacaaagtacattcacaagggcagggagggtgtatcgtcacaagggcagggaggatgtattgtcacaagggtggggaggaatgttacaaagtacattcacaaggacaggagtatcacaaagtacattatcacaagggtgggggaatgtcaccgtggcttgaccatagtgcagccagctcagaggaccttacaaaaagtttcatacttgcacgtgttttcttgt

SEQ ID NO: 215379 - DNA, 423 bp, Homo Sapiens
tttttacggagtctcgctctgtcgcccaggctgaagtgcagcgatctcggcatactgcaacctccgcctcccgggttcaagcaattttcctgtctcagactccggagtagctgggactacaggcacaagccacgacacccggctaatttttttgtatttttagtagaaacggggtttcaccatattagtcaggctggtcttgaactcctgacctcaggtgatccgcccgcccgggcctcccaaagtgctggaattacaggcgtgagccaccgcacccggccgaaatcagtttcttaatcttaaactgagttcagtttaccaaggtgaagcttgagtgatttctttaaatctaacaccagtttactagaagaacattcatttaaataggaaagcaatttggagttgcgtaaagcgagcaataat

SEQ ID NO: 215380 - DNA, 1000 bp, Homo Sapiens
gaggtgtgatgggaagtccaggctgaagggcggcagctgtccaggccagatcatggcgcgtgtgtccagatccaggatctacggggctacggctcacaccacgccctctagcactcgactagcagatgcatgaccagacccagatttcccaagagggaaaatgtatcccatgcagcagaaggaggaggggctcgatacttgctgagtgacaattacatctactgtttggatcacgcatctacacaccaaagaatcaggtccaaaaacacctgccatggaagctaatgtgaaggaagccgtcggctgctgggaacccaccctacatcaaaccccacctgtgcctaatggtacctgactctccatggaggtgaaggcaccgacgttttagaacttgcccaaatgtgtggacgtcaccaggagttaacccacaccaaagctgtgatgctttgtcacagacacagggttattaaaaataaaatgtctatgaaaattgaaaaatccataaaaatattaaacttaaaaaattttgggttagaagtaaaatatacatatgtgatttaccatctaaaaatgtgaaacttttatcattgtcagtgataatcaaatacttccattttccaccatgcatagtaattttgagatcgttattaaaaattgtttaagtttggccaggcgcagtggctcacacctgtaatcccagcactttgggaagccaaggcgggctgatcacctaaggtcaggagttcgagaccagcctggccaacatggcgaaacccccatgtctactaaaaatacaaaaattagccaggcgtggtggcacatgcctataatcctagctactcaggaggctgagacagaagaatcacttgaacccaggaggcaggggttgcagtgagccaagatcatgccactgcactccagcctgggcaatagagggagactccgtctcaaaaaaataataataaaaataaaaactgtttaagttctattggtagtgtca

SEQ ID NO: 215381 - DNA, 440 bp, Homo Sapiens; identical to SEQ ID NO: 48908

SEQ ID NO: 215382 - DNA, 961 bp, Homo Sapiens; identical to SEQ ID NO: 60255
  misc_feature (601)..(601): n is a, c, g, or t

SEQ ID NO: 215383 - DNA, 474 bp, Homo Sapiens
  misc_feature (437)..(437): n is a, c, g, or t
actcagtctcaggtatgtcttaatcagcagtgtgagaacagacgaatcagcagcgtgagaagagacgaattgctcagtctcatgtaggtctttatcagcagcataagaacagatgaatacaaccgccaagggaaggttctgtccaatctgaaacaatttccaactcttttacctttcctctgtgactgcttttatttcttcaaatcaaactggtggaaaagcagcaacaagcacccacaggctgtgagcttttcagtcgcaaacccgtacacaagcgcgaggtactgagcacagctgctattgattctgttgattgaaaatcatttatctcaaaagcctcatgcaacactacagaagcagccagcctcacctccatgctatttaaagaggcatgaataataaaaccaggtgcgtgtggtgctgacccagcacaccgncgggaactggacaccagtattctcagtgccgagtgac

SEQ ID NO: 215384 - DNA, 403 bp, Homo Sapiens; identical to SEQ ID NO: 59681

SEQ ID NO: 215385 - DNA, 401 bp, Homo Sapiens
tttttttttttgagacagagccttgctctgtcgcccacgctagagtgcagtggcacaatctctgctcactgcaacctctgcctctcgggctcaagcaaatctcctgcctcagccttctgagtaacttggattacaggtgcccactaccactaggctactttttgtatttttagtagagacggagtttcaccatattggccaggctggtctcgaattcctgacctcaggtgatctgcccgcctcggcctcccaaagtgctgggattacaggcagtggctcactcccggcccagattttctattgtcttaagagaaagaggtgatctgaacttgcatgtaaaatgtctgatttttaaaaggtatcctgcaagaaaacattttttgaaaagcttgatttgccca

SEQ ID NO: 215386 - DNA, 464 bp, Homo Sapiens
agagaccggggtcttgctaccttgccaaggctgttctcaagctcctggcctcaagtgatccttctgccttggcattttcaaagtgctgggattacaggcacgagctactgtgcctggccaaaatgaggaagacctttattcaagaaacacaaccaggaatttaaatacaggcaaacctctcaaaacactgctttgcccatagcaagctctcaataataatcattattgtcactacaaatgaagaagaaaacaatggcatattaagaaatagtgctctggttaattatctatttaaaaagttagaatcctaatgccatactgtattcaaaaataaattctatgagaattaaagacataaatgagcaatgtactttaagtgtgctttaattcaatatcatgattaggaaagatacatgaaggtagggaagtagattttttttttaaggcgaagaatggaaaaaagg

SEQ ID NO: 215387 - DNA, 440 bp, Homo Sapiens
aagggtttggcttctgaaaggtattccaagtacaccggcaaaatatctactttctctatgagtttataaattgaagtggttcttcaggacaaacaaaaacccttttcatctaaaattttaattgagaccaatttcagtgccctgggaattagttccaaagtttggctcaagttttctggcactgagcacagggctctggcctcaggactgcactgggtcaccttacagctgcacctcagggctacttgccaagaagctggtctcatggcaacacttccctatggcttaacaccagaacattgagcttggatacccaacctggctgaaagcaattcacatgaactgcaactctatctagcaagcaacttgcaggagtcatctcgtgtagcactgtaacaccctctgacatttctgggagaaaaataagactaatgttcatt

SEQ ID NO: 215388 - DNA, 407 bp, Homo Sapiens
tttttctgtctcaggactttcagggaaaacaatgttttcttaccaatgggcattttcaaagactctaagttggtatgtcagtcagtgtacagacaacgtgatccgcaaggcacgggcaccaccctgccgtgaaccacatctcagccaatcttccgcaaagaaatgtacccaaaaacttttctgtaaattcaggaaggtgatccacaccttccacattttgttttgaaacaatgatggtattttaaaagttcttcaaattaacaaaagtgatatcagaaatataaacatttctaaaacagagcgggctgtgaggagtgattttgccaaacttaagtcagtagcacttgacttatatctgcttttagtctgcggtggcaccacgcttaccaaggcacagtatccccttg

SEQ ID NO: 215389 - DNA, 465 bp, Homo Sapiens
aacacagtattgaaatcttcattatctccaaatattctatctatgtttgctactaaatgtacatgtagtagtgctattgcccaatatgatttctgaatggattaataataatatcaattttatatttccaggtacacaactcacaggattcttaaagtatctcaatagtagaatacgaatatgtaaagaaatcactgtgctatgattcatatctgaaggactgtgatcccacataggaacatgtaaataatcaagggcttaggcaaatgatataaacacatttgcacaagcctgaatgtataaacttcatacatgcaaagatataaaaatatacgcattacatgagttatttgcaattatgtcttaaaacactcagggtatttctgagtgttcaagttaatgaagttcttgaaaatatggattaatttaaatatactaaaattatatattacatatatgtatgtg

SEQ ID NO: 215390 - DNA, 499 bp, Homo Sapiens
gagaccgtgttttgctctgtcgccccggttggggtgcagtggcacagtcaaggcacactacggccttaacctcccgggcttaagcaatcctcccccaactcagcctcctgagtagctggcaatgcaggcatgcaccactacacatggctaatttttaaatattttgtagaggtgggggcctccctatgttgccaagactggtctggaactcctgggctcaagcgatcctcctacctcagcctcccaaagtactgggatcacaagcatgagccactgtgtctggccctgagttactttctttcttttttactttttagagaaagggtcttgctctttcaccccggctggagtgcagtgatgcaatcatagctcactgcagcctcaaactcccgggctcaagcgatcctcgcgcctcagtctcctgagttattggaattacaggcataagccactgcatctggccccctgagttactttcgtcatcacgctgtgagatcat

SEQ ID NO: 215391 - DNA, 386 bp, Homo Sapiens
ttttgagacagcgtctggctctgtcgcccaggccccggagtgcaatggcatgatctcagctcactgcaacctccgcctcccgggttcgagcgattctcctgcctcagcctcccaaagtgctgggattacaggcctgagccacagcgcccgacccggagagctgtttcttaatctgcctggaggaaaatccccagcccccaactttccacatacttcacatagataacactgtaacaactttgaaactaagagggagagaattaagttttcaaatttgaaattgagaagcctttgaagagtggcagcgttctagaaagttccatgattgaacaagtgaagcaaaaaactaggatagactcaactgaccatctgaactccaggaatta

SEQ ID NO: 215392 - DNA, 381 bp, Homo Sapiens
tttttgttctctgcaaagatctttgtgtgtctggctctggggtgtgtgtttttatttttttagtggggggtggtttagtttttgaaagcagcgtcctgttgggaaaggtggttagtctggtttcggggcgactgtctcaaggtaaaggaatttaatttatttgggacaaggctgtgtcggatgatcaagctgcttattatggctaatgagtatttttcacctgagaatctgtgggatgaggtggctgttatcagttcaaagtgaggggccccggactgtctcccacctgcctctttagcccccaccctaagggtggtgatggaccagacagactactcaacgtaggcatctgggtttgggggcctcctgtgggacaaggcc

SEQ ID NO: 215393 - DNA, 291 bp, Homo Sapiens
atggagatggaatctcactctgtctcaaaaaagaaaaagaaaatatcgttaagtgaaaaatgcatgtaatacccatcatgaagttaaaaattgcaagctgaaccattgttaattggggactatttatattttatatacttattgtctatttctttactagaatgttctgagggcacagattgttcactactgtacccttagcaactagactagtaggtgattactaaatattttgtgaatgcatgaatgaacaaatgaatgagaataaatctcatttgttcaccccaacag

SEQ ID NO: 215394 - DNA, 430 bp, Homo Sapiens
ccaacctaaaagactgagtgtattgttattatctgctatgaagtatcctactgaggtaggataaaatgatgttggtacaaagaatgtgatttgtttatagttataagaaaacgttgaattttttttagcaaaacattatgtctgtgacacattcttaataaaactgtagcaaaatgtaattccagcaattagtgtgaattctactaaaaacaaaacaaaacaaaaaaaaccatggtattctggtttttctgaccaagctctccactctaataactgttacctcttcaatttcaaaaataagcctatttttcatcaatctctgctataaaacagctattgccattcagtagagaaagtggcaaccatttcccctgcactattcccatcacataatcagtcactaataacttattactctcctctcataaaa

SEQ ID NO: 215395 - DNA, 432 bp, Homo Sapiens
cattcaaaaatatataatttattgagtacttgctagacacaatggatacaatgattatatagtcccaatcctccaggagaacaatagacagacacctttataatatgtatgtggagtgctctgacagggaaaagcacaaggtgccatgggggtgggagtggcccagaagctaaggaactcttcccccatgaagtggttacttactttctaatctttaatttagattctctcatggaacatttgaatggtgaaattttactacataaaggttctcaaccctaggaggtttatccctgcccccctggaacatttggcaatgtctgaacaacaagtttattgtcacaactggggaggggagaagaagttagcagaggccaaggatgctgctaaacattaatcctacaatgcatagggcaggccccagaacaaaga

SEQ ID NO: 215396 - DNA, 453 bp, Homo Sapiens
gtatttttagtagagtcggggtttcaccatgttggccaaactggtcttgaactcctgacctcatgattcatccaccttggccttccaaagtgctgggattacaggcatgagccaccatggaccaggggcctatttataacaggaatgagggtctgagccattctaccaggcaagccatcttgacaagcagaagtgttaaccaaggaagacagaaatttagaaagggtgatggatgagagagatgatgagtatcatttatggtttagggaccagctatggcagggtgaccaccaaacctcttcttaaagtttttcccaaaaattgtgaccatgcagaatcttggagaaatcatatataacttaatataactaacaatgaagaaagcaagtagatcccagtagtcccaagagaggactaaagtggatacaggctggtacacccatctctcatctc

SEQ ID NO: 215397 - DNA, 469 bp, Homo Sapiens
tgacattaacaactttgtttaatggcctgggagcttgagccggtcagatccctagagcagggtccacacactcagccctggactttctcccacctattccaacccagcctcacactcccataactgcattcctagccttttcttcccgtttaacactgtgcttcacctagtaatcaacataaaaacaaagcagatagaaggacaggcctaggtcaggcaaccgtctggggtaatgcaggtgtcacagccacaggccaggcttgactggcacaggtctggggagcctgggggcagcctgggtgggtgtgaattaacagcctggaggtggtgggagggggcattctgtgtgcctctggggaggggcggaggtgaggtgttctctttgtcagggacccttggatctgctggggacagagcctgcccaactccctcctaagcaacttctgtttcctctgctctcccttcctgc

SEQ ID NO: 215398 - DNA, 445 bp, Homo Sapiens
gcacttttagtagagatggggtttcaccatattggtcaggctggtctcgaactcctgacctcgtgatccacctgcctcggcctcccaaattagaggcgcgagccaccatgcccggctaaattatctacatattttctatgactgtatcttgcttttaaagcacatgtactgtctgtccagattacctctgctgccttgaatacaaagcatttcatattgctgtcactcctgcgtagtgcaaacactttccaatgaagtagacagaacttcagaaaataccctaaggagccatgttaaaaacgaccaagacttgttcaactagcaacaaagatggcccctaacgctgcaataagtttaaactttgatccttagttctaagtgaatcaatcccaattaaaatgcaggacttcatctactgtattttattaacatagttgagtatctt

SEQ ID NO: 215399 - DNA, 366 bp, Homo Sapiens
ttttttaaagaactctgggttgctgttttagtttttctgttttttcccaggaaggtaaaaggtcagcaaccatttgtgagtgctggaaatcccacataacaggtactgctagttgcttctctgatatcaattctcccagcttcctcagtaacagaagtgtaattttgttcagaggaggagtgtttagaaaagccaaaaaaaaaaattttcctggactcctgtgtagctaaggaaagtcatgtgacacaggcagagggcttctgggagagcttatgttttccagatatagacccctttgctcttcctgcctgcctgggataggaatgtgagctggaggaggaacatcaaatgcctcgtaaccatgag

SEQ ID NO: 215400 - DNA, 684 bp, Homo Sapiens; identical to SEQ ID NO: 60338
  misc_feature (280)..(280): n is a, c, g, or t
  misc_feature (295)..(295): n is a, c, g, or t
  misc_feature (307)..(307): n is a, c, g, or t
  misc_feature (340)..(340): n is a, c, g, or t
  misc_feature (386)..(386): n is a, c, g, or t
  misc_feature (532)..(532): n is a, c, g, or t
  misc_feature (621)..(621): n is a, c, g, or t
  misc_feature (623)..(623): n is a, c, g, or t
  misc_feature (635)..(636): n is a, c, g, or t
  misc_feature (661)..(661): n is a, c, g, or t
  misc_feature (668)..(668): n is a, c, g, or t

SEQ ID NO: 215401 - DNA, 406 bp, Homo Sapiens
ataattttccaattagtcttgctcattttttatataaactttgaaatcaatttttctgattttcaaaagaaaaaaaatcctgtttagtattcttagtggaatgaattaaatttccatagcaatttagggaaatttgactttcttaacgtgttgagtgttaaacccacaggtggtagcatgacattgactcctcagccaagcatattatcaactgtcggaaactaggttttcccatagtgatccaagaaactagtacgaaatgcctttctgattttttaaaacttgtatacatatatagtacatattatatatacttatatattaagtaatcagaagtatgtgtttctcaatcaccttttaaagacttctttatatagctcttggacatttcttgatatgaatatgt

SEQ ID NO: 215402 - DNA, 372 bp, Homo Sapiens
tttttttttttgtacaccttagatatatactttatttgctttcactatatttatatacatcaaaacagcatgttgtacaccttagatgtatacttttttttttaagagcccccatggcaagagagtgagagaagaagaatggtgctatttggcaatacattattgtgttacggttaaagtctggcaggttaagtattaaagattagggtaccatataaaaatattgcctcaacacaaaaataaacaaaatttttattagttcagcctctgaaataaggaagcacatttgtgaatattcatacataaaatgctgtccaaaataaattattcacagaaataggtaagatatagaagagagaatatagaatgctg

SEQ ID NO: 215403 - DNA, 488 bp, Homo Sapiens
tttttaagactttacaaaaatttttattctgtttacacaggaccttgtctcattcaatccttccaattaccaaaagaagcaggcaagacaaactgttacacccattttatgggttagaatgatttactccaagagagatgcacttgcctaagaccatcagctgtagagctgggctaatcccagtgcatgactcttccatgaattgtgtgttaattatttatttattgagagagggtcttgctctgtcccccaggctgtagtacagtggcatgatcacagctcactgcagcctcaaccacctgggctgaagtgatcctcccacctcagccccacaagtaactgggactacatgcacacaccaccacatccggctaatttttgtattttttttagagacgaggttttgccatgttgcccaggctggtcttgaactcccgggctcaagtgatctgctcatcttggccttccaaagtgctgggattacaggg

SEQ ID NO: 215404 - DNA, 481 bp, Homo Sapiens
cctttggaaactacttttatttaaaatatcaggaatccagaaaattgcaacttttcttgatctacataatcatttttacatgaaattttaattccataaccattgcaaagatttttcttaataaacacagtattaagtatcaaacaccttctgtgaaagtacaatagaacacaaacatatactagaggtattgttttctgcatttatgcatgaacaataagattttttaaatttttgacttatctgtggaaatatgatagagaattgtatggtatggtttaagtattattcatttctgcacttagatgaggtaattttttcttttctagataaactctaattccactttttccatacagtacacacatatacatgcatatatatgtttctgttaaacaacagtagtgagattttaacaaatgacttacctgtctttctgaaaagtgtcttgtctgttaatgttatatgagcctgtaaggga

SEQ ID NO: 215405 - DNA, 481 bp, Homo Sapiens
ctggtgatctaaaggatatggacactaatgcattatggatagctcaggtgattttactctcaagcatttttttaagtcaaaattctacacatcagtaatagttatactgccatttgaggtcataacctgacccactgacaaagaagcccagtgatataatattattttcatatgcttcttttacacctctccctgctaattaccatcatgttaccatattcttgccaaaaaaaaaaaaaaaaaaaaacaccagagtcgttacatgaagtatctttgatcactgaatttccagcacttctttgttgtgtctagatgctaagcccttttctaatttgaaaaaaaaaaaacaaaaaactggagacctgattctgtttatctcttgtagtttctcttatctctgtttctaaccactctatgtagtgcctctttttttctgtctacacacacacggagcatccaccataccaataatcacagtatg

SEQ ID NO: 215406 - DNA, 458 bp, Homo Sapiens
ttttttaaattcagggcagacattttatttaaatgaagaaaataaattcaaaacagaaattttggtgaatatgtttaaaatcttggggtaagaaggactttctgagaataacattaaaggcaaaatcacaaagaaaagtacagatacatttgattacatgaggatgaaatgcttttatatagtgaaaagcaagacaacctgggagaaattgcttatattacataaaatagaaaaaggatcaatagatttaacttttcagtccaaagacagaaaaggataaatgaaggtgtgtcaaagaacgtgcattagaacaaatatatttactaatatcagagaaatcaatgatggctagtgttaagtgtgggaggggagaaatgtacactttgcatcttgatgttaaagcacatatcagtatcaatagcgtcacaatcattccctttgacacagaatttccactt

SEQ ID NO: 215407 - DNA, 418 bp, Homo Sapiens
ttttttttttttttttttagcaataaagtatttttaattaaggtatgtacaggggtttttagatgtaatggtattgcacacttaatacactatagtgtaacttttacgtgcactgggaaatcaaaaattcctatgacccactttattgcaatatttgttttattgaggtggcctgcaaccaaacctacagtatctctgagttatgcctgtgtatattatttggagaacattgactagtacagatactcagccggaattctggatacgcttcaggtatggctgtatccaggatctttaacaatgtcattaggctccaccatctcttgccagatcttagacaagagttattcatatggtacatgtgatgggtgacactggcaaccctggctcatgtcctaaacgtagccaccttaagaaa

SEQ ID NO: 215408 - DNA, 491 bp, Homo Sapiens
ttttattaaaattaaaatttattaaaatgtcacaatttcccgtttgagccttatcctctaccatgaagtataacctcccaaaaaagaacctgagaaacaacctgacttgacatacctttgtagtgttaaaccttcaacacttaagaattcatttactctattaccacaataccagaaattctccaatgacaagaaaataaaactggtaaaaatgagacaaaggtgagttatgatttatagagaatatagaattgaacattaatgtagcctggaacagccataaagacactgatggtactgggaatgtgtcaaaaaataaaaaagatcattctacttccaagctagcttttctattcatgtgatatcaatttgctcaacagataacaagcagaaaggaactcaatgactcattcttaccatagtttttctcagctctctgcctgcctctattaagaaggtttgcaaggctggacacggtggctcatgcctgt

SEQ ID NO: 215409 - DNA, 399 bp, Homo Sapiens
ttttttttttttttttttttttttttggttctgcatatgctttaattgggccatgcctttttttttcaaatatttgaaaatgaatacctatggccttttataatttttttaatacaaagtatactggaggcaaagaaaatattttttgtaaccctaagtcatagatacatatttgaacttattatttcctttaaaaaaattgactgaaggccctcaaagaatatgggggaaataccaaggaataaaagagaaagcatcacatgttcaggtaggggacatcaatttacataacacactgacctacattaaaaataatagcttaaaaaaagaatgatttttaaatcataaaactattttaatgtaattgtttcactttaatcaaggaggaaaagaatgaac

SEQ ID NO: 215410 - DNA, 496 bp, Homo Sapiens; identical to SEQ ID NO: 58898

SEQ ID NO: 215411 - DNA, 447 bp, Homo Sapiens
tttttttttttgtagtgctgcctctgtgctgatgcacctccatgtggactgtccgcaacttggccacgcagggcagtgcctgctttgagttgctcatggccttccccatggtgccactggaaggagtggggtcctggcctgcgcctggccactgccgcctcatgctcctgcctccaatatccttactcacatttctgaggaagccctacattttcaatgattatttagtagttagctctttcccttttaaaactagaatcaaaagtgatgaatatattcctatcactatattattgatgggaattaagaaaatttttaaaaaatgagggcctcttgccaactacaaatgacacattattttgctttagctgtcattttaacctcatttatggttttccagtagacctgaaaacagactgaaatctactctgaattacctagtaatca

SEQ ID NO: 215412 - DNA, 488 bp, Homo Sapiens
ttttttttttcatctttgatttttttatttaaaaattaataaagaacttaacgacaagtataataatttaatctctatatgcaatgctatgtgtacatctacataagggaaccctgtgcgttttaccttgcttttgtatcaaagtttttacttgaatctttccaagagaagaatcaccatctgttagtgacgtgttgcaattaaactatgaaatgattttgacaatagtttttctattttgaacacactttaatttttagggatgaattaatttatcttcagaagttcctttttgactctgaacatttcaattttatttttttttggtctagactggtgtgaaacagggacattattttgtgtactaggatgtcctcttgtttagacagatttgtgttactaattagaaaactgctaatacccttatttcaatttactgagatagttgggattcttaaaacataaggagagagaacttgttggaaaca

SEQ ID NO: 215413 - DNA, 477 bp, Homo Sapiens
tttacagcaaagagttttatttcctgaatgttacagaggagaacgggtctgtacacggcacacttcacacagaacactgcacacgtggctcccttgacctcagccaaggaggtagctgtgaactccagtggaaaaccaaagagcaggccacactgccgcaaggaggagccgcagcccctcactcagaggggcttcttctgctgcctggctccacacagagctcagcaaggccacggggccagaggcggacacctggtctgttctgtgcctgccctgcctatccgaccaacgccccacagcccgccacgatgggacctcagaggctgaggcagcctggtcctgggccctccgggctgctcaaggccacagtcctgggctcttcctgctgcttccagcctctggagggcgtcagacaggcgtccaggcccacgttaagacgctcgagggtgaactgagaattccgaattccgctgctca

SEQ ID NO: 215414 - DNA, 729 bp, Homo Sapiens
  misc_feature (542)..(542): n is a, c, g, or t
  misc_feature (671)..(671): n is a, c, g, or t
tttaagtttaaatacttctatttttattaaagaaagtataaaacactggattctatattttcaaacactattattttaagaatcagtcaaatcagtccggtctcttcatactgccaacatgtccaatacttctgtcttactatatttctaaaaaatcttgaattctctaccccactagtacagaagacattaatgaaacttcttgggccttccttgaggtctttccatttttctttccatttcccttttccgttgatgtgcctcaaacctctcagccattgatacaagctcctctggaatactctgatttgctctttccagaatattaatcaattcagaggcaaccctccaatcatttctagtcaaagttgtaatggaaacaccagtcctccctgctcttcccgtgcgccctattcggtgtacgtattcttcaatattccgtggaaagtcaaaattatagacatgtgtaacgtcatggacatcaagtcctctagaggctagatcagttgcaattagtattctcactttgcctgttttaaagntctctaatgctttctcccgatctctctgttctctatctccatgcagagactctactgatatatttccaaggattaggtcacctgataagtgatcccgcacagcttttcgagaaacgaagacaatgactntgtcttgtgatgacatactttgtagaaaagtttgcatgtgactccatttctcttcttc

SEQ ID NO: 215415 - DNA, 479 bp, Homo Sapiens; identical to SEQ ID NO: 58803

SEQ ID NO: 215416 - DNA, 870 bp, Homo Sapiens
  misc_feature (574)..(574): n is a, c, g, or t
  misc_feature (577)..(577): n is a, c, g, or t
  misc_feature (580)..(580): n is a, c, g, or t
  misc_feature (588)..(593): n is a, c, g, or t
  misc_feature (595)..(596): n is a, c, g, or t
  misc_feature (601)..(601): n is a, c, g, or t
  misc_feature (604)..(604): n is a, c, g, or t
  misc_feature (610)..(610): n is a, c, g, or t
ttttttttttttatgatcaaaggtagtcaaacatttattttatataaatataatttccttgcctatatccattagatttggggaaaaaaggttcaagtttacagtgccagaacagctccttctttaaaggcttgtaaacagtgacttgttctatgccagcatgcacactttgagcatatcaactcacttaatccttaccaacaattctatgaagattgtgctatcattcccatttcacagataaaaactaatgtatctagatatgataatcttgctcaggatcatgcactgggatttgaacctaagtgatctattctctgatgccgtactatcaatgcagtacaatttttaactgcatgaatgcacactgcagagcaacagcaattgaacaatgatcatttgccttttggaaattatggccacatactttgtgtagcttgatttacaaatagcttggctaaaaagcagttcagcaagtcaacttcttaaaataggctatgaaggaaaagtgcatgatgaagccagcagtaaacaaagaaattacacaattttggtgagagaggggtttgaggtnggnaangggagtannnnnncnngaatntangaaaantttggggatgacatgacttgtacaactgaaagacctgcccttaaaagttagaaggctattgattggaagagacactggccagagcaggattgagttcattattttggagcgattcatcggctggttggtacttttgaaaaccaaccataattaatgaaaaggttggtaaaacactattgcagttgttaactttgacctttcgcatcttaattagaatgaattacctttaaggtgctggaattataaaacattaggcggat

SEQ ID NO: 215417 - DNA, 492 bp, Homo Sapiens; identical to SEQ ID NO: 61561
  misc_feature (491)..(491): n is a, c, g, or t

SEQ ID NO: 215418 - DNA, 485 bp, Homo Sapiens
tgtgcatgtcaaagacagggtctgcatacattttcatcttcagtcccagcacaagcaacttttaaatgtaggatcaatacaggtatctgaagtgaataaattagtgaatcaaatcatcttagcagcaggtagaaagctaatcatctagttcatttagaactgtatcaaaatacttcaatatattctggaaagagaagcaagacatgtaccaaaggagaaatgtacaaaaagggtttactcaagtaatagtgtaattagtaattcctaaatataatgatttttcatattatgaaatattaagcagtggttaaaaaaacaagttggaactacatatatgaacaatagagcttcaagtcatttttgtatcaaaataacatgatgcataaattatgatatataataccatttatatattaacataccccagagaacatattccacacacacatacacatgggaaaaactgaggtagaggtatagaaaga

SEQ ID NO: 215419 - DNA, 473 bp, Homo Sapiens
aaatagcaattcaaagattttctattccttagtacaaaatgtctgcgagtcaatccatttcctctttaaaatatttagacatggtgaatgtgaaagttctacccaaaaagctttaaagtttatatcatctacttccaacaataggatcaattagcattgaaagtctaaaaagtcttttaaaacaaaatattaatttttatgacaatcctataatcaactatgcctttaattttactaaatacacaaggtcaagaattacttttccattagattccactttaagaaattccaacaggaaatgacaattgctaggaattaccaaatttggcaaggtgttctttgaaaagtccacaataaagcaccatgttacaaagtttgataaaccaaaaaataatagtactaaaaacaaaaagatgcaaatattatcaattatatagggtggggtatggagcaaacacaaattaacagagcac

SEQ ID NO: 215420 - DNA, 492 bp, Homo Sapiens
agacagagtcccgctctgattcccagggtggagtgcagtggtcattttgtcagctctgtcagcttgtccttcttggagactgtgccaggtaccaggcccccacacagtcaacagggctgtttctcctcaggctcaccagcccctggtttccacctattttgatttttgtccatctgaaaggcaaaaactaaacaaaacaaaggaatttgggtgtagttagagtttgcgtttctcttacgatgcgtgaggctggtcaccttttcatttgcttaagagccacatgtgtttctttttggtgaatgaactgcagaatttctgcagaggtggtgccgggcagctttggagaggggggcctggagggaggccagactagaggcagaggccacttctggggacagttagcgtagaagggagagaaaatttggtcctgaagagtggtgtgagagctggagatggagatgatgaagttgaaaggctgagattaggtgatag

SEQ ID NO: 215421 - DNA, 402 bp, Homo Sapiens
  misc_feature (2)..(9): n is a, c, g, or t
  misc_feature (269)..(269): n is a, c, g, or t
cnnnnnnnncttttctttttatagatagccctgtaataacagaaagtaattgcaactgctttcatgcctaacagatcacagggaaaataaattgaatagaaattcaaaccagtgtattagagaactataatatatatacaatatattatgtatttatattctaccttgttcacaaaggatttgggaaagatattataatactagctcatggcccaatgatattttgatttcacacaaaaatagcattctgaatggcaattattcagaantatatgaatagtgttctcaactaatctacttaacaccctaccatcacatctctttactatttggataaaacaaagataaaatttttcatagttatttgcataggattattttgaataaagccagaagcagaca

SEQ ID NO: 215422 - DNA, 441 bp, Homo Sapiens
agacggggtctcattctgtactccaggctggagtgacagtgacactatcatagctcactgccacctcaaactcctggactcaaacaatcctcccacctcagcctcagctccccaagtagctaggactacaggtgcataccaccaccacacccagacaatttaaaaaatttatagagatggggtctcactatgttccccgggctgatcttgaattcctggcctcaagtgatccccctgtctctcagcctctgaaagtgctgggatgacaagtgtgagccatagcacccaccctttatcatgtaattattttgttacttccctcttgttcactctctctacatatatctggttgtatgtcttaagtcttatactactagaaattaggagttaggttgatcagtatatacaaagtttcagttatatgagaggaataagttttgg

SEQ ID NO: 215423 - DNA, 463 bp, Homo Sapiens; identical to SEQ ID NO: 60555

SEQ ID NO: 215424 - DNA, 383 bp, Homo Sapiens
tataaatacttacaattttatcacataaaattttaaactgtaattggacacagaagaaatatcaacaaaggcccaaacatttgcaacactaatatcctgaacatacgagaagcttttacaaatcaatataacgaatgataagacctaaaggaaaagggcaaaggatataaacagataatccacagaagaaaattgagaattaacttacaaaaagaaggtcaacatcactaataataaaagaaatgcaaactaaactaagcataaagtatcattatatttatctcaggttgccgagactgatgatgaacagtataagggaaacaggttaatactatttgtgggagtgaacattcatacatttttttttttgagaccaagtctca

SEQ ID NO: 215425 - DNA, 456 bp, Homo Sapiens
aaacagggtctcagaagtaaaaaaaaacaaaaggaaaaaacaaaacaaaacattgtcaccaaagctggagtgcagtgatgtgatcacagctcactgcagccttgaactcccaggcccaagtgatcctcccgagtagctgggacctcaggcacatctcggagcccagcctggccccgtgctcttctgcagtggcccgcgtgcatgtgcatccgctcatcgccctggggtcctgcctttccgtgcatgggctgtgggctttagctgccagctttgggtgtttcctccgccagaagccaagtgccaagcatggttctcacacagcagcgctcacaaagatatttaaaggacgaagtgtctttcctgggcctctagcaccacctctggctggcagatcaggctctgagacctcaggccaacattctgggccccaaagtcccatgccagggccaggtgatg

SEQ ID NO: 215426 - DNA, 300 bp, Homo Sapiens
  misc_feature (175)..(175): n is a, c, g, or t
tttttttttttttttttttttgtttctttttactttattaatgtggctactagaatatttaaaattacatatgtggcttgcaccatatttctaatggagagcactggtttatacaaatccccatttggactgaaccaagttcacatgtcttcgtgaacaggatagtgcagtcccnaaaataaaaaataaaaattaccaatggttttcatacaatcttctttttcacaccccagcccttccctgttaagtttatacagaaagaggctgagtttctcttgccataactcacttgctcaaaga

SEQ ID NO: 215427 - DNA, 399 bp, Homo Sapiens
tttttttaaaaggaacagaccatattgaatttattccatttctctcatatatcaatttccctgaagtttatattattaatatcaataaaattgtctgggagaaaatagtggtgtccgtatacctgacaaggatgagacactagtgtgctgagaatgccaaggatgaacaaacagcatgaaaccacagcctggagatgctgttgacactgagcgtgatcacctccaggctgggcccctacgctgcgctgctgcattcgggtggcgggatcaagaggagacacagaagccaggggaacagcctctggaggagacttcacaggacacatcctggttgtccagcttctgtaggcgcggcagggtgcgcagcacggtcatgcggtagcggtgggggctggtgcc

SEQ ID NO: 215428 - DNA, 401 bp, Homo Sapiens
  misc_feature (209)..(209): n is a, c, g, or t
  misc_feature (395)..(395): n is a, c, g, or t
ttttttttttttttactggctgcttggagtttattttccgcttggtgccaggtgcacagttccaggtgtcaggaaagctagcgagtgctggggccgggcggtagagagcggggctctcactggtttttggtgtctgctgtgttgatgcgaaggtctgcttgctgcagccgcctagtttacagggtggggggtgggaggtggacttcccnaaaaagaagctggcccaccaatgacccgggtcagccttggggagacctggggggtggggaatggcttccccggggcactcggtactgctgcaggagctgttgctggaagtggaacccaggcggcgccggtagtagtcgtgggtggccacgagcgagcccctggaggggatggccgccatgctttancttgct

SEQ ID NO: 215429 - DNA, 328 bp, Homo Sapiens
tagccattacactaggtccagtgaagctccagactttcggaaaagattggtggacgggaaatgctgtcatggatgggatcttgccaagaaccatcacgtgttaatttagttgcttaaacaaaaggtgttctgtttcttaactacttctgtgtctttactttttatttcattgttcattgtttttattttaatattcttttctgggtttatatgagacagttttcactcctgttggctgaggctgaaagtgcggtggcgtgatcatagctccctgtagtcagccttcatctcctggactcaagcaatcctcccacctcagcctctccgg

SEQ ID NO: 215430 - DNA, 520 bp, Homo Sapiens
ttttttttttgtgttttataaagagaatttattgggctgtgtatctaaacatttcagtgattttaatgactttaggtgtgaccagatctcggatctcaaaggtggtcttcaaccccttgacctctaattcctgttttctttgctttgacttcaaagattcttaggtttgcctcccacacagaccccaggcagctccatgctcacgaatcttcccgcaagcctcagcagccagagttcagtggagacctcatgtgactgcagaggctgggcctgtagccagaggcctagagggctaggactggcccaggaggtatgggcttttccccacccctttgaggctaacagcccatggacaaagtggctgtttgcataagggagaaggcttaagcactggctgccctcaagtcattctatccctctcccaagtgggcattaggttatcagactaggctaaaagcagaggggccacggggtatgcgggcagcacaggagccacacacccttctccaaaagggtctgg

SEQ ID NO: 215431 - DNA, 567 bp, Homo Sapiens
gagacagagtcaaaagacggggcacacagaaaagtcatgcaacatggtggtcctaccaccacctacagcctctcctcctcattaaagtggcctatggagggcttagcccagcaggcttagagcttctacagaatgggtatctgctccctgggaggatgttctcgggacatccttcaattgcctgcagggattttgggggttgttttcaaagcacaagtgtggtcccggctaagagcagcctatcagcactctcctcggatgtgttggtttccttgatgggccaaaagaaagtgagaagccgctgaaaacacatacacttatttgccttcccttttttatgttacccactccaccatcacatttcctcttcctctttttctccatccttcatatcttccatatcttctctgagatggaggacaagaagtcagcaagtttgtgtctcggtgagttatttcaaggtacataccactctctcctgaggctgatgacatcttgttccttagtcagcatttcattattgatgaatacaacttcccacaaatgtttagattgattttcttggct

SEQ ID NO: 215432 - DNA, 484 bp, Homo Sapiens
gactcaatacctaatagctaaagggaaggctttcacacggactgcacacctgcttcaagccaggtgctgcagggaccacggtgactttgtcttcacagacacaccaagaggcagatgcaagggctgggctgagagaggcaagaggctgcactgcacctgcagattcacagccccagggggccagctgggccatccctgcctgtggggcccctccactcctttactgtggccccgccggggcccccttccctcccttccatgggccagacctgcatggtggtcgcacattcgctttatccttcaagggtgttctcctggtcacatccgattctgccttggcacctgcttggaggccccctgcaggtcaacctgctcatgtggcaggagctcagtgtcccggctcccagcagagggcaggcctggggcaagagtggaggctggcttggctcattgtggaggggacagaaaggacaggggtgccttt

SEQ ID NO: 215433 - DNA, 552 bp, Homo Sapiens
tagagcaggagtgagagtttattaaaaagttttagagcaggaacaaaaggaagtacactacacttgggtcaggcaggcaacttgagagatctaagtgccctgcctgacccttaacttggggttttatgtatttggcatagttctgggatttacgtctcatctcccctgattcttcccttgcagcaggctgtccgcgtatgtggtgacctgccagcacttggaaggggtcgcatgcacagtgtgattactgaagttgcgcgcatgctcacttgaggcatttttccccttaccagtcgtgcgttcccagaggaaggtaggtcatatactggttaaattccgccattttgcctcttggtgcgcatgctccaggctgcttgcccagctcctgagatcttatcgggaagcggctgatcaccagatcagggtgttttgtatctattgagagactgtccttgcttggagctggctgcaaccaattattattttacagagacagtttaacaaccacctgaccatcacctgatggtagcctgacattcctgtgggggccct

SEQ ID NO: 215434 - DNA, 470 bp, Homo Sapiens; identical to SEQ ID NO: 61581

SEQ ID NO: 215435 - DNA, 496 bp, Homo Sapiens; identical to SEQ ID NO: 60208

SEQ ID NO: 215436 - DNA, 469 bp, Homo Sapiens
tttttttttttttttgcccctccttcatttatatttattccagactattgcacacttctctcaccccgctcgtgggtcttaaaagggctggcaggagttaaagttccaagaagttcccaggccaacaagagtggagttgcaaatataggtgtagactccagggatgccatcttgtccacagggccccacagacccccaggacaccagaccttgaaggactcccccacacaccagggggcccccagaatcaccctggcaggcatcctgccccgggacgccgcctgcacacaccatgttgctcgtgattctcccgggatacacaccatggcaggtggcatgggagacgatggagaggttgaggcactggagcagatccgggaatgggttccggggtggttgggatgccccagcctgagacgtggcactcggtgccagcggttgcacagtcattgggcaagggcaggggttg

SEQ ID NO: 215437 - DNA, 457 bp, Homo Sapiens
agctgggcatgatagggtgcgcctatagtcccagctattcaggagactgaggagggaggattgcttgagttcaggaggtcgaggttgcaatgagccatgatcacaccaccacactccagtctggaagacaaagctaggccctgtctcaaaagaaaaaaagtacaatcaaatagtttaatgaacttcaaaagtaatttctgagatcctgtatatctcatacctgtgtttaaacacctgaaaaaaatagataaaaattcaaaacttcaaaaaatatgaaggaaatatcatttgtcttagaaacaacgaaaattcattaaaaactcagaagcctttattatattttaaattactaaaactcagcacatctggaaattctgaatacttgttgactgaatttctgatttacagatttgatatgtagagatggtggacatcaccacacgtatagaaaggaaaa

SEQ ID NO: 215438 - DNA, 569 bp, Homo Sapiens
tcttttaatgcatcaaacaactgtggccagtgaaaggaaacaaaactggcagtttgtccatttgaatatcagacctagtttcttcttaatttccacactatttctcccatattccttaaacttcttggcatccttcatgccttacagctacccagatgcaataaagtcattgtacagtatttcttacaatataagttatatgcaatgttcagcattttttttttttcacagcactagagaccctgttaaataggggatatgagtcagaatggcttattcacagatggggtccagattcagtggttggaacacagacaccacagtgagctcctttgcaaagtggcaaacataattttgctttctgccttcaaaaacatatatccatcgcgtttaggcttcatgatactgctcctgcaaaaatgcaagtcgaaagggactgcagggactctcgctgggggccctgtgagcatcgagcagggctctaacccatggcggtgaccatgctcggaggggtggggtggccaaaggacaggctggatgggcggtgcaatcggcgtggcgtggtcagc

SEQ ID NO: 215439 - DNA, 484 bp, Homo Sapiens
ttttttgcagctttgtgactgtttattaattggtttaatatatattcattaacaaaattaatattcattaacaattataaacaaaaattaataaacatataaaactttcatgctgtacatgctaaaacatattccagacaaaagatgccttaaaatgttcctaccattggtttagaaatggtataccaaaaaactagcctaaggaaaaaagaaaggcaactaaaactgatgtggcgtggtatttagtacaggaggtcaaagatatttaaatctttgacgtaagatagacaaaatactagaaaaagtaaatatttcataatatatgaaggaaaacagggagatgttttctctcactaagttacatctgtaatgtgggttgatatatggtcatgaaaaatggcagtagtcacagactggtcattctgtccaacagactccttttctctgagaccttccaactgtacacacattcttctattttctg

SEQ ID NO: 215440 - DNA, 500 bp, Homo Sapiens
gtataacatgcacagtttaaattccactacactcatgaaaaaaacaaaggtcttaggtcagattccctagttattaggaattccataactacctatttcccaatctcttttgccaatatttttcatcttaggcttcctgtgaataatacattctccttctagttctcctccctgacatacactttcctcccccagtgtccataattctcagaggattccttgaccagcacatccagatttttcttgctctccacaaaaaaggatcaactgtaggttccagacatcaaagttctcagcaaaatacaaactataaagagttatatggagataaaagacccaaaatacaattcagaagagagaagcatactcaaggtctcttttataagaaaacagtaaaagaggaaagaaaaccagaggtggttgacaggggtaagaaaaccacactgattgctctaagcatttgcataaagcacttgcaaaacatgcattataacattttg

SEQ ID NO: 215441 - DNA, 782 bp, Homo Sapiens
  misc_feature (621)..(621): n is a, c, g, or t
  misc_feature (717)..(717): n is a, c, g, or t
  misc_feature (747)..(747): n is a, c, g, or t
tttttttttttattttttgctgttaaaacgttcacccccacaaaaggggagtggacagatttattgaaatcaaactgggaaaggagcagctggacggctggactctgggcccagccccaggcccctctgcccaggatggggccctgccagagagggaggagaggcatggggcctgcagctgcccacaaggaagcgcccttggttacttccacggtggggggcctcttggaaacctccaatctggaaagaaaaccaagggccaaagtcacatggacagggccagagaaagggactggggaggtggaaagcaggcagaagcaggctcaggagcccgcagtgagttaaactgtgcttctcaaggcggcctggggggtgggggtgggggctgccagccttgcagggggcctaggctggaccttcttctggagcccttcccagaatggctttggggtccccccaccaaagacctgacgtggatggcagaggggagaggcactctccggccgggaacctccagggcccatccctggctgctgctgtggttagtccactgagggcacggtgtggtagcaccggacagctccccacccgccccacctggtcccctgagcccagggccanatggggaggaaagaggattctgagaaagaggcaataagcaggcagtgaggctgacctcagccccgggcccggccgaggtgaccgggcctgttgcangaccaggggaagcattactaaggatctggngctctgcactctggctccatgcacagcgggtgccc

SEQ ID NO: 215442 - DNA, 787 bp, Homo Sapiens
ttttttttttttttttttcctagtcaaaaatttactacacagactcagtagcggaaaaacatatcccataagcagaggacaaatcacagatgctcctcgacttacgatggagctacatccgaacaagctcatcgtcggccgacagatcgcacgcaagtggtccacggatcgcacataagtggtccacagtcgacagaaacagaccgccacgatcagcaacttagcgtcgcctcccccggtctcatcttcttggcatgcccgtcgggcccaggcgggggactccggcgccgctgcttcttctctagctgctgctgcagtctctcctctttcttcttcaggtaggaggtcacgttgtcgaacgtggccttgtagagactgctgaagctggcgtctgcgccggcagagccttccagcatggcccagttcccacgaagaacaccagagactttctttaacacggtgctctcaggaacagactgccactggtcgcccacaggcctgtagagcaccaggggggcttcctggcagtcctggagcacccacagcccctgggtctcctcgaaagccacgtcccacacttggtgctggaacgccagctgctgcctgtacaccaactgctgtctgcgggcgtccagctggaagatgtagaccacaggagtgccgtcgcacaggagcgcacgcagttctcctggcacagaatgcaatcctggacgcggcaacttctggggggctgggggtccacagctctgcaactggcaggtgaagcatgcagctggggcgctctgta

SEQ ID NO: 215443 - DNA, 762 bp, Homo Sapiens
ttttttttttttttttttcagtgtaaggactaaataatttatttttaagacaatttgaacttccattttgttaaattgttcttaattattacttattaataacttcttctttgagtttctctgcaagcaatctcctctttagtaatgtttgcttctcctctgctgtcatttctggtttctctgtcatttcctctacctccccagtgggttttcctttctgctccatattttgtatctgtttagtcctcatatcctttctcatggacatcaacttatctctcttctgcttgagatagtgttctcgttgccgaagttcttctgttccaagtactgataagtttgctattggtccttcaatgctcgcatgctctaagccaggaatcttcaggcctttttgtgggagggaggaagtttcagacctttccacttttcttcccaaaggttctattgactgattagcaaaatgcattttaacttctgagggtgggtgtgcaaaatgttcaccatccccttgggaattattcattattgcagcttcactggaatgcactgtgggctcttctgttttagcctctgataactgttttttcctcttcctttcttcttcctggtcatattcctcttttgattttctaagaacttccctcaggattttcatctcttcgtgttcaaggtcactgaccacatcagagccatcggttaagcagtcaggtaaatacacatttctctcttgaattattcgaatggcttgcagctgcattt

SEQ ID NO: 215444 - DNA, 740 bp, Homo Sapiens
ttttttttttttttttttgggtattgaaccaggaagctttatttacacagtacaagtaacaagcaaattcctgagagactagagcggctggagtgcaagccacagcctgtgcggggaggccaggctgcaggggcgggcagaccctgggccccgggtctacgctttctggtcgccacacttcctgaagcacggcaacacccacaacatccagctcagggaagcccctgcagccccagaaacagcctatgtgctatctgtcgccccagcccccaggacagcttccccacacactgaaaacacaaatcatttgccaaaaagactatgctagaaggtcagactatcctatctaggctacaagatctccacttcggtctgccattaaaaaaaaaaaaaatctttctcttcttttctctttaaagaggcatgacagaggggtttgaccaacagcgtggacatggcaaggtgtggcatcattgccagtgtggggccagagggtgcccgagccccggtgcgcggccagcctgctgcatccctgccggctgacgtctggagtgaccgtcattccagtgaccacccccatagccacagacggcacgtcagtggaaacgggggtgcagcaggcatgacaccaaggcagagcccgcagcagggggcccggggttccacagctagggaagcttgctcagacaggcagcacacccagggcacggccactcacgcccccgcaccaggagacccat

SEQ ID NO: 215445 - DNA, 678 bp, Homo Sapiens
ttttttttttttttttttgccatttctcataagctgaatttttattttagcatttttaatagcaatgccctattaggttattatgagggatttttccagtaagacatatttttcatcccacaaggctgacttttcaaaaatcactgtttacttataaaaatataaaatttttaatctattataaaaggaaatagatttcagcacaattattaaagacaatagagtatttagaaaagttcacattgatcagtattaaaatatacctcactgaaatatacttacttataaaaacatattgcctttgccgtgtgaaaatctggtgtttagttctctagatttttttattagggcttttttctgagcttcatcaaaccgattaaccttgagatctttatcacggtcaaatggtattctctcttgaggcttatttttgtcttcagcagccttactctttaactttttatgatgtatgtccataagagattctgatctttttgattcattgtatgaagatacctgctcagccagtctcttatctcttcctgataatatatgttcttcatctttcttactggatgacttccttgcttcttgtgtttccttagctttcctttccctatcagctggagtatctgtccagattgatcgatctccagatgtgtcatcagctcttctctt

SEQ ID NO: 215446 - DNA, 680 bp, Homo Sapiens
ttttttttttttttttttcgtatattttaacaatgtttattattcatttatccctctatagaaccaccacccacaccgaggagattatttggagtgggtcccaacctagggcctggactctgaaatctaactccccacttccctcattttgtgacttaggtgggggcatggttcagtcagaactggtgtctcctattggatcgtgcagaaggaggacctaggcacacacatatggtggccacacccaggagggttgattggcaggctggaagacaaaagtctcccaataaaggcacttttacctcaaagagggggtgggagttggtctgctgggaatgttgttgttggggtggggaggagttatttcaatggaggagttatttgcagattgcagagagaaatgagggaagttcgcctacaccgggccatctgcggggtcagtgggggctgctgtatgtcttggctgccgaacggggaaggtgacataggcatcatagccaaagaggcacgtagcgattaggcccagtacccctgcgacgattttggagtggtttcctctctcaacaaggacaacaatggaggtgatcaggtagaggattgccgctatgagggttcggaagaaatcactccagggccagttgatgaatggtatcttggtgtgcaggtcacacatgtagaca

SEQ ID NO: 215447 - DNA, 709 bp, Homo Sapiens
  misc_feature (673)..(673): n is a, c, g, or t
ttttttttttttttttttacaaaaaggatttttattaaagagaaatctgtttgggtgggtcagatatgaaatagatttacagaaactttacatcaggtgtctccaagacataaaaggccgcccaggaaaagcaacgcccccttgccaggatgccagtgggaggacggcaggatggcagcccaggccacgtggcgtggaccctgcgtaggaggctgcaggaagctccaggctgcccgacagtcacggcgttccccggaaatgggttccctaggagggagcagcaggcggcgggggttccaggcatgtctgtgctgggctcggagctcgtgcacgcacactgtcctgcttaaactcctagtccatgtctcgtgggacccccaaagccgtcccctaaggaatgtgctctggtacacaaggggaaaacacaccaacccgccccttaccgagacagcgggcgcaccagcctgggccacgtgagcctctgctgagctctttggcacagcacacctgggcctttaacacctgtcacttacaaaagtagacattcctgtagtaaaacttcttaaaaacacctatttctgcaaaataatgtgtttctgtatgtggagctctgcaaatatacatgtcctttgggaagaaagcagcgtggaccgagactgagggctggtccggngacgtctgagtgctgctggaggtcggtcaggcttca

SEQ ID NO: 215448 - DNA, 518 bp, Homo Sapiens
ttttttttttttttttatcagcatgtgaggctttattcacaatccgtgctccaggccctctgcactgggacaggaccacagggctaagcccaggctgggggttcaggcaagagtcctgcccctagtcctgggctggagggcaggtcagctgcacggaggtgggcagggctcctggcccagctcacacgtgctgcttccggtggcgcagcacctctgtgggtgtaaagaggaagtccttcccgcaggcctcgcagtggtagggcctctgcaggacagatgtcttctggagggtttcgagggcagcttcctcagcccctgggggcccatcctgtggggcctgggggcaggtgttctcatgggcgatgcgctccaggggcgtgaggggcgcatgcaggccacagtgggggcaggtccagaaggttcggagacagtcgctgtacaggtctgtgtcattcgtgaggcagttgtaggtgaggaagtcagtgactgcgtagcccccctttgtggggtggggggaa

SEQ ID NO: 215449 - DNA, 735 bp, Homo Sapiens
  misc_feature (669)..(669): n is a, c, g, or t
ttttttttttttttttttggtagtggcaagtgatgtatttggcttaaagaagcttgtgttactgaagttaacgcagaagtctggcctccgtttgtgggattattaaatatatatcctacgggatcagagtcatctattagaaacagtgatagccctgggtataaataaacatttctttagagtttggcgtcagtttttcaatgtccatcctcaaatcagacagtctgtttgaggggtcagttttcagggtgcatctgcaccgagaggcttgaggcagcaatgacccctgggctgcagttcggttgcaggcgctggtggcgggcagtccaggttggagggtggagatgggccaaggtcacagatgctgcagggcttcctgtccttgctctgtgtaaccgtcatcgcggtgggtgtttgcccactgtccaaaggactcctggatgtgcacgtttctctgtgtgttggccaggcgcttcttatctcgggagaagaagctaaacagtcgcttgatgcccgactccggctggggggacgtcctcgggtgggcgatgggtgggggtttggggtattcggttttcctcttccatttcttcactcttatagtaagccagctcctcctgcagcaagaacaccttggacttgagctcgttcctctcgtgcagcacgtcncgcagctcctgcagggtgaaccgggggcggttggggtccttgagatttcatggcacttctctgcgt

SEQ ID NO: 215450 - DNA, 668 bp, Homo Sapiens
  misc_feature (622)..(622): n is a, c, g, or t
  misc_feature (641)..(641): n is a, c, g, or t
ttttttttttttttttttagcattaaatcttttattttgaaacatttttaggtttacaggagagttgcagaaatagtagagagatttcccacatatctttcatccagcttacataaccatggtacatttatcaaaacacagaaattaacattggtataatactattaaccaaactacagacattatttgaattttaccagtttttccactaatatcttttttcttttccagggctaagtccaggatagtacattgcatttagagctgtatcattgctttaaaattcttcacagattcacaatccctcattgcctgccctgggggctgaccactcccagctcccctactccacctgccttggtatacccctgattccactaaacttttgtggtattgggggtaagaagatctaatggcttcaagttagcaatggtgtgttaaaatttttttttttaataaaaacaaaataaaagaagatctaatggttgtgaagtctcatcctttggtgaaaggtgctgttgagcctgatacaatatattcaactgccagagcacagacacttctactttgtctagctggagattctttagccaggtactccttgacagtgactgttaggtangcgacatttgcaaggtttnaagtgctagtgcacagaaatcagaaag

SEQ ID NO: 215451 - DNA, 705 bp, Homo Sapiens
  misc_feature (677)..(677): n is a, c, g, or t
  misc_feature (691)..(691): n is a, c, g, or t
ttttttttttttttttttgccgctgcaggtgcgcgcttgtaattcgctcccggagcccgcaaggagccctttcgcccccgcccgcaggtggaccagatgttccagttcgcctccatcgatgtggcgggcaacctggactacaaggcgctcagctacgtgatcacccacggggaggagaaggaggagtgagacccagccgggtcaataaacctggacgcttggaccctgcctgcgagtctgccggggcgggagggcgcgtcggtggctgctgggccttgcgcacggggagtcgctcggtggcaggctgggtgggggctcccgggccctctggggtcctctagcgaggcccccctcgccgtgcactccggagtcgccgtgctgggccccaggaccccagcccttcctgctccccctcggtccacacccggccctgagtctgcgccgcccacggcgttacgggtggaggggggctccccagactcggcctgcaggcgccggtatggggtgtggaagaagaccgccaggatgcagctgaagaaggtgcacaggccggccatcagcagcagagacactgtccagtcaagtggatcctccccctgctggcaggtggacaaggacggctccgagcgtcgcacagtcagtgccgtcattgccagcatgatgagtattccctcggnctgccccagcacanagatcatgcctgtg

SEQ ID NO: 215452 - DNA, 613 bp, Homo Sapiens
  misc_feature (449)..(449): n is a, c, g, or t
  misc_feature (593)..(593): n is a, c, g, or t
  misc_feature (602)..(602): n is a, c, g, or t
ttttttttttttttttttgatgcaaaatatttattccaagttagttattttatgcagtagtttccccctcgagacttgtgataaccacatcttttaaatctgtaaataatgttatcaaaataatcttaatctttgaaatctcacaaaaatttatattttacaatccaccctgaatatcaaggctgcaagaataacacaacatttcctatatccaaatattttacagctgtacccaaaaaggaaaaagaaaaaaaaaacaaaaacaaaaaaacaaccaaaaaaacccacatatgcttggttaagggctaaagttacccgagcagccaaaaataaaataaaatatccaaattattagcattaatttaatacaattataacttcaatagtcactttgtcattgacaatgattgcttgatcacaggggtgagtgccccaagggctggtagtanaagctgttgctgcagaccagtgtctcctcttccctgcactgccagctcctacctgtgcatcgccccatatatactgggtgtgtatgtgtgtgtgtgtatgagtgtgtttaaaaaatctgtcccaccacacaaacttctctctantaagcagantacagggaaga

SEQ ID NO: 215453 - DNA, 686 bp, Homo Sapiens
ttttttttttttttttttaggaacaaaatttattccaatttaaaacagagttcatttcaggagaaagatatgaaaagtcgacttccatcggtgtctggattaagggtcagggccggtggctgtgggaggtgacactgagccgctcctcagcccctcctcccatccccaacgcgcacaacacatgcatttcaaatggtaaaaggcttaaaaacagcttgtatagaatattcttttttaaatagattaaggttgaaattgtctgaaatcaggactgtgtaatatacaagtatcactgggtcccgtccgccaggccggccacaggatctgctgccaccactgggggacattggcacggggatgcctccctgggggagccgagggacccagggcatgggtttgcagtggccgggggctgctgccgcccgggcgtaacatggtcggagaaggtggtcggcactcacgagaaatcgttggcaggtgagattcaccaaggtaaaaacacacaccccacatgcccacgtggccccacacgtggcaagggtgggggttggctgtccttgcccctgggtgccactggcacgagaaccactgcctgggactctcctggggcaggcacccctgccctgggcctgcaacactacctctgcttttttggggggcaggggatcaggcactcagacccagag

SEQ ID NO: 215454 - DNA, 781 bp, Homo Sapiens
  misc_feature (761)..(761): n is a, c, g, or t
ttttttttttttttttttcaattctacaaatatttattttgtcattactgagtgcaaagtatcagggaagtgtagctgtggaataccaatgcttaagagaccacagagttcttgaaacccacgattcttcttcaaatccagatgtgtgtgagccccacctcatcaactctgaaggctgaaggatcagctggaatttctgctgcagggtgtccctgataagctcaaaagcatcagaacggagggagctttctccccttctctcatctcattaaaatgagctttcttgttgtggggggttggggagggacctttaaaaccaaacaatggtgccctcttatcatcttttcctgtcctcctttctccaagtttccagaggggaaaataaaaccaaacaaacccctcagcattgtgctctcctgacctctaagctcttctcatataaagtgtactgttagccttctgtatcccagcctaatcacacttccctttcccttccacacttgtggacttcacagatttctctggacgtttctctggagatttctcagttcttcctcttccaaagctcttttttcttctcccaagtttctccacagtcttgctgaatccctttactcaaggcttttacacagggttaaatttgggtgggtggttttattttttttttaaccaccatatatacatcttgggttgtacttatttattactgtgcaacacctctgctcctttctagatttagtgcatagaaaggattactttanctacatttgggacttgacta

SEQ ID NO: 215455 - DNA, 679 bp, Homo Sapiens
ttttttttttttttttttgcttttttcctccaataaacatttatttaaaaagaaaggagttaacactgaaaggcataacgtgccacgtactatgttaagacagtggagctaataccacctgtcctggaagatcagagttgactaacatgtaaaacaaatgttgtctaggaacttattttatgattctcacacactaatctatttgatgcccaatattttcagttgtgtgaatagtgtgagttgatatctgcttcccctgaagatggtttctgaattaatttatgggacagactgagagtcagatatagttctgggaggaaagagaatacaggttaaagggagtctgcttgacttctctttgagaaagactgactgaatacctactacagttgacattcacttagccccaccctctcttacacctacaaacccatacttagagctttcacagaatacaaggagcatccaatatcttttctttttaaaaatttttgtatttccttgcagctccagctcaaaagaatatgtaataccttttaaagaaacaaaatgtataaaacttattcagtctttcatatgattttattttcttccttcgaccataataatatgatatccaaattttgtcttaaccggtgggtctgtaaacacaggcttatccatcccacttacaggcaag

SEQ ID NO: 215456 - DNA, 708 bp, Homo Sapiens
  misc_feature (601)..(601): n is a, c, g, or t
tttttttttttttttcttggtgccacaaaaatgattttattttgaaccagaaaggaacagcaatcaagacaatagtcagggccgagggcttggcagtgtgacttaagtaccggggattgaatttgtccaggtgcaaggagtgacataaagagaatcaatttttcatgtccaagccaagctgatacagatgatgatacttatcagtgattcccatttacacaggcttggattgcttttcagatatcagatttttggaactattttataaatatttttaaaggtgatggagccactggagtgtaggtgaattggtgcccctccccttttctttttgggtgtatcaagcatataatcaatgacaggaaaagtgaaaggtttttatgagagttttgcattaaaagaaaaccaacgatcaagtttctacactgcagcactgttgatatttgagcaagacaactcttcgtggtcgggggctgcgcttgcactgtaggatgtttaacggcgtccatgacctctacgcactagatgctggtagcttcccttccccggctgcgacaaccaaaagttgccattgcattgccaaatgtctcctggggggcanaatcgagcactggttgagaagcgctgttttcaaaaacatcctcctgcccccatcattgtcttggtgtgctttttaccattttattaagatagaccagatggtcaact

SEQ ID NO: 215457 - DNA, 750 bp, Homo Sapiens
  misc_feature (652)..(652): n is a, c, g, or t
  misc_feature (720)..(720): n is a, c, g, or t
ttttttttttttttttgtatacagaaattttattcaattttaaaagaaaatgaggactttagacaaagctttaccctataacaaagcaaatctgtccagctttaaaccaaattctgagagtagccaacttctattttcagcagctggcaagagcaccctcaatgagttctactgacatttctattttcttcatcccatatggtataaaacaaaaccaatctagactccttgataagctttatgtggtcatttgagttttacaaatggtttctctaatggtatgccaaaatcatttatgtgttctctccagatagctttactgtaacatacagcaatgtttatcctggtgagtgagtcttctgtaaacagtcaaccaatgctctatgttatggaaaccaagctatatgcaattgaaacaatccacaggttctaacctggaaatactaggaaaacaatctggatgcattaatcacagcaatatgaagatctaccctataaaaaatgatgtgaatggctaccctaatacaagttttacttttcttgaacctataggcctgtcatttaagtcaatgacagcagctgtggcttcatcccgagactcaaaggccaccatggcttcacctgtgggcatacctttttcattgtattttanacacactgagcctgggattacttgatagccataaaagaaatctaaaatctcatcaatagacacagtanagggcatgttttgcactttaattactgtcg

SEQ ID NO: 215458 - DNA, 702 bp, Homo Sapiens
  misc_feature (687)..(687): n is a, c, g, or t
ttttttttttttttttttagcaataaggtcttatcatgcctaggctggtctcgaactcctggactcatgcaatcctaatgccttggccttccagtgctgggattacaggcgtgagccactgcacccagcttgaagatggcagttttcttgtatgctcacacagcacaaagtgacctcgctctagttccttccttttcttataaggactcgatctcatcggcgagccccaccctcacgatctcacctaagcctagtcacctcccaaaggccccacctcctaataccaccctcctgggggtcagggtttcaacatataaactttggggggggacacaaacatgcagtccttaacaccatcgtcatggagatggaggccacagacctaccaacacccataacctcaagggcactggtggggacagaggggtcttacccagcactgccatgtggcagaagttctccaacattatgtctctgtagaggcctccaggcagcacttaggaattgccaactcctctggtgaggtcactaccacatcctcaaggcccacagtctcctgaaacaacagaactttgctgcttcatggaggagcgtcagtatgtccacaccataggggtgtagtcacttccctctgccagggagaatggtggaggaagaatggattcctagtgtattttttctcttcangactgacagcccatc

SEQ ID NO: 215459 - DNA, 736 bp, Homo Sapiens
  misc_feature (653)..(653): n is a, c, g, or t
ttttttttttttttttttggtagtcaacaattggtcacattgcacatttcaaggttacagaggcccaccatacacatgcggggcaggaggagataaatcttgcttggggctaaacaataaagctacagcgagtgttccagaagttgaccacatctggaagcaagaagacagactctggaagaagcaccctagagactccaggaacccccttcactcctgggctttcgggactctacagcgtggggcctctttctcagacatcgaaaggcctccttttctggaccacagtggagcgatgtgcaggtcatcggctaagctgggcgggtcggggagggcagggggagtacagttccttcggatcccagcaaaggtagactatcaatggccaagggttcagaggcaggaaaaaaggccgtttctggggggttggctggggacactccccttcccttctctctccgattaaatataaaagccgatgatgatgaagattgaaaagatgaggaaaatggcagccgtgtctcgggtatcctcccagcggaggcctttcatggaccgatactcctgccgtttgcgaagggcctcccgccgggccctcaggcgccgttcccgctccagttgttccccatagtgggcctggtagaaggcgtcanagttgaacatcgtgggcggcggggtacgcggcgagccggggtcgggtgcgggcgtcctggagggccggacgccaggtccgcgc

SEQ ID NO: 215460 - DNA, 773 bp, Homo Sapiens
  misc_feature (597)..(597): n is a, c, g, or t
  misc_feature (686)..(686): n is a, c, g, or t
  misc_feature (751)..(751): n is a, c, g, or t
  misc_feature (758)..(758): n is a, c, g, or t
ttttttttttttttttttggagtctgatgatctttatttcttagacagccctggactggggctatgaaacacagtcaccagcactatactcactcctagggtggctctgtctgtggcgttcctcaccatccccgggactcatagctcagtgccaccccccgacaccatgccctccagggggaggggacagcgaaggggagaggagggagagccctgcgcctggccctgtcctgagtccaaagattcccatggtgatcagagggcggtgttgggaatgtgggacacccttggccccgcctccctgacctccccactaccccaccaaaccagccttccttcctcctggcacttccagtgtccattcccggcagtgcaaatgtgttaggtggggtagggggtgggatagggagataaatagcagcctggcgttggcactggctggtgctctgtggtgggtatgagtaggggacggggccgccttcctggagacaagctcctgggtgctgtgatcagaagggtctgtagctccagtagctggagaacacggagatcttgtccttgagctgctggcagagctgcagggagacggtgaagtanaccagggcgtcgttgagccaggggatcacgcactccactttgtgcacgtggctcacctccaggcgctgagagccccactcgaacatggncccagggctatgcagcaccgcgcccccagctgggcgggagttcttggtggagttgggctgcaggncatgcanctggtacaccgtgag

SEQ ID NO: 215461 - DNA, 720 bp, Homo Sapiens
ttttttttttttttttttcatgtggcatatttaccaatgtcatgtattctgaacaaaggcaaaaaatacaaattcctaccattaaactggcttggttgttgtttgggttggagtagctgtgggggcttggggaagggtgtcgtttctttctagtagtctcatgtcgctttaggtcagctgggctggcttacacgcgctgtgcggtcttcatggagatgggagctctgtgtgtcagcacaggaagtggtctcccagcgttcagcctgaagcagcccaagtcctgtaggtgcttgccgtctctgaagccccaggaacatcagtgcaagaaggaagagactgctggcaaagatgactcccaaggctgttctccgctctggtgggacaacctgggtgctggccccaaggggctcctccagagagatgtgtgtgacctggcaggtgtaagtggcacctgcagagccaggttctgcggtgagagaggaggagatgctgtaggtgcctgccacgctttgcctgaggctggagaaggaggcaccagagacttgggctggggatccacccagctcctctcgggtccacgtcaccaccacatccagagggtaatagccagcaatgtcgcagatgagggtgggcagcagagcttcgtttgccaagctcagtcgtactttaggggaagcttggatgttgagctggatgatctgctgagctcggtacagagag

SEQ ID NO: 215462 - DNA, 711 bp, Homo Sapiens
  misc_feature (678)..(678): n is a, c, g, or t
ttttttttttttttttttaatccccagctcatatttatttgggcacagagtgggcactcaaatatctgatgaacttgatgaactgaaaagaggtctccttaaacaagatatcatctcccgaagagagaagtcccaaccatataaaatgtatgatcaagtcccagaaaactttgccttcccaaggaatgtgtttctaatttggtttcaaagcacactggttcccacttttaccactttcatgacattggacaatagtactactcttttctacttttcttccagacctggggacttgatattctcttagcctcatatcatctttgcaaggagttcacagagaggattattctccatcttacaaatagaactgaggcccagaaggaaatcccttagtgtctttttgatggaacacagttctgtgatgggaagctatcccagtctcccatccttgcaaaactgctgcttagtactcaggtgttctctaggttgttctggaacatttacaaacttctttgggtgtgaggatgtgctgccacaaggccaaaaatcacattctctctctctctcctctcctctctaccattctcctcagtgccaggtggggacagattccacccactgggcctgggaggaagaaaagaccttggccactagtcagggaggagtcacagccagcangaagagagagacctaagtagacaagagtagttt

SEQ ID NO: 215463 - DNA, 670 bp, Homo Sapiens
ttttttttttttttttctgtcgccacagcagcggacacgtttaatggcaggcgcctctacagttacaagacatgcctgaggtcagttcgcccccttagggggcactccccgagctaaacacagatgacagcgacccagggtgctggaggcccggggtcacctgaggactgcagaagtcctgcgctccgctaactgtgtggacacgcggctgccaggggcacaggtaggcaacatggatgggaagagagcccaggccgcccccgtctcacagctgcagagcacgcagaccacggcactgcaggccaaccaggcagagctgctggtgcgacacatcctggggctgggctggtcggggagaagctctcccgctgacgctgcctgggcctgcccctgcagggcccgggaaccgagcccaggcctctgtttctctgagaggctggagcagagcccttggtggccctggaaagcggctgcaaggtggccttagtcaggggaggcacgcgggcgtcgcgtccagaatcttctgggctatggaggtgagtgcagcgaaggcggggctcccggggaactcctggatgaagtcgtggccctcctccagggtcctcatgagcgcagggtccaggggcacggagcctaagaagggcaccccggcgagctgggccagctcctc

SEQ ID NO: 215464 - DNA, 550 bp, Homo Sapiens
tcaattgttttcctttccttttggggcttttttctatttaagtctgctgttttgctgactgttttgcctttgcacttgcagattctaatatggaaccaaaccaagagagaaacagagaattttattatccaaagctgttgtaagtgatttaatagtcagagatagtggctaaaaacgtgctctctggaaccccagattccaaatccctcatgataatgtagccatgacagccacatcatcatagcaggcatctttaatatgcgccagtctcatctcttcaggaccttgtccttagaccacaccattaatgggtgtttggttctcaataatgattacaggtaagattaggcaatcatttgaaactcagatgaatactttcataccttggtcttacaaaatgggatgtttctaaaagagagatagagattcattctgggaaaacatttaaataattttttttaagtttggatactttagattttcatactcatttttgaaaataatcaccatgtttttctcagtcattagctaccaccgatgggtcatacta

SEQ ID NO: 215465 - DNA, 461 bp, Homo Sapiens
  misc_feature (353)..(353): n is a, c, g, or t
  misc_feature (444)..(444): n is a, c, g, or t
tgtgcagacctccctgatcagtgttacatataatggataaaacaccactgtggaaaaatataatatgcttatctataaaatataaccctagcgtttttaattttgagaaatcgacacagattttgactgaatatatgtttggatttgcccaggccaaacatgcatatgatgcaaccccaccctacatttatgtggcacgaagggaaagtatgatgaaaggagacgaagaaagggattggaggccacagcccagtgccagtaacacagcagggttagggggtgtgatggatgcctagggtatctgcttgcttcctctgcagaggatcaaacctattgtggaggatgtggctcangcagcacatcatgactgaaaatggggaagactcagggtccactcagagccattagaccagtcccagaactttccccaatactggttaaaanaaaaaaaaaaaaaatca

SEQ ID NO: 215466 - DNA, 587 bp, Homo Sapiens
  misc_feature (503)..(503): n is a, c, g, or t
ggtgaaaaccacttagaaatcgaatacgtccatttctttgtaaaataacaataacgttaaaggcaaaagcaagattctgtaaaccaacattggaaaaggggacacagggaggggcagagggaaagggccagattttcaacggtttcctccacatctgcagacaaaggcccgcctactctttctattcctacacagtcattttcactctgagtgctaacaggcggttgccttatgaaatattcatgtgtcaaatattcaatgtacactataaacggttcttctcttgctgagtcttgagtgaaaacaatttagtagaaagaaaatccaatattccttcctgaagcctcacttaatagacacgggcacctgaagggaaggcagccttccagtttgagaagcctaggtctcatggtctagcgcagtggttctcaacacaggacgattttgtcttgtaaaggaggtgtggcaatgtctggagacacgttttgattgtcatgactcanggtggtgatgggtagaatctcacgaggggatgctgctgaggcatgctgttaaatatcctacaatgcagaggacagtccccacaa

SEQ ID NO: 215467 - DNA, 412 bp, Homo Sapiens
catgaaggaggaaaaacatttaattttaacttaaaggaaacagagccttcatagcaactaaaccactatacaatatgctggtaatgaaataatatttatgacatatcatctgtgaaacagatgtgacaaaatggaaacaaacgtattgagtatgttatcagaagcttttaaaatgctgttttcatcacgtgactttctataacaggaataagaaaaaccagatagtgtgcatgttctaaataatatgttaatttctgtactattcctgtaagaatgaaactgatcttgatgaggaaagatagacatctgaacattggtcctgttacctctttgggtccagttgttccagaaaggaagctgagctctggcagtgtgcgcgtagaataccctcatgtcttgaggtgcaagcagg

SEQ ID NO: 215468 - DNA, 485 bp, Homo Sapiens
  misc_feature (386)..(386): n is a, c, g, or t
gagatggagtcttgctgtgtcacccaggctagactgcagtggtgcaatctcagctcactgcaacctccgtctcctgggttccagcgattctcccgcctcagcctcccaagtagctaggaccacaggcgcccgccaccacgcccagctaatttttgcatttttagtagaaatgggatttcaccatgttggccaggctggtcgtgaactcctgacctcatgatccacttgccttggcctcccaaagcgatgggatcacaggcgtgagccaccgcacctggtccacttcagatatttagatacagacggcaaatttatttaaatgtctcaatacatttaaatgtagttacctaaatatatctaatatatttaaatgcagagagcaaatntgcgtttacaaatctgacatggaattcaactgtgctagccaagattcggtgtagcttaccagccagaaatcacataccctaacaggtaaaaatgcattg

SEQ ID NO: 215469 - DNA, 502 bp, Homo Sapiens
tttttttttttttttttttttttaccacactttgatgaatgttcaagttgttaacaagggggggctagtgaaaggccttctcacactcacaacactctaggaggaagccaataatgttgagaaaagtgtgtgctgtgactaaaggtttctcaacagtgatcgcactcaacagttttctcttgagaatggagttgataatgttgagtgaggtatgagggtcggccgaaacatttcccacatagctgacactggtaaggcctctcttgagtgtgagttctataatgctgaatgagatatgaattccgactgaagactctgccacagtcacaacactggcaggctctctctccaacgtagtcatgtttccgctgataacgaattaagtatgtcttgctgtgggacaacccaggaggaaggactcttgctgcctcatgggctttgaatgttgaagaagatgcacattctggagaaaagctttgccgcactgaaaacattcaaagtg

SEQ ID NO: 215470 - DNA, 465 bp, Homo Sapiens
ttaagattgaatgcacaaaatgcttttattactctaagcaaataaatcaatcaaatcacatttcccattagacagcacctcagctcctctatacatacagcagttcgctggattgaatacacaatgaacaactgaaaatgatcaatttccatcattctgataacacgggcaaaaaattcaaactctctgttagaatacaggtactagtaatcaaaaagaaaatttcttgatatctcccactagcattttcagatttagaatttaaccatgaagtacatatctagaactaatgacagaaaatcgcattttaaaataatattacagttcttctgtaaacctcagagtgatttctgtgtggggaacttgctgaccagaaaattaaatgagaattttgtacatcctcagatagccaaatagagttaaagggccactcccacaccacccccttcaaaaaaaaaaaaacat

SEQ ID NO: 215471 - DNA, 833 bp, Homo Sapiens
  misc_feature (586)..(586): n is a, c, g, or t
  misc_feature (610)..(611): n is a, c, g, or t
  misc_feature (641)..(641): n is a, c, g, or t
  misc_feature (706)..(706): n is a, c, g, or t
  misc_feature (744)..(744): n is a, c, g, or t
  misc_feature (760)..(760): n is a, c, g, or t
  misc_feature (763)..(763): n is a, c, g, or t
  misc_feature (776)..(776): n is a, c, g, or t
  misc_feature (811)..(811): n is a, c, g, or t
  misc_feature (822)..(822): n is a, c, g, or t
ggtttttggttttcttgccgtggtgcaaaactgtagaaagttgcttattcactggccttggttccattgaagtctgcgtctcgagtgtccgtttcctcctcagaaccatctgcattttcaataactctacgtcctccagaccttctagaaggaacgaaagaggtctcgtttcctcgcctggtgcatcactgcgaagtttcctgtggggggggccctctgagcttgctcttagtgcgttcacctcgcggcccatggcctcgttgctctccgtggcctcatccagctcccgctgcagcttcctgcggttggcgttgatgcgctgggactcctcctctgcctcctccagctgcctcttgagctgcttgaccctggcattgcctttctctgcctgctccttgtactgctcggccatcttgcgctcgtcctccacctgcagcaagatttccttcagcttcttgtctttctgcttcagcgacttggtggccgcctgtttctctctggcctcctgctcgacctgctcctccagctgtgcaatcttggcctccagcgccgcgatggtggacttgaacttggacttgacggcccnctccatctcgtggagcttgctccnngagctcttttgtctgcgctcgagctgctgncgggcactctcattcttctaggccgtgctgcgctctgtggccagctcagtgctgagctgctcggncctgtgtgtagctttgcggaccccgtcgctcatggccnctcatgtgccctgctnctncatcagctctctncagctggcgatccgggccctcagcgcgctctcgtnctggatgcgtnctttccgacag

SEQ ID NO: 215472 - DNA, 517 bp, Homo Sapiens
tttacttttaaaaaaatgtcattaaagcctatccactattgttgatattgccttctttgataacccatagaatattttgatagccactcatagggagttttctaaaataaattcatattaattttaatctcagtaaaggtgagtcattggcaaatattaataattaattgctatactttttcaaaacttctcagataagaaaaaaatgcgtttgacataaaaggcatttggcagattgggattctttctgtttgctttttcttttcttttctttttttttttttttccaattctttctacaaacagcatcaaggaaaaggcagaactgtactcctgaggcttctggaacagtcgacccataaattctctagagtagagtttcttaccgggtgtgcaggcatctgaagagttcccgaaaaatactcatgtctggaagctactcccatagattttagatgtattatgcagctaggtattggaataaagcaaaaataaccacagaaagtctgagacattg

SEQ ID NO: 215473 - DNA, 467 bp, Homo Sapiens
ttttttttttttttactttataaagatatttatgatgttttcttttctttttacagtacgcattgcatttataattggagatacaaaaaaaggtgactgttactgtttgacagcaaggcagtagtattatcttcatcaatatttgcaacttcattcgcaggaacccgtcaagttctatatcacaagaaaggcgctgcagacggtgacattttcacgaaggagccacagcccgcatcaccccctgaaagctctgaagttgcgcacgggtgggtcacgcagcaggtggatgtctcagttcccatagagtttagcagagcaggcggctccctgggctggaagaggtgcgatgctctggaaaccccccgcgggtgtgtatgtgagaggacaccgagatgtgcagtgggctgtgcagtgaggaccagacacctccgatttgagcaagggaggtgcacttcgcagggtcccac

SEQ ID NO: 215474 - DNA, 467 bp, Homo Sapiens
  misc_feature (331)..(331): n is a, c, g, or t
aaaggaaaactgtaacttctttaataatacattattcaaattcaaagatgatagcacattttgagattcagattggtaatgtatctttgattacactttgcaaatgtatttgacaattaaccatatactactactttttattactgaggtaggaggcaggactagactctggaggtggggattgggctccagaccacactgaagacaagctgaaagggaagaggtgaaagagtctctccataaaacacactcaccagtgccacgtcaggttaccattgctaaggcaacagctggaagttttggctcctttccatagcaacaatcccacgancctgaagttacgaccttttttctagaaattttggcataatccacccctaaatttgcatatagtttaaagtgggtattaatgtgattgcagtactgcttccgagctgctactctgggcacactgcctattgggagcc

SEQ ID NO: 215475 - DNA, 421 bp, Homo Sapiens
  misc_feature (337)..(337): n is a, c, g, or t
  misc_feature (359)..(359): n is a, c, g, or t
acttttaacatatttattgagcatcttttatgtgtcaggcactgttctcagcattgaggcaatggaatggatgaataaatgcacagcaagtgaaaatcaacaggcttttctttccagcccagcacatgaacttggtgatgtccatggtctcctccaaggccttgtttccatatgctgagactttccactttgtctcaagtatctgaacttggtccttgacttataatccccgtctcagggcaagagaacttggaagaaatgtggaaattgatgaggttctctcccacaaggatgtacgacacaccatagccgtcatcagcaaccggtcccaagcccnctccgctgacacgtactttggnttattcttcaagtcaaacagctccacttgctgctgaagggtctggctttggtgatatctcca

SEQ ID NO: 215476 - DNA, 501 bp, Homo Sapiens; identical to SEQ ID NO: 58955
  misc_feature (496)..(496): n is a, c, g, or t

SEQ ID NO: 215477 - DNA, 436 bp, Homo Sapiens; identical to SEQ ID NO: 148253

SEQ ID NO: 215478 - DNA, 476 bp, Homo Sapiens
  misc_feature (428)..(428): n is a, c, g, or t
gctatacttattattacagttttattttaaaggatacacatagggcaaagtctgggagagtccaggacaagagcttctcccaatacagtcaggctatgacacgctctcggcacattgatgtattctccggccaggaagctcccccaagtctccatgagcagagtttttattggagttttattacttaggcatgattgattaaatcattggtcacataactgaactcaatctccaaactttcccgccctagagggcaagtggctgaaagttctaacccctctaatcctattcctggtctttttggagggcagttcccatcctaaagctatctaatggcccacagtgagtcatctaatcagtaaaacaaaaccattcccatcacacagaaaactccaagcgttttgaagctatttttagggaaccacagnacaactactttcgtttttcttttttttaagagacagagtcttgctctg

SEQ ID NO: 215479 - DNA, 466 bp, Homo Sapiens; identical to SEQ ID NO: 61947
  misc_feature (283)..(283): n is a, c, g, or t

SEQ ID NO: 215480 - DNA, 500 bp, Homo Sapiens
tttttttgcggctgtaatgtgcaatgatgtgttttattttccttgatgcttaacattactaacaattgcaaaaataatactgaggagcactactttgcattgtttgtagttggagttttggatactgatcataaatcatgaatctggcgtattaatgcttaacttcagcgcttttgggttgtgtgtatgtgtattttttctccccccaccccgcccttttttttttaagaataaggacaagtgcttacaatctgctcaagcaattgtttttcagatattggaattcagcaaagagtgacctctctggccattctaaaactttaatgttgtgtcctaaatctggtggaggaaaagcatgcgctgttgaaccaagctgctcactggacacatatttgtgtccccaggagattatttgtcaggcactgttttttatttgtttgtttgttcatttattgttgttttactgctattggcgataacatgaaatgtgatacagctat

SEQ ID NO: 215481 - DNA, 416 bp, Homo Sapiens; identical to SEQ ID NO: 57822
  misc_feature (394)..(394): n is a, c, g, or t

SEQ ID NO: 215482 - DNA, 400 bp, Homo Sapiens
aatagcctactgtttttatttgtggaagggttggtcttataggaactattctgccagtagcagaagtggaaactcagatttccatattttagaaagtattctaaaggagtgttgagaatggatctgaaatgagactagggatagagaaaccagtcaggatatatagcagccacccagggaaaaggtaatgagagttcacagaacagcagcaatcaagtgcaatgaaagtttgtatttgcaagctccagactcttaaattccaactctgcagtaaaatagctaaaaacagtctgaactaaaatatcaagagtttttggatagagatgtaggttgtggtgagaggggaggcaatgatcttgagtggtattttcctatgaagtgtgagaagggaagtggacca

SEQ ID NO: 215483 - DNA, 557 bp, Homo Sapiens
  misc_feature (535)..(535): n is a, c, g, or t
gaaaaaataatttaattacaagtagttgtttttgaaataattttttaaaattacaaacaaaaaaatcaacccattcctaaaatcgattaacccacaaacataatagaaagcactttgaaagatatacctctaaacactctaaaatgtgtgcattctcacatgaatgaaatattttaactgaactggacaggttatttctgggaatctttcttcctcaaaattagaacagaaaaacagtaaagcgaagacacacacgtgcgtgcgcgtgcacgcaacccaaagcaaaacccattccaccactggaaatattccagacgggattgcctgagccattatttgtttcaaattagtgatgtatttatagtacctgatatactctggcttacagccaattttatagaaaaaaatccatttataagtgattcaaataaattatgattccttaatataacggaaatatactatgtaagcattaaaaatgtagttgtctagatacattaaaaaatggaaaaatgccaaagagaccaagtaaaanaaaacaaggtgcaactcatctg

SEQ ID NO: 215484 - DNA, 518 bp, Homo Sapiens; identical to SEQ ID NO: 60140

SEQ ID NO: 215485 - DNA, 476 bp, Homo Sapiens
gaatgagacattcttcttttattaaaataaaacccatccaccaccccaaggttattccagaaggaaactctccaccaatagtggtggcactagacatatactgagagacccccaagagggaagtgaagccatgggggcatctggggctacatggtctatctcgctacacaaggaggccctttacaaggctagctgccattttctaccaagacagaaggacaggaaccttccaaacagggcagcctgcaggccctgcaccttcaggccccattctcagacacctgtacaaccccttaagccagacggactcacagctgtctctggaaagttcttcgttacctgactctttagacacagggttggctggaggggcctctccctcatcttgtacatcttatgaagccccttaccacccactgtgttgctgtcccactcagctgaaggggctggccagtcccgcataaaccctccagctc

SEQ ID NO: 215486 - DNA, 399 bp, Homo Sapiens
  misc_feature (380)..(380): n is a, c, g, or t
ctaactgaattcatcataccaagttcctcagtgattcaaccttcctggtataatagaaacaaacacaatagcttcctcccataaaacgttaactactaaggtctcatgcaattcagttttttaaaaaatacaataaagaagctatacaatgtcagcacatgaataaatcaccatagcattatttagctatgaagtgcttgtaagattctccccggggcctgaaagcttaaggagatgaataactcctctcttctcaggcccagttccaaggtgcaacttggggcagcaacttgcgccagcaagacagcagaaggaggaagagagtccgcctgaagacaagtactcctaaagactgagaaagaggccatccgggtacaacnatagcagtacgtcagacta

SEQ ID NO: 215487 - DNA, 566 bp, Homo Sapiens
  misc_feature (560)..(560): n is a, c, g, or t
gacggttcatatctttattttgttacttgattcccagtcttacaatagctcttctcagattattctcaactttacaagataatttggagttactgcttttcaaaatcctttggtaattgcttgtgcctaaatcatgccaccttattccatgggatccattaatatttgggtaactagacaagggtatttagcaatccagggatgcagatgctgtgaaatgggttttcacagatacggagctgcagcttaacgttatcttcagagagacagaaagcggagtcaatttaaacttcatagttggctgagaatccagctgtgttggctcagtcagagaatgcaatggaaggttggactgaaatcatctgataccatccacgaagggggtctagagactcattatcattttctaaattttttgccaaagggaagttcagttccatatctcttgcttttctttttgcttatcttgtttttctacacacctcactggctgctccttctcagcctcctttgataattcctctgcacctcccagatctttaaacacgggtatgtttcangactca

SEQ ID NO: 215488 - DNA, 539 bp, Homo Sapiens
ctttttgctttcttatttatttgttgatgttgttaagggtttaacaaagccttcttcataaactttcaaaatagcttcacatacaaatctgtattgactaggtgtttggatcatcatggctcgctgatctctcattgttcttacaatatctagtggataaactggctgattgcattcaatgagacacatggctgtttccatagtaataagaaccccagttcttccgattccagcactgcaatggacaacaacgggttcttccttgccagccctcttgtttcgtacatgacaaacaaaatctagaaagtcactcgaatcatcagggactccatggtcaggccaggctatgtactggatctgagtgagtggacgactttcatttttctcttggttaaatagggtcatcttcctgaagatataggcagtgtttccttcttcagagtggcaggtaacttggtagcatccataagatgaactgcctgtggttctggccaattatggtgacatttaaactctgcacgttcaacctgtgtgtcaac

SEQ ID NO: 215489 - DNA, 499 bp, Homo Sapiens
acacaaatcacattttattgcaggaatatttcaagtgccatcaaatatttatagaagggttaaaaaaatagaagtctctctaaagtggtccagacaaggctttgtatagaataaatctttttttccccatcttctagttttgatttaagtattttgaatacattttcttttccattgacacttagtagcctagaagcggtccgacgcacacacatcatacacatgcaaatcacacacacacacacacacacacacacacacacacactccttcctcacctgaccctcagcccacccccatacgctcacagataactgggtatccacactataaagaacaaccaaacttagaagcagtgtcttaagtcatgtttttcttaagttagaaagggtgaattaggatgctgaagactttaaaaaaaaatccatagctttaatacacgttaagatgctgaacactgtaaaaaaaaatccgtagctgtaacacaatttgcaaactg

SEQ ID NO: 215490 - DNA, 441 bp, Homo Sapiens
  misc_feature (425)..(425): n is a, c, g, or t
taaatcaacaaatggtgtatataaaaatcccctaatcagacgattggagaaaaatcaaaactcccatgaaatgaaatgatgccaggtcacagctgagagtagctgcaaagagctgaaggccaacttggactaggcgttctcacctgaaggctctctaccacaggcacaggagtgactggggcaaggacagggcccattccctcataaaatgtatactctgccttatctgtgctaatgattgtccaggaagcgccatcatttatcatctctttatttggttcttttggacatggagtggcctaataaagaaagaagtttagaaactaagttttatacagtttgtattaataggataagaaaattttaccaagtaaccctcagacaagagttaataagaagataactcagtaaaaacttataaactntctaaagcatggtgct

SEQ ID NO: 215491 - DNA, 560 bp, Homo Sapiens
  misc_feature (318)..(318): n is a, c, g, or t
ttttctggcttctgtttattgcggctgacacgacacctgcgacacccgcggtccttccacccagaccctcgaccccagaggcagccaggccggcaggccaagggtgcccaggcccaggccaccctcaccacgtgcttctctgagagcgcggagcccaggcgcgtcttctgctcccggggtcccgggcggggtgggccctgtgcccccaccttcacccctaaggccggtccagcagggcgtggacgacagcagcgatgtaggggagggccccttcccggggccccctcctcttccaggatgtggtggggctggcacagngactcctcaggcacccccatttttcgacaggcttctagaaaactctccacattcttccgagccttgagggcactgagttttggcacagcaggggagggcacatggatgaagggcacggagcgcggccgtagctggttggccagctggcacaggatgaccccactggccagagcctcgggcaggtcctcaggcaggggccgctgcagccgggactcaaggaccctgcgcagctgagtcataag

SEQ ID NO: 215492 - DNA, 538 bp, Homo Sapiens
gatttcacaggttcattatattcacaatgctcctttctcataaggcatttcacattattatgacagtcaaaattatgttctaaacactttccaaataagtcatactcatagagattgtgtctggaagggaaaaaatcagagttcagaggaaatacatttgcaaatttcttttgacattcattgcctttttcttcagtcagtgttttctggaatttaacttcaacttgtctcaaaagtctgtcctggtttttctgatgctcatcaactccccatatttctccttgccagtgtctccttaatacttcttcctccatcacccatggttcttcttcttgctccaatttgaaaatcacatcaggtttggtgaacggatagcctactgtgattaagttgttatagttttctagcatcacattccggtacagttttctctgagcaggatccaatctcttccactcctcctgagtgaagtcgatagccacatctttgaatgttactgttccctgggactcagtcatttcctcttctttctgggaag

SEQ ID NO: 215493 - DNA, 477 bp, Homo Sapiens
ttttttttaattaacttgactttattgatagttacagcacaatttattaattaacttgactttattgatagttacagcacaatctgtccaaaaccaccagaatatacattcttttcaagagctcaaatggaacatttaccacaaaagaccatattctgggcttcaaaataagcctaaataaatacaaaagcatttaggacctatgaatcagaagactgaatatgcacatatacaaaatgagaatcattctctcacatacaaaacttatataggtagtaaagatacagttgattaggtagatttgaatgttgaatcactgacatttcctgaaggtagagctacaaattacttttttaaaaccactaacccacccccaccttacctcacttactctttttggccttaccacctactttagtcataccctatacatgttactcagaccaaatggctctcataaacaatctcagtatatgt

SEQ ID NO: 215494 - DNA, 508 bp, Homo Sapiens
ttaataattaagcaaagtgttttaattaattcttataacaagcattcctgacagcataggtatccacccctgaagttcctattctatagcacaaaataacaaataagtattttttggttccataatggtcacccacagcctgtgtatacaggaccatgcataatgggaatcagctttattttacaacagagcttcactttacccctccagcagttaatggattctgggtatttattaaaaactttacatttaactcaaagacagttaaataccaccagcccagctctggcaaagactgttggctttggttatctccagcatcattcaaatacactaccaccccaatcccagcccaatctttggccttggggaaaaaaacatgaactacgatgacaggacaagcagtaaaccttctccagtactatcagagtaccctttctggggttgcatcccacagaaacccatttggggcccaatatcaatgtacacagagctaaaattccaggtg

SEQ ID NO: 215495 - DNA, 483 bp, Homo Sapiens; identical to SEQ ID NO: 62044

SEQ ID NO: 215496 - DNA, 548 bp, Homo Sapiens; identical to SEQ ID NO: 60589

SEQ ID NO: 215497 - DNA, 484 bp, Homo Sapiens
  misc_feature (428)..(428): n is a, c, g, or t
aaattttatttttttgttaggataatttaaagtttaaaactgaagtagacatattcattttacaaacaagatattctttaagtaagaccattaaaaacagtaaacaaaaaagctgtctttacaaaaagctctgtgcatagcaactttatactgtatataactgacaaagcaaaacaataaaatgaaactatacagtgtgaaaatgaaaccttactgtacaaaaggtagagaagttaatggtttttaaaccatgcatattgaaatgtgcaaagaaaaactgagaagaattacaacgctataacaaaagaaagataaataatgaagtaaattgtccctttaaatgaaaaaaatcttacacagctcctcttacaaacacaggatagagtttgtagttaccaatagaaatactcatattccaagtggcacanaaataacttgggactggaatgattgaatagcaatgactaacgaggacagggtagct

SEQ ID NO: 215498 - DNA, 526 bp, Homo Sapiens; identical to SEQ ID NO: 59636
  misc_feature (309)..(309): n is a, c, g, or t
  misc_feature (498)..(498): n is a, c, g, or t
  misc_feature (509)..(509): n is a, c, g, or t

SEQ ID NO: 215499 - DNA, 504 bp, Homo Sapiens
tcaactcaaaactcttaactaatttatatgattcatactgtctcttgttaaaaatccacacgggggattttaagtctgtatcaggccatgaaaagtttagatataaagaaggcagttttctttttttcttaatgtttacaccagaccaaagtgaatcattttgagagaaccaccatctctgatttcctgttctctgccgtcttctctcagttctccgtcttctgcattacaggtattagtcatcaaaaatccagaacagatgtctttttcaagttcattccttctgtcaattatttgtctgttagaagagccattcagtattctttgttgtaaaatatgtctgtgggttgggcaagagggagggaggttatctggaaatgagtcttctccttgaggtgctaaagacaggccaataaatgcttcatttagcatatcccctctgtccaagggtcccaggagttcaaccccagaggttattgattctgcatcaatgtcactagctct

SEQ ID NO: 215500 - DNA, 1000 bp, Homo Sapiens
  misc_feature (472)..(472): n is a, c, g, or t
  misc_feature (476)..(476): n is a, c, g, or t
  misc_feature (565)..(565): n is a, c, g, or t
  misc_feature (687)..(687): n is a, c, g, or t
  misc_feature (962)..(962): n is a, c, g, or t
tcagtaatatttctggatgtagcatcaagttgctgttgcacatttttaaaagactggtccagcagtgtttcctcttcatttaaagtattggcaatagcatcattacatggattgtccagaatgtcttcgtttaatccatttgactcctccttttgatcctcatcagtattaacctcttcaaccgtgtgtgccctgggtgtattcattaacatatcatttcctagggtctgactattactcagcagctttgcctgccttctttccaaggccagttgtttatttctctcaattctttgttgttgctcttctgttaggcttctacttaactcagaagcaaacatctcactttcagataagtttgtcagaaagggatctaattcagtagaagtgacatcatgttcattattctccgcaacttcatcattattgctaacaaaatcttcatgtaaaaataggagatcaagtcgaattncgtntaaacaggtctgaactttcttttacttcccaggtatcaactctgtcaataaatcctaaactgcagtttagggaatagctatgtgcccangcttctgtgtctgatagcttcttaagtcttagcctcatgaccttacctttaaatttgctaatcaaacatgcctaaagctggaggctttttctgaataaatcctgacatccgttgggtatttnttaacctgtcccttgaggcccgaccagggtcctttctgaccttataaggtagtttcttcactttgtgtttcttggccaatttgggccgggccaatccctaggggccattaatggaaactgtaatgttcttggggatgtttcgcccatcccaccctaggccggaaaaagtaagcgggggctaaggggaacactatagtgggccctcgccttccgggaaacggccccatatatacaacgggggagggtttatggccctcttccttcattcccgctgngtggcgggtttctacggggttctcaacggggccaaaat

SEQ ID NO: 215501 - DNA, 463 bp, Homo Sapiens
tttttttttttcattcaatagtagttgaaccacctgaagctggtttatagaaaacaatgctaaacataaaatgttgctataatatgttataatataacctaagattctttgtatttgtccacagatagaatccagactaacttggcaaaattactcctcattatgtgctgtttctataaaaaaaatagtttatttgcactttgtatcctattaaccctagctgttcacattttcttttccttggaagtacactgagaacagttctttttaaagattaccagatttaaaataataataaaataatgtgtgagtttgcttttttcccctaaactttccagttaaatacttataagtacactgtttcattctggagttctatttccccttagaaaacaatggacttctctcaacagtttgaatcacctctttttttggcatctctcaaaggtttaacttattagct

SEQ ID NO: 215502 - DNA, 557 bp, Homo Sapiens
aagtgatgaaagactgaccagtagaaggtggtgaagatgaagaatagtggaactggcaagtaagaactgttcagacaagcattcattgtgtaatatccataaacaaaactataatccaaaggacttccattttagtatgttctgatgatgtactctagactgtcacctcctctggcttacagaataatccagaactttccatagacattaatcttgcttaacaaaggctgtttacctattatacacacacatttttaagggaaatatatgtatatagctttatctatacacacacatatacatacgtgtatatatagatttatacaaatgtataaataaacataatacttttcaatctttccattgacaaggcaagttcacattcagcaaagtgccaccacatcccatatacacatctctgtacagatatacacataagggtctgttttcacccttcaacgggagaattttttctagcaaatcccattaaccagcaactgaagggagaaatggcaccagtacaaactcccttctttcatttgcatgcatatgtacaa

SEQ ID NO: 215503 - DNA, 582 bp, Homo Sapiens
ttttttttttttttttacagaaaagaaggaagaggaaacacatttaatactggtactgttttcaataacaaattaaaccagtgattctgaatccttcctgcacattcaaattacctggagaactttaaaaaaaatactgatgaccaggtcttgtctcaaattacatgaaaatgggaatcaagattcaggcatggatatttttaaaaactctccaaatgattctaaaatgcagtcagggttgagagcaactgattgaaacctacatatttcttactgttccttgactgagaagaatgtcctataaatatagaaatagaactttttcctttacaggttgggcatacaagggtatctccagttagcagtaacttatggaggggtaagtcaagttattaatttatacttcatttccattaaaatatctacttatacctctcttcattccctgtaattctgtactctcaaactccaagaccaagaagagtcgaactacacttttataataaatttgttacactgaaaatacattattcattcatgcatgtaagtatttactgaatgcctactatgtgcaaggcactg

SEQ ID NO: 215504 - DNA, 497 bp, Homo Sapiens
acatgattttttttattttaattttaatttaataagcaatacaggttttttcttacatattatagaaatatatatgcatgtactttctaagaaacagcacagacctgcagtaaaaattagtgataagtaagaaacaataactaaaatacagtaagaatagagtacagaggaacatggacagggttaaactgcataattcagacaagagagattctgattttattgcaaccttcccaccaaactttctgtccaaaaacaataaataaagctcagcagatagaagcacttatgatcaaggtcaatgttgaaaaataagtagcacctttggtcattaaaatgattgtcgacatttccaggaagcttaaatacagcatttctgattttgaaaagaaaataaaactaattaatatgtaccataaagtttagctgttgcatatttcaatatttgcatagaatgtttgacaaaataaaaaggattcaaaacagagtttcaattt

SEQ ID NO: 215505 - DNA, 486 bp, Homo Sapiens
gccgctgaaaatgtgacatattcctcagcttaccacagagtgaaaaacactgtcacagactggattccatgttagtggaattgctgcaccggctcctgtacctaagaggtctaatgaaaatcttgtgaaaaaatatccgaaatactggagatctgaaaatgataaaaatccaagggtccacaattgaaatcacagatagaaatcgcaaggctcggaggtcttctgcttcttcagaggtcctgtttttctccttgacatccttaaatgctccatagtaagcgcgataaattacgggcagagaacacatagtgaagagcacggtcatcagcgccagcagcaggaggtgatccagctcctccaggggctgaggggacgcttccctcccgtccgcgcgcggctcggcacagtccctggtgcaggagcgcgggtgccgctgcagccgccggtgcatcgcatagaggttgcgcatggcgccgaggttgcaca

SEQ ID NO: 215506 - DNA, 468 bp, Homo Sapiens; identical to SEQ ID NO: 60793

SEQ ID NO: 215507 - DNA, 529 bp, Homo Sapiens
ttttaaacaatctaaaacttcccattattgctggcaatgacaaattctacctcaccctctccacaccactcctgattctccaggtaccaccccggtctctctcttatttggtctttgcttctgtgttcaagaagccacattattaaatgccatttcttgactctactgtctccttcgtttagttattgcctctttcctaaacagctaaactcaggaaattagtttgtatttgtatatctagtccattaattagcaaagttacacatggtgtttttttttggtttttttgtttgtttgtttttgatacagggtctcactttgtcatccgggctggagtgcagtggcatgatctccactcattgcagcctcaacctcctgggctcaaccaatcctcccacttcagtcccccaagtagcttggactacaaatatgagccaccacgcccagttaattcttgtatttttttgtagagacagggttctgccctgttgtccaggctggtctcaaactcctgagctcaagtgatctg

SEQ ID NO: 215508 - DNA, 496 bp, Homo Sapiens
agtagatgggaaactgtgatatgagtcacatctttttcttctctccccagtttgtcacttgccctttgagttgcttgtgctgtttaaaaaaaaacaacccccccaaaaaaacacccagaagtttttgagttttatgttttcagatttaaaggtattttctttcttagcttctaaattttgagtcataatcagaaagtcttccctactccaaggtgagaaaggagttcttcaagaagaattttaaggagccccagtagatcttgttccttctctctctctcagatattctgtccccatccatgtgactaagacctatagattgtgggcattcttctgtcccccaaacactggggaaatatcatcaaaataaaaaaagaccatgaaatcgcagacttgtcatggcttgtggcgactgtctgtggctggtgacataggagtaagaagaatttaccatgacagtttaggtcaagaaaggcagatttattagagaaagtag

SEQ ID NO: 215509 - DNA, 425 bp, Homo Sapiens
tttttttagtatatatttaattttcataaataattttttaaaccatatagaagagcatacaaggaaaaccaagtctcccccatatcaattatattccccataggcaaccaataccaatgtcttatgcgtcccttcagaattcatttgtgcagttataaacatatatccacatttgccttgctctactttttcattcctccttggcacttttctccttctaaatatattatagaattgactgcttattctttattgtctcttctccaaatccacttagaatgtaaagcaaatcccaagcataccgagtttgtctatttggaattcttatgacaacagcaggtaaatcatatattacttttgcagagtaagttttgttccctttggttttttttttttttttttaatttatctttaacaggacgaag

SEQ ID NO: 215510 - DNA, 577 bp, Homo Sapiens; identical to SEQ ID NO: 60962
  misc_feature (570)..(570): n is a, c, g, or t

SEQ ID NO: 215511 - DNA, 596 bp, Homo Sapiens
  misc_feature (18)..(18): n is a, c, g, or t
  misc_feature (76)..(76): n is a, c, g, or t
  misc_feature (186)..(186): n is a, c, g, or t
  misc_feature (238)..(238): n is a, c, g, or t
  misc_feature (252)..(252): n is a, c, g, or t
  misc_feature (277)..(277): n is a, c, g, or t
  misc_feature (338)..(338): n is a, c, g, or t
  misc_feature (361)..(361): n is a, c, g, or t
  misc_feature (476)..(476): n is a, c, g, or t
  misc_feature (539)..(539): n is a, c, g, or t
  misc_feature (548)..(548): n is a, c, g, or t
  misc_feature (560)..(560): n is a, c, g, or t
tttattttcacaactggntatttccaagtatacttctttatagcaacttgcatttttaaaattagtacaataaccnctaaaatatttgaagattatgacatataatatgatgaggattacatatgaaactattataagtagtagtaattattattccatataatactaattatacttggtcattgnttccccctgaattgtttccccaggaattctttctgcttgttaagtttgctgngtatttttcatgtngctcttttccttaaatatttgctgnttctcatttgtctacttgcaaatgagagcctaggagtcaacaaactttttatataaagggnaggctttaaggcccaaacacagnatctgtcatatattggtttggtgttctacaaccctttaaaaaatgtaaaatctactaagaaataggtagtggaaggcctgtagatagcagttttccaaccaataaatttctcagnatcattatctggagtttattttctgggcttgagtgaaaaattccctgaagattgcgattacangaaacctancattttaattgngtgaggaaggagaaaggaacagtcagaaggaaaatt

SEQ ID NO: 215512 - DNA, 497 bp, Homo Sapiens; identical to SEQ ID NO: 48889

SEQ ID NO: 215513 - DNA, 512 bp, Homo Sapiens; identical to SEQ ID NO: 41967

SEQ ID NO: 215514 - DNA, 661 bp, Homo Sapiens; identical to SEQ ID NO: 44519
  misc_feature (640)..(640): n is a, c, g, or t
  misc_feature (650)..(650): n is a, c, g, or t
  misc_feature (653)..(653): n is a, c, g, or t

SEQ ID NO: 215515 - DNA, 1000 bp, Homo Sapiens
gactgctttgagaaatcatattcagggaaaccaaatttattcccagcatcactattcaattgctagaagccagtttcttctacaaaatgttccatttacagtcaatctgaaattttcataaaagagatgtatcagagacactgtgcaacccaaaggctggagccctggttaaaatcccaaaatacggctgaatttgccttttcccatgtggaatggagctatcatcttggcatgtcattcgataaggatttatatttagtaactacggggagtcctcttgatttgaaaattcctgtacaaacaaaagcattaatgcacttaatgaaaaaaaaatctttgcatgataaattaacatcttaaggggaaaagaaaaaaaagcatgttgtgatagaagaaaaaaagattcatggtaaactatttctatcaattgggccacactcaacaatttaaaaaatctgcatttgaagatgtcagtgcatttcaaatatatttgccatacccaactgaaacggaaaacaaaacaaaacaagaacccagagttttctcctcatctgtaactttcattgtactagaaccttattgaattcttatggcaagagtctgattaatgttctctctccatgttttacatcattcacagttgtgtcaaaatcaaatattgccagtatagtaaattattcccaacacaatcagtttcatttctatcaccttcagaatgggttgctgtttttagcacaaaccatgcagggttgggtcacctcaaagcattttcttcagcctggcttgtactctataggggagttggtagtaggtgtggggaatctataggaacaatagagttagctatgagaactgacttcacaaaaagggaaatttcacacaccccaatttcagcttctaaagtgatatattttaaaagcttcatttgtatccttgtctgccagttacacagtatattactgttcaaacccagtagggtctgcaatcgaaaggtgctctt

SEQ ID NO: 215516 - DNA, 582 bp, Homo Sapiens
gaaatggaatggccttggatgtctatcagtgaagaaaatgttctgttagaagatctctctaagagtttttttccttctgagcttccttttcaaaataaaagtgacaattgtagcattgacttgaagtgagacatggttatagataagagagtacaaaatgactctttttcctgtcaattgaaatttaaagaaaagttttaattatataaatagcaaagggctattgccaatactagggtcaaaaatgaatttgagggaacagtgggtaagaaactttatgcctgaataacatttagcagtattgtgattgaaaaattgccatattttgatgtataggacaagtcaactgagatccagagaatcctggatgtgaatgctaaacactggcccttaactcacattcaatgtattttcttcccataacatttagtatagttaatattttcttagaatttgagcccatttaagtggattaatattctacatgtgtgcccctaaagacacatttactcaatattggagaagtagataatgaattaagcaactggtctaggaaaggaaaatttgtttcaaatatgcagg

SEQ ID NO: 215517 - DNA, 636 bp, Homo Sapiens
aattacaaggcggagaacctggagcagggatgaagtcatgggagataatctgctgctgtcatccgtctttcagttctctaagaagataagacaatctatagataagacagctggaaagatcagaatattatttaaagacaaagatcggaattgggatgacatagaaagcaaattaagagccgaaagtgaagtccctattgtgaaaacctcaagcatggagatttcttctatcttacaggaactgaaaagagtagaaaagcagctacaagcaatcaatgctatgattgatcctgatggaactttggaggctctgaacaacatgggatttcccagtgctatgttgccatctccaccgaaacagaagtccagccctgtgaataaccaccacagcccgggtcagacaccaacacttggccaaccagaagctagggctcttcatcctgctgctgtttcagccgcagctgaatttgagaatgctgaatctgaggctgatttcagtatacatttcaatagattcaaccccgatggggaagaggaagatgttacagtacaagaatgactttcttttgattgttgaaaaatcattacctgtggaatggctaggaatattggaagcagcatagtgttgatgtacgc

SEQ ID NO: 215518 - DNA, 599 bp, Homo Sapiens; identical to SEQ ID NO: 55461

SEQ ID NO: 215519 - DNA, 664 bp, Homo Sapiens; identical to SEQ ID NO: 48795

SEQ ID NO: 215520 - DNA, 677 bp, Homo Sapiens; identical to SEQ ID NO: 55747

SEQ ID NO: 215521 - DNA, 677 bp, Homo Sapiens
ttttttttttttttttttttgcttcttttaatagctagtgattttgagatgatggggtttctgggaggcattgggaacctttaagaattctgttaacttttagaactttaataccagatgggatcagataaataaatagttgtaggtagaagaattcccagagtaggtgtattagtgttaggtgcaggataaactatggtgcccttccagtaacaggacatctggatgtgatcgtttctttttttttttgagacggagtgtcactccgtcaccaggctggagtgcagtggcgcgatcccagcccactgcaacctccgtctcccaggttcatctgattctcccgcctcagcctcccatagctggaaccacaggcgcctgctatcacgcctggctaatttttgtatttttagtacagacggggcttcaccatgttggccaggatggtctcgatctcttgacctcgtgatccacccgcctcggcctccccaagtgccgggactacaggcgtgagcaccaccgtgcccagttaattttctacttttttgcggagacagggtcttgccacgttacccaggccggtctcaaactcccgggctcacacaatcctcccatctcggcctcccaaggtgctgggataatgccggagccaccacacccgcccagagaagaagggtttt

SEQ ID NO: 215522 - DNA, 451 bp, Homo Sapiens
ggtttttcattttgatttctttttattttgaaaagacattctgaaaattcaaaacattccctccagtgaaataatactaaggcagtaaaatgcctaacagattcccaaactttaaagcaaatatatttttgaatttttcttaaaacatgatttcctcataatttaccaataacatgacagggtttaacaaataaataaaaacaaaaagggggtaaaccacacacacaaccatataccatttttaagcttactcggtcctgaatttcagtattatacctaaccaaaattattcatctaaaatgatttcccatagaccaccttttcaactctcaaaattaattttgggagaattatgtttgtgctcttagacacatttaattcttgaaaaagcattgtgttgtgagcaagggctgggcatctggatagtagtgttcagcagcactgattcatt

SEQ ID NO: 215523 - DNA, 494 bp, Homo Sapiens
tttttttttgaggaagagatgcatcagcttttaaataaatggtgaagagcaataacatctgatggagaggggccacctgggctcatttcacctgtgcagtggattcaggtggtgggccatatccatcccatactgcagtttgtggttgctgttgttaggggtgccatatgtctttcccttgttctttgtccactgatattcactagcctgtttgtcctcacccctgaagcagataaacacatgtagatggaggaaaagtgacaggcaggtgggttcatcagtgggctcatcccaaaggtgacccatcccttggattggagtcaggtctattttaggcatggcaggttggaagaaagactattctcatagctaacatggctgaccttcaaccctcttttccctttagttggacgtagaagcagctctgaccaaagcccttggggaagtggacattcttctgacctggatgcagaaattctacaagctctgaatgt

SEQ ID NO: 215524 - DNA, 472 bp, Homo Sapiens
gttgtcatatattttatttttacatgtgctacagaaacaaaatacagttactatttttgccttacatagtcagataccttttggagcaattaaaaagagggaaagcactcggatcttggtttctttcattctccataaaaataatgttccttggagaaatgcctgattctaggactggggcagaaaatacacaagataagcctagaatatattatagtgccggaaaataaaaaagcgcctgctccccctgaaaaaaaaaacccacataaataaggatatatcagagggacatatgaatcaagtagatagccctcaaaagctgaagctagaacaaagcaacagaaaaacgtggtattgtattataaaccaaagtattaaaataaatgcccacgagtccatattgatagaaataaatggttgaataaatgagagagaagagataaatctcccgtgcagaagaattccaaataat

SEQ ID NO: 215525 - DNA, 473 bp, Homo Sapiens
tttttttttttttttttttttcattagcgttaaaaagggctatttgttgggggtctcatgagttggaggggcctaaataccgatgataaaggtgtacagttttccactggggcagcaaaattttttttggaaaaactatggcccacaggagggggtcgaggggtaccaaccatttttgcatatggatccattggaaatgggggtcgggagttaaaggacccaggtgaaaacacttgcggtgagggtggctgaaaagtctgagcctgaaaaaaactatcctggatgggaatcccggatggggctggaggaggaggtggagcttgtggctttacaaacacatcatctgaagatgtaaacgtaggggtactgggtggctgttttgtaaacagttctttatggaatgactgtgcaggaaacatatttccattgccaggctgaggtgtcaagggactctgtatcccactacttggtgt

SEQ ID NO: 215526 - DNA, 711 bp, Homo Sapiens
  misc_feature (643)..(643): n is a, c, g, or t
ttttttattttttatttttttaagcacgggatcctgtcttcactcctacacactgaacatatccattcggatgctattgaaattaccatctaggccagaagcaggcttagccttcacttccaaagaattatctaagtcttctagcttctggctcagctcactgtcagactcatctgaacaactttctgtgggtagtgaggtttgaacccctgaggtgctgcacaaacttgaggtaaccgttgaaggcaaggaaagggaaggaggagaagaagggggagaagcagctctcctggcagacgcttggaaaaggatattaggccaggacttcatggagaagcaagaaagatgaggataggtgttattagaagaagctgcagactgcgaggtagatgtggtgttaggattaggggagcagactgagtgaggtaataatctaacatgctctttggcatttctcattgcttgtttgattgttttctctttgtgcaagcttgactggaggtgttggctaagtgcttcattcccactgatagccacatcacaggcaagacactgatatttgctgactgggacacgaagcactgtctcttgtggtcaatcaaggctgaccgaaatacagaaagacttttgatgatttactggngcgtccttatcagtaaacatcatcctgcactttctgcatattaactcatacttgacgaatggaaccac

SEQ ID NO: 215527 - DNA, 477 bp, Homo Sapiens
tttcaatattggtttttttaatcattacaaatatagcacactaatgcattatattaattacaggagaaattgggatggggttgggtggggagaagtagtactttctgcccaagttttctgtaaacctaaaaactcctctaataaggtttattaaattttattaaagttaaaaaatcatacctttttggattcactttcaaaagttgatggcaacatctctgggaagagtttcagaaacactggtaataagaattccatgaagggtacaattaagaacaccataaatggaaccaggcggaagaaatcaacacaagttctcaacagctatagaattaaatgcatatgcaatattcattattttagggcatgccaaaaacaaaaatgaaaaacaaaaccaaaaaaaccctgtcttgtttcattttctttctttcaagagatagtgtctcactatgttgcccagtctggcctcaaactcct

SEQ ID NO: 215528 - DNA, 562 bp, Homo Sapiens
  misc_feature (556)..(556): n is a, c, g, or t
atttggtaacatttttattcaattatatcaattgctgatttcaattagaaggcttgcatatcttcaaataacaacaaagtaaatagcatctaaaattaaaacaatactaaactaaacacatattatgcttcagaatacattttgttttactttatattttggggagagtgttatcagatcaataacagggaaatcaaaaattgattcccaggaagagtcagctataggtttctggcagcaaacctctagacagagtgttgtaatcgtgtgcctaaacaagtcacatgatgaacaacagccagtcgtgagaaaccaaaacaaatttttcttatccagaagtagccgtccaataatttaaaatacggaacatttaagcatcttttaaattaaaacatttctttttctagcataaatactaattttgaaacagctgatttgaatatgatgcctctttatccttgcttcaatttacagtgaacaacatatttccagatgatgaatatcatggaaatgctataataagttcttacatgaactggtgctttacagcttacanactact

SEQ ID NO: 215529 - DNA, 456 bp, Homo Sapiens
  misc_feature (419)..(419): n is a, c, g, or t
taaagttttcctcaatttatattcatttgattttacagcaaagataagcatacatgatttttatttccattaaaaacttaactactaataattaccctcaacaaaggagtactgagttagaaaaataatagaatatgaactaaaatgttttaaaagcagatgtaatagagatgaaaatttgtcttaattatatttggtcacttctgttgcttagtgggagaagccatggctgccacccagtggcaacataagtctttaaatgattttaagatttaaataatatttaaaacattgataaaaaaaattcacaagttacacaacttcaattttaccatcagtaattctggcgtattagatatctatttataacagcaaagaattaaaacatccatatgcttaggcagcattagggaatttgntgaaagtatcatacgacatcctactcagttatgtggc

SEQ ID NO: 215530 - DNA, 369 bp, Homo Sapiens
aaatgttcagtcttttatttaaaaactataaacagtcaccaaagtaaataaagccattctataacataaactgttaggtctatattttttactgcacatcctaaggacacagcagaaatggtggttgggaggccttccacatttttggatgctaatagaacaggcaataggcagttataaatggatacatttcacgctgggggaaaaaagacaatttaaggaagtgagcagtttctgagcaggaatgtggtacagtattaagaatggaagaataatacaataaaattccacactatattaagatagaaaaagtagtgaagaaaatatcatacctgcacataatgcatatataacacaggagaaaacctg

SEQ ID NO: 215531 - DNA, 453 bp, Homo Sapiens
gaaacatgcatatttttattttccaaattaatgtattcaggcaaaaattatttgcccttaatagcatattattttacatttctgttcaccattcatccaaacaataatgacaatagaagtccacaggcagcaccacaacacattatgaatttactctgactttcaattttgcatattttcagtttgtttttttaacttgactcttgataattgcgaatatgaagtcagagaggtttggaaagacgatgctttccattgtgttttattctattttgaggagtctttgatatctaagaatgggcatcctctttgactacatagctgctttctagccattaattgggtatcatgttcttagtggaatgagaaaaacctggaagaaccctcgcccagatttaaataggagtgaatgcttgcattgtttgaacacattcacatatttgaacatctttg

SEQ ID NO: 215532 - DNA, 410 bp, Homo Sapiens
ctggccagtcacgtgaagcagtgggagtggaaaaggaacaaagaaatctgtaactggtggtgatcagttactgtaaacaccacttcacctagaccagcctgagtatttttctttcgggtttttttttttttttttttttgctagttgcaaaatgaacatatttattataaaaaagttgaaacatatttgttttttgaggcaggctctcgctctgtcacccaggctgaagtgcagcggcgtgatcatgctattgcagcctcatctcctgggctcaagcaatcctccaacctctcaacctcccaagtcgctgggacctgacctcaggtgcatgccaccatgcccagctaattctttttacttttagtagagacaacttctcaccatgttgcccctagactggtatgaactcc

SEQ ID NO: 215533 - DNA, 522 bp, Homo Sapiens
tctctgtgttctattttattattgtaaccactttggtcttttttttttgtataatcaattgcagctagaatggtgtatggctcttaatagatattttggataatgctgagtcccagaaatgtgaagcctttcccgagtattgagttcattaaaggttattatcatcgtgtttaatcagtaagtgattttaactttcttcattatcccctcctcttgtttaactgtggataagtagttcccatggattgcttcctctgtcttcttagcgagaaatatcggtggctatgagatcatagctcaacagcttcaattctgtgctcttcctctgagcaatttttcttcttttcagactttttccttttcttttcccttccctttttttcatgttcttcctcttcattactgtcatccggagtagtgtagatggaagccagggtaaataaggaaaagataacaaaagccaataaaatgaatgccatttccaagttggtgtagggaagctccatgaaccaccaccgaaaa

SEQ ID NO: 215534 - DNA, 444 bp, Homo Sapiens
tacatttgtgttgctttatgccataagttcaatgtttaaagtttgtgataatttgttacagcaactacagaaaacgaatacatatgtgtaagcacttagagcggtgtctctggcacacagtaagagctcaagaaatgccagctttctgttattattattatagcactgcagtcacacaggggagaggacatgctgttgctccactccagggcagctcctccctggtgtgagctcctcagagcccacagcttgcttcgctgggtactggagaccgacggcaagaccagggggtagggacatcctcaaaacaacacgtcactcagcacagccactgtgtgggcatcggacagatgatcagactcctgccgtccctttcttctaaagaacaagagtgtgggcaccctttctaagttgttgatctaaggccccagcctgtatggactt

SEQ ID NO: 215535 - DNA, 469 bp, Homo Sapiens
  misc_feature (467)..(467): n is a, c, g, or t
aacttcagaaatttattcgtatgtcttaattcacagaaacattggcactttacagcaaaacaattagcataatgagaaataagtcactgagtgagatgtggtgttttggaacaggtatacagctctgtctctagaaaggaacagggttctgccaagtgtctttggtttggcaagggttgttctggacttgtaggaacatgtggcggcaccatccagagggatttacttgcagctgattttgtgggagtttttcttggtctccttgtgcagtaagtacagcttcaactattttcataacatttctcttcaactattttcataatatttttctaatattctttaaccaccacgtggaatatcacaggaaggctgttgtgggttcagcttcggtcactcgtcccacattgggacaatgagtgttgctcatagacttcaggtcactcattggctgcaccactgtacactangg

SEQ ID NO: 215536 - DNA, 481 bp, Homo Sapiens
tctttagatgtacatctaactgaaatggagaaacctgggccagctcatgtttcatgtgctgcactcataaacctgacctccaggcagaaaaagtcctttgtgaaagtatgagaggctcctgacccagcactacccagaagagcacgagctgagagtgttctgaaaaggcggtgcttgaacaactctttgggaagcggctctgcagaggaaaccataaagatgacggtgctctatacctgtaagatgaccagagtatactttccagagcacttccaaattgcacatgattcctccatagctcagtcaagtagccgggacagatcttatctccacttttcactaacaaaaacgagggccaaggagattatgtgacttgccaaaaatcaaaacgtgagtacatggcacaggacccaggcccaaaccagtgagattaatctaccaccctgttggctgacgtttcacgtgtatctggtttgtttgt

SEQ ID NO: 215537 - DNA, 449 bp, Homo Sapiens; identical to SEQ ID NO: 61904

SEQ ID NO: 215538 - DNA, 447 bp, Homo Sapiens; identical to SEQ ID NO: 61958

SEQ ID NO: 215539 - DNA, 471 bp, Homo Sapiens; identical to SEQ ID NO: 60405

SEQ ID NO: 215540 - DNA, 1000 bp, Homo Sapiens
atttgaagaaacagagatatgtgacctttccaagaattcaaaagtgctgtgttgaagaaacttaaagaaattcaagataacacaaagaagaaaatcagaattctatcagataaatttaacaaagaggttgaaataattgaaaagaaccaagcagaaattctagagttggaaaacgcaattaacatactaaaaaatacatcagagttttttaatagcagaattgatcaagcagcagaaataagtaatgaggctgaagacagaccatttgaaaatacacagtcagaggaaacaaaaagaaaacgaataaaaaagaatgaagcacacctatgagatctagaaaaatagccccaaaagggcaaatctaaaatttattaaccctaaagaggagatagagaaagagacaggggtagaaagtttagtaaaagggataataacacaaaacatcccaaacctagagaaagataccaatatccaaatacaagaaagttatagaataccaagcagtttaacccaaagaagactacatcaaggcatttaataatcaaactttcaaacatcaaggataaacaaaggatcctaaaagtagtgagagaaaataaatgacatacatctggcaacatagtccttcccattcttccctccccttctgaggcagaggagtctcatcccatggccatcatcccacagagctatggagagtattgccaagccaccactggagcacccaggtatgtatgtgtgtatatatagacaaaaactgtaagagacaaagaagctgactatataatgacaaagggattgatacatcagaaaggtataacaattttacatatatgtgcacccaacactggagcactcagatatataaagcaaatattattagagctaaagagagagatgcaacctataaggactgaaccatgagccattctaaactcatcctatgatgccagtattaccctgctaccaaaaccggacaatcaaaaaaaaaaaaaaaaaa

SEQ ID NO: 215541 - DNA, 401 bp, Homo Sapiens; identical to SEQ ID NO: 60817

SEQ ID NO: 215542 - DNA, 450 bp, Homo Sapiens
tttttttttttttaagtattatgatgtttattagttatgcttcactgcctttccttccataatcatattaatgtgcaagaagcttaacatgacctacaaatctgatttagggaaacactaaagatattgagtccaaagctcaaaatgatgacacatcattcactacagttatcctgtagtacatctcaatatcctccacagaaaatagtaaataccttacaaaagaacaggcggggaaaaaaagcaataaagaaaccgtgcaagaaactcagtgaataagaagatcaaaattctacaattcaccattagataatatcctggttatctttaaaatataatcaattttgacttttaaaagtgtattaatttgttgctttgggccactcatgtctatttacaagaaagagagcacatttgtcataacataattgaacacaaaagacccacata

SEQ ID NO: 215543 - DNA, 416 bp, Homo Sapiens
ttttaatgtccaagaccaagtgatgattttcctgtataggttctagaagcctaatttgtgtgtgcaactcaaacattcgacaaacataagataccaatctgctcagcacttactatgaattcaatgtgattgtgcataccaccttactttccaaatcaaggtatacagcagtggggataagtgatgttaattttaaaaatttaaatatttttatactaaaataaacattatggagtagcagatgcaaaatctgcatgaattcttaagataaaaatgaagactgcaaagaatcatagatttctcaaagggtcacattgaactatgccttcaggactcctggagtacaagcacatttgcccaaattgttctgtcattatgggtacactttatgggtacattatgggcagaagataact

SEQ ID NO: 215544 - DNA, 686 bp, Homo Sapiens; identical to SEQ ID NO: 60826

SEQ ID NO: 215545 - DNA, 474 bp, Homo Sapiens
taacatattgaagaaagtctagtacctggatcttttgttaaacaatgactaagcatagactgtcacatataaaactaggaaaaatagcatactgcttttaaatcaagacaaaaaggcatacatttcaaagctgatttattttttaacattgtatatgttttaaaattcaactaaaacgcatcagtatgatggcaagaatcatcttgctgtcactgctttttcttgtttcagcagtgtttctctcaggaacatcttatgtggatgcttgccatgtttaaggaagagtaaggaaattggtgtggctggaacagaaacggagaaggatagagtgtgggtgataagttcagaggaggaggaaaaggccagagcctgtgtagacttcgcatcagaatcaccaggggagccttttcaaaatcaaacaacctgaagcttggactccattttccagagactgtgatttaactgaccaggggt

SEQ ID NO: 215546 - DNA, 452 bp, Homo Sapiens; identical to SEQ ID NO: 58156

SEQ ID NO: 215547 - DNA, 601 bp, Homo Sapiens
  misc_feature (128)..(132): n is a, c, g, or t
  misc_feature (134)..(135): n is a, c, g, or t
  misc_feature (149)..(149): n is a, c, g, or t
  misc_feature (152)..(152): n is a, c, g, or t
  misc_feature (160)..(160): n is a, c, g, or t
  misc_feature (211)..(211): n is a, c, g, or t
  misc_feature (221)..(221): n is a, c, g, or t
  misc_feature (234)..(234): n is a, c, g, or t
  misc_feature (268)..(268): n is a, c, g, or t
  misc_feature (329)..(329): n is a, c, g, or t
  misc_feature (334)..(334): n is a, c, g, or t
  misc_feature (351)..(351): n is a, c, g, or t
  misc_feature (364)..(364): n is a, c, g, or t
  misc_feature (368)..(368): n is a, c, g, or t
  misc_feature (389)..(389): n is a, c, g, or t
  misc_feature (392)..(392): n is a, c, g, or t
  misc_feature (398)..(398): n is a, c, g, or t
  misc_feature (400)..(400): n is a, c, g, or t
  misc_feature (407)..(407): n is a, c, g, or t
  misc_feature (413)..(413): n is a, c, g, or t
  misc_feature (423)..(423): n is a, c, g, or t
  misc_feature (428)..(428): n is a, c, g, or t
  misc_feature (435)..(435): n is a, c, g, or t
  misc_feature (452)..(453): n is a, c, g, or t
  misc_feature (458)..(458): n is a, c, g, or t
  misc_feature (465)..(466): n is a, c, g, or t
  misc_feature (470)..(470): n is a, c, g, or t
  misc_feature (475)..(475): n is a, c, g, or t
  misc_feature (480)..(480): n is a, c, g, or t
  misc_feature (485)..(485): n is a, c, g, or t
  misc_feature (497)..(497): n is a, c, g, or t
  misc_feature (506)..(506): n is a, c, g, or t
  misc_feature (509)..(509): n is a, c, g, or t
  misc_feature (517)..(518): n is a, c, g, or t
  misc_feature (533)..(536): n is a, c, g, or t
  misc_feature (547)..(547): n is a, c, g, or t
  misc_feature (552)..(554): n is a, c, g, or t
  misc_feature (556)..(558): n is a, c, g, or t
  misc_feature (560)..(560): n is a, c, g, or t
  misc_feature (564)..(564): n is a, c, g, or t
  misc_feature (569)..(570): n is a, c, g, or t
  misc_feature (576)..(579): n is a, c, g, or t
  misc_feature (584)..(586): n is a, c, g, or t
  misc_feature (589)..(589): n is a, c, g, or t
  misc_feature (593)..(593): n is a, c, g, or t
  misc_feature (595)..(595): n is a, c, g, or t
  misc_feature (597)..(597): n is a, c, g, or t
  misc_feature (601)..(601): n is a, c, g, or t
ggatcccccgggctgcaggaattcggcacgaggagagagagagagagagagagagagagagagagagagagagagagagagagagagagagagagagagagagagttttttttttttttttttttttnnnnntnnggggtcaagctaanttntttctttnttaggaaagcaccaacaccacattcttcgaaattactggaattttatttgnctcaggcttntgacttgcaaccnaagacattgtgcaaaagaaagcaaagattaagtncactttagggagagggagacgatacacattggtaacataggagttcagggtgacaaaagangccanccaatacactattttgnttgcaatattcantagngctttcaacaaaaactttttnttncttcangngcaaaanatttangcaatgtttncaggnggcattnttcttttcaatccaaanngtttnggtccanntccntgggnattanttggnaaattttttttncagctgaanttnttcttctnnccattttcacccttnnnntggtttttttnccccnnntnnncnccantcccnncaattnnnnccccnnnttncccntnanattn

SEQ ID NO: 215548 - DNA, 572 bp, Homo Sapiens
  misc_feature (25)..(26): n is a, c, g, or t
  misc_feature (58)..(58): n is a, c, g, or t
  misc_feature (186)..(186): n is a, c, g, or t
  misc_feature (309)..(309): n is a, c, g, or t
  misc_feature (351)..(351): n is a, c, g, or t
  misc_feature (435)..(435): n is a, c, g, or t
  misc_feature (438)..(438): n is a, c, g, or t
  misc_feature (467)..(467): n is a, c, g, or t
  misc_feature (490)..(490): n is a, c, g, or t
  misc_feature (503)..(503): n is a, c, g, or t
  misc_feature (508)..(508): n is a, c, g, or t
  misc_feature (526)..(526): n is a, c, g, or t
  misc_feature (541)..(541): n is a, c, g, or t
  misc_feature (549)..(549): n is a, c, g, or t
  misc_feature (552)..(552): n is a, c, g, or t
  misc_feature (557)..(557): n is a, c, g, or t
  misc_feature (561)..(561): n is a, c, g, or t
  misc_feature (570)..(570): n is a, c, g, or t
ttttttttttttttttttctttttnncccctagctgtgaacacttccagaattctggnaatctgaaagcatggattctcatcccaagacaatgaaaacccacggttaaggaacagacaacagttttagcatactctcaaacaatccttgactaatagaagacttgataaattaaccatttgttgtnccaaaactttgcttatatctgcagaaattctaccctaaactgtaccttgtttacatggtcatcagtacattctcaggtattcctgttacaaacaaagcaaattatatattcctctaacgtatncctcctatccttactaaaatgttcttttttaaaagcagggtnggatacactgctatcagagatgacttaacacctctagaagcctagccttaacctcttgtgatcttgttactgttttagggggtnagncaccccaatagatccaatggattgaatgnaaatgcaggccacttaatttaanggttaaccctcangaaangtacaacccatcaagggnggtttaacaaatgtnttattggnccnttttngggnaattaggantt

SEQ ID NO: 215549 - DNA, 485 bp, Homo Sapiens; identical to SEQ ID NO: 58860

SEQ ID NO: 215550 - DNA, 398 bp, Homo Sapiens
tttaacagcaactgcacagtaatgaagaataccatgactgctggtacagcttggcattaccgtcctgcttcctgctaaggtgccagcagttttacccaccaatgctttgcaccattaatacaaatggtcaccgtagtaaaaaggggaaacaatgcctcagtattgttatggaactggtttttatctcttggagcttctgagagggccttggggccccgcagggggtccctggatcacacattgaagaccactactgtagaggatagtatctataaatccaaacgctctctaatctgctaaatgcttatgtccttgtggggttcacgtaaagaagatttaaaaggtttatttctgtctccactctcctgcccttcctgcttaaaaaaaaaattccattg

SEQ ID NO: 215551 - DNA, 404 bp, Homo Sapiens
ttttttgaaaggttttcaaaaaaatttattttcataaattaacacacataacagtggaaatcttagagtcacaaactaccaaacagaaaaggaactgcaggggcatcatgtataccaatgttaccaaaaatgtacaaatttcattgaactactgaccatgataatatataaacatgtcaggcagctatttttactggcccagaccagcccaaggagatgctgaggcctctcaccaagaattcaaatccaattcagcaccagagaggggcttgtgaagacacacaatcaacaaacatggaatctgagagcacactgcactagatggccagctcaacggggaccccctttcatcatcaaaatagcttttgctgcttgatttgtggctagacggtaacattaaactg

SEQ ID NO: 215552 - DNA, 381 bp, Homo Sapiens; identical to SEQ ID NO: 96015

SEQ ID NO: 215553 - DNA, 487 bp, Homo Sapiens; identical to SEQ ID NO: 59789

SEQ ID NO: 215554 - DNA, 463 bp, Homo Sapiens
  misc_feature (326)..(326): n is a, c, g, or t
ccatttgggaagtcatttcaaagctgatttattaaaagaatatcatgctttttccacttggggctggggccagcatttagcaaaattcagaaaggagacatttttttctttgctattcctcctcttgttcctttttaatgctctgttctggagtggtctcctctgtccctaacttatggttctacagccttggtacttaggagaatagatcccacctcactccttctatcctacttccaagtgcccttaaaatgtactcatccatctcccagcacttagggaatctgaaaaaataatccatgctcccaggagaaggctacagggcnttgtgtccttttaccttcttagccgagcctcccagtaaaataataataatgcctccaagcagacaggatctaaattatcagcttaaatgtcagtcttaaatgaggagactgatgccatcacaaacagcttggtgggg

SEQ ID NO: 215555 - DNA, 612 bp, Homo Sapiens
ccctttttttttttttttttttggtaaaagggataaatagtgatgtcaggagatgctgcaaaatatattccagtgataagcatatggcaagcaattaatggatgaattcgcctctcttattgccatgttgtgacaaatactctaacttatttggcctttggctccctaaagggtgctcaaaaatgctgtttagaaagtacttttcatgaagagctacaacaacaacaaaaacaaatacaattcaaatatctactaaacatatgaaggagtactcactctcattagtaatcagagaaatgcaatgatcccattatagagccctgtcatttgaaaaaaaagaaagaaaatccaagtgttttttattagaacgtggagcaacaggaattctcattaccttctcaaccactttgtcaaatgctttctgcttatctgctgaagttaaagatatgcatgacccatgaatccactcctaggtatattcccccacaaaaatgtacgcttatgtgcatcaagatacacgcacataagtgttcgaaatatctttattcataatatttccaaactggatatgttcaactgcataaagaaagaagattggacagtaaattgtgg

SEQ ID NO: 215556 - DNA, 595 bp, Homo Sapiens
tttttttttgtaaccatgatgatctttttaacaagcaagtgactggactgtttgcaaaggaaagaaaacattttccaaggatagtaagtattctacgaattcctagccagcttttgtcttcttgaaaattatcaccataaggaaagaattaaattacactggcatttataagggattaggcacaccaggtaccctatgcttcaatcctgtcctttcatcttccttccatttctctgtcttgggacatggtaatttggaggtgagaccactctttcttgtccctgacaaagaatcctgtcatctgcagaatctctattcttccagctggctcctagcagggtagggagagacacagaaagagagagtcaccgttccacttcagatgctgcaagttgctgtagaggagctgccccgccgtccctgccgcccgggtgaactcctgcaaactcatgctgcagaggtgctcgccgttgatgtcgaactcttggaaagggatacaattggcatcccgctggttggtgtccaggaggtgctggagccactcccacacctggtacttggtccagtactgaggatgaatttcatgccactggcc

SEQ ID NO: 215557 - DNA, 608 bp, Homo Sapiens
cccttttttttttttttttaaagaatgctaggtgttcttcccctaccatctcatataggggaataaactaatttcctactaagttattacttcttcatagaaaacttagagcattaggggaaaaaaggtcaatagttctgtaccttttattaatcttaattgcataatcccaactttcaaatttaaaaagctcagaaaaaattcctgagcagttaagttgctttataatctaattgttggggaagaagttcttgtttctaggctaatcataaaaaaactggtaatggttaacacttgaaagatcacttactatgtgccaggcactgtgctttacctgtattaattcatttaattcttacaaccacaaatgaacccctacattcctgtttcacaaaggaagggcctggtcttaaatccacatctaatactaaaatctgtgctcttaaccacagtggtgtattgcctaaacgtctttgttctacgtgatttcaagggatagaatatagcagtttatatttctactaaattttcaccctacaacaaatatatccactaatctactaaatacacatctgctataaacaaatctttgttgtgtaaggctcagt

SEQ ID NO: 215558 - DNA, 644 bp, Homo Sapiens
ccctttttttttttttttaataaatacacattaatgagcaactgagagaaacaaggaaagtgagatcaacattaggcatcatggacaggaatccaaaatctacattctgcccagaaagcaattaagaagcctcagccagagaaattacaagtcaaacttcattgccatcagagatcagagaaatgtatttgtattttttttttcccgagatagtgacaatacaatcagactcttgctaaagtcctgcttggctctgaacacacagattatttcatcactgtatgaggctaaggatcaaccttctaaatcacttgaaaatgaccataaatttcaaaaaatgtattcattttcagccacaaattggccccagtcatcagagtgcttcagcctagccccttcatgccctctcctatgttccttttgaatggtgtaggtggaaaatcccgacggaggcagggtgtgaggcaggtggagggaatcaagagacaaacaccaggtagccacaggtgtgcagaggaaagttagaaacctcaagtctcaacccccagccacctcacagccttcccctctggtatcagtgtgggtggcaagaggtgtgctgatgccccagcgctgccagacttgagtgggaagctagcatgtgc

SEQ ID NO: 215559 - DNA, 583 bp, Homo Sapiens
ttttttttaattctactcgtagttttatttccacaacctgttcaatattcgaccaaaagcactctatctcccgggccgtggaggcggctatccgcctcagtctgctctgctcttccttcttccccctttcttcacggagctgcttctcctcgtgatggcgcaccacagttctaacgagcttcttcgcagcagccaccttccacctcctctcctgggcaaagtctgtggccatccactgcatctcctccagcagatagtcccagtgggacttggggcgtggggcctcctgcagctttggcagacgcctctgggaccacagacctgctttcctcagctccgcaatgcgctgatgcacctggttctccagagttatttgttctgtcagcgtatcctgagaactgtcttgggacgaggtggcattctgagcaggactctgtggtttggtgggggcagatgccaccacccctggggtccgggaagtgactggagatagtgccttattggtggctgaggaaggtctatttactggagaggatcgagcaggggagggtcctgggccggagccactcacaggcgcgaggga

SEQ ID NO: 215560 - DNA, 603 bp, Homo Sapiens
ttttttttttcagttaaaatagtttaataaaagcaacaaaactgtgctaacgatgagaatcaaaaatgagatattaggtagacttataaaacaaagtatagttattttttgatttcaaataaaccatgtgcaaaattgtaaaatgccaatgtgtctgagaaaagcattaacagtccttttagcaatttatatataaagatgtttttaaagtgccacagcttaaggcattatattttaaagtttaataaacatctaatttcaacatctctccaagaacagacttcttctcaataagctataaactatttggttaggaatattgaaaatgcatgtataatttaaggagtaatatacttgttaatgctgagttattagtgcaattcaaaagcatatgaattccatatcaagaacaaactctcccgcccaaggtacagtgtaatccacactgtatcatctcatctaaaaatctatacagcagctaccccatccactcagttcctctgcagttaggctattagcttttctttttcaaaaagcaaaaattcctaagacacctaaagattagcctgtatttcatttatctatactgaaagtgcttagtaa

SEQ ID NO: 215561 - DNA, 636 bp, Homo Sapiens
cccttttttttttttttttttcagatatagataaaactttatttatacataaaaaattacactttaggaattctgttcctaaaagcattctcttagtaaagctcaaaatgaaaaggttgaaaggggcagtgaacagctttttaactgtgtacatactgcagtcacaagcaattttttaagctgcaaaaatcatctcttctaagtagcatgagcttttgaaactgcagacttaaatctcatgatggcatcaaaagccaaagcgaaataaatcaatattctgaaatagaagacttggctgtcgatgttaattgggtgctatctccaaccactttccatcatgttacttcttcctcttaggtgtaactcaagaaataacttttttctaataatacctatcattataaaaacatattgcctttgccgtgtgaaaatctggtgtttagttctctagatttttttattagggcttttttctgagcttcatcaaaccgattaaccttgagatctttatcacggtcaaatggtattctctcttgaggcttatttttgtcttcagcagccttactctttaactttttatgatgtatgtccataagagattctgatctttttgattcattgtatgaagatacctgc

SEQ ID NO: 215562 - DNA, 597 bp, Homo Sapiens
tttttttttaacatagatttacactttattttaaatttgcatcctgagataataaaattttatctgacaagtgaacaatgacagaagcagcagtgaaagtttcggagaggcaggtatccttcattttggcacagctgtatatagattgagtttttccagggaagtcattcctggactcaagggagaaaaaatgaattcattccacaggctatgtaacaatgcaagatgcatgaaagttcttagtttggatgaacatatccgctattattcttttctggtaaagctgtcccaacaggaatcctctgacaaaaagttgaaatcctaggcttctccaccagatatttttatcaatgcccactctctagttacctggatatcctgttcttgcagccagattcatatttgtatgtggttagtccaaggagggcaaattcgctcgtagattatatactttcaaacacttgttacttgtttcaaagtccaggcattaaaacaattttacactatttgcgtactagaaaaaatggaaaataaaaagtcgagataaaaacaaagaaataaaagaacatttgagaaattattgccttgattcatcat

SEQ ID NO: 215563 - DNA, 629 bp, Homo Sapiens
cccttttttttttttttttatggcatggtcgtttaataaattcacataaacagagtttatttggcaaggcaaactgggatcgctgtccgccagtaggttagggtgagtgtgatgttgtacaataaatgaaaggttctgtgtgaaggagagtgagcagggtacaacaaccaaaaaggcaaactacatatttgaaaacacagctgtggttcatactcaatcatttcatatctccaagagaattctttttaccaaaaaaaaattgcatacaaaggttagtttaattatcatgtgaatgtttgaaactctctgatataggaaatctcccaggattacctgtctactaaacagatttccttctctttccaaatacattattgatcaatttggccattgatttagatccactgggacgtctcttttctttgagtttgaagtttatcaggatgtccttgataattctgataaacatcatttccacctccagagactgctctgctgcagacagttcacagaattggcatcggttttccagtgccagcttttgcccttcttcccagccaacctctcgcacatgacaaagatctcgtttgttgccaaccaaaaacactgctgattccacagctctttta

SEQ ID NO: 215564 - DNA, 618 bp, Homo Sapiens
tttttttaaacagaagttaccttatattggctatttagaatgagctaattaacattgaaaatctcttggacacatctcaattttactatgtattccagtatgtgaactgtgatagaaattttgattactctaaaaaggggatgggcatatatcttaaacatgtgggaatttctaaatttaaacgaatatgtagacatacccccaaagacaagcaatttttaaaagtttttaattcaacttttgtaaaaattgattttgtcacatcagagattctcaattttaaaaacatgtactgagaagcaaattctattgtttctctttgaataagcgaacaggtaaaagggggctttgctcaataactagatgctctgtattttttctaactcagacttacagtaactgtagtaactcttcccttgctccacttgggtacttaagcagcctcattttattagtaaagactcggatatgatggtgcaaatctttttttttttcacctctgtgactgctaaactatttatgaataaaattttaataagaagctacattaaaatactatggtgagacctcactaacaaatgcaaatcatgagcaagaatgccattacttttcaatata

SEQ ID NO: 215565 - DNA, 596 bp, Homo Sapiens
ttttttttaacatgtggagaaaaaaaactttattggtattacagcaaaaaattcacataagatacataaattatgatacctcaaagctagaggcaaataaaatacacctaattatacaaattctatacaattaaatcaagaacattaggaaaatttttttgcaaaaatgtcaaaaaaagatttgatctggtcgggtatagtggctcacacctgtaatcccagcactttgggaggccaaggcgggtggatcacctgaggtcaggagttcaagactagtctagccaacttggtgaaaccccatctctaccaaaaatacaaaaattagccaggtatggtggtgtgtgcctgtaatcccagctactagggaggctgagccacgagaatcgcttgaacctgtgaggtggaggttgcagtgagccgagatcgcaccactgcagtccagcctgggcgacagagtaagactccatctcaagagaaaaaaaaaaagatttgatcaaaccaagatttcagaaaaacaaaaccaaaaacactgtgacttggttaacatttatttaattttgggaacacagtaaaaaacagaaacaaaacatctattt

SEQ ID NO: 215566 - DNA, 627 bp, Homo Sapiens
tttttttgagacagagtcttgaggaaatacatttctaagaaggatttttacagacactcatctttcatacccaaccacagggtctaactctaaagaggataaaaccaattactttcgtcccaagagctcatgactaatgacagcgtaaatctatgctatcaaaacctgcgtctctcatctgttacgagtattcaggcaggattcaaatattctcaaagaaagaaacacagtgcatgctgtgatcgcctgctcagcaacaacaagcactgcatcccaaactatctcctcccaggaattaaatgaggccagttgtgtacactggcatttcctccactgtggtactgcagaaggtctcagtgtcacaaagaatccttttgtcttctttaatatttatggtcacagctgtcttcccaagttgaccccgactgccagttcaacaagtcagtagcagtcaaaatatggtttgtcctttatctgaattccctcctgataatgttttcttccttctgtcgctaccctctttcaaaattattgtaaaacactgattctttcaagggccaattcttccttcttcaccagaatttgaaatagatctgtcatgaacttcttggtaacttccaacatatt

SEQ ID NO: 215567 - DNA, 617 bp, Homo Sapiens
cccttttttttttttttttgtagtaacatccagtattttaatatttatgcttgataagtcatttaagttgaagactctttatgtattaatttcagcaagtaacataaccacacagaatagacaatgaaagcataattagtcattatacacaattataatttgataaaaaatttcaacatatacagaagtataaagaatgtgtatctatcatgcagcttctacaattatcattccaactcctcgtttctttgatattgccaacaatttacaccctgccccaattccaaatttggaaacaagtcccagatattaatataatttcctcttcaacatttcagtatgcctgagagattcttgtttaaaaaaaacatttttttgaggggcacagggtctctctctgtcacccaggctggagtgtaatggtgcgatcttggctcactgcaacctctgcctcccaggctcaagcaattctcctggttcagcctcccaggtagctaggactacaggcgcacaccactgctctaggaccgtgtactcttttagagatggggtttcaccatgttagccaggctggactcaaacttctgagctcaggtgatccgcccaccttggcctca

SEQ ID NO: 215568 - DNA, 615 bp, Homo Sapiens
ttttttttttttttttcattcagctaacatttattgagcccttaatgaacacataagagttttgacttcacggcagttcatactgggacctcagaccactgaaggcagacagtaacgagcagtgctggccgggccccactttcagagggggcggaagggcatcttgacacgtgtcatatggtaagaggcgcatccactcacccaggcctggtgcaggactctgcaaggccctcctgagtaaagagtggccacgaagggctgctaggcagcacctactcttggaatcaagcagggaaaaagtgcaaaattggagctggcgggaggtgtgtgtgcctgccccacagatggctgtggtgagccacaaagcaccaagattctgttcttcattcagcaaccacccatgagcctcctgctttattccaatcgcatggcaccagcctgaaaacctctctcccttctgagaggaatgctggaatgacactccactctgcccctccctccctccttccttgctcagggtccatgtgaacagcaggccattgttgggaagtgcctgttgcagtcattcttacacccccacagccactgccccacacacccactggtggctaccaa

SEQ ID NO: 215569 - DNA, 598 bp, Homo Sapiens
ttttttttttttaatttagagatagttaccaaattacaaatagcttcagctttggagttaagtaacaacctggtttgaaatttcagctccattacttattatctgtgagactttgaacaaattagtaaaactctctgagactgttttccccccatgtcaaaacacctattttgcatggctatatggaaattaaatgaaatagcaaatatgaaaaacttttggcccagtgtataattcatatcaggcactgatctgttttctttttgccctaacctacttttcctgcatcatataccactacacctctttacaaaccttattaatagagccactctagactactttatttccccaagccatacaatgtacttttgtgttttttcttcagctacatgctctttccttccctatcaaaattgtactcaatcttcaaggtgcagttaaaatatccagtcctccataaaaccctttgtactccacaactagtgtgttaatcacttcttcccatgcattcttagcctgtatattttatcacaatatttatttgaatctggtttatattctgcttctcccaccagattatagggtcttcaagaac

SEQ ID NO: 215570 - DNA, 630 bp, Homo Sapiens
ttttttttttttttttttttagctgctggatacaattttcatggcaataggaactgaagtacttcaaataatgtgagcttaaacatgttacttcattgaaacaaccaaaactacttgatgtttacatctaaaatcctggttaaaataaattttagatttggaaagggaattggcaaaactaacattctttgtagcaaaatgtcccttagtaatagtcaagttgacctcatttcagtagttcataaaggaaaatccaaagccctcagcagtgaattacctggccacatagctgattttggtcactgtgaatgcagaccaatcacctagtactggaagctcacagtggtagacatcactatcacagtactttacggtcatggatttctcgtgaactatttcaggaacaatcacaaagatgacattcttcactgtatttgcatttgtaaccaccaagcaagtaaggatctctgccccagatgcatggtttgaggtaaggttcacagggaccactaaaggggcagagccaagtaaaaacatggatgtctccagtggacagtgtaggatttcttgataagcaaagcacctaaagcttttagttttaatacttgagaagttttaaaaacccatgca

SEQ ID NO: 215571 - DNA, 603 bp, Homo Sapiens
tttttttttttgcgagtaacagtgagctttattttcatgtcaccgctctaggttcattcacctgttgccaacaacatgagggagtttctccacagcccttgattcctgaattgttcaacaaatcaacagtcaccaatacattgacttaaggagtaaacaagcagcttttctctacacaccaccgggcaccccaggaaggcgcagctccctgctccacccccgcctcttggtgcctgtatccagcagaaggacccagcaggaggctgaatccaagcactgctctcaggccactctatcctcatccctggatcctccagggaacaagataaaaaaaaaaaaatcctgttttcctgctttccaaaatggagggccttaacatcaaccaaagttacaaaacaaaaacaaaacacaggagctagctgggcgcggtggctcacacccgtggtcccaacattttgggagaccaaggtgggaggaatgcttgagttgtaggagttcaaaccagcctggcaaatatggcaagaccccatctctctaaaaagtaaacaaaaatcagccgagcatcatatcacatgcctgtagtcccagctactctggaggctg

SEQ ID NO: 215572 - DNA, 581 bp, Homo Sapiens
tggttaatgctttagataaaagaccacacccttgtattcacaaataaacaaataataaaaggtgtttttacatgtttgaagtctttttccagaaaaagatgttcttttcttttgtgtttgtgaatgcatttagagaattggcaatggcatggggttggggggtggggagccatgagtcaggggtcctgagggtacaggaaaggccccatgaccaagggctcaggactggcactacacacccaggggcatcaagatcaaaaggtgaagttaggtatgagtttaagtccttcctctagtcccaggtgtgagactaagaaagtgaacctggaggttaattgtgaagagaactagagccaccagcctgtttcttagatatttgggaggctcccaagttagggatgaccaaggatagctatgacaactcttaagtgatgagctcagatcctagtcctgaaacaaaccacagaggagagaaggtaaactgagagtccagacaaggcagagacaatatattttcttcccgagcacacaggagtagtatatttctcaacctgccctaccccaatctctcctggtagtac

SEQ ID NO: 215573 - DNA, 533 bp, Homo Sapiens
tttttttgaaaaaatatgtgattatttttaatgatttacgtataaaagaaaaataaactttatgatacaatttgacagactacttcataaaaaattttacttacatacaatgtatgcaatttttggcaacccccaaactctattcacatatacaaattcataaaaggcagacatctcaacttgaagtaaaacaaggtccattcagggtcatggctaagtcatttgattcagtagaaaagagattataaatacatgaagggctacttaactcatgtccctccactcccccaaaatgtatgtaatataatctgatcaaacagaattttatggtgcactataggaaggagaaaaagaccagcgtttcagaatggcagatcttaataatctgctcctgaacttattcagctcagaaaatcatataacaacctgagtacagaatttattttggaaattgtatgaagaaaaacccaacggtgccatttgtgctaatccttaaagaaacaaaacctggccgggtgcagtggctcatgcct

SEQ ID NO: 215574 - DNA, 585 bp, Homo Sapiens
ttttcatttttagggctttttatgtggccttcaaagcacgttgcaaacaaatccctttcactcctcagaggaggagccattaggaaggtagggggcgacaggcacagcctacagcctctcctcaggaggacagagggggtcattgcatttgagccccctgcagtcatctcgggggctcctgagggtccaggtccacatgttcgagggtctgcagcacatccacggcgctgtaggacttccaggcctgcatgttacagctcttcaggatggctcccagctgcctgccagggcctacttcgaaagtttgggggaaccccctgccctttttcctttcgtatatggcatgcatcgtctgctcccacttcactggggagaccagctgctgggccagcagcttgtggatgtgcccgggatgcctgtatctatgcccgtggacgttggagtagacagaaaccagaggcttcttaatgtcgactgcctttaaagcttgcgtcaggggctccacggctggctccatgaggcgggtgtggaatgcgccactaaccggcaacatcctggtgcgtctgaaatgaaacttagaggaat

SEQ ID NO: 215575 - DNA, 601 bp, Homo Sapiens
ttttttttttttttccaacaaatcacagttttcctcacagtgttagacttttaggtcactctgatgtagcagtaccttacaggatgaggggccactgctcgttttttccatttgacctttacagtccacatggtccagttagttgaagccacaaaataaagaccagagacagcaaaattattgctaatgtgcaactatattagtagaatgcaattaactgggctaactaatgtgtatgttaatgtcttttttttttcaaaaccaacatcatctaacaacatattcttttagtttttccataaaacctgcattgagaatgatatcatagccccaggcaggcatttaccagactgaatgttttgctgatctgaacactacctgtattccaattttttggctaatgcatggttttgtatttcaatatgttctcatacattaaataaatgaaacacaattatacattatagagtttatatgcatcatgatgatataatttgagaaattatctctatagattatgctaacaaaggattcttaggaagatttttcaatgtactagccagttaagttgatctatctgtttgataacctaaaactatag

SEQ ID NO: 215576 - DNA, 547 bp, Homo Sapiens
ttttttttttagtcctaaagcagcatgttacttccctgctatttcattacctgcaaaagctaattattaataaacaacaaactgctcaccttttattgtaatcacccaattacaatgtcaatgttggttgacatttattagatctggatttctcaaagtgtatttatctaggtcaagaaaaacgggcagaaggaaacttcacccaaattatgtagcagtgttaagcaaattcagtttttgagccaaaattaaatcatttgtgtcttcaaactttcccttgtaacttttcttatagcaatgtaattttgcattttggccaaagagagctattttcttttggcagacaaaatcatgcttctggagaaacattgacttagatctatggaatctgtttcctttttaatagagctctaacaaatagagcattatatatttattttatccaagttgatcctttcaaaaagactgatataatgaaaaatttgaaatttgctctgtagtacatttttatccaatatacataaatatgctcaatttaaagcaattt

SEQ ID NO: 215577 - DNA, 558 bp, Homo Sapiens
ttttttggcagttctggtgatttctttattctttataaacacctttttctacagtacaattcagagaataaatagaggcacacggctataacttccaccacaatctgctgttgaagagacattcaatgtgaggctagggagctagaggtgggggacgtatttgggtaccagggtaacgggaggcctacgtaataaactgcagagatcccatcagtaaggtctgattgcggcctgacggtcaaggctcatgatagaagagctacagtgagccaaatgctcctttagttccccacagtcctagagtaggtccaattctaccaaaaccccaggggttcgggtgagtctgatttattggtccactgggaagaaactgtgtcagcccaagccatccgtatgaattcagttcactccatggtagtgcctgaagtggcctaaatattctacccttttccctggagttagtcacaaatacaagtaataagattactgtttacatgagtttttttcttgattgtcccaaaaagggatcctgttccccatctaaggaaggagagaggc

SEQ ID NO: 215578 - DNA, 559 bp, Homo Sapiens
tttagtggcaactggtatttattacaattatatacagtcctatcttccgttctgaggtctatacatgatcacacaaatgaacatgtgtttcctggggggaaggacagagctggctgttggtcaggaaggccctgctgcctggctcctcctccggagtgagcccccatctcgccatgggattagctgaaccattacacggcaagcgggggcatcggaagcgcagcgtggtttcatttgtctgggaggacgacggggcatgagtggggttggggctggggacaggcacctgacgggtccagggccgggcccagggagggagggggatggcagacaccagagggaccgcagctcctcctccactgaggagtcgggaggcagtagggacgctagctctggccatgcgtggtgtcacggtagtcaagacactcagcaaacacaccctgggcaaggcgtctgtccgggagagggggctggggaggggcttgggccccgaggcttcgctgccttcagcctgacttgagatcaaagccaaaggcagctgggcctggggctggggctg

SEQ ID NO: 215579 - DNA, 544 bp, Homo Sapiens
tttttttttttccatcatccagaaatgggttttattctcagccgagggacagcaggactggtagaaactgtcaggccacacggctgcctgcacagcacccccatgcttggtagggggtgggagggatggcgggggctggctgtccacaggccgggcatgacaaggaggctcactggaggtggcacactttggagtgggatgtcgggggacagcgttctctggtagttgggccacaagactccacaaggatagcacagtgactgattcccagcgctagaggcgaggcggttggccatgtgtaggtgtgtatatatatgagtatttatagatatttatagaacagggcaagggcataccacagaaggggcacaagttttcaccaacggtcacacctgaatgtatcagctcaccactacaacagattaagtcacagatgaagggggctggctttggggctgggggagccactgtcaagtcacagaacagccgtccaggcaggcttggaaagggaggtctccgagaagaggagggatctgtttagagg

SEQ ID NO: 215580 - DNA, 586 bp, Homo Sapiens
tttaattcccacatttatttaattttctttgggtgtgagttttctgatgttctatgatggaagtgacaggtgttttctgacattaattacactacattaaaaattacctagtactgagccagatgtgaactccacataaaggcttatctttatcccttacactcaaggctttctaaccagtatgaattctgtagtgttcaatgagttgtgagccaagaataaatgcctgcccacactctctacattcgtaaggtttgataccaggatgaattctctgatgttcggtaagttgtgaactacgaataaaggccattccacactccctgcattcatagggtttctcacaagtgtgaattcgctgatgatgagtcagttgtgaaacacgaataaaggccttcccacattccttacattcgtagggtttgtcacctgtatgaattctttgatgttgaatgaggtatgagctacgactaaatgccttcccgcagtccttacattcatagggtctgtcgccagtatggactctctgatgtcgtgtgagctgtgcgtgctgtctgaaggccttcccacattccttacactcata

SEQ ID NO: 215581 - DNA, 572 bp, Homo Sapiens
ttttttaacagttaaacttttatatttacaatattctcttcatcttttgccaggtttaaaaatgtgtacagagccgcaaagggttggggtagggataagggattgtcgggattgttttggggagaggagctgggcattggagtccgtggctgaatcatggggtcccccagcccccctcccatgccccaattctgagggcatctgtctacagggttcagggcccaggtctctagcatttggagggcatggctgtttggagaggagctagaccaggcaggggaaaggatcagaaaataactaattttccatggatggaggtaggaagagaagggacagtcaagaggcaaagttctggggactcaagaccagggattctggatttgggtgtcagtggaagacagcaccccagcccctattcaagtttggcactaacaccccacaaaatgccagcagatgaggactctcccctcgtccactgtgtcccttaagcccttccagacatcattcttttcccaaatgcccaagcccaaggccctccggggagtcacctcacacatttcaaattattcctg

SEQ ID NO: 215582 - DNA, 561 bp, Homo Sapiens
ttttttccagggacagatttttttttttatatttaaaaacaaaaccaacctccccccaaataacccccaaacaaacaaaaaaacagattaaataaaatttacagtgaatatacccagcaaacatctgtatgtgcaattaaatactgtgtctgttactgcggcacgaacctcaaacaaacaatatacaagtgttctgggggggccaggggaatcccaagttttaactctgtggggtctaggaagacaagatggggaagtgagagaatggggcaatcaattttgtttatcttaattctgtccatataaatatattcataaagaccaaaaaaggaaaggaagcttgggatgttaaggtaataggaggacagtgtgggactttcccaattctacctgaccaaaaaatgagaaattaattttatgataggagaagagatttaaaaaaatgatagaagaggatggaagccaggcacagtggctcacgcctgtaatcccagcactctggaaggccaaggcaggtggatcacctgaggtcaggagtttgaggccagcctggccaacatg

SEQ ID NO: 215583 - DNA, 567 bp, Homo Sapiens
tggcaactcagtctttattgatggtttcatttttggggtcaccagtgctaagaggtggaaggtgggggggcacctttatgtgtgtcaaggaccccagagcacccccctcacgagagaataaatccaatttagaacttacaaggtggtggggatgggaagaggaagggacacagtatgtacagatgcttaaggggatgctggagggccttcagcaacagggaatggaggtgccaaagaggaagtcgggcagagtcagccactgatctggaccccctcagcctcggccagagggtagatctcaatggcttccaccaggggtagcgcctccacagcagtctccatgacggccaggccaacggcagcctccgcctctgccagctgctgccgcacagctgcctgatgctgctgctgatgggtcttgcggtgcttccagaggttggagaaggagcggtagctcttgccacagtcagggcaggagtagggtcgttcgcctgtgtggatgcggcgatgttctgccaggcgcatggagatggcaaaggccttgccacacacttcacaggcaaaggg

SEQ ID NO: 215584 - DNA, 538 bp, Homo Sapiens; identical to SEQ ID NO: 45354

SEQ ID NO: 215585 - DNA, 589 bp, Homo Sapiens
tttttttttgactttgaaaatattttatttgaatagtaaatagttatacagttgaaacagttctattgaagctttctataaatagctaacaattaagaaaataatgtatgtagaaaagagattgcatttaaaagtaagagctgtcggttgtacaagggccctggggaccctcgaagcagaataaatgataggttgtctgtaattcactcagataggtataaaagttaaaactttaagcagatccctttagaaaaaggctctcttctaaaacgcacagtggaatgtcaagagtggcagggtggggagggggcagcgcgccaaaaaaatctgcaatcaaataatatcataatcttcataattaatataaataaataaagaataaataacaattactcataaatcaacatatacatttagagggaactgatagtcctacctcaacaaagatgatcaaaccaaaaagtcttacgtgaaacactgaggcagttactacagcatcttcggaacactcccttccctccccccacaaaacaatcccagacaacagttcaaggcatttgtggctatactaaagaaaactcttttttaa

SEQ ID NO: 215586 - DNA, 294 bp, Homo Sapiens
ccaaagggagtgctggagaatgctggttctgtgggccttgctctcatcgtctggattgtgacgggcttcatcacagttgtgggagccctctgctatgctgaactcggggtcaccatccccaaatctggaggtgactactcctatgtcaaggacatcttcggaggactggctgggttcctgaggctgtggattgctgtgctggtgatctaccccaccaaccaggctgtcatcgccctcaccttctccaactacgtgctgcagccgctcttccccacctgcttccccccagagtct

SEQ ID NO: 215587 - DNA, 577 bp, Homo Sapiens
ttgttttttatcagaaacgtgtattctttttcttttaatagtaaacctctttacaacaaatatagtgaaagagttttcaaacaaaactcataagaatctcgaggactttgtcttttcttattgtgtagaatactaagaaagcatcaccatacagcacgaaaagaaatattgaaaacaaatcaacagcctcacacttggactcgccctgccccaggacccaggaagagccccaggagtgtgggtgattgtcaggtgtgggggtggggcacctccatggcccatcctgcccctcccttcctcttcctcaccacctccctccctctggagaatggggaagaggagagaatccagattctccattccagcctccctccccccatacaaataccattccttctaccaactgctttaaggggtggggagaggcagcagaggggagaacaaggagttcccaggctccatgtctcctcccctccgcgaaagcctaaacttacccctcaccccaccccaggggattccaaagagtcagttaaaaatatatagagatatagatatttctagatacacttttacattt

SEQ ID NO: 215588 - DNA, 556 bp, Homo Sapiens
ggaaatttttcaatatgtagaagcttcagaattagaggtccctctttaccccagacctgggagggaagtagatgttttgccaaaatacttcttcattcctttaaaaactacatctttcctatgcaagagtgtctcacatgtgcttaaccgaggtgcttctagttggtgagcagtgttgagcttagaagtggtgtgtgctctgtctgtctgtctttgtctgtctgttgtatacagtgggtgccatataaagctgatcaatggtggtgcttcctgcctgcttctgtgagatgggcaaaagattcagcttagaacaccatgactcaccttgccttggtcagcctttcctgggcctgtagggccttgcacatatttttcccaggaggatttcccctccaccccacaggcatggatcagcttggtctgaggccccagctgtgtggggtccctctaatccccagatgttgctgaggctgaaggcctctgatctgataacatgtcagatagtaaaagatgtgggggtgggggtggagggctcctccttcataacagtttctaa

SEQ ID NO: 215589 - DNA, 593 bp, Homo Sapiens
ttttttttatgaacatggagttagcttttattaaacacaaatgtaccagacactgtgccaggcacttcacatacagtatttcatttagtgcaacaatcctgcagtactggtcttaacctaatgttgcaaatggggaatctgagattcaacaaggttaattagcttgcccgtaatcataagcacataaatgtgattctcaaggattccaaggcccttgctcagtttactggccatgctgttttcttgcattttatgtaggaagaacaggacccaggcatctccctccaccattgacctccagagaagagatgacacagttggaagggctgtctaagacagacaggaaatggagttgggggccaaatctaagttaggggatctgagttaggggagcacttctcaggagtgaaaatgcacaggaaagtggtggctggagttggaagtgttagaggcctgagatctacggtcttgcgcctgctacagcacctgcaaggttctactgagcagacaggtatttcattcagctattaggccttaggcttctgggggggaaatgaaagggtgggtggtggagcctcaggggttaatgtcca

SEQ ID NO: 215590 - DNA, 591 bp, Homo Sapiens
ttttttttttttgcagcggtgtaacaaattttaattcaaaatagacactctgaaaacaataggtaaaaaaaaaaaatgttcaacaagctctctttgaatttacaacagagtacaccaacaatcataaaccagtttcacaactgcctcaaatatgaacattatagcaattacatgcaagtattatattttttaaaatccacatagtaacattatgtttctcagaggctgtcacatcctccaaatatttctacctaaagatagagtgaaggggttcctctgctgtgtaccaccagaaatatgacttaccatctaaactggctggtctccatgactggttctggtgctttaagttttaatatcgtgtggggaaaaaaacgaggtttaacatccacaggacagtgacgacaatggagattctttaacaatatgccatcccatcgacccggacacagcttccagcctaaaccagctagagaaaagcccgtttctccactaaacatgaccttcagaaaatgtggtcaaagacttactgtaccaaccatggagactgagatctcagtctgtaaacttcgccatgtcccctgaaaccct

SEQ ID NO: 215591 - DNA, 588 bp, Homo Sapiens
ttttttttttttcagggaaatactgttctttaatggacacccttctaacgtgatagattattctgccccaaagaacaaattaaaagatattcaacttgctgcctgtgtccaggaagagagcagggagggtgctgggcacagacccagcctagccctcagcatcacacaacagggccaccataggatgagaaaccattctattagtaataaacagacctcttcaagaaatagtgtttttggtggttcatacattttaaaacacttaacaagagaataagcatacaaatttctaatactgtccaggtacaacactgttacacacaaaatctaacaagtgtgaacttaattttcagcttctatttgaaatcagatgaaatggcttttgatacattaaccaccaggggaaattttgagggaaggagtgcttaattccatatgtcttggacttggatttcttcagctgagtccacaaaccctctttatgcaaggttgtgtgttctgtagctgtgtgcatttcttaaaaaccagagtctccaggggccgacctgggagcctaagaagtgaagcctgctggtgcagaggggccag

SEQ ID NO: 215592 - DNA, 577 bp, Homo Sapiens
tttttttttttccataagaaaacattttgaagcctttatttacaaaagctttaaaaacaaataataccctctgttttgcaaataatgttttgtttaaaaaggaccacccagttacagcactgtaatatcatgaataaagaatgtacaagggagacaaaccaatgtgactaacatttggagatttgctaatattactgattgaagtgtaggtaacacacattataacttgtagtccatcatttcggggtagagttaatgattactgtaaagtcttcctacacatgctctggtctggtcacatattctgcatggctaagtatttcacagtctcttttgtcaatatatataaaatagattgcaaagatatacacaaaaaaataagcattacactcctcaggtaattttatcagctatatatatatatatgagaatatatatatattttgttgttttgtaccaaatctctccattatttacctttgtagcaactatgaaagcacaatttttgtcttctaatttaatttgggacaaaatatacctaaagacttatctttggatttttaataaaattgatttg

SEQ ID NO: 215593 - DNA, 605 bp, Homo Sapiens; identical to SEQ ID NO: 53822

SEQ ID NO: 215594 - DNA, 615 bp, Homo Sapiens
ttttttttatttcaaaataaaaactgtatttttgcttttctttttttttttcaatttttgtttttgtacaagattcaatagttatcacatattaacttatacacaatgggatcaacctcctcctccatgtcgcttcaagtccacatgttcaggctatagtccccaacattattttctgagaaatatattaccacagtttgatttaaatatagatacagtatataatacttgtctctgggaaaaatcaaattttaatatgcaaatgtttatataatacagaaatggaaaaaactacagtaggcacacaacctaattatgacttgtggatgatgatttctacatactctcctactgtaaatgaatagttaaaagtcttaagaagattttatttatatgtgcacttgtgtccaccttatcccatatactgtacatgtctattgacaatctgggaatttaaaggtgcagccctcaagagattgttaaatcactaaaaaaggaaacaattaggctctattggacaagaaaaacactcacaaaatttccaattttaaatttcattatcagtaggaaagtattaaaaataattttctgtatatacatatgggtatatgtata

SEQ ID NO: 215595 - DNA, 609 bp, Homo Sapiens; identical to SEQ ID NO: 49147

SEQ ID NO: 215596 - DNA, 586 bp, Homo Sapiens
tttttttttttttttattttcttaacattttctcaagtttattgtaagaatatagcatataatatacagaccatacaaaacgtgttaatcaactgtgatgggtaaggcttcccatgaatagtaggctattagtgcttaagttttgaaggagtcagaagttttatgtggattttcgactgcacagcagtcgggggtcagtgtccctaacccccccactgttcaagggttagctgtactatatgatgagatgtgcaacatggttttgataagaggcagcaagggtttaggacattctgtggcatactggccacatagcgatttgcatcaggtcagatattctaagtctagaaagcctgtgggatagttctagaggaggagcagagatgaagcaacgcaaagatgcccttgttcgtctgcaaaatttagggtctctgagtgagacacagctcaagggggggactgtgagcatttggggaagggggttctgtccaaccaggcaaagcggggagtcatggctatcacagccatcttgccctcacattcaagaacttaccatcatagggacactgaagttatcttctcatat

SEQ ID NO: 215597 - DNA, 512 bp, Homo Sapiens
aagcaactctcctgcctcagcctcccgagcagctggtattacaggcatgcgccaacacacccggctaatttttgtatttttagtagagacggggtttttccatgttagtcaggctggtctcgaactcccgacctcaggtgatctgcccacctcggcctcccaaagtgctgggattataggcgtgaggcaccacgcccatccggaatgtgtatttcaaaagcaactttcagaggcaaatcttagaagaatatggaatcaggaagactaaggtctccctaagttcccggatagagtagaaagctagaaaagggagagaaataaaaggtacgggagtaaaataaaagggtcggattttgtaggattctaaggaagaggcagtgtgctctgtccacaggctgcaaggtgagaacctaaaagaatgagatatattcccattttggaatggcaatcaaaaagaggatctctctgtcaagtctttacattaatgctgagtaacaatctcaaaagcctgc

SEQ ID NO: 215598 - DNA, 576 bp, Homo Sapiens
tttaatatggaaaaaggtcatcaaaacggtaggcaggttgctgtttttaatacattcttgggatgttggccattcagacagcattatttcaaatatagatgagttatccaactttttttgactcaaagatagtttgcttagattttttttttttgagatggagtcttgctctgtcaccaggctggagtgtagtggcgtgatctcagctcaccgcaacctccgcctcccaggttcaagcaattctcctacctcagcctcccaagtagctgggaccacaggcatgcaccaccacacccagctaatttttgtatttttagtagagacagggtttcaccatgttggccaggatggtctcgatctcctgacctcgtgatcagcccgccttggcctcccaaagtgctgggattacaggcgtgagccactgcgcccggactagattttaacaagacctaattccatgggattatggtggctaatttatcatgagaattaaatataaaaatgtggaggctctgagctgccgacagaggtaaggactaccgtgacgggaatagtcgatgggctaacaggcagcca

SEQ ID NO: 215599 - DNA, 609 bp, Homo Sapiens
  misc_feature (476)..(476): n is a, c, g, or t
ttaaggctgtaggaaatttgtgtgtttatttataaatttatctatctgttatgggaattggctcacacaattttggagtgaagaagtcccatgatctgccgactgcaggatagagaagcaggaaagccagtggtatcattcagaggctaaaggcctcagaacaaaggtgggggtgggaggcgatggtgttagtccctgatcaagtctgaaggccagagaaccaggagtgtggaggtcccaggataggcagagatggatgtcccagtcagagaggtcaaattcacccttcctgtctttttcttctctctgggccctgacagtttggtggatgcctccttcattgctgaaggaaatctttgctgtcttctgattcaaaggcaaatctcttctggaaacaccctcacaagcacaatgattttacctgccatctgagcatcccttagcccagtcaagttgatgcagaaaattgaccatcncattatgccacaggaaacctcaaagcgggagatgaagtccttcagatttgggaaggcgtccaagcagttgggctcaaatatacggtggaggtcaaggacatcataggcgaggaaatctacaaaggtgatctgc

SEQ ID NO: 215600 - DNA, 589 bp, Homo Sapiens
ttttttttttaatcagagtaataactttatttccaaattcacttttacagcaacagtcagtgtaaatcatttgttaaaacacacaatacactatatagacattcacagacagaaagctaagctaagatgatttcatgtccctccccccaccctcagaattaccgaagaaatcatgggacttgcaagtgccagaaatagtcctgctcaacatggcaaactcatggggctaagtctattaggaggtgaggctctaggccagtgcccagggtaacccttttcaaagctgaagagaaatcagaagttttatgaagctgcaggtctgtagatgggacacgcaggtgatcacctctgccctcgccccgacctcgtggctttacttggagaacaaagatgaggagggtgaagcgagtgatctcagctccaaaagcacaggctgtgtgtctggagccagtgtgagaggtggcacagaggtgccaacggcttagagggaaggatgccaaggtcttagggaggcatgattgtgggcttaggacccctgaaagagggcagcaggccaaagcaaccagatgtccatattcctacgcctgca

SEQ ID NO: 215601 - DNA, 591 bp, Homo Sapiens
tttttttttttcctttcttaaaaaaaaaaaaggaagtaaataaattaaattgccaacaatgtggctgagatagccatgatcaggccattcttaaaaaaaagaggggggggggcagtaggtggagtttgtgaaatataaacaaacaatggccaaagaaaattatcaaagtaactaactacagtcacagggctagagaggggtctatggaacaattatggcctgtgccacaagaggcagtgccaaccatattttagcaaaagctaggagtagcttcttgctaaacacatcaacccccaacagattaacccctaccctaaaccctggcattccctaattatgaaaacttgtaggaaagaagagctcatctggaaattttcagtatcccaacctgcatactggtagacccagtgggtgcctacacctttaaggtgggctgaacagggatactgcttggcacagaggtccagtctttccctaagggccatcagtgatggccaattaacggcctcactacttatttctagagatttggctccacccttaccatttcttcaggatgtctgctgcttagagtcaacaggcctgactgct

SEQ ID NO: 215602 - DNA, 614 bp, Homo Sapiens
ccctttttttttttttttaaataaaaaaggtcatttccccctagtgttatttgtggggagtaaccacactgatgtggctgtcatttcacaagagcatccgagtttgggagatatgcagctgtaccaagattgaaaaaaatcccatggagaaaggaaacattgatttcgggggtgttcctcatcttctggtgagttctgactctgagttgggtgtcaactctgagcagataaaaaaggctttgaaagctccagggagtgcttgaatcaagtgatgtaaccagaaaaatcaccatttctccacgacacctcccttcgttttcaggccttgtcaagaagacaaatttttaaatcattttcctgacccctgagaaagcaggaagccattgtttaaataacacaaggacaaaggctgggatcaaatggtggctgtgtaaatctctggagtcattttattccatcagactcttcacaactattcctatctcccacaggaggagtggaaaaactttggattcttatttgtcattttaagccaaggaaagattaatgagaaggtcattacttagaagtaagaatgtagaaaatgcttactttttgtaattgtaacttcttag

SEQ ID NO: 215603 - DNA, 634 bp, Homo Sapiens
ccctttttttttttttttacactcttgtcaccagcacttttattaagacgtgaaaagacaaagacaacagaggacagcagagaataatatctctgtttcagctattccaggatgttatgccaattatccagagtccttgatctgatgtagtaaagagctagggacattttccctgaaggctttgattgctggcaaaatctcattaaacgtgtatacattcataggttggccataggatggataaaagaagagcctctggcctacatctgccacgatacatgtgcaaaaatgctctctgcagcattatttttcattgtaaaatagcagaacgaatttattattcaataattataaaatggtcaaatgtatgtgactatatttggacaatgaaaaatgcagctgttaaaagcagacaatactgatgattcagatgatgttactgatgaaaataataacagatgacaattattgagcatttatggcattcttacaggcattaccttatttaaagttcagaactaccaaggaaaagagtaacttgtggcaggcgtgagaggttccgaggcacaaaaggaagataggcattcaaggaacaccaggatagaagacccagagtaggagaagagagaggaag

SEQ ID NO: 215604 - DNA, 615 bp, Homo Sapiens
tttttttttttttttttttcctgtttgatagctgtcagttatagtgattggtatttaatacaaaaaaaaccaaagatatgaaaattgttctatattttaatctgcaaattgctccattaggcagatttaattatttgtggatttacttatggtgcttccagatatcttgtacctcttaatgtgaccatcagaaaacttgactgagaaacatttgtactatacaaaatacaaaatgctttcagtatattattgcaagtgcttcttaaaaacatatagtattgttaaatgtgtactttttaatgttgtcttgtttaaattggaaaattaaccaaatgttatccatttaaacatgctttataacatattaaatgtgagtgcttaataagtacttttaatgatactggtacgggtgttggaacccagtcctagtcaagagtctaaatcttcatctctgtttttcagacaaatgtagtaggacattctttaggatgtacttggcattccttgaggaattctcctggtgaaaagatcaacttactgaaaagaagcctccttagtattccaaatacagattacatccagctgcttagtgaaattgccaaggaacaaggtttt

SEQ ID NO: 215605 - DNA, 578 bp, Homo Sapiens
ttttttaatgggcattgtgaatgaaaatatgtaatgtcaacctttactttatggtatcttaggtttgtcttcttccccttcatagttttcccctttgaggataacccttcaagctcaaaagggcacaaaagctaaaacgttattcacgtacaaaataccaagtatatagctgttctgcagtttgatacagaacaaaagaaaataacttttctaattaaatccctcattctgtacttaggccagactccatccccactacagttttacttgtattaacaggttaagagcaatctaggaacatttggcaaacaagtacattttttacatggaaaaaactcaatcaacatcaccattctctggtacaagaaatacaaaacacatttcctttaaaaaatcctcccagtgctgaagtatcttctaagcttcccagagtatgtcctaagctttataaataataaatctttcagacatgtcagtatgaaaatgagactggtctcaaaaaaaacccatcagaatattcagagaagtaggcctcataaactttagagctctaataagtcagaaacaggaaacgttta

SEQ ID NO: 215606 - DNA, 564 bp, Homo Sapiens; identical to SEQ ID NO: 43417

SEQ ID NO: 215607 - DNA, 538 bp, Homo Sapiens; identical to SEQ ID NO: 44962
  misc_feature (532)..(532): n is a, c, g, or t

SEQ ID NO: 215608 - DNA, 588 bp, Homo Sapiens
ttggtgacaacattaacatttatttgaaaagggcatcgtgatggctcactgggagatcgcgactaatagtcctagagaatgattttgctaagaatccttcttcctatacttccccccactccgcctttcccacttccctaaaataaaactaaccaattcaatgggtttaaaatacagaaaaccgccacgggcactaattctgcactcacatataaatacaccagctattatatacacatattgtcaactacaaactatactacacacacatgcacacacacagccaggtcgtgaggctctaagtggacacagacacattacgagatatgggctacagcatttgtggattcacaactctgcctccacgcgccagaaatcaacagtcatggggggagagcttggaaggggaaggtgactggcttgggcggccccatggtcccctgaagtacaggagacctggccagccaggctggggctaaagggagcacagaaaactgcctttggccccagcagggccacaaagcccttcctgccgccctcctgtccctgccataccgcgtcttccagctagccaggctctaggatggg

SEQ ID NO: 215609 - DNA, 596 bp, Homo Sapiens
ccgcagagcgccgggggcgggaggagcaaacgcaggaggccatggccgccgccgccgccgccgccgacgccggcgccggctgctaaggggctcggcccgcgagcgcctgctgccgcggacgatggtgaccgtacgggccgggccgctgccgctgccgctgcctccgcctccccagaagcaacatccgaggctcggcgcagaagagccgccgctgtgagccgtgccgtaccggcccccgccgccgcccgaggagaacgggagggcgggcgagagagccggggagttgcggagcccgcccgccggcagcgccgctccccagggagggagtccgcagcctgaggtcttctccaagaaaaaaaaaaagaaaaaaaaaaacaacatggctgcaaaggagaaactggaggcagtgttaaatgtggccctgagggtgccaagcatcatgctgttggatgtcctgtacagatgggatgtcagctcctttttccagcagatccaaagaagtagccttagtaataaccctcttttccagtataagtatttggctcttaatatgcattatgtaggttatatcttaagtgtggtgctgctaacattgc

SEQ ID NO: 215610 - DNA, 607 bp, Homo Sapiens; identical to SEQ ID NO: 45448

SEQ ID NO: 215611 - DNA, 591 bp, Homo Sapiens
ttttaacttaaaacaaaatagtaatttatttacaatagcaaagatgtcaaaaataacaggaacaatatataacaaatccaagatttttatgaaaaaggcaaacagtatatacacgaaacaaaagatgaaacaaaatccatagggtaaacttaatttgaccttagctaaacagttacagaatgtggcaaaatggttatgatttatttaagtaaccctgggccaattaaacacacacacacacacacacacaatctttttcaacccttctcttttaaatgctgaatcttcctctcaactcagttaacctttgaagaatgtaaccatgggaggccacacgagatttaggaagtgcaggctatttacatgtgcgctaaaggcatacttgttgacttggcaggctcacacttttaaaacagcaaatggaaggtataaactgtctggggtcctatttttctctcactgttcatttctgattttttgtgataatttctttcttatctaccacacaaaatgctgaaccagtcatcttttaggttcctcaagtgctctaaaagtgtttcccaagtttgaacaggcatcagaatcacttgg

SEQ ID NO: 215612 - DNA, 560 bp, Homo Sapiens
tttaaaaccgctttattcaggttggctggtagtcacagactggatcatgtatacagggcaacccacccctaggcaaagccctcggcctctcccacctcccccacgtcatcactgagctgcggcagccagaggtgccagccaattccgaggagaattgggtccaatagaaatatttacaaataaccagggggcaggtgtgcccgtgatcgggaatcgtgagggaactgagtaccagggggcccttggctcccaacagccccaggccctggggcggacttggcacaggacccaagagggagctggggcattggggggccggcagagggggactcctgggagagccttgaaggccctcaaaggggtcctgctggtgcaaaactctgcctggggccatgggtccgagggaaaggcccctcccttctgactcgccgtgtgacagggcagagaatcctggatcccctgcatccctggagggtcgcacagggagctgaacaggaaggactcgccaggaggtggtggggcatctcgctgttcccctaggcctccatgagtgaccctgc

SEQ ID NO: 215613 - DNA, 602 bp, Homo Sapiens; identical to SEQ ID NO: 54723

SEQ ID NO: 215614 - DNA, 504 bp, Homo Sapiens; identical to SEQ ID NO: 50256

SEQ ID NO: 215615 - DNA, 588 bp, Homo Sapiens
ttttttttttacttttcttacccaaatcagagtcaacgcttttataacattttcattaatattttattgaaactgtcctgatgattttgcaaaaaacttttaagattacatacaaacctggttcatttgactcaaatacttaaaatctaccttgattatgtaactaaagaactacatgggatcccaggtctactgcaaatgtacgattaatctctgcagtatttgataatattcttcaacgtctttctctttactccttccttacccttctgtcacagagaaagaaatgtctctactccctgttgggtcaaacctttctagctgtgctgtagatcccatatacactcttgacttttatgggaccggaaataatctccattctttcagtcttcaggtccttctggcaactctcctctctagctacaagtgtgctcaagcctgtcctaacctagaggaaaaataaagcaccaattatcttttttttcaaaccagccttgatccttaagctatcacttggattctctgctttccttcaccaccaaacttcttgaaaggtatttgaatttgctgtctctcttctctgatctt

SEQ ID NO: 215616 - DNA, 606 bp, Homo Sapiens
tttttttttttgataataagaggcatattttattcagtttcccagtaagtcaattagaaacatgcactgctaaaatgcaagttacaattcaaatggtaccataaataattagagtacacactgagcattttcagaaatcagcttccatatcttgatcactaaatggaaaggttcttcagaacagtcccttaccctatatacagaaggagaagaaaaattaaggatgccataatgacatctatcagaataactggaaaacattttaatttagcatacattattgacatgtaaaaaacacaaatgaatttgtcgtgaacatttctataaggaagacattccattaggaggagaatgataaaattcatgttgaatatatgctggaactaggatactattaagaaagaaacacatttatgaagcccaattggtaaagatgtcattataactaaatgaggaaaattacatatttgaatatatggctttctttcctatcttcaacattcaaaagggccatttcttaactacttcgcctaaattttatcatgttgattcctttgtttcatctcagagattttatttctaccccatatagctagagttctgctt

SEQ ID NO: 215617 - DNA, 565 bp, Homo Sapiens; identical to SEQ ID NO: 45573

SEQ ID NO: 215618 - DNA, 602 bp, Homo Sapiens
tttttttaacttaaaatatggcattcaggttttatccctctccccgacgccatgtttcctttctgtattagtcacacacgtgatcctaaagtctgtcttccccactttaactggggagggctggacaaggtggaattccaattgcaggagacaggatgtgacatgggtgaggtgcccaaggctcaccgactgaaacttcgatggctcttccctgtttccttgtgcagggccccccttctctccactgctcacctggctctcctcctcccttcctgcctgctttgcagctcttgctactattttccttttctttccctgctcccaccctggcccaatttatttcacagaaatatcacagggccagccaggcacagcggctcacccctgtaatcccagcactttacgaggctgaggagggcagatcacttgaggtcaggagttcgagaccagcctggccaacatggcaaaatcctgtctctactaaaaatacaaaaatttgctaggcatggtggcaggcgcctgtaatcccagccacttgcgagggaggctgaggcaggagaatcacccgaacccgggaggcggatgttgcagcgagccaagat

SEQ ID NO: 215619 - DNA, 572 bp, Homo Sapiens
ttaatttaaggatgtgtttatttacaagatacaaatgtttaatatttaataggaattaaagtgcttaattttacaatgtttccaattatctgcttttatgaccaaatatacatatattacacaatatatacattatctgcaagtattttacattcacatagctagaaaagaaaaattacttgtgtatactttcacacttgagtcaactgtaaaattccaaaaacatacattctcaaacttatcagtcaagaattcaaaagaaaaatccagatacgcttattttattttttgagtcgaagtcttgctctgtcacccaggctggagtgcagtggtgcaatctcggctcactgcaacctctgtctcccgggttcaagcaattctcctgcctcaacctcccgagtagctgggattacaggcatgtgccaccacacctggctaatttttgtagagacagggttttgccatgttggccaggctggtctcgaactcctcggcctcccaaagtgctgggattacaggcatgggccaccgtgcctggcccagatacacttattttgttttatttttattta

SEQ ID NO: 215620 - DNA, 591 bp, Homo Sapiens; identical to SEQ ID NO: 50285

SEQ ID NO: 215621 - DNA, 592 bp, Homo Sapiens
ttttttttttattattattatactttaagttttagggtacatgtgcacaatgtgcaggttagttacatgtgtattcatgtgccatgctggtgtgctgcacccattcctacttctttactatttcccttttccttaaatttatttcaggaaattaaagtgtagaatacttgaggggagagtaaaggatgagtgaaataagaatttaaaaagacaagaaaaaacatcctaagaaatatgctaacagttatgtttccactacaagaaaaaaacctactaagagcatatatagtgtaactattaaaattccatctgcttcaagctctttcagttcatttcacaagtcctgaagatttgtcctgacttctttggctgctgctttgataaaattagctggcttctttagcactatattgaagagcacatagttttacagcactcaaacaagcagctcataataaaagaaaactgagcttcctttgcatagacaccccgaccttgtatcagatcttgggcaactgccggctggggtgaccagggaattcttctggtagcaaaacgtggagtctgcacgttggacatgtcccctgttgca

SEQ ID NO: 215622 - DNA, 594 bp, Homo Sapiens
tttttttttttttttttttacaattataaagttttatttttgaagaaaattatcatgtgactggcaaattcaagaaaaaaacattagagctgaaaaaaagttattttaatccatcaacctgttccaagaaaagctgctacacatcatcctggctaaatctgtggtaaccctgttttagagacttcttgaaggctactagggggcaaagaggcatggagattcagtctcatggcttttattatgcattccaaataaatagctgttttctgaatgcagttgcccaaatgcctaaaattttctgactggactgattctcactcctgatagatttctaaataccttatagaagtgtcttcaggaaaagacgccaagcaaccctttgaaattcctcaaagctgcacactcatcacctgggaattattcacaacctctcctgcgattgccctgtgggccacaacctctgcctgctgtccctgtcctcgcgaccagctctccctcagggcccccctaaagttactgccccaaagtccagactactccttgggcctccagttaatcctccttgctgcggctagagagctctttctaaaacag

SEQ ID NO: 215623 - DNA, 581 bp, Homo Sapiens
ttttttttaacatgattgccttttatttattatgcaggttgttgatttacatagggagttggagatgctaaccaagcatggagttttcacatggtctatttctgctgagttcagggacttggagacagcctttaacttctggcaaaaagacaatttcacaaaggtgtttaaaaccatcctttggtttttgatcctgagtcagagacggacatgtgcttatgaaagaaggtagagtttcaacccttaggtaaccttaaaagagcaggaactatgttgtgtgtaagtcatgtgcagtatacaaacttgatattaaatgacaaattggaacaatctttctctaggaatgcctctctttcatagaggcatcacagtgagtctcttaaagccttgatctaggtgtgttacagatgggcttacagagtatgaatgcacgataagaaggaaattggatagggagtgaggatatgaaatttaaaagaaggaagaagagaaaacgagattttaagacaggaaatgaagctctgtgtgtgtgtgtgtgtgtgcgtgtgtgtgtgcacgcgtgcgtgcgtgtgtgcacgtgc

SEQ ID NO: 215624 - DNA, 590 bp, Homo Sapiens
ttttttttgtggaatgtaattgttttatctttttctggtaacgccagtaaagctgttatcctaagagacataattcacacatcatccaccaattatgcaattgacagaattgtaccattatcacaatcttagggcactttttctgtttatgcctgctcggcttatgtaagcacattttcattacatcaaaaataaaactgcccattagctgtcacctcctatttccccctccctcccagtcttaagcaaccactaatccgtctctatggatgtgcctattctagaaattccgtataaatggaatcacacaatatgtagtaactggcttttcacttacagtacttcattctgtttatgactgaataatattccgttctatggatggacattttgtttaaccgttcatctgttgatggacacgtgggtttccacattttggcttctgtgtacgagtttctatgtggacatatgcgttcaattctcctgggtatgaaactgctgggtcaaatggtaacaccatgtttatctttttttatttttttgagacagggtcttgctcagttgcccaggctggagtgcagtggcacaac

SEQ ID NO: 215625 - DNA, 613 bp, Homo Sapiens
gcggccgccctttttttttttttttttctgagataatctattaaattacaatttataaagaaatgtttataaatttgtatgaagttataaatttataaatataaaagtataaatccatatagagctgtttaaacaagaagtttccctctgagaggattacagactatgcaatctgctacatgtgatttcagataaatgataaattatacctaatgtgtaagtataacaatcaatttttgatatttaaattatcctaaaacctgttgagtgtgaatcctcttaaatctttcttttctgtttatgcttctggctgagaatggaagaagggacggaggcttcaaatgactgaaattgttcagatggtttcttgtgaccgaccactgtaaagtatttttcaccagagtccaaaggcaagataaaaagtctctgacttgaaatcagaatcgatctgctgatctgctagccacagctcgaatattgccataaaccttggaaggaggatttcccaagattaggttgcaaatggcagttcttgccatcttgatattttggaaggagccaaggatgtgaactttcacatcagccaaaactatccttgtccgtgtcacattct

SEQ ID NO: 215626 - DNA, 598 bp, Homo Sapiens
ttttttttcttttgctaagtaaaaagtaggtttaagggaagaatcatttatagtaacactgaattaagtaagggtttgtaggtcacagaatcagactatttagggctgatacttcaagcatatctcaattaacaaaaaagcacattgagactccaaggatgaactgcctttgcttagtggccagggcactgtcaagacccagaggtctcctaattcccacgctagcacaccataccacccctttgttcaacctcacagaattgccaatactagcgtatcaccaggaatacttacgaaccatactaactcacatggaagaatggcaaatgaaaactggcccacattttcttgttccttcttcaaagagtaatagggttctacctaattgtgaactagaagctggggatgaaaaacaagccagatacagagctcacagtccagaaggagatgtcaacaagatgacaggctgccatgggtactgacagaagtctacataagggacagcaggggaacaaaaaaaggcacagtcaaaacatctttgactgcaatttggagactttaaacaaggattatcctttctacaggcatactgaatttt

SEQ ID NO: 215627 - DNA, 578 bp, Homo Sapiens
ttttttttttttttcagtttgaaatgttttccccctttattttgtttttcaaattacaaaagcaatatatgtgaacaagacaatgcaaaggtattcagaaaacttattacccttctccaccaaggtaaccaatgaatgttaacaccttcgtgtgtattcttctacacttttctatgttcatataaacatccacatgcatatatacacacacaggagtttttactttttttaaaaatagaatcgtatacattattatgaaattttccctttttacaatatataccatgaacatccccacaaattagcaaaattctagctcccccatccccagccaaatttactaactcacacatttgtggtatcacccgtgattcagtcatttatgtatttttcttttttggttttccttttccctacacccctgactcccccataacctacctgcattacccacctccctccaagtcaatgcatactcttctatacttttcttcatgcacataaaatcaaataaacatatatagataccgtttattgctgacaaacacctagagacattttgttaatgatttaaaaaa

SEQ ID NO: 215628 - DNA, 591 bp, Homo Sapiens
tttttttttttttttttgaaactttaaaattttttattcaacaatgtacacttattgtctctcaatttgatctacaaatttctcaagttttttttctgataaaataagtaaatctgggtatggttgtagagtgtttgtaatttatatttttaaaacactgaacatgatgaagacatcaataaaggaagatcatcacgtaaatgacacttcctcagaatccatgacatcagaaacagctatagcaaatacctaagcatttagcaaaagggaaaatttctggtgactgttcttatatgtagaaaagacctatatttttgactgggcaaaacaaacattgaaacttttttttgagcggggggaacatcctttaacataactgtactccacttattatccattcccccagattaagaggtaactcagctccttagtgcctctgcacgagacagagaaattacttcactcctccagtaggttctaagactgaacataagtgaactactgacagatgcggaagaggaaccatagccatctaaaatgatgcttgctacactcctgcatttctgccttttaaggccatgcaattaatat

SEQ ID NO: 215629 - DNA, 581 bp, Homo Sapiens
atcctctttaatactcttagaatcttgagtgtgttttacagaatggtgcacacaaagccccctcccctctccccctacaaggcacagcctcacccaccccactccccaggggccagaggaccgcttgccaagaaaggccagcccaccttctcccaggagaagccatcctcctcctccccgcccctggccagctccggaccctggagaatacaggaccagctctgtgccatgcccccaaggactcacctgtccctaagcagctcagggccaagccagatccccttacccaggcagaccccctccagcccagctcccctaggccgtgtccctagggcatggcctaggctaatctgagctgtctagatggacctgcatcaggcctggggaaggggtgccaccccttaatatcaggtaaaacccaccctctcccctctcccactgccttcaatataattgtgaaaaataaagatataaatgtcatagtgggaaataagttgacccacccagtaggcagtctcctgacagcccagagtgccttatctaacgcccttccctcggacgcgtgggtcgagggggggccc

SEQ ID NO: 215630 - DNA, 580 bp, Homo Sapiens
ttttttttttttcagagtcgcaatgacatttattaaaagatgcctaaagttagacacaactctggttggagggagaagaacttggaggagattgggggaaacctcccgctctccaaaacatttctgtgggatccctggttcccaaagtcagacagtgctgaggctctgggtgggtggtctcttacactgggttcataaccctcgccaggaaaaggctgctccaggtgaagtggtcgaagatcatgatgatgaagggctggttgaaacgcaagatgataggcttggacgtcaggtttagggtgaccccagtggagccagctgtgtccacaccctcctcattgagttgcagcacagctttatggaccacctttgatgacttcagctgggcgtcctgggtgatgcgtgagaaatttgcctggttggtgaacaagtctgcaatgcccatttcctccagcacatctccaaggtcatagactccagagatggtgacctttggaatgtacaggtccacctggctgctggtcaggcctgcggaccacctgttaatcgtgtcccggctcagtgcagcgatgactgtgtt

SEQ ID NO: 215631 - DNA, 616 bp, Homo Sapiens
ccctttttttttttttttttttttgagacagagtctcgctctgtcgcccaggctggagtgcagtgtcgtgatctgatctcggctcactgcaagctccgccttctgggttcacgccattctcctgcctcagcctcccaagtagctgggactacaggggcccgccaccacgcctggctaattttttgtatttttagtagagatggggtttcaccgtgttagccaggatggtctcgatctcctgacctcgtgatccgcccgccctggcctcccaaagtgctgggactcacatttttcacatcagtattattcacatattaggaataaacaaagcctcaccttaaaccattttttaaaagtacaaaataaatactccattttataactatatttgaattgttcattttagaagacaaaaacttcaagaaaaagtagccattttatctcacagtgtgaggaaacactgtaagatgtgttcccaagactccaagtatagtcaggtttcaaaaacttaaggaaaaacagcaagtagctaagaagacatgaaagaaagacagttacgaaggctggaaagcttttttaaaaagttgactgtgaccatatgattctctatagtttt

SEQ ID NO: 215632 - DNA, 595 bp, Homo Sapiens
tttttttttttttatttcatacataatttttatatttaaaatgcaaactataaatataatacacatatttacttgtacttgtgcaaataattctataggcctgactgaaagggaatgttccacctttctacctttttttaatgacaaatttctgataaaattccttgttacctaatgaatgacttcagtttcaaaatatgctaaatgcattcagtttccagtagttctgggcacacactgtatgctaagacttggtgaacttgaggactgaaagagtttcttggcctgcttgtctggaaagtgcagtggttccttgcagaccttttgtcttcattattttcaaaatttcttctgggttgttttctttaatggtaactaaatagaataatcctcttggtgaaaggagatctggaaccaggggaaaaaacctgtccatgacttcccgaccatttctgccaccagcccaagctgcctctattccgtgacttcctacctcttgaggtggagtcactacataggggggattaaacaccagaagatcaactttttcggtcaatcttggtagcaagcctttgaccaaatctgtaataactgg

SEQ ID NO: 215633 - DNA, 565 bp, Homo Sapiens
tgtctgactgtcttatttcagacagtcagtctttaagttctgagattctttcctcggcttggtctattctgctgttaatacttgtgatcgcattgtgaaattcttgtagtgtaatttttatctctaccaggtcagttaggttcttttttacactgtctatttcatctgtctgctcctgtatccttttattgtcattcttagtttccttggattgagttttgccattctcctgaacctcaataatctttgtttctatccatattctgaattctatttctgtcattcctgccgactcagcctcgttaagagcccttgttggaaaacaaggagtgatcgtttcgaggatggaagtcactctggccatttgagttgccagagttcttgcattggctctttctcatctctgcatgtgggtgttcctttaactgtggtgtaaattgaatacagtcaatagacttttggatgttttcacagggctgaagctttgtgcagggtctttatttatatctgacttctggtctttggttttacagcagggatatgttagtgaggcatttttggtgtt

SEQ ID NO: 215634 - DNA, 564 bp, Homo Sapiens
tttttttttagaaaaatgaaagctgatttttattttatcatcaacagccattctttagacatgaacatgcatacgtaatattctacgcacacatcacagcttttaacgttagttaataaaggttaaacacacaacatacatccttacaaaaaaagtcaaaatgcaaacttaaaactttaaacaaaagtattactaatttaaaaaaagtttgtgttgggtaccatttgtacaacacagttaatttaaacattttcattttggttgcacatgaaaaaggcggcagtagaaaataaagtcattgagggtttttaaatagcagaataggcagttttgccatgcaggagaagcaatattaaatattagtttcaaaaaaaatccacatttaaaaatatttagttcaagtcacagaatttttctcagtagagaccccaatgcaatgcataattagctgccttagatggcccgtttgaaaggatgatatcccttcagagtgtaactttactgattttggcacagaaaagaagtcttaagaacatgattaaaaaagaggggagaggaacagag

SEQ ID NO: 215635 - DNA, 612 bp, Homo Sapiens
cccttttttttttttttttttttccaataacatactctttaatcacaagttatctgcatttaataatgcagaaattataaacccatattatttaaatctctcccccactgaagccatgaactagtttcaaaagcagcaacaaaaggatgacaaattgtttacatatatactatagaaatacacactgaactggcaataacatctttacaaaggtgaacaaagggagtacctgcaagtcgcaccacttatagccatatatatatattcatacacgtgtatatgtgtgtgtgtgtgtgtgtgtagcttgaagtggtccatatgtacacacacatatacatatatatatagagagagagagagagagaacgcgagcagactaggtcctttcttgaaagactctctctgtaccttttcatcactaaattaaatctctaggctagggtgttcataagttccactgtaacttaggatttgctttttcctcttaacaaaactgaggcatttttttttttttttttttttgagacacagtctcactctgtcacccaggctggagcgcagtggcatgatctcggctcactgcaacggacgcgtgggtcgagggggggcccg

SEQ ID NO: 215636 - DNA, 604 bp, Homo Sapiens
tttttttatttttttatgacacggagtttcactcttgttccctaggctggaatgcaatggcaccatctcggctcaccacaacctccgcctcctgagttaaagtgattctcctgcctcagcctcccaagtagctgggattacaggcatgcaccaccacgcccggctaattttgtatttttagtagagatggggtttctccatgttggtcaggctggtcttgaactcccgacctcaggtgatccacctgccttggcctcccaaagtgctgggattataggcgtgagccacctcgcccggcccccagactacattattaccaatctaaatcttcccatgaaataggtgataatctcaccttttgcagatgagacaaaaacttttagcctaataattttagcaatagtttagtagtcaagaccaattctaaaatttatattacctacacatttctatcaaaggccaaaagctaattagttaacaaatacattaatcatagttttaaatttgtttaattaccaagtagctgtaaaaggctcagctttaattaaagctactagtaaactgaactattccacagctatgtctgaatggtgttacattttac

SEQ ID NO: 215637 - DNA, 611 bp, Homo Sapiens
tttttttttaatttaaaaaagttttacttaattgcttaaataaaaaataacattaaaataatttctacatatagttacaaagcatggtagagcttgaaaaagcctcttgtaattttgaacagatgaacatgatgtctccatgatgttctaacaatatggaaaagttaaaaccaaaagacttctaacccttggtaagaccagagggattaaaagaccccactatggacatattcactttagtcaaccacttttatggaatgaacacttgtgagagactgggtgtgagctgatctggttccaagtgatctggaagctgaggtactactttcaggatgaatggtccggggatattttgctgcagttgcttgaggaatggtttgcactgtgactggatgatgtttttccacaacaactgagctcatgggaggagaaactcccattatagctaaactgctgctaattctattttttgaagcaaaatcacatcttcctgtgatccgggctgtaatagttcttcctgctttctgttgtgcagaggttacaactcttggcacatacatttcttctgatgcagcagtagctgcagatcctgcaccaagagcagaaacagg

SEQ ID NO: 215638 - DNA, 562 bp, Homo Sapiens
gtaaaaaaaaaaaaaaaaggtacagaaatagattacattatgatgaccacagtagtattctacatgacaaaaataaaaacagatttaagtaaatgtaccggcactgaacaagcatttacttaacatccaatccaggctgcatatgcacaaaatgatctgaccacatgcttatgcaaaataaagtttttcttagaaagccaaaattccaaccattctgactgtccgctgcctattcccctgttgagtattttgagcgaacttctatagaatataagaacaattggcatggcacttaaagactgcaaaaaacagaacacaattaaaaacatttataatgcatttctgtataaaatacacaccgtaaatcttattagttaaaaaaagatttaaaaacaaaagaccaccctgaataatggttaaaacctcatcatagaaaaatgctcatcattttgtacactgaaagaaactactgagaggttttttggggggctggtgggaaggtagatacctaacttaaagattcattcaaaatttgctttaaattgtgggtaataactcactg

SEQ ID NO: 215639 - DNA, 598 bp, Homo Sapiens
tttttttttttaaagaaaaatttaaaagtttattgttcaaacaagaagtacagaccacaatctagaagactcaaatcaagtggtaagaaattaatcttacagcagttacaacacagtttataatgcataaagggggggaatattttgaccttttttataattggctgttatacattctttttagggcaagttgagctgtttaagcttgttggtctatagctgattggtttaatttcagtgaatcatgctggcaaggatgtaaagcttacattttgcatttcatttatgatcagagacagcatttcaggaaaatcagaatgattagttttggttacacggttgcgggtagtcagccttagggtatttctaaactggggcttccatttttatttttcgttaataatacctgcatgagatgggcagctcaggtcttaaggtcacatacagtgcttcagtggtcaagtgttctgtttaaattagagtccaatagcaggctagtagctgccattcaaagggaatgtatatggcaaccatcttgggtaatttatatgtccaaaacctaagggcctggtgcatcctgatagcagtctcttgttgc

SEQ ID NO: 215640 - DNA, 587 bp, Homo Sapiens
ttttacagagcaggacccacggctgctgctgggtcgggttttatttcaaatgcagccacagaggcggtttctgcacaggtacgtgatccgactccacaagctcccaccaggggctccccatgacccgcaatgacgctgtgtggggtcaaaggaaaacaggccacagccaggcccctcgatggacgcaggcaggggaccaggaatgcggcccacgcagggggatcgggaatcaggcggaaggtgcaggtttgcagctggcgggaggagccagcatgccccaatctctaaaatattcccggtagaaaaatagacatttccctccaaagcagattcctggggctggagggtccctccaaggccaggggtccgggtgattccagagcatccacgctctgcgctgaaggcactgaacctgccatcactgtcacagccgtcaccggccaaggagggtctggaggagggaaggggcccttgcgaggctctggtgctggtgatcccggcccccaccaccggaggagctgaaagcccttgctcagccgctgccctgctggtgaacccggcccccaccgccggaggagctgcaccct

SEQ ID NO: 215641 - DNA, 562 bp, Homo Sapiens
ttttgactcgtatttaatttatttagaatcttacaaaaacaaaaaacaaaacaaaaaccaccacaacagaaaaaaaaactaaatacagaatttgttacgcttcacggttgatcgtttttacttgcaagagtaaataaaccttgctaaaatgcagccagtacatttttattgcatgagaccaaatttttcagttacatatcaaaaatgattgggataatcaattccggacgcttggtaccgtgctcccacgaaaggctggatgcagcaatgcagtatcattggaacagggcgcacccttcacacactgatggacacgctacaacaggagcgataacaaaagggagatttaaaaaagagaaccaaatgaaaacacaccaagagctgacatccacctttgtttcaagttgtctttggatcccatcagatgttgtctccagatgcaccatgtcagattagtaaaggagaaccatctacacctacatagaaaagtatcctttgctcagaggaggtagaacctggccaaagttttattgcagagatacagtgtacctcttcccacctc

SEQ ID NO: 215642 - DNA, 585 bp, Homo Sapiens
tttgtacaaaacctgaaatatttttacttttttaaaactttgatctaagttgccttagacctcatggactcgatacaagagtaatatgaattgggaaataaaacactttaatagccacgataaactttgttagaaatgtacatgttgccaaaataataataataaaattaaaaaaaagagagagagagaacagcttgatgtccaggttagattatataaatgttcaacaagggcagggtaaaggaaactttaaaaacaccagttctgaataagcctggggccccgtgagactccccctctcccacccagtctcgggccctagggactgcgtccctccaaacaggacaagtgggagtggataaggcctccaccaagctgcctctcccagtggacaaaaacatccaggtaatgggtatataaacaaagctcataagaaatgtacaaatataaaaagctacaaacattaataaattacagcatcacaaaacacggaaacacttcacaaggtgctagtaaaataactgtatcccccaatcccctcatcatacaaggaaaacaaagagctggtattaaagttgaagattc

SEQ ID NO: 215643 - DNA, 588 bp, Homo Sapiens
gttagaagagaatactttattttgaaataaaatacaaatgtgcaaaggaaattagctcctcctgccccccctttgaacaatgagtcaatagaatgtgagactgggtagattagcagataataggcaaaggtctagcttttcagtggcaacttgaagaaaccaaagatgaatgatgctaaaggaatgaccctttggtacctgttttaaagtacttctggcccccttcttttataaacccccaggagcccagcaccacaccttgttaccctacaatgatcactcacgctccacgatgtcactaatgtaataactgaagatatgggccagtttgtccatgtcacgttccgacttgtaggtcagggtgaacctgtccattaatgctgtaaaccctgaccaacaaagcagaaattacgatgttaactccaaatcctaaactttttggcccctttctccccacacatcaggccagtgtaaaggaaacagatcccttcaagctgagtaattcctttatccattaacatggtgtaacttagaaactactaagggccaggttggttgctgctgccactgggaatccaaaggaccacc

SEQ ID NO: 215644 - DNA, 580 bp, Homo Sapiens
tttttttttttttcacagtcacccccactttaatccgcaggcagcctggaacagtctagaggagatttgtataaaaagtagataccaaggctggcgtggcagctctgtggcagtggctgggttggtgggcactacagtcaggcaggcagccatggccactagtgtcacggccccagtgagggcccctggcttcgctcacggatgtggtccaagatcaggtcggtggctcgatccagcaacagaggcagcagctcctgctcagcaggggagaagcagcccagcacatgggcctgaaccgcctcagggtgcgccgggcgcccgatacccacccgcagccttggcattgcattggagttgaggcagctaatgcaggaacggactccattgtggcccctggcactgccccccagcttcagagccagtctccccaggggcttgtccagctcatcatgcaccaggtagacttcctcggcagtcagcccaaacagctccgcagcccgggccacgctgcgcccgttggcgttcataagccgccgtggccggagcaggaccagttgggcatcccccagcggggccaggg

SEQ ID NO: 215645 - DNA, 571 bp, Homo Sapiens
ttgcagaacacattttggtttaatggacagacatagaagtggctcaaaaataagcaaattcatttgtaataataccagcaaatacctattgttaagcatttatatgtcagacatcccaaagatttgtgtacatatttagtctttataatagctttgggaggaaagaaccaatatcatactctacaaaggaagaagcagaaccaggattcaaatctatttggcaccaaaaatctgcctcttgctacactgcctctattcctgtttctttggaccttctccagaacatgttacttccctgcctcagttagaagttagtgactacgaatcccctgctgacttggcctcaaggccagtattgcaccgcaaggaccaagactgctgggcattcctcttttgcctgttgtatgcgtcctctcttcctgtcaactgtcattgatttctcattgctgtcagtagatctgaaacaaccaccaccatcatccttccaaccctcatctggtgcaacgagataaacaggccatgccctgagcaaagaaaagggaaatggtggtatctgtgctgccagcctggg

SEQ ID NO: 215646 - DNA, 544 bp, Homo Sapiens
ttttttttttttttcacaccttggccgtttatgtatacagaagtggggtgccgggcgggaagggcgcggggaatgagggaacctagaggccgatgacgtcgttcagctcgaggtccgcgttggggcggcagcgggcctgggggggctgcgtcccggggcggggttccgcgtcgggcttggcggcagccgcctccgggcgcgccgcgtccatgacgcccagcaccgcgtccagcatggagggccccagatccaggtggaaggacagcagcgggtcggcaggcgagggcgctgcggactgcgggacggcgggcggcggcggggagcgcggggcccccgcggggggcgcccggggctcggggggcggcccgccgccgtggcggctcaggaacgaggtgtccccgaaggcgtcgccgccgcgccccacgtgcagcgtgtgccggaagtcgccgagcggcgcggagatggacagggcgccgcgatcaggccgcttcttgggctgcgcggggcccagctgcttcagcacgggcatctcgcggtcctccca

SEQ ID NO: 215647 - DNA, 583 bp, Homo Sapiens
tttggcttccaataaaaaataattcaactttattagtatgaaatattttgagataattagtgacccaaatgcatgattctccaatatgaaaggtgttcagcataagcatacaatcatttagtaaaactgctctttatgagacccccagaaaagctggaggcacttcctctttttggtggagagagaagacactacttaactggccatttccttgctggagtttattccgattcccttttgtctgattcttcctcctcaaactcgactaaaggagtgtgtctgttggcctgagcaccttctctgtagaacactttctttactgtgccatcctttggagactttatggtatgctccatcttcatggcgatcataaccatgagggaatctcccgctttcactttgtctccagctttgacaaacaccttttcaatggttccagtcataggagctaaggggccgccctgagtttcttgtgagctcacagaagataagtatttggggactggaatgtcaatctcaatacttccttccttggaaaataggtaaatagtgttttccaggataatcagcttcgctttactag

SEQ ID NO: 215648 - DNA, 594 bp, Homo Sapiens
tgctccttcctggacgtctctaccccctcggactccgtggatggtcccgagtcgactcggccaggggctggccctgactaccgcctcatgaatggtggcacgcccatccccaatgggccacgagtggagaccccagactcctccagtgaggaggcctttggtgctggccccacggtgaagagccagctgccccagcggaccccagggacacgggagagggtgcggttcagtgacaaagtgctctaccatgctctgtgctgtgacgatgaggagggggacggtgagcaggaggtggaggaggaagaagtgggcttgccccctgagcctgcccatacagaggcccatgcaggcccccacaagccctccccagccccctacaagtcacggcgctctccactgaccagccgccactcaggctctaccttggcccctgaacagactcgaagggtcacgaggaacagcagcacccagacagtgtcagacaagagcacgcagacggttctgccctacacagccactagacagaaagccagggggaaaaactaggggccggggagggggccgggggcggtgggcacatagagctataaataa

SEQ ID NO: 215649 - DNA, 578 bp, Homo Sapiens
ttttttttttttatgttcttcatggtaatctagaatttttatttgattccaggtaactttggacaatagacatgatgagatgttttctctttgaataagttaacagtttaattacattgaaataaaatatactgtgggcttaatacattgtaaatattacagaagaagtactactttgctatagtaatttaatgactgaagctacatttaataacaatcttaccagtacttgtatacaaagtattatacagattactaacgaagatattgcagtggttgcaacgatgttaccagctcaacaaacatctaacaatacaatattcttctaagaggaaaagtaataatgttagatttacagacaataaagagtcatgtttcccgcttgaaacattggaaataaatttgaatccagatacaagaaaaggtttcctttcttgggaactctgatccccagtaggcctagtacagtcaatttacatgaagatagcttttaagatgccacggcaatgtaaagaaactctcccatccgaaaattactgatttgtaggccactgctcaaacatctgactttttagaaa

SEQ ID NO: 215650 - DNA, 562 bp, Homo Sapiens
ttcagataatttaatcagaattttaatataaacaggtcattatcccatattttacatgcagaacgatttcaatattccaaaaaaaaaggcgtcttctgtacatggtgctacttggctcttgtaggaaaacattgaaaaaataataattgagctgttggggggttttgtgtttctgagttgttttctgcaaaagctgcagcacatttgatcctgcgttgccaacgcacagggccgaggccacccaggcacacaaagggacgaggagaagcaactttcaggcaaagtgtaaagactaaacaagctgttcctgaatatgtgcatgggtgcacacttattttgaggctcttccttccttctccaatgggaccaagagccccagatttgtgatctggtttttaacaaggattttcagtggcccgcacccagatagaaatttggctggtggctggttctggaccttgactagtatcagaaggtaaaagtaagctcaaaaagccattgtgtcccctcccctcactcccatttctcggggacccttaaggaaatattcacggacgcgtgg

SEQ ID NO: 215651 - DNA, 595 bp, Homo Sapiens
gaatacagtttattacagtttttagacccccattacgacacatatctaaagctgaacattgcaaactgaccttactagcagcaattctccctagacaggaagggtttcagttaatttagcaattaggagtaaagacaaacttacaagtcatggtttttcttgtagcagctggtatatgagcagtgaaactatagatacgtagagtcattcaggtttagccttgtctaaaaaaacattaataagttatggtgcagaggagtatccccagggttgccaaagagaaggctgatgtctttagatgtcagtatgaaacaagcaaatcactttcaagacatggcttactatttgctttactgtcaggacaacagaaaaagaagtggacagctaccctagattctagctcacacataattcagccagataatcatcatttaaataataccccttgaaatttttcagacttttcacagctctaaaaacacaacatcagacataacatcacacatctgttccaaaggactaaaaatcaaaagcaattgcaaagtattgggaatcacttttatggctttcctaagggacagtccccatctttcca

SEQ ID NO: 215652 - DNA, 531 bp, Homo Sapiens
aaaaatcccatcatgaccctggaagcctttagaacagttttatcctttgaaacacaggacacatttctcccagtgcgcagaatttcaagtttacgtggttcagcttaagaagtgtatgtttcacgttccttagaggacaacagacccaagttatcactatgagaaaggaacagctgtcccagcttcaatgggataatccaacaccaccagctacctgtacaacagtaagatggtcaatccctgtctgttacccacagggacagcatgacaaggagagagcccccatctgacttaatagcaaaccaacccctttattcttatctctgctgctaggggtcaagactggtatttgttgaggtttcagattccagagacccagggatcccatccctggctgtggctacagtcacatcttaacagggccacctctgcccaggtgtacattcccaacagcatgtccttcctggttctctacccccacagcacttcttagagcagaggcagagcccagaagctgtgtgggtcacaggc

SEQ ID NO: 215653 - DNA, 638 bp, Homo Sapiens
tttttttttttttttttcaagaccatccaataatttactgtgatcccatctgtgcccgacaagggcccacagaggcctgggaggggagctaagggctggggttccggtggcatttgggatgttcaagacagtctgtgcacagcctccctgggagggtctgcagtcacctcggcccacggtcccggggtgactgggctccagcagcccttccttccttccttgcttccgtccttccttcctcctccttccgtctgcacctccttcctgcatccggcacctccatgtcctgagcttgtgctgcgtcaggagagcacacacttgcagctcatgcagccggggccactctcatcaggagggttcagcttccgcagcttgtgctgccggatctcacgcaccaacgtgtagaaggcatcctccactccctgccgggtcttggccgaggtctcgatgtaggggatgccgtagcttcgggcgaggtcctgagcctgccgagattccacagtgcgtgcagccaggtcacacttgttccccaccagcaccatgggcacgtcatccgagtccttcacccgtttgatctgctccctgtactggtggatgtcctcaaaagacttgttgttgttgatggccaacacacacag

SEQ ID NO: 215654 - DNA, 592 bp, Homo Sapiens
ttttttttttttttatgcataaaaccacatattctaattaatttaactataaaatgccaagcaaagacagcagatttataatatagaacaaacaccatctgcaccaccttaaatcattgttacagatatatttctaggaaaaaaatacacctgaacaattctcaagcctagattctaagatgctaaagtattaactaaataggattccaaacagacccagagaaagttactgcataattatttaaatattaacatgtactgagttcagaaatataaatataataacacataaacacagtttacaaattcatgtcaccattttcctgtgctccatgatttcttcaatttggctacatacattgggccccaggctttgcccttatctggaatcactaagagcccacattcctggccagtgggagcaaatgtgaagtcgtgggagcaagtccttgctattcctttaatgtccataggcatgatgttaccgtgggagtttaaaatttcactgatcacatcttgattttctgccttggaaagcgtgcatgtagagtatacaagtatccctccaggacgtaaggccttaactgcagac

SEQ ID NO: 215655 - DNA, 611 bp, Homo Sapiens
ttttttttcaaaactatatatatgagatttatttcacattttctacctactcagtcatgtgagctgttgctacatttgtgaactttctgaaaccaagtgacaaatatccacaaaagatcatttacaatgtagacatcactaaagtctagatttaaaagtccagtgaaaatggcacacagttggcttacagaaataaaaaagtacaatatatttgaaatagtagggtttttgttttccatttatgcctacatcatggtgttacctgtggatatgttatcaacgatattgatatcagatactatgacccatgacatttagtatttttagcaataagaagcacacttaaatctatttcaaaaatatgacatgttaaattcttaggaaagtatcaactttacaaagtatcatacacctagaaaagtaaacatgaatttctcagtctaggttagaaaaaaagtgttttaagatttttattaaaaaaatttaaacaaaatttgtttatcttatctagaaacttatacgatcatgtaaaagtaaatttatttattcagtattatacagaacaatggaaccagtatggcctgcagagatacagaggctgtgagaggagg

SEQ ID NO: 215656 - DNA, 599 bp, Homo Sapiens
ccctttttttttttttttcagtgcaatagcccttaataaggtgagtcatgtgtaatttcgtgtgcagctgggcatcaccaagtcacagtttccagcgtgctgctcagccctccgagtgtgtgtgctcatccttttcatagaagtcccatcggccatggagagggttgggctgcagagctgtgattgccagaggcccttccttgagaactgtggggaaggaggccctgggggtttcttctgtaggcagagctcaggccccagtcacctctgccaccctcagcctggcactgttgtgccagagcctctgctgcctctctcttcctacccatctgcagaccagcagaatattctccccctctcatcaccaaccaggagtttggtgtggtttctggacacggccagagcagtcactgcggggctggttttgctgggcttccctgtcaaagcaatgctaacgtccagctctcgactcaaggccaggttcttctcccacttgtggcctcttgggcttggaggctgagccgggggctcctctcctgctggccgtccaggaacagacatcttcacatcctcagtcttccaaacccggaccatgccgt

SEQ ID NO: 215657 - DNA, 532 bp, Homo Sapiens
tttttttttggctaggggcagttaaactttgccagtagagggtgctggagggatatctaagaagaaaggggtgttttctagctcctgccacactatcagtagttttgttttaatgaacaccttcatacagccctgctgatgaggacccaacacactccaggacttgcacaggtacacacagtgatatcccaactccctctgcataactgcccatcaaccttggctcacctgtacccggaaggttgctttctgctccccagaagaagtggtgtaccactttacactcccaccagcagtatatgaaaattccaactgctctacctccttacaaacacttggtacggtcagtcattctattaccattttagccacactaataggtatgtaatgatatctcacagtagttttaattaacaattttattcagatatatgtcataaagttcaccaatttaaagacttcaattgttttaagtatatttacagttacgcaaccatcaccataatcttttagaacattaccgacgcgtggg

SEQ ID NO: 215658 - DNA, 533 bp, Homo Sapiens; identical to SEQ ID NO: 44842

SEQ ID NO: 215659 - DNA, 610 bp, Homo Sapiens
gggcggccgcccttttttttttttttttttttttttttctaattaattatatttatttacaaaaggtctaattttatataactatgaggttcttttacatcagaataatatataaacagaggtgaaaatctggtaattacaaacacagaaaatagaaaccttgttcccttatttattactcacctttcagaacaagtccttggctcagttgtagaggtggggaagaccaacacctaccgaagtttgcaggcaggagcccccaaaaatgtttataaataacacatttagataccctaaggaacagcagtgaagaatagcatcaaggaatggcttagtttgaatctgatctaattcaccagccactcactgtttcattgtccacgactaggggcagggaggattagccagtatgaatgtcaactttacaagtagggtaattaccatcaaattaacaattaccaatcactagcactgagatggctttgaactagatcctactgagaatcacaaaagcagttttgatagtcttaagctattatagctaagtgtcttaaaatggagggttagggagaatgtgtgggtaattagagcaaaatcatctctcactttc

SEQ ID NO: 215660 - DNA, 595 bp, Homo Sapiens
ttttttttttggcctcaaatacacacacacacatatgcctacaaggatctggggagctccaaatatcatactatggaattcatattcaggagcatacaaggatcctgagagcagagcttctgtcctagggtcaatcctaaagttgccttattctcaaaagctccagttcctgaagaaggattgaaatatactgagagccatgaagagacagtagtgatttcagctgagggtgagaatttaggtggctcagagataaccacagccttaggcaacccaaagcaaagcaaacaatggaaggaatcaacgataccaaatgtgttgggctttggttactggggacttctagaaaaagtagagactgagtagctagtataaatgaccagaatatcagccatcaaccactctttccaccctctccttataaaccttttacttaatcccccaaatccccgacagtcctccagtgttccttcaactagctaactcccttccactccttcagctacctctaacaccctcactgactctctctccctgaatgactatcccaataccttgtcactgatcattttcccatacatatacacatgcaccc

SEQ ID NO: 215661 - DNA, 609 bp, Homo Sapiens
tttttaaggttcattaatttttttttttcctgattacaaaagcaaaacctcattttttggtctttgaagaccatggagtatgacttctaagagcaaacattaacatcagatttgtatgtctcactacaaaaagaacccatcactgatgtaagacctactcatgatactgaagtagattttttaaattaaaaaataaaagtagtcatttaaaatggaggaattgtagatgagtatggaaaaatccattcacaaagttcactatttgcattttctaaaagaattttatgtaataaaatagaaaactaatgatttatagagatgtgcataaactcaagagaggaatatggaagggaaaactgtgttatattcccatttaaatttaaaaaaaaaaagataaaacacttgaaatctgtgtttcacatattagaaaaaaataaattcaaatgattctaattaccattagcttgttaatgtctccatctctaagatgctgccaagatagcacacaactttacctctgaatatgcaactaacttcagggtaaaaagacacacagtcctcactcgggaccgaacacgttccacagagaaatcagaaggaaattattgc

SEQ ID NO: 215662 - DNA, 595 bp, Homo Sapiens
ttttaatatgacaatgttgacaccataagttgcagtatttttaataataggtaaaaaatcagtatcatttgtgttattactgctgagctttttaaatgtatttagcgatacattcctttagtaaattatatttttccttaacctatatttctgttggatgttggaatttcttactaatttctaaaaattctttatattgagaaaattagcccttcaaattaaagagaaagtatgttgcaaatgtattttctcattttactgcttagtgtttttgccacctctaagttttctttttattgccaaatccatcttcttatctttggtttcttccttggtgtcatgcttagaaaggttttcatcccctaggttatataaatacttgcttatattttcttgatttttaaaatactttaaacattaaatatttagctggcagctgtgttttgcatgtggtatgacatggatatataactttaattttcaaatggataaacagttctcttacatcctttattgaatatcctatacgctggagagctgtcatttcctctttgcgaaaatgttcttaaaaccttttcgttaaagatctcttttg

SEQ ID NO: 215663 - DNA, 594 bp, Homo Sapiens
tttttggaaaaataggactttcttgttttgccccggtgtccccgacaccctccccatcagagttttaaaaaccatgagcgatttggtgagtttgaggccaggtcccacagggtgtccgggtcctgctgtccgtggggccagaggacccttagaggggggggcgcctggctagggtcccacaggttcgtggccgggcccccagggctcgcagtccagctggaccacggtgtgggccctgagcgccgcgggctccggggcgggcggggcgggcgtgggcgtggggcccagggcgccgttggtctgggagcaaacgctgctaacaggcgcgggaatcttggccttgccggggggctggccgccgtgcaccttgtagcgcattagcagcacgaagatgaagaccagtaccgaggctacgatgacgccgcccagcgcgatgatcatcgtgccgcccaggaagggagcgtgcggcgccccgcatggccgcagcgcaggttcggtggagaagcgggcgcagcccacaggccgcgtggccgtgagccccgtggcgctgtcctcatacacggcgagcacgcacagatcgtaagtccggcctga

SEQ ID NO: 215664 - DNA, 456 bp, Homo Sapiens; identical to SEQ ID NO: 52409

SEQ ID NO: 215665 - DNA, 609 bp, Homo Sapiens
ttttttttttttttttgcacatatactttaatacttaggcttgggtaaaatcattttaaataacatattaaaatatgtttggggggacaacccagcaattgcacagcccactagaaaattttaacatctaagtaatataactgttttagggtctgaaagttctccttcagttgttccacagcctctttatcaactaggcaaatatatttaagcttttaaatttcataatgttggtattttttaaaaggcacgggaggttcacttaatattaaatatataacattcactttcataaccaaaacctttttggcaagtgactttcacatagattatgagattctctacatgccttaaaataaatctggcagctcttaactcatatctaaattctctggacaactgtcttgctctctgttttggggccaggggcgtagcagtgaaggccctaacaggcttgctgacctaattggacagtttgttaaatagcaggaaatgtaacaaggcttctctctctcttgcatgttaatgtagtgaacagtgctaatagccagagattgtgcaatttagtcacaatatttcaagccaaaattcagtgttcttatattaaaa

SEQ ID NO: 215666 - DNA, 636 bp, Homo Sapiens
tttttttctcttaaaaagatttattatcaaaaagtttgctccctttaaatactgagccaattcatcaatgcagctccattctttttaggattattagggcccaaataatttcagactaaaacaagaaataaaaaaactggactataggttcagtaacatattcacagacatgtcagtgtgcactcaggaacactggtttcatttcttgattggaatgcttatcaccataaaatcttctgctagagtcacttcttggagatctaacactgattcagcttgcttttttagttctgcaatgccatctgtttctccttctctggccaaggcaactggtttgtacctctgactgaagtgagtcagaaccagcctctttgcacggcacaactttgcaaatgttgctgccatctgtggtgtgctgtggccatgctcctttgctttgtccatctgggcatcatccagggttgcttcgtggatcaacaggtctgcttcaaagcacagttttactcctccatcacccacaaccccagagcagtcacccaatatgcagatttttcttccaacaataggcttttttaagacatcttggggagaaattgtaaccccattttccagaacaacagaaattccatttttcag

SEQ ID NO: 215667 - DNA, 625 bp, Homo Sapiens
ttttttttttttttcatctgtgttatttttattttctttgctttggtctatacaaaaaaaccaataaccaaaaacataaagcgataataataaaacactctgcttggacctcccccagccccccacaccatgtgcgggaaatgggggggtctgaaacaggaaggggaagagaaagcccctcaccacacaccagaggggtcagccaagagcacttctcggggtcagctagggcagctgtgtgggtgggacaggggtgtgaggaagctgtccccagagctccctggggagtgaggggtgggcaaagccaactaagcaccctggagagagaagctggcatcttctggagcaggtgactcactccatatctcctccccatctcccctggacggtccctgaacttttcaagagaagttttggattttgggggtttgggtctcgaacctgggccctggaggccctgggggcttagggcagttggtcggtggagttcagtgagaaaatcagacccagagaaggaaccaaagcccttccgggcccaggcagctggagacagggaggctggaggtttggaggggcgttgctgggggaaaacagaatgggtacttgagtctgaagctttagtggc

SEQ ID NO: 215668 - DNA, 498 bp, Homo Sapiens; identical to SEQ ID NO: 39989

SEQ ID NO: 215669 - DNA, 596 bp, Homo Sapiens
ttttttttttttttttttcaatttaaaatggtagaatttattttaatataatgatatatatgtgtccacatatactattttaaaaataagcatgtaaattataatcattataaaacataagttagtcctaatttaatattatcagagtaaaagagcacatatagaagtcagtctaactttgttgcacttgtcttttaaagttagaatacataaaagatttagcacgttgtattttatcttatttcagttttcatgttatcatcaactataaatacccttaggaatgtaccaccttataacttacattgaaatagccaatatttcttagtagttattaaagtaccattaaatcacctaaaacaaataatctaaaaaaatactagtttaaattaaaaccctgaggaattaaaatttgttttacacaatagttttggttaagtgcaatttcatgtacatactactttgtttaaggatgtacttggtaaggcatagtaaaaataaaatctacgtaagtaacaatctaatactatatttaatttgttgctacaaagttgttttgtttctctaaaaagtagtttttgcatatcattctggac

SEQ ID NO: 215670 - DNA, 573 bp, Homo Sapiens
gagaagaagaaacacgtagtggcagttgtaaaataattggtattcctaacaatcctgatgtataattatttgttacttttgatttgagaactctacaaataaaagtgctgggactagattaattgcaaacattttagttatatgtgtagagctttattgttactccttttagctaccctgaaaaatgatccttaaaggtggcctagttggtaagactgttttatccttaatctgcattcttctttcattgtagaatacagtatttgcaactcattttttcttgtttttattacagatatacttactttctctttgatctattattgtagacactatacattcaaattgacatttaagaccaaacatctcttatgttatctttaatattactttgaataatgattgcaatgatgtttcttcctgtgattccacataacatttagaataatgatgtcaattttttacaactgaatttatttctagtgctttacttatatttggctttttgactcttttaaaacaatcagcctgcatttatataacttttataaataataatataatttgggtcaa

SEQ ID NO: 215671 - DNA, 585 bp, Homo Sapiens
tttttttttttttttttttttaaatagagccagggacttgctatgttgcccaggctggtcttgaactcctgggctccagcgatcctcccacctcatcctcccaaagtgctgggattacagacatgagccaccccacctggcaagatcttatatgtgtattcaagatattacacaactcactaagtctccagatgaaaaccagaatctctaaatatagtttgacagtttgacaatgcccaatgacagactaaatgagaaattaggaggcagcttgatttttttttatttcctcagagatctttgttctgagttctgactcttgttctacaaatattcaaagtcgaaatgattatcatgttaatgggtaaagagcttcaaatctttggctatctcatttttttttaatttttattcatttgttttaccttatgtgttcctctacaatggttatctaggaagttaacaaccattctagctatctagcattctggttcttgatatcatgtaaaatgagcgttctgatctctgacacacaaagctatttaaaagataaaaaatagacatttttttcaacaatcattttac

SEQ ID NO: 215672 - DNA, 525 bp, Homo Sapiens
tttctcatgaagaactttgttttgtatacatagtacttttaatttcaaatactcagattaagagcaagtgtgaagagacattagagtacagaccgggggacaaggacacccaaatgactcccaggggtggctggctggggcttcaatgaggacacgtggtttcagcatttgtcatgatccctggcacctggtccatgttcagttattattactaaaggcaaagaaagaaaattcccttgtgttccctggaaaccatgaggattcctgtggctgcaaccctggttgggtacccctggtcaggcacccacggcactgcagccctggcacctcccaaatggtcacaggagtggggagagctgaaccagcaggaaagaaaggagccagggcagagtggatctttaatgccctctgaggcactttttttttttttttccacagggctttgctctgtcacccaggctgcagtgcagtggtgcagtcgtggctcactgcagcctcaatgtcccaggctcaggtgatcctacc

SEQ ID NO: 215673 - DNA, 585 bp, Homo Sapiens
ttttttttgtggtgcaaaccatgtaggtttttcagggtttagacctctgacacaaaatattgatatttactacagtgtctgtcctaagtgcagctccttagagacattcagagacttggcttcctcagtttgtggcttccaagtcttccatgaaaaatgagacagcacagaggatcatggaagaagtttcagaaaccaggcctagaagtgcatatattacttctgcccatagatctttggacaaaatattttcaaatggctttacctaactgcaaaggctgagatatgtagtttagcagtacttttatggaagaagagaggcacaccaatattaatggacactggcagtctctatcatatatttataattgctctttcacaaatgtctctatattccttctctttccacctctgtgataattggtattctccaggatttcatccttgtcctattgttctttctctacatattttcctagggcatcttatatacttttgagtctgaactacccttacaagggtgtttcaaatctgattattcaaatctatgtctctagccctgactaatttatacatcccatctgg

SEQ ID NO: 215674 - DNA, 569 bp, Homo Sapiens
tttttttttttttttagttactatggatttattttttttcctttcaaacacggtaaggaaacaatctattacttttttccttaaaaggagaatttatagcactgtaatacagcttaaaatatttttagaatgatgtaaatagttaaccttcagtagtctattaaggcattaatacttctctggacatgcgcgtttgagggtggaggggtcctgtaaggtgcttcatcgtctgtgattactgcttgggatgtgttctttggcagcttgtgagattactttacctagtgtttataaagtaggaagttaagtgaatcatagattagaatttaatactcttatggaaataattttttaacatcttaattgacaatggcgtttttttatacataaccatggatgtagtgggaaacaatgttgtttggtaaaaataatgtacttgatcaatgtaaaaaagtatataaaatagtcttattaaaaatctaggttttttttttcctccatgaaaatctgtttttttaggccaaagtcagtataaaagaaactctacttcttgggctgggcatgggggc

SEQ ID NO: 215675 - DNA, 547 bp, Homo Sapiens
ttttttttttcattctgaaggttcaagatacaggcacaagaagcatcagggatgggaactgggtgtgtggggatggacatcattaacatgacaaacacagaaacagtttggttctttttccctcctaagcctttgtctgtgaaatggggttatggcaagaagtgtccagagtaactggtaaattcaagaagattaagaagacttcgtgtgtggggggtgtgtgtgtgtggctaaaaaggatatcagacctagagtcttggtcttgggcagaagaggaagagaagcaatcgcgccttttccagcagacagggatcaaggttgggggggaggggaaggcaggcaggcctcccagaggaaagaagaggtgaatacgagtgtgttcacaaaactactccccattcattacattaaaaaaaaatctttttgcagctctctggatttccattttctaccaccttactgcaaagttggggctcagaatgttcgaaagaggtgctgaccaggcagctgagattggggaaaagggatggtggtgaactgtggtcag

SEQ ID NO: 215676 - DNA, 606 bp, Homo Sapiens
tttttttttttttttttttttttttcaggacttactttctaattaagcccagagtcactttaaaaagcagaccatcctgtccaatgacacccattccattggctcgtccacagctgtcaatacagaccatctctggttccatgtctttattagcaaccacaaactggccatagatgagatctccaacctgcacatttggtctgtttcttttagttgcaccttcaaatgacaagtaagacaaagaagctggctcactccctccaacatcaactttgaatatatctccagatttagctgtcactatgccaatcacatggtctccttttactggaacataccgcttctgctgagagtccacccagtaaacaccgccgccgctgccactgccgggctccttgtgacggaggcggccgcacttggtgaccagcaggcggtccccacagcgccgaaggcccggaccgcatacaacgcgcacccgcgagcacgctctagcattcaggctcaacggtcgctccactgcacccccagggccttccgcgtcctcctgttccggcaggagcagctcctcacccgggagcaccacctgacctagtactgtgcgtgcag

SEQ ID NO: 215677 - DNA, 554 bp, Homo Sapiens
gtagagagctaatggcatgagaaatgagttaacactgctgtgtattcggacctacaaaatccagacccctaaagatgggtctgtgtttgtcccagttctatccagccatttttttccccactgagaaagcctagcatgtgtagtaactttttccctttaccctctttattctgatcaaaaacattaccaatagacaacaatagaaattttaaaaagcttttttttttacttcgctaagcactttggactataatgtgtaccaatagtctgctgcctttgttttcttgttttcttagataatttgatttgaaactgacactgcacctgatgggttaacaagatctaggcttcagaaggtgacagatatgagtgaggaccatgtgtggggcaaagcctcagaatgatgaaaaggttccggcactatagttggggccatgttgactccttttcaaccatttgtcacagacgtgagaagaagaaatgacttcaaaatcaagagaaaacaaatactgaaagtctctacttacatccaaattttaaaaaataaaatctgt

SEQ ID NO: 215678 - DNA, 612 bp, Homo Sapiens
tttttttttgaaatttttattctttttattttgcagtgaaagaacacgaaatatcttttcaaaatggtaaagtgatcactttcaatgaatgatgtaataggaaaagagaattaaacactgtaattatggcttacacaattacacagaacaatatgtgcaaacttttgaaaatactgtgactaacacttcaccgacaaacaataacctcaatataactaagtttcattatttatcacagttacataaaatacaagagcctatgaacaagctgttattaacaataaatgtagttttgcctgaaattcttatctatatgcaggcctcttaagcatccaagttttaaattctactgcattgttattgcaaaatgaagcaggcacaacaaaattaaatccactagctaaaggactaagtaaacaaaaatagaaaaagaaaaacaacaacagcgaaaacccttgggttgtttcccaagattttttttccaaacaaatattgatctcacttagcatttctgatcatttcatagccacagattaatagctacatgacaaaaagacttcagaaggattaagctacacaacactatactagtgttttaaatcatttaccaca

SEQ ID NO: 215679 - DNA, 542 bp, Homo Sapiens
ttttttttatttgcctcagatttattttttccaattaatgcaatataggaaaaattaacaatttttaaaatttcacttagaattcatagattacagctgttcagactctagtaggccccggtttgctgatctatgagcgatactggtttgtgtgtagccaaaaatccctacagaccagtggttgtcaggcgaggaaagttttataccccaggacatatttggcaacacctgagaacctttttgtttggcaccactcaggaagacgcgttactggcattgaggcaagggacagtgctgaacatcccacaatgtacaggacagcctcacagcaaagggtgacctggccccacatgtcagtagtgcagaggttaatccctgctctagagacaacacagggatcatgggacacaagtcactagccctggaccagccactgctcaagaggccacgtgcaatccacggcattcatctgtccctcttcctccactgttcagcacttgtcgtcaatctggaagctgctaagagcctgtctgtcactggca

SEQ ID NO: 215680 - DNA, 611 bp, Homo Sapiens
tttttttttttcatgtttcatagttttattgagtctttttcagttttaactgtccatggtaagtacagttctagtgaccacaattatgaagctctgctcgtactaaaaatagcagatacaaagttggctgccatgccttacacacactaagacacacacacacacacacacacacacacacacacaaggttttgcatactcttacatgcaaacagtactatgctattataggaaatgtactttccttttattaaaaatacaattacacacaattagtctgggttttgttaagctaccactgatttagataaacctgagaaagctcaaaatatcaagtaacactgtttccatactgctcattcaatggcactatcactcaaaaagaaatctagttcaatcatctatattaaaatcacagataatataaaaataaacattttttgcaatagcactaaaacatactataattcaaattcacaaattttgatatgtaacatatattcaccttcatattaatttgtgattatgtgtataatacaatgtacaacagaataaaaaactctaacagaattcagcagccaaataatatacaattatcactatgaaacttg

SEQ ID NO: 215681 - DNA, 601 bp, Homo Sapiens
ccctttttttttttttttttgtgctcttgtggccattcccaggtttaattacaaaccgatccgaacatcccatctgggtcgacagctgggagggcaggattggggggaagctgctgggcgcagcccaggccaggcaaccacgtccttcccctgctcccaggtggagtaggggcctcacgactgcctcgatatccactgtcttggagcagcctggctaccccgagatcccaggtgacctcaaggctgcctgcacttcagcgccagcatgtatcctggcctgagaaccccaaagcaccttaagcgtcccccctcaaagacaactgtgcacccagtcctcaggtgggaagaggaagcccagccaggcccggaatccgcctcctccccagggtcctgggagctctgactctccggggcgttagaccgaaccagccaggcgagagggggacccacgggccagggctccgaggcagcggctgcttctggatatattttctttaaaggcgaaatggttccgtctttggtatgaacaccctcactccaggcaaaggagggggtgggcaggggccccggcaggaggaggctctgcccagcccggggccag

SEQ ID NO: 215682 - DNA, 591 bp, Homo Sapiens
ttttttttctaaataaaatctttttattctcaattttatcatagttacagtattatcattgtcaggttgctttctgaacaccaaatcaaaacacatcttaagtaagtataataagctttgttcagagtgtactaaattagaatttttctaactcagaagagtaacaaaggtccacttattgctattcatctgcccattttcaccatttaaagggtccttgccagtgatgcttgtagtcacatgtgcgggacagtgcaatcacagctgcaaaaagtagaggtgacagaaaggcacagaacctccaagatttcccacggccttgtggtgtgaagcagtgtaacttccctgccaggtagaaggacgcaaaggccagaccagcaaatgcaaaggaagaatgtccactggggaagctctttcggccctcattcaccacgtccttatcccctgtacacatcaagtcagaatgggctagcccatcagggaagcagcggtagaagaaatctgggcgtggcctccctacgatcagttttattgtgttggtaaagacgccattcagagccagggcaaggctggcagccaggcaggcttgtc

SEQ ID NO: 215683 - DNA, 415 bp, Homo Sapiens; identical to SEQ ID NO: 61693

SEQ ID NO: 215684 - DNA, 427 bp, Homo Sapiens
ttcatgatcacacagaacttttgtatctcctaaagcaaggttaaaaatccttggattttgcttgccttttatacatcaataataattttttagaaaaactgtatttttaattatgtcacaaaatataaaagtcttcctttgttgatctcaaaacaaatccttctaatttttagtttattgttttctttttttttttttttgagacagggtctcattctgtcaccaaggccggagcttaatagtgtgatctcagtgatcttcctgtctcatcctcccaagtagctgggactacaggagcatgccagttttttttttcttttctttttttgtaaagacagggtatcaccattgttacccaggctggtcttaaactccaaactcctgggctcaagctatccgcccatttctgtctctcaaaatgctgaga

SEQ ID NO: 215685 - DNA, 916 bp, Homo Sapiens; identical to SEQ ID NO: 45949
  misc_feature (489)..(489): n is a, c, g, or t
  misc_feature (580)..(580): n is a, c, g, or t
  misc_feature (620)..(620): n is a, c, g, or t
  misc_feature (626)..(626): n is a, c, g, or t
  misc_feature (638)..(638): n is a, c, g, or t
  misc_feature (641)..(641): n is a, c, g, or t
  misc_feature (651)..(651): n is a, c, g, or t
  misc_feature (666)..(666): n is a, c, g, or t
  misc_feature (668)..(668): n is a, c, g, or t
  misc_feature (677)..(677): n is a, c, g, or t
  misc_feature (681)..(681): n is a, c, g, or t
  misc_feature (686)..(686): n is a, c, g, or t
  misc_feature (690)..(690): n is a, c, g, or t
  misc_feature (699)..(699): n is a, c, g, or t
  misc_feature (706)..(707): n is a, c, g, or t
  misc_feature (709)..(709): n is a, c, g, or t
  misc_feature (723)..(723): n is a, c, g, or t
  misc_feature (726)..(726): n is a, c, g, or t
  misc_feature (728)..(728): n is a, c, g, or t
  misc_feature (756)..(756): n is a, c, g, or t
  misc_feature (765)..(765): n is a, c, g, or t
  misc_feature (775)..(775): n is a, c, g, or t
  misc_feature (783)..(783): n is a, c, g, or t
  misc_feature (801)..(801): n is a, c, g, or t
  misc_feature (811)..(811): n is a, c, g, or t
  misc_feature (815)..(815): n is a, c, g, or t
  misc_feature (830)..(830): n is a, c, g, or t
  misc_feature (845)..(845): n is a, c, g, or t
  misc_feature (859)..(859): n is a, c, g, or t
  misc_feature (871)..(871): n is a, c, g, or t
  misc_feature (876)..(876): n is a, c, g, or t
  misc_feature (880)..(881): n is a, c, g, or t
  misc_feature (892)..(892): n is a, c, g, or t
  misc_feature (894)..(894): n is a, c, g, or t
  misc_feature (900)..(900): n is a, c, g, or t
  misc_feature (910)..(910): n is a, c, g, or t

SEQ ID NO: 215686 - DNA, 1000 bp, Homo Sapiens
gcagcccttccaagcaaatgcagttaaatttaacagaattttttttttcaatatgccagacacagtggtaaacgtgtaatataaagattgctctgacactcgtttgaatctgaacgactaccaggaaccttccttcttattatccaaagcctttctcttgcaattcactctttcttagcttttataataagggttgactacttgaaaatatggttcaattgtccttaccagcactataagcaattttagtttctcactagttttcatttgcttttcattttttgcaatgaaacccatcacagtctattgacctactacaattattaagtctattttatttgtgattatagtttgtgaaaatacaattaattactcatattatcaatgagagtacaatgtagcataatttccaccacacgttgttaatttaccaaactacttaaatctgatttacggatttttttctcgatagtagtttagatgccgtggtactttcaagatgatgagagaatcatgaacagagaagttcctttcaagtgaaaaatgcagctgtcgcagaatctctagtgtatccaggttagaatatttaaaactatgtattcatattagagagacatcatgggatatgataagcagaaaagagagacactaattgtgaatagataaaaggattcacatatgtcttaaaactttcaaataaaatatgcagagtgagtttttaaaacgtttttcctgtttatcccttgtttaatgttccgttttagttctaagtctatcctacaactaataacagatatgaaaagacttggaatgattgtctctgtgttctttgtgccataatttaaagtggccagaagcaagcaagtggaataaacaggacaattgcagagtttatggaggattaggccaattgcaggcttccacacttagggaggagaaaacatcctcatgaatatgagattggaagtgtctagctgtgagaaaaaaaaaaaaaaaaaaa

SEQ ID NO: 215687 - DNA, 743 bp, Homo Sapiens; identical to SEQ ID NO: 58317

SEQ ID NO: 215688 - DNA, 1000 bp, Homo Sapiens
actgttatgtgattaactgtttttgagactaagaaaatattttgctggacatctgatgaaattatcttaaaaacagtgcttgggtgttttccctggagtgtagtggcaagagtactctgttgtccatcagagccacttgctgctctcagctggccttgctgttgaatggcataatctgatttcgttggagtacccaagtcctaagatttgaagaataagggttattatctcagtctcatcttttctctgagatagcatttgttcaggaaatgttatctgttttcaatggtgaagggagtgagagtctgcttaggagttactgtatacattaaacattggtgaccggcctttaaagaattagaggctgggcctggtgacttacacctataatcccagcagattgggaggccagggcaggaggatatcttgagcccgggagttcaagaccagcctaggcagcatagtgagaccctgtctctacaacaaaatttttacttttttatttttatttttattttttgagagggagttttgctctgtcacccaggctggagtgcagtggcatgatcttggctcactgcaacctccacctcctgggttcaagcgattctcctgcctcagcctcctgagtagctgggaccacaggcgagggctaccatgcccagaatatttttgtattttttttttggtagagatggggtttcaccactttggccaggctggtcttgaactcctgacctcaagtgatccacctgcctcggcctcccgaagtgctgggattacaggcgtgagccactgcacccagccctacgaataatttttaaaaataaattagttgggtgtggtggcacacctgtggttctagctactctgtgaggctgaggcaagaggattgcttgggtccaggagatctagactgcagtgagctgtgatcatgctacagcactcgaagcctggggaacagagcaagaacttgtctcagaaaaaaaaaaaaaaaaaa

SEQ ID NO: 215689 - DNA, 1000 bp, Homo Sapiens
ggatttgctgaggaatcagaagtgaaccaaagactacaaagtttttgatctgaacaattcaaagcatgaagtttttatttactgtaatgaaagtgaaccagaccataggagaggctattgaagtgtgtggagggcggagagggggttcagatagagaggggataacaagaaatgtttgagatgcctgttaggcaccagaatagacataaaaagggagccggcaatacaacctggagttgagatgagagttttggagtcatcagcatataggtgggatttaaaggcatgagaaaggctgagaggtgagatctcaataggagcacaagtagatgaaaaagagaagctgtccaagaattggaccttgggtaccccactgttgagacgctggagtgctagcgaagaaccagcagaggaagttgaggaggcagccaacagaataggaaggtagctaagaaagggtgttgtcccagaagtcaagggaagtgttttaagagaagtgtgtcttcatctgtgtcaaatgctgttgataggttaaattagctcaagacagagaactggctactggtgggcttgacgagaggcctgaaatgctttggtttgcattcctttatctttcatacacaacttacctaaagtaggaatacgcttcaaatgtatatatttgggaataagttcctcactcctcaagtctacggtagggtttgatgtcatcagggcaaaacaaaaatgcaattagagtatttttagtgtgctatatgaaaggccaaattggcagcctctcttttctcaaggtcagtatcaacatgcataaatcatgttgacagtatgtctatgtgcccttgacatgatgtgatgaaaatggcacgttaccaaaacctattacctcaatctaatcatgagaaagacatcagaaagattccaatagagatacattctgtgaaatacctgatcagtactcatccaaactgtcaaagccatcaaaaaaaaaaaaaaaaaaaaa

SEQ ID NO: 215690 - DNA, 1000 bp, Homo Sapiens
tgtgattgcagtagattagaaaggagtccatctcccaaagagtattcaagttttagaatggaagctgcttttcagtcatcactggaattttcctacgagaatcacttacataatctacacaaccaaatgcagaaagaaaacacagggtgagttaaggaacaaagttaacatttcatctgcttggcctctgagcttgtacctgccagtcccaatgttactcggatcaaaaatgtaggatgttaaggaaaatggtgtttgtatgttttgttagtaagaattaatatggaaataatttgcaaagactggattccagtgaacttcttcaaaatcacaaaagctcagctttaggcaagatacacacatgttcagataactggatatagaagaaagagttcatcatctcaataaaaataatccatacttgtggctccaattaagaaacacaaaactttagtgtacattttggtttcactttgtttctttgttttttaccacttgcatgaacaagtaaatgatgcagaaaaacaagaagggtgattcttgcagccctaatgaacagacaccatcagaacaccaaagagaggcgacttaattttgtgagacagagccattttcctcctttctgtgaagtatctctgataatgtacagttttatgaggaaattatatggtctgggccgggtgtggtggctcacgcctgtgatcctagcacttggggaggctaaggtgggtggatcacttgaggtcggtagttcgggaccagcctggccaacatggtgaagccccgtctctacaaaaaatacaaaaaattagcgtggtggcacatgcctgtgatcccagctactctggagactgaggcaggagaatcgcttgaacccgggaggcagaggttgcagtgagccgagattgtgccactgcactccagcctgggcaacagagagagactctgtctcaaaaaaaaaaaaaaaaaagaaaaaaaaaaagaaaaaaaaaaaaaaaaa

SEQ ID NO: 215691 - DNA, 1000 bp, Homo Sapiens
gaggtggaggttgcagtgagccgagatcgagccattgcactccagcctgggtgacagagcgagactccatctcaaaaaaaaaaaaattaatagaattgcttgaattcatggatgggaaaaataaatattataaatattagttcttcacacattgacttataaacttaatgtaatgcttataaacatcataatatgttttttctaactgcacaggaacattataaaacattataaaagtcttctggaaaaaaaacaaaacataataataaacgaactatcacaagtcaatgtggtgctagattaactgattagcagaagaagaaatttattgaaagttaaaccatcgtttcactggcacacaaaattaatccttgttagactgaagaattaaatactaaatggaaacatggaagaactagaagaaaacaatattgttttcaagaagtatttatgggctactctgggcatactgcctatggggtagccctgctccacaaggagcagtaataaaaataaataaaaacaaaacttaaaaaaagaaatatttgtggattctgattagaaaaaaaaattcaccctcactaattacacacacaccagagaaagcaaaatgaaacagttaccattttttcacctgttaaggtagtagttatagtaccactacacaacagaatattttgctcccctgaacagttgttataaagactgtatagtggccgggcgtggtggctcacacctataatcccagcactttgggaggccaaggcaggtggatcacctgaggtcaggagttcaagaccagcctggccgacatggcaaaaccctgtctctactaaaaatacaaaaattagccaggcatggtggtgcatgccgttaatcccagctgctcgagaggctgaggcacaagaattgcttgaacccagaggcaagtcaagaatgtgtcactgcactccagccttggtgacagagcaagactctgtatcaaaaaaaaaaaaaaaaa

SEQ ID NO: 215692 - DNA, 442 bp, Homo Sapiens
tgaactaatcaaatttggtttttatgtgctgtgctctttcgtaaccactgaatagtttttcagattattccaagtcatatgaaaccacactttgtgaaacttcaagttttagatgaccttgcaagttaaggactaaacatgttgcatcacaaaaagcagccctgggaagacacggagagcaagtatatcaaaatagattttacacttgatggcattgagccgactcttccaaattatttgaaaatacgaacatattttacttttatgcatgttttggagaattctgtcaggcaggtaaagtgtacacacagttaggccttcagagctccaacaaaggaagagagttaggagaaaagaactggtgagaaagtgaaatggtaggtttgtagagaccgccaaagtaaactttttaaaactataaaacggtgaacattccatgagt

SEQ ID NO: 215693 - DNA, 366 bp, Homo Sapiens
ttttggcacgtggatgttcagttattccagcaccatttcttgaaaagatcatcctttctacattgaggtgtgtttgttcccttgtcaaagatcagttgcatatgtttatgcaggtttttatctgggctctctgttctgtttcattgatctattttttctgttttttgaccaataccacactgccttgattactgtggctttatagtaaaagtactgaaattgggtactatgggtcctccaaccttgctcttctctttcaatattgagttgactattctgggtcttttacctctccttataaacattacaatcagtttgctaatatccacagaataacctgctgagtttttttcgttttttagagac

SEQ ID NO: 215694 - DNA, 471 bp, Homo Sapiens; identical to SEQ ID NO: 59647

SEQ ID NO: 215695 - DNA, 519 bp, Homo Sapiens
ctttctttctttctttctttctttctctctctccctccctctttctttctctcttctttccctaagatattaataaagctaactagttttggctcagatttcaatattcacaaaatatatattctaattaataagagtgtcacaaatcatttggaaaataattgcacctctcaatttgcaaatccttagatcaacagcttaattagcgttgccagactttaaaaaatgtttccaaaaattctgctccttctcattttcagatatttctccaaatgtgaccccttttgaccctttccctctattcccaaatgtatttttttcctcatctctcttataaactgtagcctaataccttctttctctttctccattctccttttctatttgagtggagggagagaaggcaaggattgggctctgttttataaactccagtttctctgttttaattcctccactgatttgtctgtctttctatcttttctaataataaatactggtaatttattttttctctat

SEQ ID NO: 215696 - DNA, 461 bp, Homo Sapiens
cagcttttatttcagatttggggatacagaaggatgcaaaatgaggcaacctagccacccaactggcccagtggtcaaggggggaaatgaggtggccgctagtcagcgctggagccatttctcgacggtgctttctgtttgtttgtttgtttttgttttgagatggagtctctctctgtcgcccaggctggagtgcagtggcgtgatctcggctcactgcaacctcaacggtgcttttttctgatcatagctgagctcaaatgctgaccccagtgacctgtctccaagcactgtggctccaggaaggaaaggcctggagagacctagaccaaggcctcagtagggagggagagaatttactctttgcaaaacgtatggagtccttgttatttaccaaatatcatgttacagaccagggataaaaacaacaataatgaattcagtgaatctaaaacacaatc

SEQ ID NO: 215697 - DNA, 425 bp, Homo Sapiens
ctttggagacagtctctctgttgcccaggctggaggacagtggggtgatctcagctcactgcaacctctgcctcctgggttcaagcaatacttctgcctcagcctcccaagttgctgggactataggcacgtgccagcacgcccagctaatttttgtatttttagtagagacagagttttaccatgttagctaggctggtctcgaactcctgacctcaagtgatccacctgcctcggcctcccagggtgctgggattacaggcatgagccaccacgcccagcctatttttagttttttgaggaaactgtactgttctccatagtggctatactaatttacattcccaccaatagtatatggggattcctctttctccactttctcatcagcatttgtcattgcctgtcttttggataaaagccat

SEQ ID NO: 215698 - DNA, 561 bp, Homo Sapiens
ttcaaattattttcccttttattatcccgtggtaggtgtggcataaagaatatgtccagtgaagctccaggagcaggctgcgtgtttccagtcaagttcatagccaagtcctttccatccaatgggattgtgacccattgaggtcccagaaaggactggtcatctccaatggagcttgggacctggttgggtccaatgaggttcaaaagggggccagtcgcttaggagactgggttggagctttcctcatccaatcagggcggagacttccctgtccagtcccagtgaagttgggcgatcccgtccaatccaggtccctgattgtcccagtcacaaggtggggcccatggatggcactgtccgatcgggtcacatgaggctgcagcgcgcgggatgcagcgccccctgcaggcgcagggccgggtgtgcagggcgcgcgcgcaccagagcgcagcgcagcagctcgcggaagagacgcagcacgtgccagttgtacttggcggagcactcgaggtagccgcagcgccagcccctgcgcactatggcggccagcgcgcgccg

SEQ ID NO: 215699 - DNA, 578 bp, Homo Sapiens; identical to SEQ ID NO: 59795
  misc_feature (572)..(572): n is a, c, g, or t

SEQ ID NO: 215700 - DNA, 425 bp, Homo Sapiens
ttcaattaaaactgaaggaccaaagaaacccaaggaattagattcatgatgctacttgttctgcttctatcaccatcaaacattaggtaaaataataattctttgccttcaccttgtccattttctggaggaagggacataggtttgatacaacaaatcaaaaaaacaaaaaagatcctcggggtatttatgcagtataataaagagcaaagcaatgtaattccaaaaagatagctctcaaatatttgaaaaaaaatcactaaatcctaaaacttctcttggaaacaatttccatgtctcaagaccattacattggttacccttgtaagaattttcttaggaatagtttaaaatggttactttgataatacaaaagatctcacactatagaactgctgaatggactcacaaatcacttatacttt

SEQ ID NO: 215701 - DNA, 481 bp, Homo Sapiens
tggtttttttgtttttgctatttccttggaagtacataaaattgaaaacctcacaaaaccactcactttttcattttggcagactccaattttgctctcaacccacagcacacagagaataaaactgcaatgagtaaatgtagcttaaacaatgactttatcatcactaaaaccagtatagtcacgtggaaattgactgggtttgggcagcttggaaggtgaaaaatctatcaccaacattataagacaagcaataatacccatgaagaaaggaaaatctttacaagctgccagctcaagccagcctgtatcctctgtccaaagttggatgatgtctgcacccaaaccagccatggaagtgggaatgaggcctcgcccgaagggatcagactcaataactccagataaaggtagagagcacagctatctgccctccctaagcattttaaggtgatacacactgtgatatcagctaatagtg

SEQ ID NO: 215702 - DNA, 594 bp, Homo Sapiens
  misc_feature (486)..(486): n is a, c, g, or t
tttagtgtttttagagcacttttatgttcatttatgataatagggacctgcccaggcactgggctaggtgttccacatctactgtgtcattatgtaaattgtttttcacaagaacttgagaagctagcagtgtagctattattatccttggggtggtttgtttttggttctttgggttttttcccaggggaagaagctggagtttggacagcccctggcctacatgggctcccttttgcagaggctgctccagcggggatctccttgagctcaggtaaataagccagtgccaggccaggtcctctgcactcctttgtctattttcccctttgttccttggacctgaaaacccttcaaggcttcagaggaagctcagtgagttgattctcatgtaccgggagaagataatgtagaggcggcggaaccagaggagctggctgcggtggcaggacatggctttcttggcctgtgccacttctttgctgntgagcacgaagaggacatcctgcgtatgaagcagagacaagggcagatccagaaagggagatgtcttgcgcagacattcacagacttgagcgtgagcacagagcaccc

SEQ ID NO: 215703 - DNA, 490 bp, Homo Sapiens; identical to SEQ ID NO: 58695
  misc_feature (8)..(8): n is a, c, g, or t

SEQ ID NO: 215704 - DNA, 484 bp, Homo Sapiens
gcacgagctttcagctccccacccaggcctgagcgaagcccacaaccccgccgggcacatgtgaaagtaaacaaaacctgaaagcaagcaacaaaacatacactttgtcagagaagaaaaaaatgccttaactataaaaagcggagaaatggaaacatatcactcaagggggatgctgtggaaacctggcttattcttctaaagccaccagcaaattgtgcctaagcgaaatattttttttaaggaaaataaaaacattagttacaagattttttttttcttaatgtagatgaaaattagcaaggatgctgcctttggtctctggtttttttaagctttttttgcatatgttttgtaagcaacaaatttttttgtataaaagtcccgtgtctctcgctatttctgctgctgttcctagactgagcattgcatttcttgatcaaccagatgattaaacgttgtattaaaaaaaaaaaaaaaaaaa

SEQ ID NO: 215705 - DNA, 610 bp, Homo Sapiens
cccttttttttttttttttggtggaagaaacagatacatcagactagtccagcgtctcagtttccacacttcataacaatggggcaccgtgcacctagtgtctaacttaccacgctgcctttgggccacaaattccatactgtaacagccaattacccaaaacactaaatagggaatggctcaaaaaaggctgtctctgaaaaagcagcagcattttgatgagcaaaaatagtaagagaggattttttaaacttagaaaaacgaggaaagttgaacccagctaagaatatttctgagacaccccccaccccttgtgatttttctcccgctaggattttcccttgactcgcctctttagagactgctaaacacacacacacatacacacactcattttttaatcccaccaactctcctcgccccaaggccagaggcttggcggtgacagcttcgaacaatgacatcaccctaggtttgcctccttggcagggtcaccaatactgtttgcagtcaatttcctgtaaaggctctttaaggcaggaaactagtcctgtgccttgagtcctccccctgttctgagccatcgtgtcaggtcaaaacaaagactttt

SEQ ID NO: 215706 - DNA, 593 bp, Homo Sapiens
tttttttttttttaatgtttattcattaaatatttattgtgtactataaattgacactacactagaattaggcacacattttagaaagatatattttctatctagaagacaccacagtatcgtaggagatctttataatttacaaatcacttatacattacataataaaaatgtatacatacgattgctttatccagaacacagttcccaataaacactgatgaaactatgtatagactgagatttcagtgtctttcttggttttttaagcaagtttatctatgggctaaaaaataccctatcatccagtaaaaaggttacaattcaaacctcaacaagtgttttccaaccggaccttaactgtggcctggccagaaagtgttagtaataaagcactcaaagtcaaacctactgcattgcttgtccaagaacagactaaactgcgtatcaagaaaatttcctttaatactatccatttgtcaaaacaaaggttacaggccaggcacagtggctcacacttataatcacagcactttgggagattgaggcaggaggatcacttgaatccaagagtttgagaccagcctggttaa

SEQ ID NO: 215707 - DNA, 594 bp, Homo Sapiens
ttttttttagttatataaattttattaaattaaaaatatcttaaaatttttaaaattcatgtacatttccatttatgcaaaccataattttttgctgactatatacaataaaaaaaaatattcaagtggcagagaaaatcatttctgagaattacttttatcatgttttctgataatatccataagattagctcctgtaaccagatcattctgtgtctgtttatctttctgttgttcctttctcttctggtcatgaaggtatggggaatttaataactgagggggaagaatggatcctgtgggctttactcgttttgcaatatcccagaagagtctttttgaattattattgatgaaagtaatcgctgttccattttgacctaatcttcctactcttccaatctgatggacatactcatccatacttgaaggcatatcaaaattgacaaccagcctgacactgatcaagtctaggcctcgtcccaagactcctgtgctcactacaacttcatagtctccttcaagtaatcccttcaatatgtttttcctttctatttgcgacttctccgaatgtatagatatgcttttcagccc

SEQ ID NO: 215708 - DNA, 624 bp, Homo Sapiens
tttttttttttttttgaaagaacattatttttgtttcactacagagaggctctaacactgctgtgtaaacattaccaacaataattatttattttctattatgtacctgttcatttctaagagtaatggacaaaagaaaaggctctcctttgtcctccctctcttcctaattaaaagagccttctgccccatggaaggctgggagctaggaaaagcagcattctcacaatagactgcaatcagaagatagattttatgtcaggtcatctagttacatagatatttccctgttgttattcctgagtccttagtaaaaaccttaattaaatgttccagccttgtctcggctgtgctataggaggtaaagcacaagtttatgtcatgattggttcagtgacaaaagggaacagactctttccaagagcaaactgggtgacaaggataaacttagtggtctagcagatgtgtttcagtggagtctcccaccgtccatggtgaaagcatgcaggttttattttctcagggtaaaagcttaggacagaatttcctgaagaaaggtacttccaccacatacttaagaatcacgtgagattaaaaatgcagagatctgagacccatcacaga

SEQ ID NO: 215709 - DNA, 628 bp, Homo Sapiens
ttttttttttttttttttttttttcagagagcaagctatctgtacttgtgcgtttctcctaccagattgtgcatgcctcctgtgggcagagcctgtgctgacttgctcctgggtctccagcatcacccagtctggagctgaggacctgggtacctacagatttccttccacactgtcagaattgagatgaaggaagcccagagaaatcaagtaccctccaccaggcagagcaaagtcctgggtgcccaaaatccagggaaggcaagggctgggggtacaagcagaggatctgaagaggtatatgagagtggccagcacagacctggcataagcttggtgctcagtgaaggttacctgatgttgctgggcaccagggtgatgcagtgcaaagggccttggccaacccactttgcagcatagctgggtgacctggtacagatcacatcgcatttcagagcttcagtttcccctcaggcagagaaagatgacaagagaagcctggaagggttgttctggggagtcagtgggtaaaaagaggccagggtggatcctggcacatggtgggtaccagaccagtttgtcagaggaggtcctctctccccagaggtacccacactggctgttgcaa

SEQ ID NO: 215710 - DNA, 619 bp, Homo Sapiens
ttttttttttgactttgccaaagatttaatatccacaaatgtacaatgctcactgggaaccaaagtcaggcatggggctgggctttaaggagcacaaacaaaaaggagggactagaaaacttcagaaaggtattggtgggggatgttgcggggggacaggggacagcgaggatgtgggatcccgagatcatccaaatccctatgtgtagacatatgtgtataaaggcctttaagagactcaggctgatggggtatcagatactcaagatgggtggtgccgggctctgaaagacatgcttcaagtaagagggactagaaaactctgccagggagcaagagggatcggggattccaggaggatccaggggcttgctgtgttttctctggtcttcaggtctcctcactgcggcgggatccaggcgcagctctgttcaatctctagagagatttgttcaaaatctggacctgaccccggggtcagcagttgaggactcagaggtggaatttttgtgggcacccacatggtagtcgatccgctgtcctccggaagacggtcaccctttggggacctggaaattttttttttcaggtggcactcccccctacaagctggctgtcc

SEQ ID NO: 215711 - DNA, 621 bp, Homo Sapiens
tatttttttttttttgagattttaaataaaatgtattttctgcaaaatgtcagcagtcctactattgcattcatctttccacaataacatatttagcaacacctcacattcacaaagagctctccttcctacattgcagcatcccttcatgtccatgactcccacaggcatgctctcaacccctgggaaccgaatacaaacccactgccagcagctcatagtggaagggaagggggcttagagacagcaacctacttgctcaaggccttgctttagaaaagatcagcaatactcaaataaactccaaaccagcaacaagtcaaataatagccaatattacttaacacatagtacattttgaatcacaaaaccgaatgcatcctatttgaaaattatggtagaagtattccaaagcatagaagaggaggccagaggagaatggaaaagtcatttcacgtactccagcttgatttcagtaggggtagcagagttcaagtcttcagggtgtgagctttccggcccaggtgtttcatataattctggacccacttctcctttgggtcagcacagatctccttgcccagtttggttctgaagatgacagccttctggggacacctg

SEQ ID NO: 215712 - DNA, 599 bp, Homo Sapiens
tttttttttttttagtgcaaacaaacatttattgtgaaatattcatcctaccctttattaggtattacatcatcaaagcactttgtggcaatgaaaatagctttttttacccctctaattcacccaatattccattaaagctgcaaaaaatgtgcaatctgcttgaaaaataggttgctcttatttactcatttgtgaaaagtcaaaaattaaaaaagaaaatgatactagcatacagggcctctagagccaattcacctttccatttcccaactactccccaaaataattaacaaagataatttgttttaaatgcctttttataaaaccaatgcacctttccccatattataatcatacaaattttaaaaagccgttatttactttcttggaaaaaaggtggccagccgttgttttttgattgggagcatgtgtatttcctgggagttcactttctttaactttatgctccggtttttgatgggtttcctaaggggctctgcatttcccatggactcttccccttggctgttgatgtcatagccctgaagcacggagtcttctcttttgaaggagaatttttggtggacacccctgag

SEQ ID NO: 215713 - DNA, 607 bp, Homo Sapiens
cctttttttttttttttaacttaagatctggtcaatgctcacaattagtatttgctttaatgattcaagcaattttgagcaaactgatactctaagcagccagaccaggacaattgataattactagaatataaaaattaaaaatatccatgtcatgatttaaatgatcaaaagaacatgaagtctgcatttaacaattttaaacattggggtatgactaaaaaaagctggcttttatgcctgatacaacacgtggtatactaaattaaggaaatgctaatcctatctgcgtaagcagcatgttaatcgataaactttctcattccagagtatgctcaagtagtaggtatctcaacaagacaggggagtaaaaagactcaagctttggtaatgatgcatgcaatctttggaacaaactgaaaggtaacatccccatttattcttatggttctaaaaacacaaaacagccttttaatatgctaaaatcacacatgagaattaataccacaagcaatgtatttttgataggtctctatatacttgtacccatatctttcactctctgtatacttatttatctatgaaaggctgtttagtttgctttgtg

SEQ ID NO: 215714 - DNA, 601 bp, Homo Sapiens; identical to SEQ ID NO: 52880

SEQ ID NO: 215715 - DNA, 629 bp, Homo Sapiens
ttttttttttttttacaaatgaaaacactttttattgtgggcagtcataattgtatgctatccatcaaacaataaaacctttatagctgagacacattcagcctgaagatgaagtgatatattgacttcttgatcaaatgccagaacttacagatgaatatgaaacagacatcaataattacagcttgcactgtagctgttggttcctaaggctttaaattcaatgaacaagtaaaaactggacagacacacccttcagaaattagaggtggaaaaggattacctcattccatacctgtcacatagcaggccccctgcagctattcagcgagaggcagcccagggtccaggagggggtgtgggctggagctgccaggatggtgccagtgggcaggcacgggggaaacctggcaggggagcacttaggagccgaggtttctcttgggcactaccctcccttcccctttcattcccttgtattctgcttccttgagaaacctggtccggatataaaagcacatacttaaattcaatttcttaaaaatgtcatctcacctggaaaacaaactttacttgaatctaaaaatgagttactactactactaataaaaagatattcctcagctaat

SEQ ID NO: 215716 - DNA, 542 bp, Homo Sapiens
aattcgtgatgtgagatttttacaaaagcagagtggaagaagccaaaagttataaatcctccatcgcagtcctagttaaatatattgctgctaggctctagacagaattacaagatgttcacaatttgtctcattttccctttcagatcgccaaactttggcatcagagcaaggtccacacttatcactgaaaattttcccacccagccccattaaaaacgttaaagtgtgagagattttatttcaacactgacaagctagttactagagggcctacaaaggtaagtaacaagtttccatttcaacttgagagacaaatgatgttaaaatataagaagcagggtaagtcaggtttgtgattttaaataaaagggagaaggatttcagactgaggaatgacaggttagtatggctaaagattgaggtgtgataaatgggagccaaagtgcacagcaaaaatatcttgactaatccatatcctccctgtcttctatcatgtaaccaaggaaggagaccacctgggatactatgttggtccaagt

SEQ ID NO: 215717 - DNA, 578 bp, Homo Sapiens
gtacacaatccaaatcttggtagcagcatctgacagggtaaataccaactcttgtgcaagggtcttttatatcctcaacccctctgattctggaaccggttccctaaacaaaggcagacttcttcagcttcttccagaatagacattagacatggtgacagtgataaacctttggggtgggctagtctttttcaacattgatggagcagaatttacaccctctgattcaatccatctcagtaaatgtcaatgatgccttcctatctacttctgctatccaggaacccacctctttagagtcaatgcatgtgaaaggctcatgatttgtaatatcaagaagtaggaagacaaagaggtttgaaggattctgccaaaggcaaagctgtatgaggctctctcctgactacatgtacaccctatatttggataactcattcccaactgagtctgctcttaagggtacagagcagggtcattgggtattatcttaactgtcattgccccagtacctagaacagtgccagtacctggcacatagcagcattcagtatatttgttggattgatggacagataggt

SEQ ID NO: 215718 - DNA, 581 bp, Homo Sapiens
tttttttgcctctaaaaaaacacatctacaaatgtgtgctcacaaatgctcaccgacttgctgatgccagtgtttgaaattagagaggcttactgaatttcaaatgaagtgattagagtgaataaggcagtttagttcatctcccataggatacagaaagtaagactgggacaaaattctctactaactcttaagaaaattaacaaagacataccaaagaatggtggttgctagtattgctagtatttacacacacacacacagttagtagaaatccatttaaattacttataatagtgatccacggagtaaacacgattaatctggaaattattggtcttcagggaagtactaacagttcaacagtcgattatttcaagaaggtggctaagagagcagggtgtacaagaaaggaaaaatgtatggaaatattcatagaatagaaatgagactgggcgtggtggctcatgcctgtaatcccagcactttgggaggccgaggtgggcagatcacctgaggtcaggagtttgagaccaacctcgccaatatgaagaagccccatctctactaaaaatacaaaa

SEQ ID NO: 215719 - DNA, 585 bp, Homo Sapiens
ttttttttttttgggagtgatgtattcttttattgaagcaagtatgtccagtcacaccaaaactgacgtcctgcattatggtacagcttcatactcagagttcatctcaaataccaaaacatcaaatcagggtatgtatcaaattgggaaaataaagtagcagacagacactgtttcaagtaggtactagaactgatcacccgtgaagtgcacgtggatgtgtacagaaaccgttctaaggctgtattccaaatatatattctcaagttttaagcctttctcatctcaaagacataaacaaagcaatatgtactatcaatatacaatctgtactagctagaacctcagaaagtgcaaacacactgtgacaatacagtggaactattcctgctccacccaggaccagaggcatgggcagcaggcccagggctgcctcctccccaggcccagcctttcccaatgtcttcaggctcttccaggagctttgggaattgggacctggcccatcctcacccaggcttccccattgatcaaggctcctgcggaaactgggaatgcagagagggacaaggatgcggagttcct

SEQ ID NO: 215720 - DNA, 610 bp, Homo Sapiens
tttttttttgagacaggatctcactctgttgcccaggatggagtgcaattgttgcaatcacagctcactgcagcctacacctctgggactcaagcaatccttctacatcagcctccctagtagctagggccacaggcttgccccactgcatcctgctaacatttttgggttttttttgtagaaatggggtcttcctatgttgcccatgctggtcttgaactcctgggctcaagtgatcctcccaaagtgctgggattacaggcttcagccactgtgcctggctcttcattaatttctatgactatataatggaccagagttcatttaattagtccctactgatagatttttgaggtactgccatttaaacaatgctacaatgaataagctgtacattcacaattctataagtaaaattcctaagtcaaagggcatgtgcatttataattttgatacttacaaattgttgctgcaaagatcgcactactttaccttctcactagcaatgcacaaaaattaacaatgcattccttgttagtttgtaggaatgctgtatatattacggaaattagccttttgcctgtgacaagttgcatatattcttttctca

SEQ ID NO: 215721 - DNA, 607 bp, Homo Sapiens
tttttttttttttgctgtgagaatactttattagtcaaaactgcacactataaaagtgctttaaaatgcagcagcaggagatgtgaagacacaaatgaacaagtgcgtagtgacacatagctgtcacaacacagtgaagaatacacactgcctcccccgctttacctagaaaaggagagttctaggccacctcctcctcagcatactcctcatcctcctcctccttggccgtggcatcctgatattgctgatattcagacaccaggtcattcatgttgctctcggcctcggtgaattccatctcatccatgccctcgcccgtgtaccagtggaggaaggccttgcgcctgaacattgctgtaaactgctctgagacacacgtgaagagttcctggatggccgcattattcccaatgaagctgcctgacatttttagcccccggggtgggatgtcacagacggctgtttttacgttgtcggggaaccagtcagcaaagtagctgctgttcttatcttgaatgttgaacatctgttcatccacctccctcatgggcatgcgaccctggaaaatggcagccgccgttaggtagcggccgtgacgggggtc

SEQ ID NO: 215722 - DNA, 598 bp, Homo Sapiens
ttagcttttatttactcaaaaacatccacaggtgaattcagcagtttaagtcccccttaaactcagtttatttcttctgttcccaacatcttctaggcatcctccgagagcaggttctctgctcaattccacaatggcatggaaatgagtcaccaccacacacatgttcagcccaactagagccttttgtcagtaagtcaactaggcacccttcaggctccatgacttattcttctattgggaagaaggaaaacagacaataatatcaataatacgttgtccccaagtcaggcctccaaaacactgaattagagagaaaggacaaaggaaaaatgaagtggaggaagagagtagtggagtgggggagatataattggggagcactggagatgctcccacctcagtggaagtaatcaaggatgtaaaaatcccttggcccatgcatacaggccctcaagtgtttgttgatggggaatctgaaagtcaatgagacagagtcatctctgatggataaccactcagaattcttctcaatgcttgtgtccaaagaatcagagggatggcagaccacacaggctttgaagatcataatgtaggt

SEQ ID NO: 215723 - DNA, 446 bp, Homo Sapiens
agagaagggagcaatggccagtcaccttcaccttctaactaactagcctccggatgaggtggctgccaccaggcccgaatgatccccaggagcccagcttccaaaccccaacatcgaatcaaacatctccatccccaagtgcagtaacacacaaaaaccaaacactctgccctgggaaaggcctggtgcgattctcagtaggactcacacccaccctacctagaagtactgggctggcctgggtactgcatccgtgtgttttgataagggggtgatgtggccacgcccttatctagatttcactttgtatccactgggcacagatattctagagaacttatctttcactcttgtaaaagccacatatccacatctctttcattttctcagtgtgttatgcagcaatttattaaagtatttattgtctaataaaaaaaaaaaaaaaa

SEQ ID NO: 215724 - DNA, 569 bp, Homo Sapiens
aaaatgtataaagcaatggcgacctgggtttaagccacacagagaaagggctggacaatccattaacccttctgccaatgtccattccattgcttttaacatgattgtttccatttcttacaatttgcatagcacttacttgtcaacttgctttgaattcattgtctcagtttatcctcacaacaaccctgtgaggtaggtagggcaattaacactatccccattttgcagatgggaacactgaggcacagagcggttaagatctcgaggctagttagtagaagcatagggaatagaaatcaggtctcctaactccccagtccacatcttcctttttagactatgttgttccgcatgactagggagtagaataaagcgagcagtgagccatagctctggttcaggctatgcctaggaacaggcgagaataaagctaagaaagcatggctaagggctagcaacactcagataaacaactgctctggacagctcagcaccaaacttcctgcggaaacttgggctctattagctttggttgaagctactttctggatgcctagttactgctg

SEQ ID NO: 215725 - DNA, 624 bp, Homo Sapiens
tttttttttttttttaacttacaaacaaaaataccgtaataataaacccaaacaaagaccctcagcttgctgccacgttctctatgcggtttggcggggcgggtatttacaagcctacagctgggactgaaaccccgcacgcagccgccggagtttccaaactgcgatcccttctcacccaaagaaacaaggggagtatgatccatgatcaacaacatgctaaagttaaacaagaaaatggtacaaaatagaaattattaccatacatgtccagcatgcaggattaatatttttaatgcagattttttgtatttttctatataatcgagcaggcaataaaactgatgagatttgggcgccgagcgtcctaactgaggcctgtgtctcagggctgagagccagtgttctccgaactctgacagacaggtccgtctgtccttccttctttcgctcagcctcgcctctcgcctgccgggacgccagagtccctctcctttcctcgttgctctcttcctggcgcggactactctccgggcagcaaagcagctgtcccggcttaacgcgcaaagttcagaaagccaggagtctccagatggccttggtgacttctcgggactatgcctc

SEQ ID NO: 215726 - DNA, 617 bp, Homo Sapiens
ggttttttttttaagcgaacaatttgttataatgaaccagaaatacaagattccactgaaactgaacagttgacagaatatggttgaacttaaaccttcaagggaaacaagggcaaaacaaagctaatgagtggaaaagtccaagattagtttgggataaacatgaggatataattgcattttagcatggctatcttctgacctcttccagcagttcgtctgccatcattctcccttctgacacacctaccaaatcaaatggcttctgatcctctatattgcagtataaaccaaccctatagtacccctctggtcatgatacaaacccagaaggaaagtctgtaaatctcatacaaaggtagaaagtgcaattcaacccaacacgctggttatggtatatgtgctgtcaatgtacatggtagcaacttgaatcaaaccagagctgctaccacatgtaagcaacctcttatgctgccctgtagtgatgtcaatgttctcagtttactaaattatcaatgtggaagaacgcatttttgagctccagaccttctaaacattttaaacaggctatcgaagaggatgtaacagaaccctatttcagaaacctaaggatcagg

SEQ ID NO: 215727 - DNA, 547 bp, Homo Sapiens; identical to SEQ ID NO: 44039

SEQ ID NO: 215728 - DNA, 530 bp, Homo Sapiens; identical to SEQ ID NO: 50311

SEQ ID NO: 215729 - DNA, 593 bp, Homo Sapiens
tttttttttttttaaaaataacatttattcattgaattcctttacagcacatgatcaattgtttgatgtacaaaaagtatctatgacactagtattaaattaaaattaattttaaattttaccacaataaatgtatacatagtataaggaaaactacagatgctttcagatcaccagtctagaacatattctgcaaagtggctaattcacattatatttttcttttaatactgagttccataaaaatgcaagttcttccattgtttgagttctgaagtcagtattcattcttgcaaccaatgaacagtgttttgagaaaacagttttctttgtaaatattccaccaattcacgtcttgattttagcatcccaatctcatgataggggatctgaacaacttgataaccgagtaactgtaggtgtctttgtttaatagcttctttccccagtaagtgtttgctattggagcaaaacctttttggaccatcaatacacagtgctatccttttatggatatcttcattagctgtggatggcaatacaaatccttcttcatctaatttaatttcaacatctattgtataacaataggg

SEQ ID NO: 215730 - DNA, 599 bp, Homo Sapiens
aagtttgattttgctacattgaaaaaatgtttgtgtgtgtgtgtttttttttcctttacaaaactccttccacagacgcccggggcctgtggcgggtcactgtctgggcagatgctcacagcagcacgtggtgcccacagagttcaggaggctctggtaggggctgttttagaaaataactgatttcctgttgaatcaggtacgctccgtgcgaccactcctccctccctgctccctgtccagttcgggtggtcctggctttctggctgtgggcagctgagaggacaaaagaaaggaagaaaaaagggaaaagtaaaccactgccccccagttgagccaggttcctcctggagacctctggggaggaggcttctggatgacagcctccccgccagccttccattccctcctaggcctgttctctcccggtggcccaatctgacaccagctggtggcctggagtagggaaggtgggcaggtgtggcctcgggcagcctgccctcgcaggggactcggtccccggggacctcagagccactggccaggtgtgtgcctgccaggtcaggccctggcccgggcttcgatggcatcatcatctc

SEQ ID NO: 215731 - DNA, 583 bp, Homo Sapiens
ttttttaaaactttattctttatttcatttacaagctaccaaatattatgtatcgtacacagtgctgaacacttaaatggctgtagtcatggaaggatccagactgaatggaaagctgttgagaaagaaaagataaaagcaaagtaatactgcaacaggaaggtggcaaaagcatagttttgccataataaaatcaattagatttgtgattatacatcagttccggttaaaatgtctgagcgccatgcgattttcagctttattgtctgcagtctgactaaagtctgtatagtcattttgtcttttgcagttattaaaataaaaaaaagttaaaaactatagcagcaacaagcaaaccctgtgacaggaaggcaagggttaagaactaaaaagagtttatacagtgtgttcagggaaagtgtgcagtttatcttccataagcaggagttcgactgagggacaacatgattcgggcaaatcgctcacagagttcatgcgtggaatatgaaggtaacttcggtggctcatggaaacttttaatctccatagaacaatcaagcagttttggcaaaaaatctgtcag

SEQ ID NO: 215732 - DNA, 573 bp, Homo Sapiens
tttggtttttaattctctttattggctctaaagatagtggcaggagctgcctcgtaggccgggaaaaaaggagcacagtgatgattggagggaaggggcaaccctgccagtggtggatgggggaaaacacccatctggtggtgttaaagggtgccggggcactggtggctcatgcagtttctacttagcatccctggatccaaagagaacaatgcctagagcttccaacctctcagagggcccagcctaccaaggtgacatcaaaacaaggaggcttaaaaggagtttttaaaagccatgacgtcctttgctgaaataaacattgacatcctcaacatagatgccatggttaagaggcttggaatgtccgggaaggcttattggattcaacataatttctctgaaaccatgtgaccttgggtaagacacttccccactctggacctcaggttcctcatatatatagtgagttgatgggactagatgatctctattgtccttcaagtttaatatcccatgattgtctatgtttgaaaagacccacgtgtccggcttgtggcagttgtgtccctg

SEQ ID NO: 215733 - DNA, 592 bp, Homo Sapiens
ttttttttttttccagttctgacacctttttaatagaaatcactgtttttaggaaacaaatagcacttttgtaatttttttttacaatgtttcttaccttgatcttaatttaagtaacactaggaagacctcaatatcttttattttcctttttaatttaaaaaaaagttttttttccccagatacaaagatttttgcccttgcataaaaaaacagtgcccgaacgatgacacaaggactcacaaagactcacgggacctcactgacactatgattcctactctaccatgcaaggtcttggctacccttaattggactgtcagcctgaaaaacagcttttctattccttattttagtttttgttaccaagaaagtaaaatgaacagtaaaataaaactttccttaaagaaaaaaagaacaaaaacaaaaattaaagaaagagaaaagaaacgtctccattcaattcacacacacctgggtcgcgtgctgcttcactcaagatcttctcttcttataaatatagaaaagggatggagcttgttttcaagtaaaatcactgatccacctttttttccttcctggacacacacat

SEQ ID NO: 215734 - DNA, 568 bp, Homo Sapiens
tttttttttttttaaattttacagagtttaattgagcaaagaatgattcaggaatcagggaacccctcaaaccagaataggctcagagagactccagtgccactgtgtggccaaagacttacggacagaaaagggagtgaggcacagaaggcagaggtgaggcctgcaaacagcagggtggctacagctcgtgtctggcttattgaaacagagtttgaagtgctgctgcctgtgactgattcaagagtaggttacagtgtccacacatccaattagatgactgttcactacgtatggagaaacctataggctaaacttacagtatgtaaggaggcggcttcaggctacagctgagtagtgtgtccttacagttggaaccaggagttcatgggaattcttcatcatccagtggtctgtaaatgttgcccatgctgagtagtctgtccttacagtgtgaaccaggggttcatgggaattcttcaccatccagtagtctgtaaatgttgcccatgctgagtagtgtgtccttacggtgtgaaccaggggttcatgggaattcttcaccatc

SEQ ID NO: 215735 - DNA, 590 bp, Homo Sapiens; identical to SEQ ID NO: 40772

SEQ ID NO: 215736 - DNA, 590 bp, Homo Sapiens; identical to SEQ ID NO: 51687

SEQ ID NO: 215737 - DNA, 564 bp, Homo Sapiens
ttttggacagtatttttttttaattttgtatctacgcattttctaaatttccttcaataatcatagattacattggtaataaagaaacataaacatttcttaagggttgcttaaaatgagcgttgcctgtaaagtgatccttctccaccttaggtgaaaaataagctctgcttttccttcccttgcctcatgctccatcccctgtccccatgtgaagaggctgccccacggcttcctcgtccttctttcttcatccactatctagtcccagcagccgccctcttagctgtcagtccatccccatctcctccagctcctccatgctccaacagcactttagagaaggcagagggccagcacgtggctttcttgccttccctgagcaaacagcccgagagagaagctggtgttgatagagagaggctctcttattgcaaattagataagcccaaatgtaaaagcatattcacatttatcaaacatctcatagatgtggcacctatgggatttcaaaaaacccttcatagatttttgcctcccaaacccacacagcagccccatgag

SEQ ID NO: 215738 - DNA, 424 bp, Homo Sapiens; identical to SEQ ID NO: 51277

SEQ ID NO: 215739 - DNA, 504 bp, Homo Sapiens; identical to SEQ ID NO: 51845

SEQ ID NO: 215740 - DNA, 508 bp, Homo Sapiens
atttattatagtcacacaagtgattatactaaaaattattataaaggttataattttataatgtatttacctgtcctgatatatagctataacccaatatatgaaaatctcaaaaattaagacatcatcatacagaaggcaggattccttaaactgagatccctgatccatctttaatatttcaatttgcacacataaaacaatgcccttttgtgtacattcaggcatacccattttaatcaatttgaaaggttaatttaaacctctagaggtgaatgagaaacatgggggaaaagtatgaaataggtgaaaatcttaactatttctttgaactctaaagactgaaactgtagccattatgtaaataaagtttcatatgtacctgtttattttggcagattaagtcaaaatatgaatgtatatattgcataactatgttagaattgtatatattttaaagaaattgtcttggatattttcctttatacataatagataagtctttttt

SEQ ID NO: 215741 - DNA, 592 bp, Homo Sapiens
ttttttaatagatattattttgtatttatatagtgccttcttcaagaaccttaaatgctttacagacattatctctaattaatccccacaacaaccctgtgaggtaggtattactcccattttacaagacagggagactgaagcacagagaggttaagtgacttgcccaaggtcacacagttaaattcactgaagagccaggacatgagcgctttagcctcccagctcccagccaaatacctcatgatagaatctttaataaaaagtgtttttaaagaaagtatcaagagtagttatgttatgaaaatgaggtctttctactgccatcaaggaaagaaaaaaccctatactgatggttagaggccccaagacccacataatacaacatttccctctttccctgttcccaagcctcctggttcctgtcttaaataatcttttaaaggtaaaatttccaagacagaagccatgtgacttaagaagtgggacttaatttagaatatttacttttagttacaataatttatagaaatttttattccaatatacaaaatatgggacagccatcccaacaatcatgtacatagttaca

SEQ ID NO: 215742 - DNA, 565 bp, Homo Sapiens
tttttgagggttcttaggtttattgagtgatctctgagaaaagggccggccccaggagcaggagggggtggggaggatccagagaagcagaggaccaggaagagagcaccccaccgtgggctcctggaccagagcaactgggggacttacacttgccagcacagcacactcctctggtcttgggcagaaatccagccactgccccatgctgccagacctgatcgcagacagccactgttcccattccttgccagcagcaggacggagagtgctctaccccacctccctagtcattcacaatattccaggggggccagccctcctggatgacctggttgtcagcctcacaccctccttctaggagtgagagcatgagctcactttgcagtgggcactaagcaaagactggggagctgtgccagtcggagtacaccagaaatccggagaaggtgctgtctgtcttgatgctggcatagatgccaatgtagtcacccacacccacctgcacccacacttggtcctcaggctccagcctcaccatggccccccccgagagcgaggctgg

SEQ ID NO: 215743 - DNA, 574 bp, Homo Sapiens
acgttcattcgttatttatttgtgtgcgaccccggctccccgcagcctccacccctcccgcgtcccgctttcagaaggaacgcggccctcagctccctccgaagaggccccgggtcaggggctgcagccgggtccccgtgcgtcggcccagctcgtccagcaccgccttctccttctggaacatctgctgccactctgcctccgtgccgtgtgtgaatcccagcaagtgacagagtccgtgggtggccgtcacagtcaggacgtcattgtaatcttcattttctttacactgatggaagatatactccactcctaggaaaatgtctcccaaattgtagtcatctggaaaatcaggctggggaaattcacctgctttcagatgctcatgaaatggaaaagaaagcacatcggttgggacatttctatctctgtagattctattaatgtgctgaatattcttgttgtcaacacagatgatccccaggtcaaatttctgcactcctaaaatcctccttacaatctcgatcttactgcgaagtggcgctctcctgatggggatgactcgctgcagatt

SEQ ID NO: 215744 - DNA, 523 bp, Homo Sapiens
aaaaaggctgtaagatagtcaaccacagtagtcacctatgtctgtgcctcccttctttattggggacatgtgggctggaacagcagatttcagctacatatatgaacaaatcctttattattattataattatttttttgcgtgaaagtgttacatattctttcacttgtatgtacagagaggtttttctgaatatttattttaagggttaaatcacttttgcttgtgtttattactgcttgaggttgagccttttgagtatttaaaaaatatataccaacagaactactctcccaaggaaaatattgccaccatttgtagaccacgtaaccttcaagtatgtgctacttttttgtccctgtatctaactcaaatcaggaactgtattttttttaatgatttgcttttgaaacttgaagtcttgaaaacagtgtgatgcaattactgctgttctagcccccaaagagttttctgtgcaaaatcttgagaatcaatcaataaagaaagatggaaggaagggaga

SEQ ID NO: 215745 - DNA, 491 bp, Homo Sapiens; identical to SEQ ID NO: 51289

SEQ ID NO: 215746 - DNA, 561 bp, Homo Sapiens; identical to SEQ ID NO: 40386

SEQ ID NO: 215747 - DNA, 586 bp, Homo Sapiens; identical to SEQ ID NO: 46959

SEQ ID NO: 215748 - DNA, 591 bp, Homo Sapiens
tttttactttttaaaatttcttttttataaattaatattttattgttggatcctcctcctttctctggagctgtgcttggggctactctgacactctgtctcttcatcaccagccaaggaaaggggctttcgggtagggcgtagctgcagggcctccttgaagtacttgggaaggaggaagccatcagtattccctggagtcagaatcaccccattggcagagcggaagaagggtattccatctgccagagccaggggtccatcgatgaacacagctatttcacaatgggaccgcatgccactgatgataccggggtctccaggcagtcctggggccaggtgaatgtgcgtccttccctggcaggacaggcctttgagtaggatggatggccagtgcttccagaatgtaccatggactagcatcgggggcagggcctgcggtgtctccaggggcatcagctccaacttaggtacctgcagggaatggccctggttggcccggatgagaaggccagtgctgggatcccccagctgcagggcgaaccgctgcttcctattggtgtccaccacgcgctgcacatcttcagcaga

SEQ ID NO: 215749 - DNA, 384 bp, Homo Sapiens; identical to SEQ ID NO: 52080

SEQ ID NO: 215750 - DNA, 545 bp, Homo Sapiens
cgcagtctgctgtgcccctgcgccacgagacccacggcggggaggacgtggccgtcttctccaagggccccatggcgcacctgctgcacggcgtccacgagcagaactacgtcccccacgtgatggcgtatgcagcctgcatcggggccaacctcggccactgtgctcctgccagctcggcaggcagccttgctgcaggccccctgctgctcgcgctggccctctaccccctgagcgtcctgttctgagggcccagggcccgggcacccacaagcccgtgacagatgccaacttcccacacggcagcccccctctcaaggggcagggaggtgggggcctcctcagcctctgcaactgcaagaaaggggacccaggaaaccaaagtctgccgcccacctcgctcccctctggaatcttccccaagggccaaacccacttctggcctccagcctttgctccctccccgctgccctttggccaacagggtagatttctcttgggcaggcagagagtacagactgcagacattctcaaagcctcttatt

SEQ ID NO: 215751 - DNA, 574 bp, Homo Sapiens; identical to SEQ ID NO: 51952

SEQ ID NO: 215752 - DNA, 584 bp, Homo Sapiens; identical to SEQ ID NO: 42777

SEQ ID NO: 215753 - DNA, 498 bp, Homo Sapiens
tttttttttttttacagaaaaatgttttaatgtaggaagcactaaagtctttgttccaacaaaattaactcagagaacaaattattttacatatgtatacagatcaatcaacaaaagtacacattataacaattgctaaacactgtccataaagaaaacatttcaaatgagaagcgccatcgcggttttctccttctgggtcacccagtggaatgagggccctcgccaggggctcttcccagacgtctcttcacaccaaccggcttccttctgatggccccattttcctttaaaaccagttctcatcaaatagggtgttttatgcaccctggcaaatgatcattttgacaaggattaaaactgtaagctaaacagatgacacaaatgacaattgggaataatttttagtggggacagaggctaaatactaccccctccccttttctacttctaaccaatatcttgagcattcagtgggacaatacagcggacgcgtgg

SEQ ID NO: 215754 - DNA, 593 bp, Homo Sapiens
taggaaagcagatatttatttggagcagcatgctcagcttggcatgttttctttcttccttatttatatactgtgtcattcccaagaaggatttaaagtgacttcaatcaatacacaatatatatgaaaatataaattagatatacaggtaaaaaaagagcaagaggaaaacaaggcacaggaataaggctggtgcaaaactgcttctctgtgattttctacacttacaataaatagtccatttatgggctggcaggataaactcctaacaagaaaggaccctcaagacatgccatggaggaagatacattcccatgggaatgtccctataatactccatagatttccttttcctgaaacatgtttgatttcttcttaaacattcccaagttctcattttgagaatggccagggttctgggcagtgtagtctactgaaagactcaggctactaagttcctgagggatcacattccagtcagggtccattacaagtcagagattatataaatatgcaagagagcatgaaccaaggctaaaactacagttggtaattcctcgaactctaacttttttgttttttggccttttggg

SEQ ID NO: 215755 - DNA, 410 bp, Homo Sapiens
ttccagtcccaggcttctgaagagacgtggtaagtgcggtgcagttttcaactgacctctggacgcagaacttcagccatgaaggtaacaggcatctttcttctcagtgccttggccctgttgagtctatctggtaacactggagctgactccctgggaagagaggccaaatgttacaatgaacttaatggatgcaccaagatatatgaccctgtctgtgggactgatggaaatacttatcccaatgaatgcgtgttatgttttgaaaatcggaaacgccagacttctatcctcattcaaaaatctgggccttgctgagaaccaaggttttgaaatcccatcaggtcaccgcgaggcctgactggccttattgttgaataaatgtatctgaatatccaaaaaaaaaaaaa

SEQ ID NO: 215756 - DNA, 234 bp, Homo Sapiens; identical to SEQ ID NO: 55568

SEQ ID NO: 215757 - DNA, 607 bp, Homo Sapiens
tttttttttttttttttgagacggagtctcgctctgtcaccagtgcagtgagaagggtgcagtggcgtgatctcggctcactgcagcctctgcctcccgggttcaagcgattctcctgcctcagcctcccgagaagctgggattacaggggcccgccaccacacgcccggctaatttttgtgtttttagtggagacggggtttcaccacgttggccaggctggtcttgaactcctgacctcaggtgatccgcccgcctcagcctcccaaagtgtggggattacaggtgtgagccaccgcgcccggcccatagctttgtttttaagcagctctcaccagcgttcacacctgaaaatttgaaaactgaacgtgcacaagtaaaacatgtttcctggagaaaatctgcaaaatacaataaagcataaaggagaaaatttaaacaccatcccatcatccagagacaactggtgttaatatttcagagagtaaatgggcttaaaaaacttttttccccttctcactttttcattttggtagaaaaataattaagccagtctgctttgcttcaatgtatggttccttttcgtttctaaaacaggctttaaaaa

SEQ ID NO: 215758 - DNA, 465 bp, Homo Sapiens
gcacgagcaaagtttggctattttaattcaatttcattgttcaaggtagtatgggtatattaagtggttcatttccctcctgaagaaaacaacttctgtctgatgtgattttgtgaaattcaaacatgactctttgactgtttaaaaaaaaatttttttttctttacgtatcttggtaagattttttttttttctgggacatattttttgtaaacctccaagtagtttggaaacacttgcctatttgctcattcctctgggcacagcctttcagagcatttatcccacctgtactgaaaaatctgttttcccaggtggtggtggggccactggatagaagggatcacagagaaatgaggagtgagcgagctttgtaaactacttctaattctcttcattagtatgctatgatccaccccagcttctgcaaggtcagacatgcaagacaagtacttggccaaaaca

SEQ ID NO: 215759 - DNA, 471 bp, Homo Sapiens
tttttttttttttttaacagtagcattattttaaaactaatttcccataattctttaatggatacagaatattacagtgtatggctacactgtttttataaccatggccctattgaacatttagtttttctccctaattttccactattatacataataaaataatgtcttcagccttttataatattccttttcctcagaggaaaaggcaagtacagtagaatctattctctcttttctctctaagggaagtcatggacttaccacaagctttgtgaacccaaaccactaaaaggtttaatcaatggaaaaagtccggccagcagcatgagcccatgggctccacagcatggcccgtgccacgcctttccctgcacaccaccgccactgtgatgccatcactccccattcacctgcagctccttttccgttccccacagccaccaagacacgggatcgatttctttcttc

SEQ ID NO: 215760 - DNA, 637 bp, Homo Sapiens
ttttttttttttctttttctgtaaatttagtttgtatggtcgtaggacactatcacagtaactggatacccaaaggataacagaaatagtctcaacaaagaaaactagattttctaaaagagtaggatgtgttttcaagttaccatctttaacttctaagaggtcacctttacatttactgaagacatcttttaactggtctagtaaagacttaaaactattttctattcgttcctgaatctccattgtatcctctaaaccactggtatccagctcataaatatcattgacaagataaaaagagcttatctggcactgagaacagccagaattaaagaatccacccattctggtaggtacaggaccaaggaaaggatactgaatatccttctcaataaatcgctttcctgtctccagggttgcctccagctgttgaaggagcaaacgaagaatatcaatccgggaggataccccattctcggcagtcttctccgagttctttggctccacagggtggttgagacttggaagtccacttatcagcctcaatgttaaggatcggattcttaaccacaaggtctcctcctctaaggaaagtttcttatgttcttcagaaacgtccctgtcttttggatcc

SEQ ID NO: 215761 - DNA, 575 bp, Homo Sapiens
tccaggatcaagtgcagtggcacaatcatagctcagtgtaaccctgaactcccgggcttaagtgatcctcccacctcagccacctgagtagctgggactaaaggtgtgtgccaccatacccagctaagattcatttttatagtctaattattttatattagtttttaacacaattgcagattttgcatgtttattctaaacaacaatttgccagttactggaggataagactgttaaactggcaattttctatataaaaggttactatattagaatggcagcaacagccagagatttgggatacaatcttaaatgacagaagtaaaacaaaaagttacacaagagagctggatcattaattagatcaagagtttggcaaacaggttatgtgaagggtaaaacgggaaattttttcagctctacaggccgtatgttctctgttgtaactactcagcttagcctttgtaatgtggaaacagccacaaacaacagacactttttcagtttgtttgtaactgaaaaactgcagctgttttccaataaaattttgtttacaaaaatcagtaggcagaatt

SEQ ID NO: 215762 - DNA, 624 bp, Homo Sapiens
ttttttttcagcttaatcaaagtttattttcacaatgctatagaggtaagtccccaaactttacaatcctcatttgtttctctcaaaaagatctctttttttaaaaaaaaggctttagaataccacaccatgtttaaaatcctgtaagctatttttgaaatctaaattaaattctgacaatgataaaatgtttgccagccaatcaaagtcccaaactaattaacattcaaagtaaaaaagaatcatcattgggatctcattatattttgatagctgtaaaggctgattgactcctgtcattaatagtgttagtgtcataagcaaataatatcacttatattctagaaaaggaaataagcatatttgtcttgcacatcttatacactgaggtataaaaccatgttttaccaactttttttattaatgtaccaaataatttcttccacaatggcaactgtggtaaaaacccccatagcattagccaacctgctggcatgttctatggtcttctaattaatatagtgcacagacatttataaactacacagccacagtaatttacaagtaactaataaatattgaaatgctgggaatataacaaaactacattctaaatagtttact

SEQ ID NO: 215763 - DNA, 612 bp, Homo Sapiens
ttttttttttttttttgcagattgacatagtgctttatttaagctgtctgtacgaaggaaaatcatgttcatccctatcatatacgtgtaaaaatactaaggatgtacagtgtacaaaaacagtttctcctagttattccacatccttgtgggtcatatacttcaggaaatagacaggtttagtatgaccaacagtaatagtaatacagtttcttgggtttatagttgcatctgcttaaaatccttaaccagatgactagatcttgcgcagatctaatgaaagaactagcaaggtcaagaaatgtcacaaactataaagctacagggaggtaattcaattaccaatttagaggttttctttttatttaaataaatactttacatttcatgcttgcctgtaatgcactaccaggagcaagataaggaaattctactgtagacagtacaaacagtagcagcaaagtgtgtatgttgaggtgtaatagagagaccctgcagttagtaaggaaggcccttacttttgtactctaggagaagcaagtggcccctgcaagaacagtcagctttaagaagctggaaatcagggatgggaaatggaaaacaatacttgaa

SEQ ID NO: 215764 - DNA, 641 bp, Homo Sapiens
tttttttttttttttttttttttttcattgaatattctctgaagacaatcagaggcctgccagggagggactcctggctggttccagcactgtccttaggcctctttttaatactaacttgttggaactgatgcactttgtttaatgtattttaccttttttttttaaagctgctcatttagaacaaaatcaaatgcttattgcattgtatccttcctgcttgctgtttttcctcttaatttcaaaagttatgcattaaagataaaagtacacttaagaagtatgcacaagaatacctattaaaataactaccatcaagtttgatggtataacttcaaaggattaaaaaaaactattttggattaatattttgcgtgttttttttgtaaatatgattgtatataaactggtggtacgttatgacagttttaagtggttgtgagaaaactaaagagaacaggtcttaagctatgtttaaccttaactttgtgctgatttgacaacaaggaaggcattttggccagagtaaattttttaaaactctttccagcgggacctcagagaatcatttccaaatagatgagaagttccttcctactttaataaaactccggaattcttccccctctcttgctgtctca

SEQ ID NO: 215765 - DNA, 552 bp, Homo Sapiens
tggctttgaggagctgagagaggccttggctaacagcaaaggagctgggaactgcagtcctacagccacgggaactgaattcagcccataagctcattcataggcttggaaaggcattcatctccagtctccagataagacccagcctggccaacactttgaatccagccttgtgagaccctaagccgagaactcacttaagcctgcttggacttctgacctacagaactatgagataataaatcagtggtgttttaagctgctaaatttgtggcaatttgttatgtaggaataggaaatgaatacagtattttaaaagaggtaaagaggaaatcttcatacttgattccctgtagtatgctggatatttcttggtaaatgcatgaataaagtctttagtagcaagtcatgtacctggaccttgttggggatgttctcgccagagatctcaattagtcttcattggacgtttgttggcaaagttgcagcatcttactgagtagcgtttggtaaaggaactgctagaatgagactataggaataggactgaaa

SEQ ID NO: 215766 - DNA, 567 bp, Homo Sapiens
agtttctattgccttatgtaacatttaactaatcttctcttctatagtgtctattctgcagttcatcccacctaatgtacttttcatcttggatgttgtacttttcatctcttacattctaatgtgggtcttttgaatgtctcccatgtctttatctgacatgttcagttgttcctctgccttcttcagcagatggattacagtcactgttttaatgtccttgtctactaattctatcttctgtgtcacttctggatctgttgctactgactgatttttttgcttgttataggttacatttgcttgtttctttgcatgcctgctaatttttcagtggatgctggatatttttgaattgctaaattattgagttttgttagggatgcacttatttgaaaacggtaagttaagggtactgttcaggagtagcttttaagctttgttaagtgaaaccaaattatgccctagtgctgaggcaacacccttctgaagactctatttgacgccctgtgactaccaaatcctccactctggctggtgggaacataaactattcctggccttcta

SEQ ID NO: 215767 - DNA, 582 bp, Homo Sapiens
ttaagctccctgagatgacatacggagacacactacacagtacagtattagagcagaatataaattatttacaaaaatcatttatagtacaatcaaatttctatttcaacaaatataatatcagattaattgtatctttgattatttgttgctgtaagtttattcataccagaaaaatggtcacatttaaaattctcaaaatagttttggcacaggtcacatcttctcattttgctaagtccctgagcactttgaacaggctgactttatgcatcggcctcttccccagccaccctggtcccctctttccacaatgccttgctacctgctctggcctcaaggctacctttactcctcccactattaactctagatgaacatttaatgctatcacctttctagctaactgtgctctgcagaaaccatgcagcttctctgacaagaagatctactagagtccctgccccaaagaggacttcataccatcttcccgatgctgacaaggaaggggaaacagataagggtacgttttgtgtatccttcttcttgttcataaaattgcccgtaatggtcagtgtttta

SEQ ID NO: 215768 - DNA, 626 bp, Homo Sapiens
ttttttttttttttttcaatttaatgccctttattttctgatgggtgccaagtcacttactacataaactacaacaataccaagttttcagctaattgtttgcttaaagaatcacagaacttacattcaagatttcatttacatacaaaattcacttgaggttttctggttgaaactttcaatagctttaagaattatattctctaatttttaaatcacttgcagtttaagctcatttgagaaacttttttctccttcagagtaccgtattcatttatcacagcaaaaacccacctttaaaggtttgtttttgttatggttgctgtttgttcccttatgtttgtttgtatgcttgttttttaagtatgatactgagggcagaaacaatctgaattccatattcgggttcacagggtatatatattttttctgttagatacacactccttaatcactgccaggaagtgtactcttgatcatttagaaataagaaagtgtaggggacttaaacaaaatctatcattgctattgaacaaaacagttgaatcagcatgttctgctttcaacaggaaagtggtttataactactccaagtgactgttttagtcaattcagactgcttcaac

SEQ ID NO: 215769 - DNA, 394 bp, Homo Sapiens
ggcagatttctcccgcaccaggctgtggaggtttggagggctgcctgagcagacactgtgccattgctggggctggggaaagaatatctgagacgacgtttgggagcaatgctctttaccacgttcaccaaatcgtctggggcaggggttgtgagctgcagcagttgctggtgccttgtgggaaggtggggcagggaggaggctgcccgccacctctgcccccagtcacttcctgcttgacctgactcttcacatgtggctgcttaattcctgcccctctccccccagctgcttctcctttactaacacacctgctacattttacacatgtgttggtaagtgagaaacagaaacgaaaaataaattaaaatgcagaaatacaaaaaaaaaaaaa

SEQ ID NO: 215770 - DNA, 565 bp, Homo Sapiens
tttacagtctgtaaaggtgtgactttataaagacatctccagcttcctgtctctgcactctgcgggaagcaatgcgagggcatgtccgcggctcagagaactagagcaagtccctgatgtacaggctgcgccgcacggcgttggagacaccctcgttgaagcggaaccagacctcgctcctgcccaccgctgtgcccatgcgccgctccactgagtcctgctccggggccgtgtcccctgcactcgggactgctgtgctcctgacgaccacacgtccaaagaagtccttctcaggctgttcctcccgggccgctcgcctcatgatgtgctccagccgctgctcatggttgcgtggggcaggtcggtgcacccctttctccccaatgccccccagcagaccctcgagccctggggggctcccatccacctgggggctgttctctacccgggcagaagcctccgcccgccgcatcttctccacctcgatctcgcgggcgatgagctgcttcgtctggtaggtgaggggcttgcgggcaggcagctcagggaagcggcagagttcctc

SEQ ID NO: 215771 - DNA, 580 bp, Homo Sapiens
ttctgaggttatttttatttttaaatttaacttcaatttctgtttatttaaattttaaaaattattcagattattaaattcatgttagtcttattgtgatcataacagtaggaactgtacagatgattggtagtggctctcaaatgttaaaatacatcagaataacatgggaaacctgctgaaatgcagtttccagcagacttggttttgtcatagcaattggtatttttaacaagcattccaaggattctgatgcagatcgtatcctgaccacactttgagaaaccattatttagtttctgaatgagctccccattaagaaatgtgaagttttatttaaaaattaataagacaaccctttctgatattaaaatggtctttatcattttatcctatgcatcccaaagagttaaggcagcaggaaatactttgttcccgataatatattcctgtgtagaaaagccccttcacattcacttgaccactttttataccttgtaggaaatgaagttatttctggctgtagttattcctttttctaatagtaaggtgaataaaattcatgttgttctaaaaggaa

SEQ ID NO: 215772 - DNA, 538 bp, Homo Sapiens
cttattatcgtggttttgattgcattctctattgactaatgatatcgagcatcttttcatgtattttttggtcatttggtcatttttcttttttaattttaaaattttgagacaggctctcactatgttgcccgggtggtctcaaactcctgggttccagcgatgctcatgcctcggtctcccaaaggggtgggattacaggtgtgagtttttttgcccagcccatttgtatatctcctttggagaatatctaggttcttttgaaggtagctgcatataaactagccaaattaacagactgtggtttttagatggctttccatatctacaagaactatttagttctcaaaactgggaagaaatgtttcagaggcatcattaattcataatctaaaaatttatcttgggtttccttttttcccccagattctgtatcctccatagtcctattcatgacatgggtcgttcatctctgtattctaaaccctcaatgaactgtagacagtaataaatatttattggatgaaaaaaaaaaaaa

SEQ ID NO: 215773 - DNA, 553 bp, Homo Sapiens
caaagcaaaacgtttaataattttttttggaaccccagtgtaacagaattcaaatgggaaaagtgagagggagtgtttaaacaaaggcatccccaagtcccttcccagttggtcctgaacaatggaggaggtcaaaccttcttttccacagcatgatggtataaatcagggaagtcctggaaatctattccacaccctaaaatacccaaacccattaaaagcacagatataggcttttacaaacatttactaaataagcaaaaccatacaaaatatgttcccgtcggcaatttttcccataccatggactcaaatggttaaaactccttatcatcccagactaatgccaccttttcaattcccaataattccttccgtaacaagcatcattgctccaagaatctctcaactacattcaaacccgagtcttcagacccttggccctctgggacctccagagcctttgacagtgccacccaaggcagcagccagggcttctgctgggacagcccctcactcctccactctgactgtccccactgggcttctctgg

SEQ ID NO: 215774 - DNA, 618 bp, Homo Sapiens
ttttttgtttttttttttgattcaacaatacatttttaatatagctttaaaaaggcaaacgaattttaagatcaccaggggcaaatgcagagcataagacattcactggatccagttacgtgtgtaaatgccctttaccaagtcaatactattaaagagactagtggttgtggcagaaattgtttctgcttataagggaggcaagccaggttctagtgtcctcagcaaaggcacaaactcatagcataatgccaggccagtcatttaacttcccagagtctcattcccttcgctgacaaaataggaagattgaatcagttgatttctcatgattaactattttcatatccagtgaattttcagcttatcagctactcaattgccatctgcttttcttctctgtcttccatcacaatgcaaatgccctcccatgtgtatctcgtgattggctggttgttccttctaccactcttggtgacatactcaacacagtgcagggataagatacactaggcaaggttaagtgaagccggccagcacactcaccccagggaagtcagagtaagcctgtttccaccgcagcacagcagtgagcacagctaggcagaattccagcag

SEQ ID NO: 215775 - DNA, 576 bp, Homo Sapiens
tatattaaactatgtatatatttaacacacacatcttaaaaatagctccagatgacagaacagtattgcatacacaggtccatacatgggaccctccaagtcccaggcacccttccctgatcactgtgtcctagaaatgatttcctgtgtcagtgacacagaggaactgtccaagcaagcctccagtcccaagcaagcctccaggccctgagtgttctgatgcctgaagggtagtcataggtcccgaggtggagtcgggggtggagtgctggggtcccataggatgtcctcatatgggcttagaactgggcccgacagccatccttgagccccagtctgctccagcagggctttgagcaagcccacagtgagagggggctctgctccaggctcagggaatggggttgggggccccacctcatctgggaggtatgtcctcagtagaagcaggagctcagctggagccagttctggtgggcacaggcggcaaaggagggggaggtgagcatcaagccggcggtgctgggcaaactcggccagcagcagtttgaagatttcacttcgaagcaggggact

SEQ ID NO: 215776 - DNA, 1000 bp, Homo Sapiens
ttatattctttagaatgtgccttctgacctttcagttttttaattttatagtcacatcaacatctttatgatctattgcctatatatctgtgagggcacatattcataaatatactgtcaatctatcagcatttgtgtatggkaggktaccctctatttgcagcttttatgtttaaattagttacttgaaagaatgtrgtrattttaggragaagtatcagtttgatagacttaataattcatttcttttggrctatggrgcgcatatctgttccttctttatgatgcctttttatggktctgaagkgattactgaagagttgagaatctctttaatgcattttcttaattcttacaatggggataagtkacttcaattataaaakkgaattttgcagactaaatkattttataaggcggtggcsattgaragakcaattttgtctttacctgcmtttaaratggaacagctcttagcagcsgtggkttttttttccatattttttttaaatttgtkggckctkaagakgaataaagtttataggtgcatctgcctcctcttctctaagaatatgcatactaatgtttgtttctataaatcaaatacacatgtgataatatgcatgtraatacataactatcctcatcatgtatggctctcagttcttaattgatgataacatgattgaattgccatatatctgtattacttgtgtgaatggttgtgttgaacacgctaagaacaatttgaattttattaagtacaaaaatccttaacgtttgtatgggaacattggcaagaaagaatagtgtgaaagggaactgttttagtttcctatcagtaattgtacatgcagttaaatgtttaaggkaaaatgattggtctctgttacagctaaaagatttcagtagccytcattgagtttggggkaaaataagttgcygttcctttgtcytccttttaawaaaaaaaagkkaaawttaaaargaaaaaamaaac

SEQ ID NO: 215777 - DNA, 966 bp, Homo Sapiens; identical to SEQ ID NO: 43286

SEQ ID NO: 215778 - DNA, 455 bp, Homo Sapiens
  misc_feature (18)..(18): n is a, c, g, or t
  misc_feature (362)..(362): n is a, c, g, or t
tagttatagcaaaagccngattgaaaaaaagtgaaaaagaactctacagggtgggtgtgagccccagcaagccgcccaaggacccggttacaatgttttctgggttttaagtactccttttgaggttcctatcagctaccccttatctgaatgaaggatttggtccttggctaatcaaaggttgaggcgaattggtaccctatgcagatgaaggcatggcctgtgcttggcccacggccactccaaggcactgtccttttctatcagagaactggtacaagggggagggttgtagcgacagtcgccttcgatcctttgctactcgggtgtagatgaggtttttccttttggtttagatgtangaagttcacgttaactggctttaggttccctgctcccagaccttggtgttttttcttgtaggaagtcagcacgaattggccttaagttccctg

SEQ ID NO: 215779 - DNA, 979 bp, Homo Sapiens
taaaatatttkttagttccagcctatatatttgctggttggagtatagctgactcattgaaatcaaagtcaattttttggaatttaatgtttttcatatgcttgttcactgttatagttcctcagaaactgctggaatttcgttacttcattttaccttatgtcatttataggcttaacatacctctgcctcccacatccagactcatttgtgaactgagctgctatgcagttgttaatttcataacttttttcatctttctgaacaagacttttcagtggccaaatagtcaggacattcaaaggtttatgtggtaatatcagtgatatttcgaactgtgaaaatggacttaataattagaccatttctacaaagaacaactgaataggtggaaaacatggaatttcttttaggtgcagtggtggtcttcaaattacattagttttttttatatatattttaaacatatgtaagaaattaagtggcaaagaactgagaaagcttaagacctgcttcaaaagcctgaaaaatggaaaaataaaattgttttcagatatctcatatcactctcataatgttggccccttaaaaagcttgggaatgttttgtatgtacaagtttattaaaactgggtatgcttcatattactggaatgaatttattctcttcagagagaaatattaggttggtgcaaaartaattgtggtttttgccattgaaagtaatggcaaaaccacaattactttttttaccaacctaataacaatgtattagcaaatatttacaaatggtcaggtgatattcttgattgaaaagttgcttaacatttcagtaatataatattaawtctaagtctaaatacaaatgcatagatagtaaatgataaagtagagacychtatatgccygtctaramwcaawtgttgggtwttgtttaaawccagaaaggagrggcctttcccaawtcchmawagaaakgt

SEQ ID NO: 215780 - DNA, 1000 bp, Homo Sapiens
  misc_feature (993)..(993): n is a, c, g, or t
tttccgggtgtcaccggaacatttgatcatcattcctttggcaattccagccttctgtggaaaggccagtagaaagcattgatttattcacctctacaggaatcagactcagcctcttttggttttcagtgaagtatgccttttcaatttggaacccagccaaggaggtttccagtggaaggaggagattcttcaattgagctggaacctgggctgagctccagtgctgcctgtaatgggaaggagatgtcaccaaccaggcaactccggaggtgccctggaagtcattgcctgacaataactgatgttcccgtcactgtttatgcaacaacgagaaagccacctgcacaaagcagcaaggaaatgcatcctaaatagcaccattaagtcttttgtcaaggtctgactaggtcaagggtaatggaccagtatcatctggtgatctggtaaacaaataaaagtggtggcacctttagatgatgacaacagttgagctctttacttttagtaagaccgacagaaatgtagtcggtaaagcacatgtagtgataggctatcagttatgtctgatacataagacagaataatatttcacaattagaaagtaccttagagatcatcttgctcacagtagatcattaatatcaataattaaagatgaagcttaatccaccatggtcatcagtcaggtggggcttattctaaatgcttaatgtgtcttaagctcatttccttgttcatatttgggtttgctacttggctaaatcctttcaccttagtaccctaagccagtttcctggcttgatactatttgataatgctctgctcaggratgattaawattgggtgrgaawggrgcccgggggtgkgkgtttkggacagtattcharatmaaaaaagtyctwrtcctgggtaayykcargsattgaascmctcccaragggccccgatkktggkwaaatattgaaagargcaarcgtgggkyccmcccsnttttcca

SEQ ID NO: 215781 - DNA, 1000 bp, Homo Sapiens
tctagggtgagccacccacagtgccctgctggacaggggggtatgcggactgcacgggggggccctcagcaggggtcttcctgcctagggtggggctggctccagtgggtcctgggctcaggcagggggggtggcagggaggcagggacatccccccgccctctggcctatggctttgttgccctattgccaccagcgcagaagcaatgtgctataccgtgaggtgatgaagaagagccccgggagggagcaggcagctctgtgcctggggcctggccagacctcaggggtgctgtggccctgctcctgttccccctcagctcctcccagcaatgggtctcctccagtggaggtcagtcactcagaagtggacccgcagcacgtcttggctagcaaccggccgctggcaggctgtgcacgtcatgggcagggagcgttgcttctcacccaggcagggtcggcacaggaggtggccgcaggcagctggtacaccggctcctttttgaagtagggagaaaatactcttttgcaggaggcacattcggggcccaggatgctcccaggctgctccgagccggtgccaggcctccaggaagtgttgctccctcttgtgccaaggtgctggagctgtcccctggtcagccgtgccgtgaaggagggcatagagccaagggtggatgccaaggcaatttccaagctttgtgacagcttctgctcgtgggacagtggacctgtcgagcagtccatatgtgtcaggctgggctcattggtggctttcattttcttarcagtgtgctctgaggtagtgggtaagacaaagggcttgtggcagaaaamaggagcattwmacmaarttatgtctgggrmtgttcagctsyctatctyctttctgagaggcagamawggagargggtcmtgccatgcggctgtgycyccagcagkggcgcarggtgggtstgggcaggatggcatcsggcctgrgggggggggggagggtggg

SEQ ID NO: 215782 - DNA, 1000 bp, Homo Sapiens
atgasgcccccacatactgaggaggcaaggcagtcatcaaggccccaaggtgaggcaaatccctggaaggcttgaaccctgcagttcagtctcccggggtaatcactccccagatagcagtgagaatggggcactgaggcccgggatgtaggcactggacagcagcaacccaggcatctgtgccccacaaaccagttaatgggcatcgttaagctgccgtgcaacatccaggatgtttttggctcctttgctcagcaacaagttggccaggctgatgcccaagttctgggcagccaactggggccctcgtggaatgttacgagcagtgatgcctaccaactgtgggtcatcctcagggccatcttcatgctgggcagggacatggatggtagcctgcatggtctcttgtatgctatctgagccgtctagactccagactcctccagtcaggtacagttgcccatccttcatagctgtatgcacggctactggcacactgcagcctccttccaggtgcctcaggaaggccctttcagcgatgcagcgaagagagtctcgggatcgtgcagcacacccaccagatccaagatgtcctggtccttggctcgcacttccacgcccaaggccccctggcccacagcatacatgcattcctcagggtgcaggatctgccccacccggttgtgccagcccatgcgctgcaggccagctgttgccaggatgatggcactgaactcctgctgctcgtccagcttccgaagccgggtgttgaggtttcccgaatactcctgaactccagatgcgggaactttctctgcagctgggctgctcttcgcagggagctggttccaccacactcttctctggcagggtttctagggtcttccaacaaattttgggtgaaramamagcatcatgagggttttccgcttgmgatggctccgatggtgagcaggagragmmagtgggaggtcytcaagggtgamaacaggtcacttat

SEQ ID NO: 215783 - DNA, 916 bp, Homo Sapiens
gtgaakccaacaagvgssaccatgcgggggccaccgcyctkydgccatagaccctcgggctgtgcaacctgcagcccacatctgcctctggccctcaggggcgctggggaaaggaaggccaaagtgtatcatgttcataaaagaaaatgctggtgggcccaggccagcgagcttctgaagcccacgtctgtccacagtggcccccaggctcacagcccctcctcagcacgtgtctggtgggccaggcgtgcagtgatgtgggccaggtccgcggccttgtccagcttgacgtaggtgtcggtgcggatgcggtggaggctgagccagtccggcagcagctcggagaggagcagcaggtgcttctccatttccccagggctcatgatagtacaacagctgcccaccatcctggcacaggccacctccatgctgagcgcaggcttgcgttcggacacaaagacgctccgcagcacgcgggccagctcaggcagccgttctaagcgctgcagccgctgctcctgctccgggcaccgcgtcatctgtgccagctgcttctgtgcctccttggctcggatccgctccagcagatcctgggacacccccttcagagcactgggagaggctgcaggcggggtggctggtggggtagccggcagtgctggcctgggagacccggggctgctgggcgcacaggagcgcagggccaattgactcaaggccttctccatcctgggtgaaatcaggttgcgggcccgggccagcacctcctgagcagtggtgagcttctccgtggcgggtggctggggcagcgcggccggctcgatgtcgggtacttcatccacgttgaagcgcgggtgccascgggtcasctggtcctccggcaccaccatggcggggctcagggaggcaggaaggc

SEQ ID NO: 215784 - DNA, 833 bp, Homo Sapiens
tcaggttcttgagaaagtaccgagaaaaatattgtactttcaatgatgatattcaagggacagctgcagtagctctagcaggtcttcttgcagcacaaaaagttattagtaaaccaatctccgaacacaaaatcttattccttggagcaggagaggctgctcttggaattgcaaatcttatagttatgtctatggtagaaaatggcctgtcagaacaagaggcacaaaagaaaatctggatgtttgacaagtatggtttattagttaagggacggaaagcaaaaatagatagttatcaggaaccatttactcactcagccccagagagcatacctgatacttttgaagatgcagtgaatatactgaagccttcaactataattggagttgcaggtgctggccgtcttttcactcctgatgtaatcagagccatggcctctatcaatgaaaggcctgtaatatttgcattaagtaatcctacagcacaggcagagtgcacggctgaagaagcatatacacttacagagggcaggtgtttgtttgccagtggcagtccatttgagccagtgaaacttacagatgggcgagtctttacaccaggtcaaggaaacaatgtttatatttttccaggtgtggctttagctgttattctctgtaacacccggcatattagtgacagtgttttcctagaagctgcaaaggccctgacaagccaattgacagatgaagagctagcccaagggagactttacccaccgcttgctaatattcaggaagtttctattaacattgctattaaagttacagaatacctatatgctaataaaatggct

SEQ ID NO: 215785 - DNA, 935 bp, Homo Sapiens
  misc_feature (36)..(36): n is a, c, g, or t
  misc_feature (38)..(38): n is a, c, g, or t
  misc_feature (661)..(661): n is a, c, g, or t
  misc_feature (664)..(664): n is a, c, g, or t
ttttggbccttgggccccttgggcctccggcggggncntcacacaccagggcctgtcaggggatggagggctaggggagggataacattaggggaaatacctaatgtaggtgacaggttgatgggtgcagcaaaccaccatggcacgtgcatacctatgtaacaaacctgcacattctgcacgtgtaccccagaacttaaagtataataataaaaaaaagaaaaaagaagttcatttattttgactcctacaaaggcarggaatagggttttkgktgttgttgttgtttttgggactgtctcgctctgttgcccaggctggggtgcagtggcgtaattttggctcactgcaacctccgcctcccaggttcaagcaattctcccacctcagcctcctaagtagctgggactacaggcacacaacaccacatcaggctaatttttttgtagttttagtagggacagggtttcaccatgttggccaggtttgtcttgaactcccggcctcaggtgatctgcttacttcggcctcccaaagtgctgggattataggcgtgagcgactgcgcctgaccaggaatagggttttaatacaatttttcatctggcctgaaaaatatacttcagtgttcaatgatttgaaatctctgagatatcaggggntgnaagggattagmagctttaagaaatataaatataaatgtgtatgtgtgtgtgtatacatatactatttttttttttttttgcccagggaagacatctgtcagtgctcataaaccctgtttcctctggggataagttagtaccarcwtaacctgagggkgggcaaaaaaargaaatgmagaattcaacgcaacacacatccygamaagtttataagggacacgkgaagtttagaggsaggaaataaaaagtaacacmaccataaaaaggctgt

SEQ ID NO: 215786 - DNA, 895 bp, Homo Sapiens
gaaaaaacaaaaataamaagwgcacccacgggctccaggggaaggggccccaacccctggtgaaggaggtcggggcagagccagctcccccagctgggggtgcaggggtgaggggagacccccctgtaggcccgtcctgcggggtaaggagggggcacgggggtgggacaggttgggggtggggggcaggccagggaaatggaggaactcgggccaagtgtgtgtcggcccatctactgtccagtgtgtgtgtgtttgtgtgtgtgcgcacgcgcatgtgtgtggtgtctgggggccctatgggggtgctggtggctgaggccgggggtgggggcagctcgggcccctggccagccccttcacagtgggggctggggagcctagatgatgtgggccctgacgggaggcagctctgccgaggagccaggtctgggaaaactctgtcccggggcccttgctctgccctgctccatgcctcatggtgggtgcaggcaagtgccaaggccaggagcctgtcctttcagggctgccccacaccgtccacacccagtggtcaggcagagggagaaaggggctggcggcttctccagtgggagggaggggaaggcaggccttggaaagttagtacttcacagttttaaagagaaaactgaggaggaaaaggctgaggaggagaactggggggcacagggacatgaaaggagagtgggggcccttccgagccactccctcccccggacccaccccctccagctctggatccagctccccccaatacacagcacaaattccttcagtataaatgtgcttaaaatgaaaattcttattaaaaaaatcaaaacaaaaaaattaaaataaaaacaaaaccagcgagaattaatacctggggttggta

SEQ ID NO: 215787 - DNA, 833 bp, Homo Sapiens; identical to SEQ ID NO: 53277

SEQ ID NO: 215788 - DNA, 960 bp, Homo Sapiens
  misc_feature (24)..(26): n is a, c, g, or t
ttggcaacgaatctgtctttaatnnncwawtgtaaggctgcgttttctttgcgaagtctccacaggattttcacggcaaaaccaatgagaaaatgtcctttcaaagagaagaccgagtgtcccgagaacattttcttgaaagcgcgtgcacgggccgccctctcgaggcatcgtaatgtgcttcaaagaacacttggtaaaaccctctggctaaaaaatcaaaatttccaaagcatatacatttgaaaaaaacaaaatctccacttaaaagcttattttgacttgttgcccgggatcaattgcaaaagcgcttctgttgagaaaggacagttcagccaaactcaagctggtttttagaaacagaactggaggaaaaaaacccagaaaacataaggcactgggcaaatgtgacgtaggctgggatgaaacccattctcccagaaccggtctctcccacagcacaaagctgctcctcatgcagccagctggctgagggcccggagtgtgtccacavvgggaggagcggggctggggaggggaagaggggaggctkgctccccgaaatktkacctgaggactkatctgagctgcagtgagcactttttacccaggggctgagcttcctgggctcctgcgacatggatggagctctccctgccgtkctkccakctcakgagcctgaagcccaakggcgcgcttctgtacccagcatccagtccctgccagggccttttgagagccggatcctttgttcatcttctcctgttcagcccacccctkgcaaactcgakatcaccttcacatcaccctcccctgcttakccactcactcaktccctkgcccctctgctctktccctccakakacacakaaacykactcaatgcctgagcctgcacgattkgkgaggctgcagtctctgtgckctkttrwkattaacctcwtkcttgcttccccactca

SEQ ID NO: 215789 - DNA, 405 bp, Homo Sapiens; identical to SEQ ID NO: 59748

SEQ ID NO: 215790 - DNA, 839 bp, Homo Sapiens
aaaataatctcaggttaaaaaggaaaatttabghttaataactcasamtatcattttaagtcaatgatactgctatatgttccattaatgatagttggcgtaaradttagtaataaggtttatcattactatttagtcatatgagtcataaaataaataattttaaagtgcttaattcttctctccagaaagacacaagctgaatgtattttttaatgataaatattaaaaagatctttcaataacaccttatctgctttaatatcttcttgwtctgacagccagtggtttggaggacaaaaatttctcctcgtgtctctggactwcaacattttcactagattggtgataaccttaaataactgaatccatcttttctgttccatctgtatgcattgttgcatttcagagctagtagtaactccaaatactctgaaatgctgtaatatattcttctcgaacttctggcttggtttctggataagccaacttgatgatccccaggcatgcatctcgaaggcatcgagacaacattatcagcatcttctaaagtaaaaggcatcattgaagattgtctttgacctacaacttctatgggatcaccgaagaattcgttatcatgtatggaaattagtgaatgactaaacaaggagcaaaaaagaaaaaaagagtgaggaatgawtcgactagaatcttcaaaagacacaggagaacccctggatatcacctgaagcaacggwaccataraccctrtgatcatccgtgttramataggaagatattagaaaccaaagatgtctcagaaacctggcattaaaggctatactgtaragaarcct

SEQ ID NO: 215791 - DNA, 1000 bp, Homo Sapiens
  misc_feature (742)..(742): n is a, c, g, or t
catggtggaggtggccactgggccctcggactcagccacccgtgagaagctgcccatggtcctgaaggtgcccaggctgaactcctcacctctggccctgtgtgaccggcccttctccctcctgggtttcggagacattttggtgccagggctgctggtggcctactgccacaggtttgacatccaggtacagtcctccagggtatacttcgtggcctgcaccatcgcctatggcgttggcctccttgtgacattcgtggcactggccctgatgcagcgtggccagcccgctctcctctacctggtgccctgcacgctggtgacgagctgcgctgtggcgctctggcgccgggagctgggcgtgttctggacgggcagcggctttgcgaaagtcctacctccatctccgtgggccccagcaccagccgacggcccgcagcctcccaaagactctgccacgccactctccccgcagccgcccagcgaagaaccagccacatccccctggcctgctgagcagtccccaaaatcacgcacgtccgaggagatgggggctggagccccatgcgggagcctgggagcccagctgaatccgagggccgggaccaggcccagccgtccccggtaacccagcctggcgcctcggcctaggggaggggtgagacgctcgctgccgtgcccgccacaccaagatgttggggctgcctggcgcccactggagamagaaagamagamgcctgtnccccgggaccgaggcctgtgccgtccccacccgccccaacatggtgctcatccttgccgagacccctgcagtkcgtgcccgcgcccagcccagctgccccggctgcacgcctgctgctcccagctcgcccggstgccamaagctctctgcgggtcawtctccccgcagarggaagggtycgtctcscagscctkcccggctytctkcaaamcyyaaacgtygtttbmttattaaaagggtgggtggatttkgcscggc

SEQ ID NO: 215792 - DNA, 629 bp, Homo Sapiens
tctttactgaaaaccaccttggccttcattctggcaatttcagcagagttaatttgcttgctgttagagatgtagcactttatccttcctatcagtaactgctccgtgttcagactcctggtttcttccaggcttacagtggacatcatcagcttcctgctttaaaaaatatcttatgtccctaattgcctttcttttacctgactttgtcacctttgttgtctttgaattctttaggctgcatattattttacatgctttgttttgtcatgtatataccaggtattggttttatggtttaaacactatggatacaggggtttgttttgcacaattttaatagtcatgcactacataatgatgttttggtcaatgacagaccacgtatatgttggcagtctcataagattataatactgtatttttactataccttttctgtgtttagatacaaataccattatgttacagttgcctacagtattcagtgcagtaacatgatgtacaggtttgtagcctgttttgcatttttcttaggttgtatgctcttctgttttaaaggtttgaatcaccagcatttttgtgatcaaaatcctatttagaaaaaataaaactactttctgtttatc

SEQ ID NO: 215793 - DNA, 818 bp, Homo Sapiens; identical to SEQ ID NO: 43668

SEQ ID NO: 215794 - DNA, 1000 bp, Homo Sapiens
gctggaagacctaccatcaaccttttacaagagcaaggtgctgagaaggtactgctgcatgcatttgatggtcggccatctgtagccatggaaggagtaagagctgggtacttcttctcaattcccccttctatcataagaagtggacagcagaaacttgtgaaacaattgcctttaacttctatatgcttagaaacagattcacctgcactaggaccagaaaaacaggtacggaatgagccctggaacatttctatttcagcagaatattgcccaggtgaaagggatctcagtggaagaagttatagaagtgacgacacagaatgcattaaaactgtttcctaagctccgacacttgctccagaaatagcttcaaaaccatccattacaaaatcgaatcaactgcagggggcagcatttgaaaaatagaaatgttctgatgaagaatctgaactgaagaagctgttttatagggttatagaagattgtwattgtagagaaatatttctcttagaaataaaactgggcttggatcctgaaaccctgggttctgattctagccttgtgctgcttttcaattagccgagttctggcaggatattgggaaaatactgctacttcttacattgcccttttatatagaaccaccacctgaactgaaaccattgctactgggaagggtggctccacaggaagagtataagcactactgtgatgaggatggagtaagctaaagtatacttttttttttttttgatggagtttcgctgttgttgcccaggctggagtgcaatggcacgatcttggctcactgcaacctccacttcccaggttctagcgagtttctccctcagcctcacaaagtagctgggattacaggatgttcamcatgsccagctawttttgtwtttttagtagagacaggkttctcctgttggtagggtggkytsgaatcycgacctcagggaccsccscctcgccyccaaatgcgggrwtaagg

SEQ ID NO: 215795 - DNA, 883 bp, Homo Sapiens
  misc_feature (12)..(12): n is a, c, g, or t
  misc_feature (24)..(24): n is a, c, g, or t
  misc_feature (31)..(31): n is a, c, g, or t
  misc_feature (33)..(33): n is a, c, g, or t
  misc_feature (35)..(36): n is a, c, g, or t
  misc_feature (38)..(38): n is a, c, g, or t
  misc_feature (223)..(223): n is a, c, g, or t
tttttttttaynycattaatttantattcanananngntcaggtctctccagctttagttctcttggaaacataagattgtccagtagacagcttgttaaacccaagtcattcctaaggcaccatgtcaaagatacttcatacccctcctccaaaaccaaagaaaacacacagagattaatacactacagaaggwataaacattttagatcagtttgtgactnctgacctgtctcctgtttataccatcagaaaagctgatataatagctgttttcccggaagctttatcctggcagtcacaacaggaagaggcctgtagagaaccccagggagcagtgcactctcattaggctgcagcacttaaggtttttaacagaggaaaaacccaatgattcagtctttggcatctcccactccatctgcattaatggcgaacatagcttcagcttcaggaagacagggagagtcgtagattttgcagattctggtttcccctcttcctttcctcagatacaatctggttgttgatgcatgggcgatgatatttcctccaataggttttttgggatcagcagcaaacatcgctgctccatccacttgagctaccacctgattagtgattaccactgctacaccaaactcatcagcgagtcgcagaagcatccgcagaaacctggccaagtgcatctgcctggctgaarctcacctcgacccgagtagtctgttctgtaaagggcggtggcactgtctacaataagcagtgcatacctagattctaccatcatggctgatgcttgataaaggagctgggtctggtggtctgtgttgaacgctcgagcatatgctacattatccargacatcactgccagagagaccatac

SEQ ID NO: 215796 - DNA, 1000 bp, Homo Sapiens
gtctgtatttagctactcaccctgctcctgaggcaggactgggtaggcactccctgcctctaagaccacagccaagctgacctggaatgccagtccccggtatgaggaaggcagcagaacgcccagagacaaaagattaaaggggactgagctctggatgcatccacttatgctttgccagacagttcccttccttgttttgtttgaatgcttcccccaccccgccctgagcaaagtgtaaagggcaacggtggtacagaagtacaggcagtcccttccagaagcagtcctgaaccgcataacccacctacctagctgctcctcagcctgccgagttcttggccctggaatctttaacaggcacataggagattccagggcaggggaaaatatttccctgcaagaggctacttccctccaacagctgtgagggccagtgcaggtcaaggttgctaaatcaaggaaagtgcacaagggcaagagaggtcatatacaaaccaaccaggcttccggccctcctgctgcccgactgctccgaggtgtacacaagcctccagcccgacccagcggcctaatgaaactctggcaacctatcctgggcgtggccacgagtatccagctccaagcccaagtgaggcggggagtcaacttccccatgattgccaagtggccaagaccagaagcagggacgattaggctagttctgcggcaaggtgaactggagaccctgtctctgccctccttccctggcctgtcccacagacatcccgttgtttaacccactgcctttgcaaggacctgctctgtccactccaaatcaaaggatacttgcatccttcttacacagactcccatctctctgctcatagtggtyccaggctgccgagaaaaaraamttgggtcagtagaggycattagtgtgaagagtgagaggcaggcttcctgtgrawaatgytytatgctktttccwaaaacttggycmaaaaaawactggggrgga

SEQ ID NO: 215797 - DNA, 876 bp, Homo Sapiens
  misc_feature (22)..(22): n is a, c, g, or t
  misc_feature (36)..(36): n is a, c, g, or t
  misc_feature (45)..(45): n is a, c, g, or t
  misc_feature (50)..(50): n is a, c, g, or t
  misc_feature (119)..(119): n is a, c, g, or t
  misc_feature (418)..(418): n is a, c, g, or t
  misc_feature (649)..(649): n is a, c, g, or t
acatattttggatgggaagtcntaatatcatccaangttcacatnggsanttctsttcaactaaaacacagttattaagacataaccaaaaaacaaccaccaccaccaaaaaagcagtnccaagtaccatccataaatgtattcattaggtcatatattacttatttcttaaatttggggatataacttttttctttttttactttctttgcwaactaacatcaagaaagacaggaacataatctttttccttcttacccatttcctcccaacattgatagcgcttggatctaaacacatttagacagattttcttttgtgtgtttgagagggctagtatcccttgctattataatatttgctatctgctaaccaacacatagaatcaaaagaggattccaataactcaacatgcctnattatctaactttttactagtcacactcaggaaataaacatatttgaatagcaaaaactattatatacattttataatgkgtctcccagtctctcatcataccagaagtgacggggtaattttcccagagtctgacatgtgtaatcttgtcagactgctttatactgccccagaaggaagaggacaatggagtacctacacacttgcccagggagcccctccctgtgagtnttcctcagggtacactaccccagcacttctgggggctgtgcgtctgaccagtgtttacatggcaggtgtaaatcctgatttttagtctagttttttaacataatacttattatgtatggttcacagctaagcaacacggtgtactatgatgacacttcctttcatatataacttttgttttttctgaacagttaaaaattgcatcactctgttattaacaacctcac

SEQ ID NO: 215798 - DNA, 1000 bp, Homo Sapiens
aagcaatttactaatttattcttcgactacatactgcagcagaaccagcaatacacttgatttttaaaagcacatttagtgaaatgttttctttggttcatccttctttaacaggctgctgagtcactcagaaatccttcaaacatgattaattatgaagatgaaacactagagtcatataagaaataaaaattgggcaataaaataaaatgattcagtgtttcttttctatattgtcaatgaaaaccttgagttctaataatccatgttcagtttgtagggaaagaaaaaataatttttccttctacccactttaggttccttggctggggcccctataacaaaagacagattgacaagagaaaaacaaacataaatttattagcgggtatatgtaatatatatgtgggaaatacaggggaatgagcaaatctcaaagagctggcgtcttagaactccctggcttatatagcatcgacaaagaacagtaaatttttagagaaacaacaaaacaaagaaaaagagctttgagtctgtaggggcagcaattcsgcgggaagcaaatatatgggagtttgccttgtagattcctctggtgctggtctccaggctgacaaggattcaaagttgtctctgaaactcctctttgtcatactgcacatataaaamgtcttttgtttccaacaagaggattttctttttcattctagaattatctccttgataamttgatcagatataggacatgacactgaatagagtccaacagtacaaaaaaaattcagtatgttctagctacttcacacatgtgtacgcgacagtaattttttacagtaaggtattttcgaggaaaaatgcattacgtagtttgggaaaatagagtaattwaaaaatatatttgrvatgaaatctccamamattagaagatgatgagktagakgccatskgkgccmaagtggtttttyattatgtaagcmccgtkgattaaaarattkktttt

SEQ ID NO: 215799 - DNA, 1000 bp, Homo Sapiens
gcaacttttaccttcctaacaaacttttctgttcaagagatagcagctaaagggggcaaaaaacatgattggaaccacttttctcaataagaaactttgtataggccggccgtggtggctcacacctgtaatcccagcacttttggaggccgaggcgggcggatcacaaggtcaggagttcaagaccagcctgaccaatatagtgaaaccccgtctctacttaaaatacaaaaacaaaattagctgggcgtggtggcgcatgccctgtaatcccagctactcgagaggctgaggcaggagaactgcttgaacccgggtggcggaggttgcagtgagcctagatcgctccactgcactccagcctgggtgacagagcgagactctgtctcaaaaaaaaaaaaaagaagctgtgtataaatgtttgcacgaaatctgcagaatgtgcctcctggcatattctggattcttgcttcctcatctgttaagtgaggttaatacctcttacttatagttgttgtaaagattaatataaagcatgacatctaccaaaatcagaacctacacaaagtgtgtgctcaataaatactatcttaagaggcagcctgctgtgtaaaatgaacatggactttaaagtcagatctgcactttaataccgggtctgctacttgagaatttcaattttctgctctgtagataggatagaacatctgctttgtaggtagttgtaagaagttttaaaattattactgtggaaccaatgtctaagagcttcaatttctctaaaaaaggaacagggtcmctgawkgagggtggggtatgggattaggrcacagtagaggtgtaaawaactgcmwkgtaattagagaaggaatggacaggaaccmtaaaggtgtgtktggkgtkaykcgtktggtgtgagrctggctgaggtkgaggcttgatwtttaktgsatyattammaykttttttytagmrtttaatgaggawgaaaaaaaawaat

SEQ ID NO: 215800 - DNA, 955 bp, Homo Sapiens
  misc_feature (25)..(25): n is a, c, g, or t
agccavcmaccagaagtaatgagtncccagggccaaccacattggaggcctgggtgagggaccacccagcagggagcaagggagggatgcagacaaaggtagcagagaccctggcaacctccttccagtactcagcagtaacagcccagctgggaggggacccagcaacacactgggtccccagcacagtcttgggtgggcccttcatggaaggggcagggaggctctggatgcttctgcagtcatgctgacccaggttggggtacatgagacctgccccagaggcttggggttcagctgtcatcctcggtgatgaggtgatgagtggtggaccacagggtttacccacatccaacggtcacaggatggggtctgagccgtyccagtccactgatgcccccttccacttggttctgatgcagagctcgaggggtgggacaaggtcgttgtctgtttcctcagagatggtttgggtggtgtcaatggtcagccggatctgctyttgctggttggccaggccatcgtagtagtacaagtmaaagagcctctcagtcctccagtcacgcaggagccccggctgcaggctaaagaggatgctgaagtggctctcactgcaaaccacccagatggggaacctcggggtcttcaggaagcagccaacctggcacatgtagtaatgctcaaagagagaaaagaagccaatatcactgcgtgcagcaatgcctctkagaagtgtgawgttcccatccccagaatccagctcaaccacatcgttgaaaacgtttggacacagctttcccagttaggagcagattgacaagttcctgtgtwcagtagccatgtgctccaatcaggtggctggkggggacatcaaagtcctggcggatgagctctgtagacctggacaggatggcagaaagggtgagcggatgcgccataggggccacttcaactg

SEQ ID NO: 215801 - DNA, 1000 bp, Homo Sapiens
  misc_feature (305)..(305): n is a, c, g, or t
ccgagtagctgggactacaggcgcacgcactgtgcccggctagtttacttctttcagaacatttgttatcagcaaatttaaacatttcaacaaatatttcagtttccatttggaaacaaaattcttgtttgaaaagctgactggaaacctgtgagaatgggagtgccaccctcctgtggggatggaggttgaaacagcaccagaggcttcaagaccagtctcctctcatttcggggcagtaagagacatttagcttacttaaacagactgtgckggcagagcaagtgagtggcagagctgaagtncagcattgtcctgtggaactcctggatttttctcttaatttgcttcatggcaggagtgttacatttagtcttgaaggtcatttgtttcagcatcttgtctgtsaggtaatgtaaccagagcacattactataagtggtgatattcaccccagcggttgttattctccttcttcatkagcctgttgatgtbaaactggtagtcaccgtcaccggtaaacaggtcctcatccatggwaacgtcacagaaaaccacaatcccatcccgttccaagcgcgacagggtgtagtcaatgatgctcacttgcaacccacagctggggatagtgctgctcttcccattgagggtgtagtggagttttttgaggytggttttctttaagagcacgttcccccagtgtwagtstcggtgctcaaagcgcagtgatgcctctgccactgcgagggaggctgtkagccggtgtagaatgctctttgcagttgccaaggaagacaacttggttcgcatttgctctaagtcaatccctccaaactcaaattccagcacaatgaagagctggtcgtctttaaaaaatcaggccggtcatttgcagagcctttggttgaattatagtgatccmggctttgwggwgcvagggagggtgagatccctggacacagtgcactgagttcagcccsasaaarcvttctgtttcggt

SEQ ID NO: 215802 - DNA, 1000 bp, Homo Sapiens
  misc_feature (3)..(3): n is a, c, g, or t
  misc_feature (6)..(6): n is a, c, g, or t
  misc_feature (8)..(8): n is a, c, g, or t
  misc_feature (349)..(349): n is a, c, g, or t
  misc_feature (891)..(891): n is a, c, g, or t
agnaananttacttcaggccaacacaaataaataaataacaaatatctaaatagtgatatgtaaaataacaaggctgtgggctctcctatagttatttaatagaaatgagattggaaacaatgtatgtatatcatacaggaaagaagcaaatatagctcacacctctcactcaatcaaaatcactaaattctttaataactaactttattattcctaaaatataaataaaaaataatgcacatttttsagcatcactatacacatgttcattttttggttttagatattaatctatacccagttcaaactgtggaaactgaactaacatgactgaaataaaatagtgtnatattttgttctttagactcttttttcccttcctgagattttgatatgtacttggagagttttgagtyaatatttatttgatttgttttcttttctggagtgatattgtaaatactttaaagatttgtcagttattctttcatgtaacaacaaaaaaaaatcaggtagtttacctcacaattcaatcacacaagtgcttttcctcaagacaactatcatacttcagacacagaggtactttatgcacactacccatgtcatcacacagaatattttaaaaaacacacattcaagtgtagagagttaataawactaataacattttaatacttcatcaggkattgggtataactgggtaatactcagttgagttatktaktttactgtgagttcwcgkcaggtgactaatacagaaactacaagtwcactttkgtggcactaccttkaatcacactaaggcaccagcagcktatccacccattactttagcatcaccagttcaaatkcmamacagtkgaaaakgrawayagtctttgratatnatgwcacacttttgaccctcmaamcyctgaaagggtcttkggggacccmaggggattgcaactamaaystgagaactgttyaacwaatggaatctttcatgtctaaaaa

SEQ ID NO: 215803 - DNA, 707 bp, Homo Sapiens; identical to SEQ ID NO: 46515

SEQ ID NO: 215804 - DNA, 1000 bp, Homo Sapiens
taaaaacaaaaccagcgagaattaatacctggggttggtatggcagggtatgtacagggggaaccccccgcccctgtcccaccccctctgtcaccaaccgaggcaggggggaggttgaggttccccagctggggagcaatggcttgtgagttctgaggatgggggagccaagtcctggcgtttagctggtgatgaagatgtggtgagctgggcagaggggtgtcttgatgaacacgaggcccccaggacccatcctgagacccaggaccaggggcctcactcagttcctggcctcggcctctgacgtcagcccaggctgtgggagcaggcagtccactgagggcccaggcctctgtccaaggagtcgctgcctcctccctccccgtcccccagggaaggtccccagtactgcccgggagggcaggtgggggcagggctggtgcggggtcacatggtcggtagaaaggcagagaaaagccggggcggagggcgagggctgtgtccatgtggcgtgggcggtcacgcgggagtgggtggccgggctgcttctgttggagctggggctgaggctggggctacagctgcctggcgggggggccaggccacccccgtcccgccccccaccccccggctgtccgctcagagtgtccaggccctctgagttctccaacatttcctggatgagaggcggcatggagcccgggatctccatcttcagcgtgatcacccgctcagcccccttggcgctgatgcttcgcaggtcagtaatcttcattagcatcttggggaacatgtgggggcggctgggcctccgcttccgcacgtagacctttagcgccttcagcagcggctcctgcagcatgtccacccsggtccggctgctccaggtcttggcggtctcgcagatkasgcagatggcgctgagmrccccgtctcscatcatcatttcaaggggarcagmtkgttgsggaggaaaaammaggtaggkgagggccccaaa

SEQ ID NO: 215805 - DNA, 1000 bp, Homo Sapiens
taaattcaggtagcagtttattaggtggactaaggaggaatcagagtcttccagtcataatgggtagctttgctgccccagtttgcacatcctcacccaaaatgggtgtcctgaaggaggactgaggttcagcagttaactgaccttttatacaagttagcacatgaaggatagatatgcactgaaacatgtggtctggtctgacttgagagaaaaggaatgttgcacaagggttgtgaatgtgaaagggggaatggaggaatggaaataaaattgggatgagccctaatggaggaagtcgggcaaattgaaagtataaatgaatgggccatgagtgttcagagggagaaaagaaaggtttaatatactccttcagttgagttttcttgtcttgaacataaaaagtgaatacaaataaattcagtaatactaaaacatacagagatactgaacttgctggcacatttacttctggtaagcataaagcagagagaacccaggttagaaggatgggaagagaaaaggagcagttttattgcttatagaaagccgttctgaggggttggtggggtaagctcagtctattactgagacaatagtgagatggcttatatgtttcccctgttaatatctggttaaattatgtatccatcaaatggtatgctcgcagcattagcaaaattaggagtttcatctttttcattgaatcacaggtggagactcctattttcctttctgttttcaggcctttgagcccctgggagcccaaataccactcaattattttgtawtttatgattaataaaagttcattttttaaatttgtatttttatacaacctccaaaaaaaaaaacaactgggtagagggtgggggggrtttwcttttaaraggcaaatgtgagtwaattgaamcmaraaamctktttttaaawattyskctgawwagtmmrkagccaggadaaaamatawtgstgttttaaaatycytggggtggagggg

SEQ ID NO: 215806 - DNA, 1000 bp, Homo Sapiens
  misc_feature (24)..(24): n is a, c, g, or t
  misc_feature (884)..(884): n is a, c, g, or t
ccagcsaagsgmgaaatacatttngkggaraktttggkggcattcgccaccatgcatggtgatgcttctgaattgtctgaagtgaagatgataatggataagaaccagaaaagtgagagctaaacaaccgccttcagaagacarcacacatggagtcagcatcggtgtgtgtgcatctgtgtgtgcatctgtgtgtgtacatcggtgtgtgtgcgcattggtgtgtgtgtgctcatccatgtgtgtgcatatctgtgtgtgcrcacatcggtgtgtgcatatctctgtgcatccgtgtgcactgatgtgtgcgtgcattggcatgtgcgtgcatccatgtgtatatctgtrtgtgcatctgtgtgtgcatatctctatgtgcgtgtgcatcggtgtgtttgcmtatctctgtgtgaccatctgtvtgtgcatccgtgtgtgtgcatatctctgtgtgtgtgcattggcgtgtgtgtgtgtgcatccatgtgtgttcatgcctctactgtctccagccatschcgcagagcagcagcctgacgccagcagatcacgtgcaggtgggcttggctgawgggaggtaaggaggctcagctgggctgtctgkcctccaggacaaccttggcactctcctgcccctctgtccagcgcgtgtctgtctctgtctctcatcttctctattacatctctgtgtctctattagtctctttgaatcttggagtctctstgagtctctctctatgtcctcagagtctctctctcagatctctctcgtgtctctgtctctctctgtctctgtctctgtbtccstcccacctctctctccctcccatgcacgtcatctaccccattaactgcagagaatatatgggattttgtggcangacagttcgacgcascttggyttctctccmcaggcagggctstggctagggaatgggctcgagragattctgggcgtgctytagcgatgagttttsagcactcgattactggagac

SEQ ID NO: 215807 - DNA, 1000 bp, Homo Sapiens
ccgctccctcccacacagaaggggtctcccagggtcagtgactgggtagtggagacccatagtgggacagtgacttccccacacacccactgcaaggccagcacaaaggcccagcctgavgtcctggcacaccaccccctggcagccctcatggaagaactcccgagtcacacagaaagcctgcccctctctcccgaaacaaccattttatagaaatggaagctgggctccagggggctacgactcggccagggccacacagctggtcagtggccaggactaaaacccatgccctgcctgccacacagaggtgcagtctctgatggatgcaaaaaaaaacaaaaacaaaaagccatctgagggggcagagggctgggaggctgggagagcccaggccagggcaggcagggctgagaggaccgacctcagcaggtggggcgctccctccccagaacttacagaacctggaggtgtgagaggcagcccttgcctcctcatcttccctacgaacaggctccctgccccgccatcacaaggtctccctgtcctgttcctggcccacactaggaacactggccctcatggaagtttgacgtccttatggaggggggacctcctgggccacctgaggtacctaagccaaccatgataacccagctctggcccaggaggaagggtgctctatggctctgggtgaccatcagccccagggcactaaggaggcttggtttgcctctctgtaaaatagacactgtttgccaaaaggtctcccaatttggcccctccttatggagttccaattcatgattggtagggctgggtatgagctttgtggctggagttaggggaagatactgcattatgactgcctcagccaccacctttcccaggtaccccamacacaaggsagcatttytaggggccagaggatggggamtcactamaamaaacaacaaaaaaaccaaaccacaaccaataaataattattaaaykgrggaaa

SEQ ID NO: 215808 - DNA, 952 bp, Homo Sapiens
ctggcagggacaaatggcgagactaccacccaagggttggatgggctgtctgagcgctgtgcccagtacaagaaggacggagctgacttcgccaagtggcgttgtgtgctgaagattggggaacacaccccctcagccctcgccatcatggaaaatgccaatgttctggcccgttatgccagtatctgccagcagaatggcattgtgcccatcgtggagcctgagatcctccctgatggggaccatgacttgaagcgctgccagtatgtgaccgagaaggtgctggctgctgtctacaaggctctgagtgaccaccacatctacctggaaggcaccttgctgaagcccaacatggtcaccccaggccatgcttgcactcagaagttttctcatgaggagattgccatggcgaccgtcacagcgctgcgccgcacagtgccccccgctgtcactgggatcaccttcctgtctggaggccagagtgaggaggaggcgtccatcaacctcaatgccattaacaagtgccccctgctgaagccctgggccctgaccttctcctacggccgagccctgcaggcctctgccctgaaggcctggggcgggaagaaggagaacctgaaggctgcgcaggaggagtatgtcaagcgagccctggccaacagccttgcctgtcaaggaaagtacactccgagcggtcaggctggggctgctgccagcgagtccctcttcgtctctaaccacgcctattaagcggaggtgttcccaggctgcccccaacactccaggccctgccccctcccactcttgaagaggaggccgcctcctcggggctccaggctggcttgcccgcgctctttcttccctcgtgacagtggtgtgtggtgtcgtctgtgaatgctaagtccatcaccctttccggcacactgccaaataaacagctatttaaggggga

SEQ ID NO: 215809 - DNA, 915 bp, Homo Sapiens
  misc_feature (29)..(29): n is a, c, g, or t
  misc_feature (41)..(41): n is a, c, g, or t
tataaataacattttttctcttttgtaanagtaccattacnttccattttcttaaatwacaaaaccctaaaaatatatattaaattgtatacagtgcgtcacacttcatcttatattttaaaatacatgatgtttctattttattctcaaagttgcatattaagagcatatttacaaataaagccttgtcatccaaagtcaaaatccctgctggaagctgagtttggatgtgggaaggtcttgacgtgcatgagacccacgatggcagctcccgtgcgggcggggaagggcctccagtctttgtgtctaaagacccttcctttctgaagcagatttccctctgactttcctccacaccccacttctgcctccgtacccaactcagcaagacggaagcctgtgagatgtgcccaccaggggtctgcaggcagagggtgaagccctgtcaccccggagccgtccagcctgaggggagacagctgtggctggaaggcttgaaaaacaccccacaccagggaagctaagctgagacctggccaggaggtagaacagtgaggaaggtaaacaaagacaccagaggaaacaatccaaactcccaaggtaggaacaaaagccgacatcaaacaccacacgggrgatctgaaacctaacggtgccaggtggtgggcgctgtggagctgcscggctccgtgggagamctggcctgacctcagcagaccagggaggcagggtctcggaggccatccgcgtataagtgcttgtgaagagtaagcgtgcagtgccaggatgcatcggggctgggtgatggcctggctgggctgcaggcagatcctgagcccggccaggaaggctcctgcctgggctgacagtggggcatgtgggtggagcagcamamaggcaagmaagtggsttata

SEQ ID NO: 215810 - DNA, 1000 bp, Homo Sapiens
catgtgcacacacgagaggcaagtacaaaaatgtaaccccaccaaagtgcatgtgaatgaaagtgcaaaaaaggcttcatttgcaaactctgagatcattctctctgcttcagaaaataaacagaaaggtcctaactgccctaggcctgggctgatcaggggctgggcgaggctgccaggggccaaaatataagtggcatctgttgctaggagggcagagggcaccagaagtctctgccaactccctcccctctctgcgctcccaggtcaaggtgcaataatatcatttggggacagagtgggggtaaaggggcagtagggcagacaagaggcagatttctttctactttttaatgatttggtttctttccaaagagtttgacgataatgcagaaagtgctgaggcctcaaagttcagaagcctgggagcccttttctccaaggcccttggtccatcttgccttcaccacaggcaagcattaggtgcttggcagatctgatggcaaaggccctcccagcccctctccttagaagctgtgaggtcccacagcaccagccgtgagtacttgctgccttctcactgcacaaagtcagtgaacatctctcatcttttatagaggaacagactgaggataaggagctgatgagttctgctaccacccagacaactaagataaaagcaaggcttagacttgttcttctttactcttggccaagggggtaccaatgtcacccttgtaaacccaaccttcgctgtgtggcaggtcttgcctagcttccttccaggaaggctgtgctcaaagctgcctctaagmagttgaaagggaatggacacctaaagccctgtgggagctcaactgwgggrgctgaatggsttcctcaaawagctgttcagcccakgggagagagaggccctatgggttgtggkaggaaacamwakayactgggttyccattctargggaaataarctycawtttatggtaagrcctggvttttcc

SEQ ID NO: 215811 - DNA, 1000 bp, Homo Sapiens
  misc_feature (909)..(909): n is a, c, g, or t
gccccaaagcttgatgacattctgtaaagttacacaaatgtatctgaagaagttatctgttcttgtcctaattttgattctaaataaaaatccaatttcaaaatcaattaagattttaatctaggaaatcttgggattgttacacatgtaaaaaaccttatctctgagagccttttctattcttcttaccacaggtccactcacaaatcgcagctggtatggactggtactgccccaaataagaggaacctaagagcttggctccaagaccccccaccatcccggtgggtttgcttggcctttaggacgtgtgactacagcttttgggtaggtacagggcaatcaagattgaggaagaacacttcagcaaagcaaccattatttgtccacaaaaacagtgaaaaacagtgatataaaattaacaaaccaaatataaatctaacgccattctgcatttccagaactttttttatatttgtgcagtgttcttggtcaaccactcaccaattttctgcgtctatctgaagtacttttaaagttattaaaactgctcttttgaccataagtcacatagaattgtgattaggaaatcaatttacttatgactcggtgcagggcacttgcgagggtggtgagtgtaaaggaactaaaaatggaagtctctcacttctaaactggacacaggagttctcaaattaaaataataaaaaaaaaaagggagagaggtgcttactggcaacattwatactagacaccagacaagacagtkaacgattttggtcagaactgwggaamaccatttccttgaaaagtcttaaaaatagctaaccaagcactgcctcaagwccagtgagtamcattgttmcatacgkttccmcaaamatattgtacctggcatwcacwcattankgwccccgkcctcymagtctccmctttccyrkmyawgtgtccctgtccmccgmcwchaswcacakgtcacrgtcccgykgckgtwygcttc

SEQ ID NO: 215812 - DNA, 999 bp, Homo Sapiens
  misc_feature (572)..(572): n is a, c, g, or t
aggamgtcagatwatacatttcagtaasgggsggggtgacggggacggggcaacagcgcaggggccacagggagaagaagagatcgagagctggggtttggcgtaaatcttacaaagtgtataaagaatctgtgtttctctacattaacaaaaaccaaaggctacaagagcggttgtatatacaaaacacggagatattgcttcacttgcaaacaggttccagaccagatggggagacgagacagaggagggggacagggagggccgagagggcgcgttgcgtgcaggagaggggaggggagaggggagagggggggacgggcttctccctgcatcaatcaacaggcagaggtgggaggcctgtgcgagctgctgtgtgcggaggagcgggtgggcgctgagagcccggggggtccgcctgccccggcccccgctgcctggttcttcgggctttggcccagagcacggttctgggtggggacgacgggctggctgggccacccggtcacagagggagggaggcaatcgctccctagagtcggccaaggaaaaggggagaaggcggcgccgtnccgcccgtcctcctcgcctctggccagccccgtccatcctgccgccctccccaccccgccaagacgctgtggggacccgagtttcatgggtgcagcaaaccgggggcttctagcttttccccgggcaggacggggtagcactggctcctgtccttcctgggccccggcccggccgtgcagagctcactgggagggctggaacgagccggccacagagggacagcagggaggggcaraggataccgtggcggggmgggcggaggacgtgcaccacgctgggtggagcsmggggtcacaggttctggcagcactsagcttgttgggctctgtccgtcgtagtgggcgsacctgaatgtccacacgttgttcccggggactcgystgggcasacggtctsvatctgttytgtgaagatsggkaawctctg

SEQ ID NO: 215813 - DNA, 1000 bp, Homo Sapiens
gaagcaatctgtctttattatgaggaactaggaggtggggccaggccagactcatgtcagaaggcccctcagtgagtgcagcccaggagactggtcacattctggggttgcggaagggccttggctgcattcagtttctccacatcactgtagcagtacaaattgggaccatggatgaggtacaagccgggaccattggcggaacatgagttagggccaagggacttttccatacacaaggctccgtctaccttctcatggggccaaggaagctctgtccacgtggcttgggctcctgacttcaggtccagccaccacagccgccgtcctgccatgatatggagccgagaagacccagggcagataaaggccgcatccacagagtccaggataatcccatgaggggtcccgacttccttctccagccgcttcggataaccgcttactagggtatagcctccctttgtcaggaagacatatacctgggtgccctggaccagatagagtttttcttcccaggaaaaggcagcatccactgctgaaggaccctggggccactgatgagcaatgggccagctatgccagccatcccggctggtgtccagacgccagtagtgggtcccactgaaggcataggtggcaccatggttgtcagacgtcagtdcagacaagactagatgtgggctacagcgcatatactcagggccatggtgggtactgttcccatggccagtcccattcctgtgtccatggcctggagagagaaatgggtgaggagaacacagaaggaggccagaggtcagagtgaggtccaaggtggaagagatggctggggttagtggggtgtgggtttcccatatgagggcaatgggaaaatcmagaatggaaattggggctagattaagggcaaggtgtcgmamasggrttaaagtgaractaggaaagtgaraccmaarstcagggaagwkgatgaatttgaaaggtyaagtgyaagggtttt

SEQ ID NO: 215814 - DNA, 682 bp, Homo Sapiens; identical to SEQ ID NO: 50708

SEQ ID NO: 215815 - DNA, 1000 bp, Homo Sapiens
cagggaccccaggactgcacagctgcagacttgctgggaacctgggacaggtgacacgcccactctcgcctgtggcccagggccttccacctctgcatccagccatgcacccaccatttccccacagggtacaggggcagccttccttgatccamagcmaacccttctcctgctgtctctggctgtcagtgagacccctctggaaagggcagaagcaggcaagccaggcagaagggggcccggggtcccactacctgggtaggaatgagcagagggcgggcagagcccttgctccttgtgggaggtagatttgtctcactgcatacatgggacagatgtgtgcacccacacacatataaataaamaaaaaaaaacacaaacacaaaaagccctttgaacccagcactggcctgaggaaggtggccccggaggaaccctgaaggcacatgtccaccaggctataatgcccctgccaccctggggctcagctggccagactcccaggggtgggatgctgctgacccaggagcccaccaagtccccagggcagtactgggcagggcccagaaaaccccacgcccagcccaccagcctgccactcctggcctcagatgccactcccggcctcagatgccactcccagcctcagacgcagatgggcccgagaggtgttcctgggaaacagttcacttagcaagacccagtacctgcgctccagaagctcagcgcaggcccagcctggggttggcccagatggaatatcttcacacccgcccgsttytgcaarchccacctgggctaagcaggcycgaccaggacctgcccgatggstgagaasmacctcasgtyagagaggcagcgggytgaggcaaagggaragggaatatgggggkgamatctgggmcmactctctkcttctccttgggwggsytgytcggrvagctggaccagggagtgggrgaratyttttggggggtaytktgsctttgcaagtttaaaa

SEQ ID NO: 215816 - DNA, 1000 bp, Homo Sapiens
acaactgtttgagccaatgatattaatacgttattataaagtaatcaacatgacaatacttttgcccgcatccaaaagcgcagtacactgatttaggccagactgactgatgctccctcccgtcatcaggttctattttaggacaggaggaaaaacatgttttcccattcacagtttttaaaaatcttttttaatggatgtcctaattgtacacagaacacaaacctatcttcacttctcaatgtgtaaatgtgtatctactaagtatacattaatgtgcattaaagacattcagaaaacataaaaaccaaagaaacatattaactgcataaaaatttaaagttgctaaatggtaaagcagctagaaattataaagtagggaaatgttgaatagctgacataaagattcttagtaagaacattttacattccaatattacaaatgagtacaatatgcaatgcatgaaaaataagccaattctgagatgttgaagcacctatcagagcgtacaaatgagcgagctacctggtctagatggaatgaagtgttagctttaaaatttgagttaatttaataacttacatcttcacccaggaagcatcagagctgaggaaataaacctcagcagtcaagtgttactaaacctcatagtttgaagatattactccgtgatgtgtggagcacagagtagctaaatagtacttataataaattkgytatagttctaagattaatcccttgtggaagagggaaagttggccctcatcaagaacataaatggctgggcatggtggctcacaccatgtaatcccagcactttgggaggctgaggcagacagattgcttgagcccaggagttcaagacgaacttgggcacatagcgaaacccagctctaccaaaaaaaaaaaagabtaactgttgcmcctagtgaggggtgggtgtmactatcyaagkgctgtgtytctcccyacctccacmyactycatttgtgctamaaa

SEQ ID NO: 215817 - DNA, 825 bp, Homo Sapiens
gggaatgcrgagaaaagggaggcttgaccccgggcaccatgggccactccaggatgggacacggcccctctttcttggggacccagtatgtcctctcctctagacccagacatacagttataaccgtctgtcctavcccctccctaatccctggccctcccagctgtctgggacttcagtggmcccccagcccctgcccccactcaccaaggcctcgctcgtccctctcgtctgacatgtctgtgtgcacccccctcctctccaccctaccttccatcaaccagggcagatccaccgtgccctggttccccagacattccagaatgccccacatcattggcacaggagtggggcagccccggaaggaaccagggattaggctgtaggggggtgagaaggagagaagggaccaccccattcttctcaagcaaggattgccagcgcgcgctgacacagtgatgggctgcccagggctggaggggacgctgttcctcccgccgccactgcccaacctttcctgataatcgtggcatgcgccctttcctcttccctgccccaccccctggccgcagcaggccggcactgcagagtttgggtgctggtggtgtggctgtaggggaggggagaccacacccaaggtgggggctgtggccatgtgtggccgtgatgtcgatgatactcgttttccctgatccgtggtgttgcagtccgttgtcaccagccttgtttctagtgtgtatatatgtcgcccccgtgatgcatatatacacaggtattaaatatatcgctctatataatattatatatgtgtgtggtatccaagga

SEQ ID NO: 215818 - DNA, 745 bp, Homo Sapiens
  misc_feature (491)..(491): n is a, c, g, or t
  misc_feature (517)..(517): n is a, c, g, or t
aatatattrattctttgaaaatgagaattgagacatgggctaaaattaaatacatcaacaacaaaaatcttgtaaggagaggttaaaagcagttatcttcaaaaagtaggtctgagtttatagagtggaggtaacttatttgttatgagctctttaggataaggtatatttgtttcattttgatcctgcatatacattactttaattatgagaattaggttcaggaaacacctcttaaggaagtcacttaaaacacatacacactcacacagagacctcaggaaatcacatttgtattagcaatattttasccagtmctttcygcatctagatttatttccttttatgatcattaasattctcmcctaamcmccccsccaaaahmcattacctcycamttymtttasattctmammvtcaggmyacmmammmcmcataamcmtctacmagtmccaaadcatttatgaccttataatthmmhagtgcaaganaaaggkcaaagrcaggtatwcaaatnaatyataatctrrrgrgttacatatrrgdkgtgcttgattatktgtkaakktctgctagakwdgtkacaggkttgttatckkgcctttytagrcattttgkkcacaatctgayaccgttgcatttbctggttgtatcctcagcttaacaggcaccggsgtcagccggcccctgcacaccggccrgstacccccgccggctagsatcggcagctcmrgatksgtgcycc

SEQ ID NO: 215819 - DNA, 897 bp, Homo Sapiens; identical to SEQ ID NO: 47308

SEQ ID NO: 215820 - DNA, 1000 bp, Homo Sapiens
gtaatcccaatgctttgggaggccaaggtggaaggatcacatgaggccaagtgttcaagtctacactgtggagggcacaagctgtgggagggcctggaagacacgcctcagagattctcccagtcctgccaccctgtgggagacacttctaaggaatcgtaaactcatgtgaccagcagggaggacaacgatgaagaaactttcctgcctaaaatcagctgctgtccagagctagcacctggaaggagacactccctctcctggggtcacatcttcactgcaaggcgggtgggagctcactgctgtgacccacatatactcctctctcggcgtctctatcctgctactttctctgactgcatcttcctctgttccttggtcagtgtttgagaagagaatgttgaacaagtcacatccttgtcactctgagtcagaaccctcatttgacttggaagatttgtgcttccgttttttcttctttttcttttctttcttccttttcttatgcttttctttcttcttctttttcttgtgtttctctttaccttcagaggaactggagctgctcctatcttcacctgaggtagaatcctccagtaactgttttaactgctgtatccgaaacattcaaaattgatcaaagaacagtcagttttagctttaacttacaacagttgcttagataaatatgtcattcaaaagcaatatggaaggatcatgaataaccacatcacaaaagacagtacttatttttatttttacctgttttctccattcttcttcacctgaatgcctatgtttatgtgactgtaaccagtgtacaaaccattttttgtattcttttccttgtcctagtymtttctgtaggttccacagtacttacaattataattctaacagacgcatactttactaaacawtccccactgstcaattcctaataggwtatcwcmcccccacattataatttatgwaccagttgaaaaaacaactcyctgat

SEQ ID NO: 215821 - DNA, 943 bp, Homo Sapiens; identical to SEQ ID NO: 52873

SEQ ID NO: 215822 - DNA, 1000 bp, Homo Sapiens
agcagagtgtcatgaactaatgtggaagttctcccagatgatgatgattgaaagaagaaaacagcagaacaatatgtttagtgtgacgtcatttacgtatgagagagaaagagataggaaggctgtgggttttgttgtattaatgaaaatgcctcccacgctaagcctggccctcagcctgccagcgtttccgcctggctcacgatgttccacgctgttcctccaggcgtccctgagggcctccatcctcgctcgggactgtgcggctgcggcggctattgtgttcttggtggaccggttcctgtatgggctcgacgtctctggaaaacttctgcaggtcgccaaaggtctccacaagttgcagccagccacgccaattgccccgcaggtggttattcgccaagcccgaatctccgtgaactcaggatcccatccagccaaacactcaatgtagtgggatgtcagaagcaagagaagacccacaaggccaggcactatggctcatgcctgtaatcccagcactttgggaggccgaagcgggtggatcacctgaagtcaggagttcgagaccagcctggacaacatgatgaaaccccatctctactgaaaactacaaaagttagccaggcgtggtggcagccgcctgtaatcccagctacttaggaggctgaggcaggagaatcacttgaactccggaggtggaagttgcagtgaggtgagatcacaccattgtactccagcctggggcacaagatcaagacttcgtctcaaaaaaaaaaaaaaagagagacgactcacaaggcctgctcmcctcactcttgcctgaaatttgggagacaaaacctttcaaaccacagttacagataaaggctcagatttccaattccatcaacatggaggactgagcasktgagaatctyctccawtaaaaaamataawwatgtgaattaaagattkktaggtcctgaamataaaggwtttaaatmmagmatagacactg

SEQ ID NO: 215823 - DNA, 747 bp, Homo Sapiens
gaaagtttgtaggaattcctgacataaatagtgaagactatccttacatctggtttccaccttattttcctgccctcgttttaacatcacccagatttcttcagttataaatatgccatacacctttgtaagtaacctcaaatcttcttcaaaagaagcagaacagtgaaaaaaacagatgagtaagttaagagttggtcatctggaaagaagaaaactcagtaggcaccttcttttgttttttcttgtggtgtccggatcagcatcctgcatgtgagattcatccacgttgtcctgtctagcagtagttcagttctcttcatggttatgtctggtttcattctatgattatatcacaatttatctattctacacttgggtggcagctgcttcagattttttacttttaaaaaatatacttaaaagtgaactacaggcagggcatgatggctcatgcctgtaatgccagcactttgccaaggtgggcagatcacctaaggtcaggagttcaagatcagcctggcctagatggcaaaaccctgtctctactaaaaaatacaaaaattagcttggtgtggtggtgggcacatgtaatcccagctacttgggaggctgaggtagggagaactgcttaaacctgagaggtggaggttacagtgagttgagattgtgccactgcactctagcctgggtgacaaagcaagactccatctcagaaaaaaaaaataaaagtgaattacaacacta

SEQ ID NO: 215824 - DNA, 962 bp, Homo Sapiens
gatggggtggcctagtggacctggcccatctgccactctagtccctgcagctcaacgtcctgcgtgaatgcagcagccacccccgtcttggcccaggtcctgggggctgctgaacccagcaccagtgtccccttgtgcccagggggcccagtcttctgtggggtgcacagcctccctccctccagcaagccctccctgcccagaaggaatgggtccaggtgtggattcccagggagggggttcattggctcagcttgggtcagggcagagcctgttacctgaagagaggtgagaccaaggccacagggagctccaccttctctggtcttcagtccagcactgggtgcccatccccatctctaaaaccagtaaatcagccagcgaatacccggaagcaagatgcacaggcgggcggcttcccacacacccgtcacaagacgcggacatgcaggtctcggcgcgagctctgccccgtccaagagcctctccgctgtcgcccagtgtgagcctggaagaggacccaagagagtgccgtgctgaggctgcctcgaggtcactgccttccggagctgcgcctattcctccctcgccaaacgcgttccagaatttgtccacaggtgcgccggcacctgctttcccacctcgaggccgcggcctcccccccgatttatagacaactctgacattgtcaccccactgacgaggcccgattccatagggtggatccttgccaggcgtccctgatcctccctgcccaagtcttccttcgtgagctggccttgctccccatcccccaagtgcctcamcactcccccagactgggtgaaggtacagctggctcctttcgggggtgcagcttcaactctctcggcggtagggcggtgccatccccacccatagggctggstmmatccagtcactccmamagcgtccagamaaaaatwaaaaamccttgggscctg

SEQ ID NO: 215825 - DNA, 1000 bp, Homo Sapiens
ggagacgccgggccccgcgccgcgccgcgccatgtcggtgaacatggacgagctgcggcaccaggtcatgatcaaccagttcgtgctggccgcgggctgcgcggccgaccaggcgaasagttgctgcaggcggcccactggcagttcgagaccgcgctgagcacgttcttccaagaaaccaacattcccaacagccaccaccaccaccagatgatgtgcactcccagcaacacccctgccacgccgcccaacttccccgatgcgctggccatgttctccaagctccgcgcctccgagggcctgcagagcagcaacagccccatgacagccgcagcctgctccccacctgcaaacttcagccccttctgggcctcgtccccgcccagccaccaggcgccctggatcccgccctcctcccccaccaccttccaccacctccaccgcccacagcccacgtggcccccaggagcacagcaggggggcgcccagcagaaagccatggcggccatggacggccagagatgagactggacgccgccgggcgctgggctggagctgggggcagcccagggttgtggggacacaggagggccagggaggggggagccggggagggcagggggtttcccgaagatcgcactggaagattttataaaagaatttttgtgggtcggggggacagtaaacttcctgggccacgtgggtccttcaggagtttttcaggcaagtttttcctctgtttttaatatataactataatatatatgaatagataaatataactaatgtgcgtgagaatgggcctggcacacctggggtgctcggggggtagggctgccatgctgcagagctgatggagtkatgttgttggcacaaggcatctgttagctgcctcctttamagccatgccttytggawttggaraggacacactctgcrgtamtgggmgcamawagmrswgcgggccaggaggsytaggtyaaryktggaggccctttgg

SEQ ID NO: 215826 - DNA, 895 bp, Homo Sapiens; identical to SEQ ID NO: 51566

SEQ ID NO: 215827 - DNA, 1000 bp, Homo Sapiens
atagtgacttctttattgtttctaatgttgtacggaacaggatgctgaaaacgccattcaacagatgggtggccagtggcttggtggaagacaaatcagaactaactgggcaacccgaaagcctcccgctccaaagagtacatatgagtgtaggtgtattggagaagaaaaggaaatgtggaattttggagaaaaatacgctagattttaaatgttagagctgttcccggagacttattgcagaaatagatgagaagcaaatcaagactactattcaaaaatgtacttagttttcatttttgtaattataaataatattatttctaatgtcaagtctcctattaaatagaaaatactgggtaattttttagacattcgtgggggaggtttaatcctgaactgaagtataatatgtgtaatataagcattttgatcaaggttaatgttacctttacagtagtgtagtgaatgctacttttctctttctgcacattttatttaatgaattaaagacataaaccttttctctcaccagcaaataccaaacagctatcatatgatgaggttgtaaatcagtctagtccaagcaactgtactgtatactgtggaggtgttacttctgggctaacaggtatgggagccttccctgtgtggcattaattttttaaagtgcaaagcttaatatttgtaggatttttatataacttagtgtgatttgtttgttttggtttttwgtctaacagaacaactaatgcgtcagactttttcaccatttggacaaataatggraattcgagtccttccagataaaggrwatccattgttcggtagggatggtttttaaaaaaacattttcttggtaatgwactgggaaacmgaaaataataaaadaaavacttttcctccaaawadtttttgamattwcccgkttyttaaaatstccgtgggwwaaaaagkgraatttgsggggggggggcccgccgtttcccrccccttgggg

SEQ ID NO: 215828 - DNA, 937 bp, Homo Sapiens; identical to SEQ ID NO: 51753

SEQ ID NO: 215829 - DNA, 636 bp, Homo Sapiens
cccgtcatgagcaactcccttccccatctctgctcaccatgtggacgctgaaatcgtcccaggtcctgcttctgtgcctcacctgcagctatgcctttatgttctcttctctgagacagaaaactagcgaaccccaggggaaggtgccgtgtggagagcactttcggattcggcagaacctaccagagcacacccaaggctggcttgggagcaaatggctctggcttttgtttgctgttgtgccgtttgtgatactgaagtgtcaaagagacagttagaagaataaggagcagagtcctcctggccttcgaggcttcccatttcgcactccattaaagaaaaatcaaaatgcttctctttacaaagactgtgtattcaataccttaaacgaacttgaagtggagcttttgaaatttgtgtccgcagtgcagaatcttaaaggtgccatggcaacaggcagtggcagttacctcaagcttcgaaggtcagagatgcctgcagatccataccatgtcacaatctgtaaaatatggggagaagaaagctctagctgaatggatttgtgtgttaggagagaaaaaagttgagtgttgacaaactgtatgcaaactaataaaactattctgaaaaaaaaaa

SEQ ID NO: 215830 - DNA, 1000 bp, Homo Sapiens
agtagcaacttgggactcgatagctacagcgctctccttgaaccacaagacattttcttcagcagatcgtgcaagtcttattgatgatgcttttgccttggcaagagctcaacttctagattataaggtggctttgaacttgaccaagtatctcaaaagggaagagaattttttaccatggcagagagtaatttcagctgtaacctacatcattagcatgtttgaagatgataaagagctatatcctatgattgaggaatacttccaaggtcaagtgaagcctattgcagattctctgggatggaatgatgctggagaccatgtcacaaagttactccgttcctccgtgttagggtttgcgtgcaagatgggagacagagaagccttgaacaatgcttcctcgttatttgagcagtggctaaatgggactgtaagccttcccgtaaatctcaggcttctggtgtatcggtatgggatgcagaactctggcaatgagatttcatggaactacactcttgagcaataccagaaaacttcattagctcaagaaaaagaaaaactgctgtatggattagcatcagtgaagaacgttactcttttgtcaaggtatttggatttgctcaaggacacgaaccttattaaaactcaggatgtgtttacagtcattcgatatatctcatataacagctatgggragaacatggcctggaattggatacaactcaactgggactatctagtcaacagatatacactcaataacagaaaccttggccgaattgtcacaatagcagagccattcaacactgaactgcaactgtggcagatggagagcttttttkcaaawatcmcaagctggrgcaggrgaaaacctaggggacaagtgctggaacagtgraaaacaawatagagtkggtdaamaacatagaaacmcmycagagaatggktttttwtttttttttgggtgkttwtktttttwwtttttaarttaatttttgaa

SEQ ID NO: 215831 - DNA, 963 bp, Homo Sapiens; identical to SEQ ID NO: 46321

SEQ ID NO: 215832 - DNA, 938 bp, Homo Sapiens; identical to SEQ ID NO: 44672

SEQ ID NO: 215833 - DNA, 1000 bp, Homo Sapiens
  misc_feature (48)..(48): n is a, c, g, or t
cccatagggcaagtmcggctgctccaggctctccccagtgttgctgtnaggtgagtagatatgaatgattgtgtgtggggaagatgattcatggacagaatgggaaagaatctggtgtccaaggccattaggttatgaggtcagagggaggttgagtgtgggtggtcagcagcggtgaagaatcgtgggggtaatagagttagcaggaagggcaaaccactccccaccacagcgctggggccagtgccagccccaccccccaagtgagagactccaggccctcagccccacctccctcatgctgagaggcaggaggctgcacatcacgcttctcacgcgcagagaagatcccgatttgtctggtgtggttcaacaagaagctggaaggttgggccacgcagccctgaatgctcattttggtggacagcccacctcctgagagatgaatgtacccatcataacaatgagtggtgcccctggggcaggtcattcggggggagccacttgaacaggttccaaggggctgcacacaggtaggacactgccggtctcctgggacaggggcagcttgaggagggagggagtacagcagaacgctgctgctgctggcactattgcacaggtccgaggagcagaagtgggtataggaggccacaagcaccccaggaggggctgagtggatggtggtcttctgggaattttgagccccaacagtgctgcagccttttgtccccaccagggttgatgtgagttctacatctaggagcagcagcgtctcctgacacacctgccccacctcgcacatctcggtattcgatgtggtccaatcagtgggttcttgagcaaagtgtccgtgtgtcataatggtggtccccgatgacaggtcagaaaatctttctattgcagtctcagtsataccacgggccaatttctgtgtccattracaggttgcamctggctgggsatcatcctgactctmwaatgrragatgctccccctg

SEQ ID NO: 215834 - DNA, 1000 bp, Homo Sapiens
tattttttgttttatatgcaaaaaatgttcattgaatgcctcctatttggctggcactgcctaggcactttcacaggtatttcatcctaatcctcacaacagccctatgaggtaatcattggtcccagtttacagaagccttgggtgggagattattgcttgatatacttctatttgccacacatttttgttggcaagacgttcgtatcggctggtgattcactggtcaagagctctcattggccaggagttcctatttgttgctgtaagattcaaataatcaaaatactagaatttttcccccacaagaatgatgggaccaatggcataagagtaaaggaaggagagtcagtgggtctctccctttgaagcaccatttgagtttgcattggtcagccccacacaggtgggcgggatgaggtggtggaggaggagacgcggtggttataagtcttctcgcttcagtaggatgagcttcctcacgagcgctgtgatctggggtctgacctcctccactgacacagttgggtcccaagcccctaccacctttccatctggggctactaggtacttccagaagttccaggtgggctccttcccagaagtctgggccaggtacttgaaggcaggatgggcacagtaccggtgactgcaatcttgctaaacatggggaatgagacactgtaggtgcggcgggcaaagctctcaatctccttgttgctgtcaggctcctgttkggccaaactggttgcaggggaaggcgagcacgttgaagtggtgggggcccaggtctcgctgcagctgctgcagggctcggtagttctggtctktgarscgcactcgctggcacattcacacaagggamacgatcgsggtaytywtcagcgamacagtrtkcccggatgttgacgccttgartcgwatartctkctctgctsssgcggcgcgccmmagagcmgcacacgctscacgtcgcgccmcatggctttccgrgkggggg

SEQ ID NO: 215835 - DNA, 962 bp, Homo Sapiens
  misc_feature (10)..(11): n is a, c, g, or t
  misc_feature (42)..(42): n is a, c, g, or t
  misc_feature (446)..(446): n is a, c, g, or t
  misc_feature (480)..(480): n is a, c, g, or t
  misc_feature (489)..(490): n is a, c, g, or t
  misc_feature (492)..(492): n is a, c, g, or t
  misc_feature (495)..(495): n is a, c, g, or t
  misc_feature (497)..(497): n is a, c, g, or t
  misc_feature (499)..(499): n is a, c, g, or t
  misc_feature (506)..(506): n is a, c, g, or t
  misc_feature (513)..(513): n is a, c, g, or t
  misc_feature (515)..(516): n is a, c, g, or t
  misc_feature (519)..(519): n is a, c, g, or t
  misc_feature (622)..(622): n is a, c, g, or t
  misc_feature (624)..(624): n is a, c, g, or t
  misc_feature (626)..(629): n is a, c, g, or t
  misc_feature (631)..(633): n is a, c, g, or t
  misc_feature (635)..(635): n is a, c, g, or t
  misc_feature (637)..(637): n is a, c, g, or t
  misc_feature (640)..(640): n is a, c, g, or t
  misc_feature (642)..(642): n is a, c, g, or t
  misc_feature (644)..(644): n is a, c, g, or t
  misc_feature (649)..(650): n is a, c, g, or t
tttattwaannaataagccttacttttacatacatagctgtntaacttccacatctttatcaatataaaccccaattaattacaaagcactaaaataaaatctaaaatttaaaacgaaaaaacactaaacatttctttctgcacatctcttggtttctaaaacgttcttctgtggttctgccctgtttgtataaagctccacatgcctccacatgtttaaacattacccattcttttacccaaatctctgatattgatagatatgtaaaaaatgttaaatatgtatgtttaaatataatatgtaacatatatttaartaaaatatatacakktatattttgaagtctatgacaaagctttagttgtgaaataagcaaggatgcaggattgtacatcttttcatcgtgctttccccgtcattagacagcaattaaaatcagacaganacaacatgacacaactgttaaattttcttatgtnaaaattgcnncnacnantnttctaantaatatngnnacntaaaagattgcttaactgattttaataacatgacatgaagcccctagacttgatataatcgttatgcraaataacataggtgaatactgtcttcttttaaaantntnnnntnnntnangcngncntgtgnnaatggggcaagtttccattaaataaatgaaaatwtwtaaaaaagaaagtttwgctttccatgtcatttgaagaaggaaaattawcattttaaacaatattcaagtatattaaacacatwaaaaaagtattataaaatgtttaactttcatcagcttcaaggkttatgtwgctcccgaattttgcatacaactgtactttcaaatctgcwacactcgctgaattgattcactctggatctbaggcgtcatttctcatgcaaattttctttgcttctcctacattcatgcgttctcctgrgaaggctatgarga

SEQ ID NO: 215836 - DNA, 813 bp, Homo Sapiens
  misc_feature (377)..(377): n is a, c, g, or t
ccggtccggaattcccgggatcggacttggagtcagagagacctggctgcgaatcccggctccgccactttctagcgctgtgaccttggcacaacagctccagctggcagcatcacttcccgccaatttatccaacttctgccaaggctctgaaatgccaacaacgtcgaggcctgcacttgatgtcaagggtggcacctcacctgcgaaggaggatgccaaccaagagatgagctccgtggcctactccaaccttgcggtgaaagatcgcaaagcagtggccattctgcactaccctggggtagcctcaaatggaaccaaggccagtggggctcccactagttcctcgggatctccaataggctctcctacaaccncccctcccactaaacccccatccttcaacctgcaccccgcccctcacttgctggctagtatgcagctgcagaaacttaatagccagtatcaggggatggctgctgccactccaggccaacccggggaggcaggacccctgcaaaactgggactttggggcccaggcgggaggggcagaatcactctctccttctgctggtgcccagagccctgctatcatcgattcggacccagtggatgaggaagtgctgatgtcgctggtggtggaactggggttggaccgagccaatgagcttccggagctgtggctggggcagaatgagtttgacttcactgcggactttccatctagctgctaatgccaagtgtccctaaagatggaggaataaagccaccaattctgttgtaaataaaaataaagttacttacaaagaga

SEQ ID NO: 215837 - DNA, 1000 bp, Homo Sapiens
tgggtaatcctcacaccaccctgggacggaggtgccatcgctttaaatgtggggaatagaagaaacttgccaggaggtgcagagaggaagtggcagcgctggaattcaaacccaggcaaaggagcaccttttacctggggtaggagagagcttgctgggtgggcttcctccacgcggggaacagcagagatggggcttcctccccatctcccaggataaaggcagagacagctctggaagaggagctgttgccaccgttgttttacaaacaggacccctgggcttccctcttcctccagagagaaggatctggggccttgctcagtacctgacatggagggtggtctaggtggggttttagaagccctggggccaccctgggcactctgccctatcctcaggatggccactgcagacaggaggctctcgtcatggggaacagtggcaagcaagggtggctggaggacaggatgcaaaggcagactgcggccaccttggcctagagcagggggatacgggaggcctcccagaggcgccgggccagctggccggcctgctgcaccagcaggtcagtggggatgacagacaggtgcagggccagcagctcgtagcacctgacagcctcggttgggcggttcttgctgtagtagcgcaggagcttcctgtagtagtctcctcccagcatgccgatagacctgagtcgtcggtkaggacgggcacctcgatcatctggagtttgtacccatgtcattctcgaaccacaggaagtaggagcagtagaaatcccctcctggaacagcagcgtggtgtagcccttctgcaggtatctgcgcgccacctggatcagagaccagaccttagttttgacaaaggcagccagcggccccttgcccaactccgacgaggtcttttgactgcagttgagggaaggcgccaccatctgcccagtggtgcggtccacatagatgragtgcacaagcctgggaagtcttctaggtag

SEQ ID NO: 215838 - DNA, 1000 bp, Homo Sapiens
agcagacattgcaggcctgaagaaagcaccttttctgctgccatgacaaccatgcaaggaatggaacaggccatgccaggggctggccctggtgtgccccagctgggaaacatggctgtcatacattcacatctgtggaaaggattgcmagagaagttcttgaagggagaacccaaagtccttggggttgtgcagattctgactgccctgatgagccttagcatgggaataacaatgatgtgtatggcatctaatacttatggaagtaaccctatttccgtgtatatcgggtacacaatttgggggtcagtaatgtttattatttcaggatccttgtcaattgcagcaggaattagaactacaaaaggcctggtccgaggtagtctaggaatgaatatcaccagctctgtactggctgcatcagggatcttaatcaacacatttagcttggcgttttattcattccatcacccttactgtaactactatggcaactcaaataattgtcatgggactatgtccatcttaatgggtctggatggcatggtgctcctcttaagtgtgctggaattctgcattgctgtgtccctctctgcctttggatgtaaagtgctctgttgtacccctggtggggttgtgttaattctgccatcacattctcacatggcagaaacagcatctcccacaccacttaatgaggtttgaggccaccaaaagatcaacagacaaatgctccagaaatctatgctgactgtgacacaagagcctcacatgagaaattaccagtatccaacttcgatactgatagacttgttgatattattattatatgtaatccaattatgaactgtgtgtgtatagagagataataaattcaaaattatgttctcatttttttccctggaactcaataactcatttcactggctctttatcgagagtactagaagttaaattaataaataatgcatttwatgagggacagcacttkwaagttttt

SEQ ID NO: 215839 - DNA, 923 bp, Homo Sapiens
  misc_feature (19)..(20): n is a, c, g, or t
  misc_feature (22)..(22): n is a, c, g, or t
  misc_feature (30)..(30): n is a, c, g, or t
  misc_feature (652)..(652): n is a, c, g, or t
  misc_feature (655)..(655): n is a, c, g, or t
  misc_feature (666)..(667): n is a, c, g, or t
  misc_feature (672)..(672): n is a, c, g, or t
  misc_feature (675)..(677): n is a, c, g, or t
  misc_feature (681)..(681): n is a, c, g, or t
aaataatgcttaacattannanagcttagnacaacagcaacatttacagaaaactggattacagatgtttaacaactaatttgtttgaacccaaacattgttttacaaatacctgtagtttaaaaaaacaaaaaaaaaaaaccaatcccccaaaccgccccaactcctccccacaaagaaacaatggtaggaatagaccaaaaactcaaatatggtccttacagtacataagaataaaaacagtaaactataaacttctaagtgttaactctatactaaaccactttgcattagaaaattataaaataggatggctttagtccactttatgttttagaataatcaattttaatgcttagttttcccagaacaggagcttaaaaagcaatttgttactaggacattttgtcgggatacagtctaggggaaaggacataacaaagccaagaacaagatagggacagcactaatggaaaacccatcttttcattaatcttggttgctaaatttggtttcacatttctgatagcagggaaaaaggatttttggmaaactggacagcttccttcttggccctcaaaagctctgcctatttytcyttttaaaggcacaatttgcagctaaatgtattgctttaaaaagtaatccatcnctngtgctttcccnnacagnagnnncacnttgttgakcagaaaatgcaagcaatcttatcgcaaaacatggcatatacagtgattcaggaggkaacaatttgccctctgccaaacatacacattggtatattcctgcaaacagctttacacawcttacacaattyatgtagtctgtgttcaaacaaataaggtgttcaaacwtttcctaattcagacagaccwcaagtctrtgcataaggaacamctgcatccmkttaaaawatgaccttc

SEQ ID NO: 215840 - DNA, 1000 bp, Homo Sapiens
cgttgctagcctctagcagtgccgcgtttattctaagatgtgggagattcttttccttgcaacagtttttgtcatctgcattcttccaaggcttttaaggtgcattttcttctgtgtgaaaggaaattctttgtccttttcctctcagcaccgtggcttcccaaggtagacactattttgtgcctgtmacagagagagggagtgcaggtttgcaatgctcacagacaattgattgtctgccctaatgtgtttcatttacatgtttataacgtcaatggtgctggggtgtccactgtaccattcattcccgcattcccacaagggggcaattgtctgaatggccaagtcagacacctttttgattgctctttggttgtcttttcagagcaaagagataaaggaggaaaatctgtgatgcagaaacactagttgaaaatatacagaattaaatgtcaccacaaaagcagatgttaacataagcccaaatatgctttttagccaagatgtgaaggttgaaaaaaataattcagagcagagggaaggatgatttaaaccaataaatatagccctattccccctctttacttcttttctgtctttagcaatcagaagatgaaatgtaattttccttttcatttttaagccttgaaacatccaggcacctcctcattatttgtatgtttgctgtgatttgtgaattttgtatatatttacatagctctgtttatgccaacagcatcagcttaccacttggaaaatctattgaatgactatttgggctgtggggagggtaaacttttaaaaagtaagatccaagtatttcttcatcaagcagtttttaaaaggaaaacgataataatcagtaggctccatggaagcctttgccttaatagctatgtgccaaatacttttatcttgtgtgacagtcatgtcagagtgaaatctctcaggaaaagtgtamtagtagttacaaagtaaataaaggattcattttaaggtg

SEQ ID NO: 215841 - DNA, 1000 bp, Homo Sapiens
cgagtaccgcgacctgcacgcccgcattgagcgcatcacgcggcggttcacccagctcgacgcccagctccggcagctctcccagggctccgaggagtatgagactactcgagggcagattttgcaggaatatcgaaaaatcaaaaagaccaacaccaactacagccaggagaagcaccgctgcgagtacctgcacagcaagctggcccacatcaagaggctcatcgccgagtacgaccagcggcagctgcaggcttggccctagccgccctccccgatggcggggatctgggagggtcgggggagcaaaaggcggtgagagaggatttatttaaaaaaataaacccgaggaagatgctcatctgagccagcaccgccggctttcagggcagcccctgcagacgtctggccctggcgggtggctgcaagctcacctcggccctccctgcgcttcctgagcagtccctgcttatgatgggctccccaggaagcccactgcctcctccctggctgcagcctccggggttcagcctcctgtctcgccagaagactcctaggcccttggggtggcgcgcctgccttttctagttttatacaaagacagccacttttagctactgctaatgagacttgagtctatttttgtacaaaagagaagcaaaatcttttttctaaacctgtgcctccctctcctcggacacccagggtctagccgctgccctgggtcctgcctgcagtattacagaggtcgtcgaaaggtgcagctgcgttctgagggcgtggggaatgggcaggtggcctctgctggtctctggctctacgtttaggcacccctttcccagcctctcctcttkggsagggtctctgctcagcaagcaamagggtggccargtgctatttkagamtcagctggtgcccagamaststcagagcaaggggcaraggsttcasgccccaggctgcctstatttaggctcastgtggggscatktttttktgt

SEQ ID NO: 215842 - DNA, 1000 bp, Homo Sapiens
tatttaacatggtaaatataaggaataaattgtttgaatataaatatctataaaaaaataagtacatcaaaattcaatccaacctctttcattagccggttatataaaggaaaataattttactgctttaaagcgtaacaaacacttacttttcaatatatttcataaacaaccctataccattgtgtctccaaaaatcaaggacagggaatctcctgatttaatgatcttttttttcttatggatcagagctagtagattaccatgaaaatattatatctactgctgacacattagaccagacttctacgaggctaggatttagtatgggggatggaggaaggggcagcaggggtgggaagagtttggggaggcaataattaaatgtgggaaatacttctgccagagtgcaatataggtgaggtagactcatattcatgaaacatatcctgatttatggtagtaacagtttcattcagttttgcattttacaaatttaaacaaaagtctttcttttttttttctttacttgcatgtttgtcttttgagtgtgttttcaatttgtgcattccttagaaaatctttgtgtggactttggagtttctccctgaaatgtgccaggcgcctgagtcagacacaaacactcccttaggaccttcgtcagaaactccacccctgtgtggaatctccttcctctctctctctccggaggatgccacccgaattcgaatgtgactgtgtgtttctgctgagaggtccattgtcatccccagatgaaagaagagaccaaagcagttaccactgatggaagccagtgaagatggttgggggractccttaamctttcttggaatgtattgaacgaggacgctggtcctttgccagtaaggaamcagcagaggatgccctgctctgatccagccagggtgggrrtgmgagtcggcacaggsycccckggrggyatggctyaataaggccgaggtstgtatcatktgccggt

SEQ ID NO: 215843 - DNA, 952 bp, Homo Sapiens; identical to SEQ ID NO: 43455

SEQ ID NO: 215844 - DNA, 791 bp, Homo Sapiens; identical to SEQ ID NO: 44920

SEQ ID NO: 215845 - DNA, 1000 bp, Homo Sapiens
acatttttcttaagtcttcatgaacacattgcttttgtcttaatggtgatgcattccatgactatgagacagttctcttgtccccttcatttgckgccggtggcacagtcaggattaaagagctccttgtataacggaggaaacagtgtattcactatctctggatgagattgcttaaatacctgcbgcttctccccgtgcaagtbgcaaactgccgtgatggttggtatcttggctattaactttgcsaaggtctcatcatccaggtgattcttctgaatcacatgttgaagtgcaaaataaattttttcctgaagcttctggactttccttggttctataagccaggctcggtctggagatatcagaacagcagatgagaacaaagcgatctcctcctcggtcagctgcaaggaacacaaattctttgcaaagtcaaatgcttcattcactaggtcatcagaacctaaggctttgaacatttgcattcctccatattttccttcaragcagaacagtgttgtttaatgggttgaaggcacggcacattctcactaaaaccacttccaagcaacctgacttcagaagtagaatttgatcattttgacagagctccatgaagcctgttatccgctttgcaaactccaccacgtattggatggcgtgagtgatctggatggcacattgttgccacagtgcttccctggacttgctttgatatgctttaatttcttcataggtgtgggtctgccacgccagctggtgcagctcttccatggtgtattgacatgtctccaaatgggmcttaatgatgttctgtgcaattcggtcgatttcagtcatggttatccctggtgctaactgcccattgttgaaagagctataggtaaacaarttgggtacggctgtgaggtcatagataggttcttgctttwtctgtttgwttcagtcatgtcagtcctgactgmtcaggggcggctgccggmaycacsttgtatta

SEQ ID NO: 215846 - DNA, 965 bp, Homo Sapiens; identical to SEQ ID NO: 40984

SEQ ID NO: 215847 - DNA, 995 bp, Homo Sapiens; identical to SEQ ID NO: 54305

SEQ ID NO: 215848 - DNA, 570 bp, Homo Sapiens
tcttggaatgtgaagcccaatgccagtcgggcagcccaggatagaagaaggtggtatccttataattactccagactctcctatccagcctgttgggaatggacccagtgatacaaacctgtcctggaattctacctggagaccagagctggcctgaaaattactggtgtgacttttaattagttcaggtctaatcaggtttctttattgttcccttatgtattcaagcttaaggaaaaattgcattgctgtttacctctttgctgataaatttgcagtaattacagcattgcaggaaaaacaatctgttattccagtcttaaatttttctaaaagaagacaatattttagaactgaagcattgagaacttcccttgcaaattatttttaaaattctatcttgtttttctatgtatttctttctgactagacttgtgatatgcgtgtgtttatgtacagaaatttttagtgtttttgttatgttctgttattgacccaaaggccatctttattttctataactgttcaaaatttatattaaaatctacttaggagataatttctttaaaa

SEQ ID NO: 215849 - DNA, 819 bp, Homo Sapiens; identical to SEQ ID NO: 43626

SEQ ID NO: 215850 - DNA, 1000 bp, Homo Sapiens
atgcattagctatttttgctaatgctctccctccctctaccctacccactgccaggccccagtgtgtgttgttcccctccctatgttcatgtgttctcattgttcagctcccacttataagtgagaacatgcagtatttggttttctgttcctgcgttagtttgctgaggataatggtttccagctccatccatgtycctgcagaggactgttgctttttatggctgcatagtattccatggtgtatatgtaccacatttgctttatccagtctgtcattgatgggcatttgggttgataaccatccatttttctttgtaagaaaaagatccaaaaacttcttgccatgtttggcacatctccaatacaaaccacgtgatataactggtttttttttttttagataatcccactttaaaacaagatatttaattgattgtttcaggtatgactgtyaggagcaaattatcttttccccgaagaacagccatggaaagggaatcactgtcaagagctttaacaacatcagttgtagtagtaataggtttcccatttatgttgacaattacatcgtgatctctcaatccagagctttgagcagctgttccttcaaccactttacatacataaaccccagaactcacatcagggaaatctggataatgcattttcaattcttcactaaggggcacagtgagggacagcatttgcagacccagatatttcttatttgaaaacgcctttcctttcatctggtgctcatggtattctgccaagaactgcctaactcgatctgaaggaattgcaaaggagattccatcagtyaccctcaatgaattgacgccaatyacatcaccatccaagttcaccagaggacmacagaattccatagttaattgtggcatcatctggmgtacataatctgaatcctyatcccagktytttgcccycgctgtttgkggtgaaattctgsagtgcgkgttykgmaraaatgggtgcc

SEQ ID NO: 215851 - DNA, 955 bp, Homo Sapiens
gatggcggcggctggggctggccgtctgaggcgggtggcatcggctctgctgctgcggasccccgcctgcccgcccgggagctgtcggccccggcccgactctatcacaagaaggttgttgatcattatgaaaatcctagaaacgtggggtcccttgacaagacatctaaaaatgttggaactggactggtgggggctccagcatgtggtgacgtaatgaaattacagattcaagtggatgaaaaggggaagattgtggatgctaggtttaaaacatttggctgtggttccgcaattgcctccagctcattagccactgaatgggtgaaaggaaagacggtggaggaagccttgactatcaaaaacacagatatcgccaaggagctctgccttcctcccgtgaaactgcactgctccatgctggctgaagatgcaatcaaggccgccctggctgattacaaattgaaacaagaacccaaaaaaggagaggcagagaagaaatgagccctccctcggcgaactccagcaggccacaccagctgtttcccacctgctgtgcagtcaccttagatgttcagaagccgcttcctctccactgaagagctatgagatacgcacaatacttgctgttcacgttatgactctcatgcaagcaaaatacacagtttcattgttctgaatcctgtggtttctttcagcccacttttatcgccttaacctagttaatgtatattttgaattgtgtgtatgacctcagaactgaaattgataatgaagttgcaagttttgatagcccgtgaagtgcataagtatctaattttacctgaattgatttggggggaaattaccagtagaatgccttggtctgaatatttgatagaacmaattgttgtacataaaacagatctgcgcatatatatatatgtwtaaaamataataaaatawtggaggatga

SEQ ID NO: 215852 - DNA, 563 bp, Homo Sapiens; identical to SEQ ID NO: 49266

SEQ ID NO: 215853 - DNA, 844 bp, Homo Sapiens; identical to SEQ ID NO: 44859

SEQ ID NO: 215854 - DNA, 768 bp, Homo Sapiens; identical to SEQ ID NO: 52419

SEQ ID NO: 215855 - DNA, 1000 bp, Homo Sapiens
gcagggggacgagatttggaatgccctgacagataattatgggaatgtgatgcctgtagactggaagtcatcgcatactaggaccttgcacttgcttactctgaacctctcagaaaaaggggtaagtgacagtttgctctttgatacatcagatgatgaagagctgagagaacagctggatatgcactcaatcatcgtctcctgtgttaatgatgaacccctcttcacggcagaccaggttattgaagaaattgaagaaatgatgcaggaatcaccggacccagaagatgatgaaacccctacacagtcagatcggctttcaatgctttcccaggaaattcaaactctcaagaggtctagtaccggcagttatgaagagagagtgaaaaggctctcagtgtctgagttaaatgaaatcctggaagaaattgagactgccattaaggagtactctgaggagctggtgcagcagttggctttacgagatgaactggagtttgaaaaggaagtgaaaaacagctttatttctgttcttattgaagtgcaaaacaaacagaaagagcacaaagaaacagcaaaaaagaaaaagaaactaaaaaatggcagctctcagaatgggaagaatgagagaagtcatatgcccggcacatatttgactacagtcattccttatgagaaaaaaacggaccaccgtctgttgaagatcttcaaatattaacaaaaattctttgtgccatgaaggaggacagtgaaaagttccgagcttgttaactgattatattctgaaagttctgtgtcctacatagagcagcaactttatctgcggtgggstcmagctagattycgrcagcttattctgagagctggctaccattaccctcttgctatkggaactcasacatttaacttggggttgattmrtawttamartctkrctamctaatycttatattwwaracaacggaawatgggcctatttkratytagrrtggtttgttaa

SEQ ID NO: 215856 - DNA, 841 bp, Homo Sapiens
tgcccacctcaccctcagctctkgcctyttactctaccctctaccatagttwtkgctcaktcactggctctgagcctccttatcctggttctggcctttggcatccccaggacccaaggcagtgatggaggggctcaggactgttgcctcaagtacagccaaaggaagattcccgccaaggttgtccgcagctaccggaagcaggaaccaagcttaggctgctccatcccagctatcctgttcttgccccgcaagcgctctcaggcagagctatgtgcagacccaaaggagctctgggtgcagcagctgatgcagcatctggacaagacaccatccccacagaaaccagcccagggctgcaggaaggacaggggggcctccaagactggcaagaaaggaaagggctccaaaggctgcaagaggactgagcggtcacagacccctaaagggccatagcccagtgagcagcctggagccctggagaccccaccagcctcaccagcgcttgaagcctgaacccaagatgcaagaaggaggctatgctcaggggccctggagcagccaccccatgctggccttgccacactctttctcctgctttaaccaccccatctgcattcccagctctaccctgcatggctgagctgcccacagcaggccgggtccagagagaccgaggagggagagtctcccagggagcatgagaggaggcagcaggactgtccccttgaaggagaatcatcaggaccctggacctgatacggctccccagtacaccccacctcttcccttgtaaatatgatttatacctaactgaataaaaagctgttctgtcttccca

SEQ ID NO: 215857 - DNA, 1000 bp, Homo Sapiens
  misc_feature (864)..(864): n is a, c, g, or t
  misc_feature (909)..(909): n is a, c, g, or t
tacagcatcttcatacaaacaacttgaaagaagaccaagtttaagtaagaatcttatgacatgtaaggmataacataaatgaagctattctttaaatagttgcattcatgtctaaagtacatttggttttctaaaaagaaaatgtacattcttgcccctggtgaatattttattggcatttacaacaaatggctaatacttttataactgattctcatagcttataaacattacatcaaagttacacaaagtaataacaataaacatatagcaccatttcctcttcaaagttctaacttataaaatamcgccccamacatggctggbcttggkggctcatgcctgtkatcccagcattttgcaaggbcgaggtggtgtcgggtcacctgaggtcaggggtttgagaccagcctgaccaacatggagaaaccccatctctacaaaattagctgggcgtggtggtgcattcctgtaatcgctgaggcaggagaattgcttgaaccagggaggcgaggttgcagtgagccgagatcgagctattgcactccagcctgggcaacaagagtgaaactccatctcaaaaaaataaaaataaaataawtccccaaacaataagtcagaactaatatatctttcaaagtgtagcagaataaatggctcagaactaagmaaattaattagaaacmttgcataggacagagcacttmccagaatagaaccmatcaacaaaawratwcaaatcccctraagagtaagctgagrggwactggtgatagcaaaaaaaraacawaaattttttycgaaawaaaaaaawawaactmaatamatarttcctcgtccamactgtrgaagtgcaaatgccgntttayttccgcccmmmagcttwcttgtgtrtaacctmctggtatnmccmatatwtactmtggtaagtacctawgaggattgcmcatccatttawtctccmsyttttgaccmggtacttcmwaaragakgaagaaaa

SEQ ID NO: 215858 - DNA, 716 bp, Homo Sapiens; identical to SEQ ID NO: 52959

SEQ ID NO: 215859 - DNA, 903 bp, Homo Sapiens; identical to SEQ ID NO: 52594

SEQ ID NO: 215860 - DNA, 1000 bp, Homo Sapiens
ggctgtgttatatataggaagtaaattttctcaactatacccagatatgtgtttgaaaagtaaaaccctccctactttttggctatagtgtattcctggaaactgcataggaaagcaaacatgggaagatgattgttttattgttttctacttttaaatggtatgggaaccttgagatagcaaaatgctgcctagtactatgccaaatacagtcaacttttgatgctttctgaggaaaagaaaactggtaaactgatggatggatgagttgaagttaaatatagtatagtaatttgtatagcctcaggtgagcagcttgccaaaacaaacaaacaaacaaacaaacaggggtgagggatttggaaatatagtaacaacaatgataagagactgtgggaagaaatgagagttgctgccatcagatccaatgcagtggggctcagatttaacactgataatgaggttcaaagcttaaggagaaaagactataaatgtgagaagagaagccactaacgattcacagtaagtggttttagtagattcgctagctatacagttataaaatcttaaggttttttcttaagcattccctgagaaaaatcttaagattttagacacttttctagtcaattatttacaataggtttattgattaattaactttgttttagttcacttcctattgtcaccttctatagtttctggtaatcataacatattcataaagagtaggctgggcgcagtggctcctgcctgtaatcccagcactttgagaggccgaggcgggtggatcacgaggtcaagagttcaagaccagcctggccaagatggtaaaatcccgtctctacaaaaaatagaaaaagaattagccgggcatggtggcaggtgcctgtaatcccagctgcttgggaggctgaggcagagaattgcttgaaccggggaggcagaggttgcagtgagccgagattgcaccactgtacttcagacaagactctgtctc

SEQ ID NO: 215861 - DNA, 485 bp, Homo Sapiens
aagcaattgctgttaaaatcttatttctgcaatttttacaaaagcctgttaccatatgaacacatatccatcgagccctctatattattagagcacaggaagagggccctgtaggtgaggaaccttgaagtctaagtttcagtagtgtcataagtccacccctggatgggactctcaatttccagaataaaatggtaaactagaagcagaataactgagttatgtgaggaaagtaaagcccaaggatcttgaaagaatctaccagggtagaggaagtatgaggcatacaaatgggatgactgcatcccaggagagaagatggcagagagttcgggtgcctagaaaagggagagtttgtaaaattacgtggcaaaaaaaaaaaaaaaaaaagtagacagacacaacactgattcccttagggaataatggaggttgtctaggaagtacagaaaaggacctgtcttcttcccaccccatccctgagt

SEQ ID NO: 215862 - DNA, 405 bp, Homo Sapiens; identical to SEQ ID NO: 61347

SEQ ID NO: 215863 - DNA, 512 bp, Homo Sapiens
ttttttttttttttttttttttttgacaaaagcaaccaactctttattaaaaggcattaaaaacaaaacaaaacaaaacaaatacaattctgattaaaaagagacagacaccatgtccacagatgggaagaacttatattctaaagatgttaatttccccttcaatgcaattcttctcaaacttccaacagacattttgttcacagaactttgacaagctgattataaaatgtacctgaaaaagtaaatgtgcattatgaccaagacaattttaaaaaagaataaggggctgcgcacggtggctcatgcctataatcccagcaaatatttattgagtacctcccagtgatggcttgagaacagatgaggtcacctgccgagtgctaagcctcccaggtttgggtgggtgggtcgttgcatgcttgctatccaaggctaagcccctatctgtccatctagtgccgtccactccaggccacttgggacacaggccatcacttatccctgttcgc

SEQ ID NO: 215864 - DNA, 644 bp, Homo Sapiens
catgatgtaattagattatattttattagacattctttacaaatttaaaatactgttatttttacatgcacaaaggaaaatcaatttggataattatatttaggcattcattaaaatcaaccacaaaatagagacacttcattgtgtcatttatcaacatacttgatatgtatatctaaagtgcattatgttacaaaaaatatagaaattcagcagcaccaagatacatttacaaaataaatacatcaatggacaaaataaattatggtaaatgtgataataataattggattagccttggcaaaaaaaaaaatattcacaatgaccaatgtgcagtttcatagagcaatgggggagacagttttattccaatgcatttacagtatttacagacaataaatatttctaatactttccatatgttcactattacagaatcctgcaatatgtccttggaaggtctctgctgaaaatttcaatgcctccgtgaatcgagctccagcgacgtggggggagtgcaagacaggtggtccccttctagcccactcccagtcacttcagagtctaaccaggcaaaacgagggtcgccgttttcttttcctggtccctgcgtttccgggcttgcccttcttttctttcccagg

SEQ ID NO: 215865 - DNA, 438 bp, Homo Sapiens
ttatcactggataatattccactgtatggatgtaccacagtattgctctcaatcatattctattgaccaaagtaagccacatggcaaccctgacttcaagggagggaagggttatccaatcatataattggaagaagaaaaagtagaactattttgtgagcagcactaattaacccttttgcttccatgtcttgaatgaagtaacaatgttatgctcacagtcaaatctttttcagggtaagtgagagagtttcaatttaacgacaacttggacccccaatttttgctatgaagaaagtaataaaaggagccagaacactcctcatatattacaaaaaaatctcaatatgatctcaaagcttggctgcaggctgctcacagatcctctgtgtcctccctgaataccatgtaagtgacagcgtctttggagtcctaaag

SEQ ID NO: 215866 - DNA, 928 bp, Homo Sapiens
gccgtcctgtgcacctggcctgtgcgcgtgcccgctgctcggcttcacccagactaaggcgcgggcagctgcgggaacaggcggggtgggcggagggagaccgggaggcacgggcgccctgtgcgcggaggaggtgaaggcggccggggccgggacgccatgtccatggaggaccccttctttgtggtgaaaggagaggtacagaaagcagtcaacactgcccagggattgtttcagagatggacagagctcctccaggacccctccacagcaacaagggaagaaatcgactggaccaccaacgagctgagaaataacctccggagcatagagtgggatctagaggaccttgatgaaaccatcagcatagttgaagcaaatcctagaaaatttaaccttgatgcaactgaattgagtataagaaaagccttcattacaagtactcggcaagttgtcagggacatgaaagatcagatgtcaacttcatctgtgcaggcattagctgaaagaaaaaatagacaggcactgctgggagacagtggcagccagaactggagcactggaacaacagataaatatgggcgtctggaccgagagctccagagagccaattctcatttcattgaggagcagcaggcacagcagcagttgatcgtggaacagcaggatgagcagttggagctggtctctggcagcatcggggtgctgaagaacatgtcccagcgcatcggaggggagctggaggaacaggcagttatgttggaagatttctctcacgaattggagagcactcagtcccggctggacaatgtgatgaagaaacttgcaaaagtatctcatatgaccagtgatcggcgccaatggtgtgccatagccatcctctttgcagtcctgttggttgtgctcatcctcttcttagtgctgtgac

SEQ ID NO: 215867 - DNA, 645 bp, Homo Sapiens; identical to SEQ ID NO: 41326

SEQ ID NO: 215868 - DNA, 1000 bp, Homo Sapiens
tattacatccctataaaataatcccagtgattttccctcctgtgtgttttcgtcttgcttcttcatkgtccatgatgccagctgaggttgtcagtacaatgaaactakggbgkkkkkkkrgaaagtgctggtaagtttaatagttcaacatagtgccttctagtgcagaaaaacatcaacactcatcagtggttaagggcgctttcctgtggggcacataggaactgacagtgcctacatgagctggtgcctcatgtagcgtatgagccatgactcctgcaacccaaagagccaaatccagagagcccagccacacaatcacacagccctgacttctgcctacaccatgaaacaaactgcactgaaaacaaaggctgggaactcctttaaatttaaatgtcactttctgctctcaggtaaggagacttgaaagtattcgtataaacttgagtttgaattgtgtttctgccatgtactgtataatagctaaactattatatggagacgttcatttgtacaatgagtggctgcttcatgagttactgtggggatcactgtaacaagcatatagtatgcaaatgtgcggcattaaaatcagtatcataattacaaagagaaatgattttggtgagaataccgtacctgtaatacagcaaccatgaagtgagaatactttcaaccaaggcaccagacgcataatttggagggtataaattcttaaccacaaagatacacatttactgtgtcagctcataaagtgctttaccaaaattaaatcaggtgataaacagaggaactattaccacttttacggatgaagaaatcaaggctgtgacttgcccaagatctcatggctttaaagcagaaaaacaagggtttgaactcagataggcttttaaggacaagayyccaaactaagtttcccaaagcctagsttagamtgmttctggcctcwcckggatmcaggsactatctcagtkascaaaggcagaatgaagtg

SEQ ID NO: 215869 - DNA, 577 bp, Homo Sapiens
  misc_feature (297)..(297): n is a, c, g, or t
gatcatttacaagtttttattcattgcaaacagaattcaaatgtcaataaatggcaatttgagaacactgagacattttaaaagacaacctgatcaggatcaggtaatatttcagtaacataatcaataaattacaataacatccaactgaatagaaacaaacaaaaacagaaaataatttcaaatgggctaaaagcaagatatacattctattttttctaacttttgaccacagtctaaagtttccttttcatctttctctaggaactttcaaaatgcttatttattaacaaacanaaaaaaccccctttgactattttagaaactaagcaggctgcataaaatagtgtttaaaagtaaagaatctggttcaaatcacaatttccctatttccttgggtaaattattcaacttatctaacccagtcattttcttgcttataaatacctacacactgtggagttatgagtgggttaaagcatgcatgtgatggatgcacttagtgtctgctgtagagtaagtactcaaaaaaatagctgccattatcattatgttatttttatgaatacatcttact

SEQ ID NO: 215870 - DNA, 680 bp, Homo Sapiens; identical to SEQ ID NO: 44087

SEQ ID NO: 215871 - DNA, 1000 bp, Homo Sapiens
tataaagctgaaattctcaaaaaattggagcatcagagattgatagaggcagaaaggaagcggattgctcagatgcgccacagcagctagaatcggagcagtttctgtttttcgaagatcaactcaagaagcaagagttagcccgaggtcaaatgcgaagtcagcaaacctcagggctgtcagagcagattgatgggagcgctttgtcctgcttttccacacaccagaacaattccttgctgaatgtatttgcagatcaacctaataaaagtgatgcaaccaattatgctagccactctcctcctgtaaacagggccttaacgccagcygctactctaagtgctgttcagaatttagtggttgaaggactgcgatgtgtagttttgccagaagatctttgccacaaatttctgcaactggcagaatctaatacagtgagaggaatagaaacctgtggaatactctgtggaaaactgacacataatgaatttactattacccatgtaattgtgccaaagcagtytgcgggaccagactattgtgacatggagaatgtagaggaattattcaatgttcaggatcaacatgatctcctcactctaggatggatccatacacatcccactcaaactgcatttttatccagcgttgatcttcacactcactgttcctatcaactcatgttgccagaggccattgccattgtttgctcaccaaagcataaagacactggcatcttcaggctcaccaatgctggcatgcttgaggtttctgcttgtaaaaaaaagggctttcatccacacaccaaggagcccaggctgttcagtatatgcaaacatgtkttggtaaaagacataaaaataattgtgttggatctgaggtgatatgttctgaatgtwagcccgtcacatcagaaactactcatggmmtgtggttgcggatttyytwagagtttcagaatgatkatatttatattttmttttagakraaagctgatatt

SEQ ID NO: 215872 - DNA, 1000 bp, Homo Sapiens
gtgccatggcgccasgaaagccacgaacgtgtgcggctgctactaggctccacagcgctgtggctttcgcagctcggctccgggacggtcgccgcgtccaagtcggtgactgcccacttggccgcgaagtggcccgagaccccgctgctgctggaggcaagtgaatttatggcagaagaaagtaatgaaaaattttggcagtttttggaaactgtgcaagaattagcaatttataagcaaacagaatcagattattcttattacaacttaatcctgaagaaagctggacagtttctagacaatttacacatcaaccttttaaagtttgctttctctataagggcatactccccagctattcagatgtttcagcagattgcagctgatgagccaccaccagatggttgtaatgcatttgtggttattcataagaagcacacctgtaaaattaatgagattaaaaagctgctgaagaaagctgcttcaaggactagaccttatctatttaaaggagatcacaaatttcctacaaacaaagagaacttaccagtggtgattctctatgccgaaatgggtactagaacatttagtgcatttcacaaagtattgtctgaaaaagctcaaaatgaggaaattctgtatgttcttcgccattatattcagaaaccaagctcacggaaaatgtacttatctgggtatggtgtggagctagcaattaagagtacagaatacaaagcactgggatgatacccaagttaaaactgtgactaatactactgtagaggatgagactgaaacaaatgaagttcaaggatttctctttggggaactaaaagaaatatattcagatcttagagataatctgacagcattccaaaaatacctgattgagagtwacaaacaatgatgcctttgaaagyytgggamtamarwtctgttaagmtattgctgttymttgataatgtttatgggamatcaatggggggatgcggtttmaaaa

SEQ ID NO: 215873 - DNA, 986 bp, Homo Sapiens; identical to SEQ ID NO: 47154

SEQ ID NO: 215874 - DNA, 967 bp, Homo Sapiens; identical to SEQ ID NO: 52458

SEQ ID NO: 215875 - DNA, 1000 bp, Homo Sapiens
  misc_feature (3)..(3): n is a, c, g, or t
  misc_feature (8)..(8): n is a, c, g, or t
gtnttcanatgcacactccaggcaattctgatgcacatggtcatgaagccccactctgagagtcatgttttggccacctgatttctagtaaacaaggtctggcagggaaatttcccatcttggttattatttatttagagtgtctcaatctctcacaaggaagcggtgtgatgrcatgatcacagctcactgcaacaaccgcctcccaagctcaagtaatcctcccacctcagcctcctgagtagctaggactacaggtatgcgccaccatgctaggctaatttttgtattttttgtagacaggattttgccatgttacccaggctggtttcaaactcctgggctcaagtgatccacctgcctcggcctcgcaaagtgctgggattacaagtgttggcaactgcacccggctccatcttggttattcatagagtttcttgcccatgagctttctcatgttgaataaggaaagtatcataactggaagcttttccacatttgttaacattcacagggcttctctccagtatgaattctctgctgcctagtaagttgacaccgttggctaaaggctttctcgcaatggtcacattcatagggtttgcctccagtgtgtgtcctctcgtgtttactaagggttgagcgatcattgaaggctttcccacaatcaatgcattcgtagggcttttctccaggatatgtcctctgatgttcaatgagtcacaaccgctggcttaatacacgtcacactgatagctcttcccaccgacatgcgttctctggtgcatgatgaggggagactctggatgaaagctttcccacaatgactgcactyctaaggtttctctccagtatgtgtccgccgatgcactacaagttgagatcgctgccggargrtttccacagtamtacatttatagggttctctcagatgaatctgtgatgggaagaaggtagrsycctgaaaggctttccmcmtgmtacmtcaaaagttytcaca

SEQ ID NO: 215876 - DNA, 1000 bp, Homo Sapiens
gcgcggcctcagggcgggaagatgccgcgcgtcgtgcccgaccagagaagcaagttcgagaacgaggagttttttaggaagctgagccgcgagtgtgagattaagtacacgggcttcagggaccggccccacgaggaacgccaggcacgcttccagaacgcctgccgcgacggccgctcggaaatcgcttttgtggccacaggaaccaatctgtctctccagttttttccggccagctggcagggagaacagcgacaaacacctagccgagagtatgtcgacttagaaagagaagcaggcaaggtatatttgaaggctcccatgattctgaatggagtctgtgttatctggaaaggctggattgatctccaaagactggatggtatgggctgtctggagtttgatgaggagcgagcccagcaggaggatgcattagcacaacaggcctttgaagaggctcggagaaggacacgcgaatttgaagatagagacaggtctcatcgggaggaaatggaggcaagaagacaacaagaccctagtcctggttccaatttaggtggtggtgatgacctcaaacttcgttaattaatagcacagcagatgtgtgctgcccatctttacatacacattgcttctagttggcagaaataattgattaaaagaccagaaactgtgataactggaggtactacggtctatttctcaaccttaggcagtaatagacatcacaaactgccatggttttgcactatgattataatacctgcatttctaattttttaagcatgtagccagtaataatttgaagttttttttctatgcaagcttaccttgttggcattatttttagggagttgaamtatcaactgtaaactccttttctycactttaatttaaaagtcatgtcattaaaaaaartcaagaattaaattkttyagakggtctgtctaatcattttctdtttttttttttmttytagakgtttggtatmarctcattt

SEQ ID NO: 215877 - DNA, 874 bp, Homo Sapiens; identical to SEQ ID NO: 44855

SEQ ID NO: 215878 - DNA, 522 bp, Homo Sapiens
aaaaaaagatatatggttttactttggtctccaaaacagttgccagtttgaactttattctgccagcaagtatttggtttggctcagcagggctcaagttgaaaaaatatttgcccattccaaaaagatttaacgagctttgctgcaaatgctggtgccatttggcacatcacagggactgtggcacagcaaagagaactctctcaaccacagattttatttgcccaaggtagccagcactgggagctcagttgattcctcgggtcaagaagctgcaagtcaaatgcgtgaagtttccaagagaaagtgaccaaagcaggcatgagaaaactcttgctgacattgaaaaggaagtcactgggtctgactccaccctgcacaggaattgatggctaactttcagaactgtcaacaacatcctcacaccaaccatcagatacagtctctaatgctgccagtcagcagaccagattaatctccaacttctagcacaagctatccttatccaatatcagatgctag

SEQ ID NO: 215879 - DNA, 495 bp, Homo Sapiens
cgtaaagacagcgtcttgataggttgcccaggctgctctgggactcttggcctcaagcaatcttcctacctccacctccccagttgttgcgccatggtgcctagccaagatgagactctcattcaaacagtcaaaaacccgacttaaagtagctcagacacgcatagaatggattggctgctgttgtggactctccgagggtggctccatctgcaggcactgttggaaccagtacccaaggatgatgtcccagcatctgtctctccgggatctcacctttgtaccctgccctcactggctgcgtctcatttctgcttccctctgtgtggcttcctgttggtggcagggtgaggcccccaggacagcaggcagcctcagcctcaccctttcccagtactgagacccagaatctcactgcggactccttgagacaatcccagggaaggctttgattggcttagcttgaggcatcactgctcatccctggaccattca

SEQ ID NO: 215880 - DNA, 413 bp, Homo Sapiens
  misc_feature (20)..(20): n is a, c, g, or t
ttttttttttttctttaggnaattttttattaatatttcaatgttggtagaatactgctacatacccagaattcaggattttctactatattctattctagtacaaaatgagattttttcccctcaaaatcagttcacaataacttctaatacatctgttatgaaaaatgcttaattcttcatataactatgtgtcttatatatagggtgatcgtacaatttattatacaaaatgggacatacctgagagtgaaaggaagcactattaaaaattaaggtgggactacaggcatgaaaccagaactgtcttaggccaactaggacatatgcttatcatctttatatacccggtgacctcctatgtcagcaaataaagaatatatactaatatcaatagatcaccatgctgtact

SEQ ID NO: 215881 - DNA, 421 bp, Homo Sapiens; identical to SEQ ID NO: 60452

SEQ ID NO: 215882 - DNA, 784 bp, Homo Sapiens; identical to SEQ ID NO: 41078

SEQ ID NO: 215883 - DNA, 1000 bp, Homo Sapiens
actgtsgggtcaccagckgtggagcgtgcvggggggacaacctgagcttttgtttcgatgtttctggttgatttagcctttcgagtgcttgtcatgctcagtgggagaagtccaaacctgatctgactggatgccagtggcaggatgttatggggttcttgggagttgaacgtactgctccggggggcgagctgattctctgtaccagtcaccaatccaaacagaacagaagttcgctgcaccaggcgatgaaggttgctgttgaggtgtggcgtgaaaacgtccaggtcaaatggatcaatgagggcttccaggtggtcagtcactttctcaattctggagtctggcttgctccggccactcttcacctcgtcacccttggctgtcagaacaatgttgaggtaacgcagatcataaagcagctgcagcgcccggttctgggtgactggaaatgcaccttctttcttaatctgtttttcttcggagagtttctcataggcagctactacttgaaccatacagcttttcagcatctcctgtaatgtcacctttggcaaggcatggcctccaacccgattaatttcctggcataaactaaacaggaaggactgtacataccaggacggctgtgcagggagtcggatcctggatgtgacactgctgccagactctgcctcctcctgaatttctagctcatcccagctggtggctgtggccagaactgagccagcatcatctagaagtaatgactgggtgaatccatgaatcaaaactttcacaactgcactgctccagacctggtagcccatcacgctctgctggaggagtacttctttaacctcttgccacttggcctgtgtaggaatgatttcctgagttttcacctttccctgttttctcagagcctaaactcccttkstgggttctctgascctctgatttcccaggaksactgttcagatgggggmmastctcccagggmtgcarakytggcatgaaa

SEQ ID NO: 215884 - DNA, 1000 bp, Homo Sapiens
tgctgaggggtccccgaggagaggcgactgtggccaggctkwggggcactggctgaggcggtaccacatgcttccccgcgcctggggggggttgcgccctccccagttttctccaatttcagcaacactgtggttgttgtaaggggcaggaaggaggcggtcctgcagaatacagcgtgctgggggcagaggccagtcccaagtccagcagagagagtccccagcccccggcgcgggcaagacgcagtaagggacattccctgaaaatacactggtgtttcagacacagtcacttggctgcycactactatccagaaccaaaagatgtcgcaaaaaactttttggcagtccatcagcaaagaggatcctttcctttggaaggacctcgcctggttgggagatgacagtctctaggatgaagcctggaagtcggagccgacgctgcggtccccacccacgcctgccatggagcacgccggggcagtggcagggctgagagtgggcgagaggaccggcccgtagacgggggctgtaggtgactcggcctctgtaggagctgctgctgctgccgataggagtccaccagtggctgcggcaccaactccatcagctccaggctctctttcagcttcatcaggatctcaaagttctcccggcctcgcacctkaaggtagtacgtgtcctcgtctccatgccgccgcttcttcacaccggcaccaagggcggggacggcagggggggctctgcttgaaggcacgcttkctggcggccccgttcttggcggastctcgttcagggcctgctgcycccggtagtggtcctcatcagcttttcggtcgcggscaggacaggcgcagatgcggccctcaaaggaccggcggcccagcacctgcccatcccgcatctccagggtgatgatgawgaggatgggcgccggttcatgcccctamamactgctgtgaaaatgaagtgtwcaggatgtggtgatccgtcccamctg

SEQ ID NO: 215885 - DNA, 907 bp, Homo Sapiens
  misc_feature (14)..(14): n is a, c, g, or t
  misc_feature (19)..(19): n is a, c, g, or t
  misc_feature (36)..(36): n is a, c, g, or t
  misc_feature (64)..(64): n is a, c, g, or t
  misc_feature (612)..(612): n is a, c, g, or t
  misc_feature (647)..(647): n is a, c, g, or t
  misc_feature (703)..(703): n is a, c, g, or t
  misc_feature (728)..(728): n is a, c, g, or t
  misc_feature (887)..(887): n is a, c, g, or t
taagmtggagtcantggvngcatacatagctcaatnmaacctccacctcccaggctcaagaganatctcccgcctcagcctcccgaryagcctgggattacacggcgcctgccaccacgcccagctaattttttgtattttcagtagagacagggtttcaccatgttggccaggctggtctcgaactcctgacctcatgattcacccacctcagcctcccagagtgttgggaccacaggcgtgagcaccgtgcccggccaagatgaacattttttaaaaccaatttttcaggtataacataagawttctagccaaaggaaaattttgttgtattaattctaacatttgctgtgatttggtattatgtggtatttcttttgtgctccaaccaaaatcatgctagatttagatgccaataaatgcacaatttgaattgaaaacagtctttttacctcccaaataatttatgccataaagtgactgacctccagccatagccaagatctcactttcttttttattttttatttatttttaatttttttttagatctcactttctaggtgagtttaatgttcctttccttacatacctgaamtgmctgtyttcgtntgtggtgggcmtttgtggmtmatttgttttggatntttttaaaawaawttaatttmtttgtmatmmattahatttcawgawagggtgtttnahatattttmhatcaacatttgtgntatgtcaathtcamacaaatcamamamamamwthayayacacacacacaggacwywtatttcaatttccttgthtcattttmacatttttgctttcmawggcattggcamtgttgttggycawgtcaaggtyatgttttmattttcacatgtsagggtntwtgttcagccacaattttt

SEQ ID NO: 215886 - DNA, 1000 bp, Homo Sapiens
cccccccaccaccacttctacccaacagccccttgccagggagcccttggctgaagcctggacgctgtccctgaggtgaccccagggctcaggagaaacggtggtccaggtctctctgggggctagcagagtatgagtaggccttgcccaataccaagcggtcccggagcagcttgaagaaggcatagtagttgctgaagaggatgagggccagcgagatggtctggtgccacttttcagaggacattagggagtacagctgatagacaatgacagcgccctccagcagcaggaggatgttgaggatccgcaggggtttgctgaaaaagaaatggaagcggaagtgggagacgtcagaggggatagccacgttgtagtggcctacggctttgtagacgttcttgctgtgcttcaccagcacgccctgcggccacatgcattcttcagtccacgggtgctgcagcacgttggagcacagcgctgggtccaccttctgccaacagcccagatgggcggcggccttgtgcagcaggtcacagtagctggcaggcagcaggtgctgcatgaggatcacggaggtgctgatggacaccagcaggaagagttcacaggaccagcgcttgtcatagtaatgtgtgttcttcacgaaccagacaggcacaaaggccacatagtaggcgctcagcatggagctgacgagcacttccttcatgcgccagttgaagtccatcttgaggaactccacctcactgcggatgaggctgggtgacaggcagcaggcatgggtgggcatggcgtccgggccatacagctgtcttgtgtgctgcttccacgtctcccgcagtgtcaggaggtagtcccggctctttgccaggccactgaccgcctcccgggggcccatggaggccatgtggttgaagaggcttgtcttgcggaggtcgcaattcagctgcaggamggaatgtacatcccaacggatagcagaggacaggaggtyagg

SEQ ID NO: 215887 - DNA, 997 bp, Homo Sapiens
tgaaaaacatctaggtaggccgasagccttgactcaccttgccgaastcctgaagaatggaaaaaagacaaatgaatcttcaatatcggtttttcacctcaggaaattatttattaaaagttttcatcattattatttaggtatcttgattctccatgcttcaagwcaaaaaaatcttcagcgttaagtccgtatctctctagagcttcattcagcttcactggaggctctaagttatgctcatttkctaaggyaaaakttccccagtgaattgccatagatttctttgtttggacatcagtgtgaatccttacagcttcttctgggtctacatgctggtatttyataaacyacctcggttcataagctccgatrggaatagactgaccaggtcaaaagatccaaatctttttcctatctcttcaaaagcagggcaataaccagtatctcctgcgaaaaaaaatcgattccaaggcmccaagacagaccagctgccccatagcaccttgttgtmatccatwagagtccttttacaccagtrctgggaaggtgtaaagamaaaagtgaccttatcatgtccggggacacaattctcctcccaccagtccaactcaatcacattctcacagccacatttttgcatccagtcaaggagaccmaaaggaacaaaccatmtcaactcawtaccaaatcgctcattcaaagcaawraaaaaattgtartacaaawggwcatagtrgttgtgactrataaggaamgcawctawaaaaaaaaatmacwtatwrtrmamggggaacgacgaactcgctttggacccctgttctgcgatggtgaagcacgmgagctaaagatgggatccgtgagayatatgagctcatcmatttcaacattamcgtggcatgtactgmcatgtgactcttaagccagcttcctcactcarcttcttaaggktagtgataaatctggataagcctgggggtcttawytagttctcttt

SEQ ID NO: 215888 - DNA, 1000 bp, Homo Sapiens
  misc_feature (15)..(15): n is a, c, g, or t
aatcattaaatactnttatatgtttccaattcactgatttaaaggcatatagatttaatttttaaatacactttcaaagctgttacgcacagttccatagtccaggtggtcaatttcttcctctcaaagttagaaagcacttgaaggacacgggattcaaaaaaacctttattaatttttaacactttctttttccttccttaggatcttgttttggtctagcagatcgagcaaactgaaccaccatgggttttccaaaaagcacatatccattagcttcctttaaggcttttgctgctgctttttcattaggaagtccaatgaaagcttgtcctttcatacgaccttctttcatcaaacgtatatcaaacatgatccgctgtgtttctgatgaaaagtcaacatatcttccaaaaatatatttaaggtccttttcttgaacatgtttagctaaattctttacataaattctacagtttggttcacccggttcataacttctgaaaactgaaagtgtttccatttcttctctagaaattctgcccttttccaattcccttctagaaatacattctgaaggcatttcatcagagtcttctttaatctcctctgtgatgtccaaattaggtttggggaagatttttccaaatcctatattggatgcatcaacttcagtagcaggtaaatcatgatttttttcctcacaattttgttccttttctaaatctttcttaaatgcagctggcatgtsggtagatatatggaattcaattcttttgttacctacaggttgtggktggtcaaatacatctgaaggtaacagcactggatgtaaactgctgtgtgaaggacacaaaggtgtattcaacatatcctttatttttctcttttttctcacatggsgctgctttattgttttaggtcttttggggtgaagatttgstagtscattaatttgttcattctctgtsgggctcatcatcagtgtttcatatctgat

SEQ ID NO: 215889 - DNA, 1000 bp, Homo Sapiens
ccagaatggacattagcctttggagccaggtagtaagtggaaggggtaccaggggttgctggtgatgttctgtttcatgatttggatgctggttactcggggtaaattcattttgtgaaaattcactgagctttacacttatggtttgtgcttttttttttttttttgcatatatgtcatccttcaacaaacacttaaaaaatgtttgaaaaccccatcaattcagtcagactctttgggtgggagcaagaaccaggcatcagtattttttaatatcccagatgatggtaatadgcagcsaggatttaaagkcactggtttaatatcttgggaaaagcagatccactcaagacctcacagggtcctgacaaaggccacttccagcycagtggagtgagacactggggtgggaagatgtccattttttggatgtgggtcagtctcttgcacaggcagaggtattgcagcatgctgttgtaatgtgtatcttccttggcagtgtctgttgaaagctggttgcatcagtttgtaatggggtgtaatggcaacaaggtgggccvccccccccaggaagtggatmactgagcacagcttctacagggccatttgtagagaggtggcagctgggcttcccaggggctgccacccagggcagagccagtgctgaggctctgacaacctcggcagggtggggagaaggccagactcagggtgtttatgtttgtgggtaatgacagtcagctctgggctccagatgatgcttactccctggcctctgtgttcagattaggaacttgcaacatcttgctgaggaccatgtsaggctcagctctaagtgctgtggctgaagaatttcctcctctctgtgtggtwagtggcagctccctagcaatggctgavctctarcatactctgtyaamtacaggmgctgggacagaaagacatgggctcmcagamagtatcccacctgggcctgtcacccccmvaatscatggcatga

SEQ ID NO: 215890 - DNA, 1000 bp, Homo Sapiens
gctgacttacatttcagtatgtgacaaaaattcaaacccaaatgcatctagctcactcagtttcagacaggtcctatgttcagcccctaaacgaatggcacaatgccaccaattttgggattcctgagtttggttcccttaagttctcagagttttcccaactctcaaaaccaaagcatcatgggagtgacagggccactggcaagactttttgccagtcagcctagttcttcttttaagatgcagtagtctcaaagcttaaagtcagaaaatcttgcaatacaagagtaactgcaagaacatataaagaaggaaaagaaaggacggggtttctagttgctaagatttgccaaacatggctacaaaactggtaaacaaacctttcttgagtgcaaagtccattagcccaacttgccatgaagagatttgaaataaaaatgaacaaatcaatttctgttgtagatacaaagcgaaaaaataaaattcaatcaatatattgaatttctctgagtttatcactagaactatttcaaaaggatgatcggggatagaatagaaatctagtcattcaaatgggaaggtcttggatgggtgccataaactcagctgtgaagattcaggaaaggaaaaataagtctggtcagcatcaggtaatctcagacagaaggratcaggraacgaatcagcctgcctcgggaaggaaatacaggkctaccatttttaggccaaagacacattcattcagggktgkgtgtaaamcaactcttgtawacaaaataacttcccatcagacatgcatgttcccaggaaaaaaatactgcrgcatgcccccctccccayattagckaataaaaccttcttgcagtacataaggaamctwgttctgtatraatatcataatttkgtwttcatgcccsacgrcccamacttccatrgtgggktaamatttkagggaaagaacatcyctaacccatgcctggaccakttctggcggwtcttc

SEQ ID NO: 215891 - DNA, 1000 bp, Homo Sapiens
cactcagtaagtccccttgcccaggttttgctcttggagggaagaaagcagaagaaaagatgcaggactgagatgattgtcctgaccccgctacccccaagtgtaagagaagtcctggatggaatgggtggtgattccaatgagggatgggaacctctttccaaggcacaaggggccatcttctcaacatgctgctttttcagatttgggtagtatgttggccaggagctgggggctgcagcgcctccagctgactgaggaggagaggaatgtgaggacgctgatgcgggtccacggtcatcatcgagttcaggagctgccgcaatgctgaagaatgcctggggctttgtgggatgctgagttggttctgcacagcaagggccacactgtcacccttttggaacaccatgtcataagggccttccccaaacatcatggcatatagcacgcagcctagggaccagacatcagtccgctcatcgatgacacagtgactctgcacagagaagagctctggggctcggtaggagatggtgcaccgctgggctgcccagtcctgcagggtcagagcctggcgggagcctccacatggatgcatgcttgattcatggaacccaagtccattaaaactggctgcccctcatctccaagcaatatattggtgggcttcaagtctctgtgggcataacccttggcatgaatggcctcaaggcctctgcagatccccagcagcagccaaaggatttgatcctcggtcaggaagttgcctttgtccttcagcctttctatctcattccacagcgtacctctcttgaagaatggtagcagcagccaggcctcatgcttagcaccccgttccctcagacagtaagccacgaggsgarggatgttggggtgattgaagagggatgcatgtcggctctcgsygggsctcctccggtcytctgctcgtgacaaggattgctyagggggtraagtktcmayatgtaccttcwctagg

SEQ ID NO: 215892 - DNA, 1000 bp, Homo Sapiens
ttagactccattcttgccaactgcaktagcacaagtgtgcctggccttgctcacattgcattcctttctcttgctttctgccttctctgatgctgagaggaaaatggtgtagaccttacactgccagaaaaatctcaagagagtctcaaaacaaaatgtatgctgttccacaattagtcacagctgcaggggaaatgcataaagcaaacattaaatgaaagcactctctaagaattcacctcagactggaattagagactttatccacgtgggacagagtacgcggggttcttgcactcctgactggcctcctccagccaacttccctctgtttaccaggccccaaactattctgggtttgacaggcatgcagatgtgcggagaggagaagaggaccgtgcaggcttkaagcagcaggatactgatcactactggctctgctttgaggggtcacggtcacggctgtcaggacacaaagatgggagaggagctccctgcacaaagcccttgtccaccctgcctggayayaggtyyttaaggccccttcccagtttctcttctgaacggacagcccagcccttgtgggatggcgttagcccgcagatgggaaggcagagcagaggcgttacaggggtaggtgggaaaacaggacgtccccagggcagaaagtaataggagcgattggcctcgcccagcaccccagcaccctatagataataggtgcttgctaaacagttgcaggaagcacaggcagatggggcatcagagggccctaagcacagagcacgaaagggggacagttcatgggatgataccaagtcggtgtacagcagacagcacaggctgtgaccgtttgctgaggggctgcgcacagaggaggaggaagcccaagctttcaacaacctggctttatgagcggggggatcaratctggcttgtwaaramaygccarargwtctggtyaaaaaaaraarmccggkktgtcmackgggccggcttt

SEQ ID NO: 215893 - DNA, 1000 bp, Homo Sapiens
  misc_feature (8)..(8): n is a, c, g, or t
  misc_feature (17)..(17): n is a, c, g, or t
  misc_feature (27)..(27): n is a, c, g, or t
  misc_feature (29)..(29): n is a, c, g, or t
ggttgaantgagttttnagatttcagntnactgcaacctccacctccctggttacaagcgattctcccacctcagcctacccgagtatccgggattacaggcatgtgaccaccacacctggctgattttatgtattttattggtagagacaaggtttcaccatgttggccargctggtctcaaattcctggcctmmagcagtgctcctgtcttggcctcccaaagacgttgggattataggcaatgaaccaccamamccaaatactactgtgtraaatttaatatccaatgttttttcttctattacaaaagtatctttacaaacwtatcttaccctaagccattgaaattgttccatatttaagttgtactgaaaaaggatccaaatttacagtttctgctcagmtgtgtagcaaagtattaaggaaagggttacatgttcacactttraggccaagtggtagtractccaaggacaaaatgaacagtcaaaaaacagggctgtataatccatccattctttccaacagtagaatttcctccaattatcaattmtrgagattctggggttattcaattaagaagagtaacacatacttcagtcacatgaggacactctcaaaatacaagtatgaaaataacaaaactcctmataacaatgtcaagtrcaavaaatgaattataaaatttaagtagggmtgaactrtwgtgtmactgagtgaaatgttcaagttaacaatccattamacacgaaatctctmacttcactaacttaaatcattatttgcagaataaaaaawaaacttccagtmagtartcaagagttggcatcaagcwggtargacatatmwttaatcatgaaccagcaaaacagtwttmaaratktaattagmaatacccmaaatgtgtgtgagagtdagcataaaratttcytgatgtgwttacatagagctaamtatagagkmcagtatacaataaacgggrtgcwtgatataktttt

SEQ ID NO: 215894 - DNA, 982 bp, Homo Sapiens
  misc_feature (5)..(5): n is a, c, g, or t
  misc_feature (7)..(7): n is a, c, g, or t
tccancntatccccacgsgtgggcaaagcacaggctgcaggggtcgtgcaggctgcagctccgagtycccttcgtcggctccgggaaagcgtctcatgcgctctcaggatctggcacttgcccccatagagatctgtcctctgaggcaccgtgaccacagctgaccagccgatgacggagcaaagaggggccgtggtcacctctgccccacctggtgctgggctgtgctgcggcgtccccctggggtggtgcggtcagcctgtctttggggactgggtgctccacctgcggctgagatgaggttcccctaagtccctagaccacccccaggggtggtcagtgtcctgaggccagaacggggtggccggtggccttcttgtcttcatggtgcccagttccaccctactgccagtccttgcccgcctgcycctgggagcctggccttggggctgtcctggggcctgggctgtggtcctgtgggggctggccctcacctgaggactctccggagtctcctttggggcatgccactggcctctgcgcctccgggctcctcggtgtgggtggcccggggagttccagcgacttgcggatgtgctctcgggagcagatgttagcctggcgcacgggctctgggatccggaacctgcagcagcagcaagtwaggcgcacagcggcctccaggctcatcctgtggcccacggagatgtagaggggcctggtgctgcggtcgtggctcctcagggccattcccaggacagttccagagtctcccagcagagggaatgagtytyctcgagtytgcaggagtkggatcttctccttgtgcagggcgttgttctccagcccatccacctgcagaagtttcttggccaccccaacacacggcagggctgtgaggacgccaaggtggsagggcaccccaaagcctcggtggtggagtyccccgtttcatccacaagaagrcctcgagcwcagggag

SEQ ID NO: 215895 - DNA, 1000 bp, Homo Sapiens
ggaacggggtcctaaggcctctgccaggttccagctggggcaggggtcacgtcgcttcctgagagcagagcaaataaataatggagaggcaggggctggggsctgaggtggaggggctctggcgttggcttatgtgactccataggrgcaagacaggtggssgggggsscccaccccagggtggggrggcagagccaggggaccacagggtcctggggsstccctggcacctccactggtccctcgcctctggggccaaagcagggtgtggggggrcaccccagaaggcactgctgaaatgcggctggactagaaatgagtgggcagagaagctggggctgggctgcagttcctagagcggggcgtcatcagtcctccacttgcgggggtaaccctgctggtggccatcgcagcgggggttccccatgctgtccagaggcaccaccacctcgtccgggttcgagttcttgttcagttccaccacgcggggtaccaccgaggaccagcgatccctgcggaggcggcccacggtatgcgagaagccataatactggtaggtctcattcttgcccgggtcctcgttgatgatgcccaagttctggttccagtgagaccagttcacctcatccaccctgaagcaccacctgcggtcaggagtgccgtccgagctcttgcccacggtgaccatctccccagagcggaaggscttcctcaggaatacggggaaggagcgctcaatgtccaggatggtggtggcccactgcagcttccagatgtgcttkctctccttggagacctggccmactgtytcgcccatgaaggsaatgagcatkttgagggagcagcamaaagkgaggatgatgtaggacacaaccaggatgatgaaaacamggggtacttggtkytsctcagmwctccaggtcgccatgccgrtggtmaccttaacmaggtcamggrggaggkgctgaagkytcstkttmmgggccargggtaattgggc

SEQ ID NO: 215896 - DNA, 1000 bp, Homo Sapiens
ggagctatgtttctgccgcttccaaaagcgcttgacgtcgctgtgcccggccggggtcaccaccatgagccgcttggccgagttctcgaacacgagcacgcccagctcccgcgcgtgggccagcagcagctcaaagtccacttgcgacaggaactggttatacaggacaccctcagtgaaccggagtctgtccctttccagctcccagagccggatctggtcggtgatggtggggggcagcacaggtgtctgtttgagcatcactgggtgggctcttgtccttaggaaatggattatctgctgggctgtgatgccactggcgattgcctgctgcacactctcccgggtcacctgcgccaccaccatgttggggaaccgatagagcatctcagagaagagggcaatgagggcaatctgcagctccgactccgtgtaggcatacagtcggtaattggtttccacgacaatgaaacctggctgatgcacagtgcccccagctccagagacacctgatgagagattgatggccaggcgtgtggggtagtaacgccgagatttcctcttcctctggaaaacaagcccaaactcacgcagatgttgcaggaagttcaacagagaatcactcataccttccacagagtaatccttgcccagagtagagaagctgagctggaagaggaaggagagaatctctaccaggtccatgccccggctctgggctgtctgcaaatactgcaacataaagtaccagagctgagccggggtgtccagcaacaggaactggaagccagcggaggtaatgcagggcggctctccaggttcagtactcttcatgagcccagcctggctgaggagctgagccaagtcctggctgacagctgcmctgggggagccaccatgaagtgcaagacamctcccatcgctctcggcgtaytttcaaggrgggamgtcccgggatgctttttggtccagctgattgtgtaacagacaggcttccccc

SEQ ID NO: 215897 - DNA, 1000 bp, Homo Sapiens
cacatgggtcatgtgtccactggacagggggcccttccctgcctggcagcagaggcagagagagagagaagagagagagacagcttatgccattatttctgcatatcagacatttagtactttcactaatttgctcctgctatctaaaaggcagagccaggtatacaggatggaacatgaaagcggactaggagcgtgaccactgaagcacagcatcacagggagacaggcctctggataactgcgggcgggcctgactgatgtcaggccctccacaagaggtggaggagtagtcttctctaaactcccccggggaaagggaggctccttttcccagtctgctaagtagtgggtgtttttccttgacactgatgctactgctagaccatggtccactttgcaacaggcatcttcccagacactggtgttactgctagaccaagccctctggtggccctgtccaggcataagagaaggctcacactcttgtcttctggccacttcgcactatgtcccctcggctcctatctctgtatggcctggtttttcctaggttatgattgtagagtgaggattattataatattggaataaagagtaattgctataaactaatgattaatgatactcacatataatcatgtctatgatctagatctagtataactcttcttattttatatattttattatactggaacagctcgtgccctcagtctctttcctcggcacctgggtggcttgccaccaccataggcagtcatgccattcactgaaaagcagaagccaaaggaaaaccggagcctaatcaagtgttttaaamacatcagkttttaaatkcctatgaagcacccaagtkgaaatkctgagtagkcagctkkkctcaggsaataawctagtttgggaatgagtttggaraaacagcaaacatcarccacaatkaggattrgtcactksrgwttcmattcatggaaagagggctkrgattratgscaaattt

SEQ ID NO: 215898 - DNA, 1000 bp, Homo Sapiens
ggtaaatggagtctgctctcatccatggttaaaagtggattgagacgctctacagagaattccatcttctttttaaggaacacatctgaacgamttcagaagggaaatttggatatttaaaaatcagtgtctctyacttcccactccatcgcgccacctccctttctaagctcgagagcacagcgctcctacggtccagccaggcatgctctccagaaaggggcttgagagtttcgggcccctgatggagcggctcacttgctggccgtgaacgcctggattcccgtgatagctctcccaaggatcagggcgtgaatgtcatgtgtaccttcgtaggtgttcacggcctccaggttcatggcgtgccggatcacgtgatactcgtcagaaatcccattcccccccagcatgtctcgggcctggcgggcgatgtccagggctttcccacagttattcctcttcagcagagaaaccatctcgggggcagccttgtcctggtccttcaagcggccgagctgcaggcaggcgtgaaggcccagggtaatctcagtgagcatgtctgccagcttcttctgaatcagctggttcctggccagtgggacaccaaactgcatcctgtcgagggcgtactgccgggctgtgtgcaagcagaactccgaagctccaagcacgccccacgcgatgccgtaccgggcgttgttcaggcagccgaagggaccccccaggctggatgcaccarggagcacattctcctctggcactycacaccgtccatgatgatcatgcctgttggtgaggcccgcagcgagaacttgcccyggawtcttgggggccgagagamcccgcatccccttctccargaggaagcccgaatgcagcatcttyamaccgagccamactaaaamagatcgggcatagggarttcgtgatcamggtttggtccattgaggtgtastctkttgggtgaktktagtggsttggttcawgctstggggcattc

SEQ ID NO: 215899 - DNA, 934 bp, Homo Sapiens
  misc_feature (275)..(275): n is a, c, g, or t
taatcattagcattacctcccatcaggtgcacagaagaaagtcaaggctggaatttcattctcttatctaaatctctctgttctctctcagggaatattttcagagaataggtggaatgaagtgaggctgtggagaatgttatctatgataggatagagggcatagaaggccaggagtcaggagacctgggttctgtcctggattatacaccagctcactgaggagctttgtcctctctggatcaagagtcccacctgaaaatgaaggaactggntccagataacactggagccctttcccccaagatgcactggcattcagaggatggtgcaggtccagtcctcttctgcctgtggggtggatgctgcctggagtgtgctgggtctatgagagaaatgagggtactcatgtgttccaatgtaaccatatttctgatacctcctgggawcgtcggtctcatcgtctgcactgttgctttcagccagcagaatccaggagctcactggggacccatcccaattcttaaagcatgggtaattcagccaggcctcagcctcttgtgccagctgcctccaaccctttgggtctccaccacccaagtttcctgtagggtccgccgggtccaggatcacaggcctgggtttcgtgagctgccttctcaggtacttttcaataatggggtttttaaagtcataatactttgtccagtagatgcagagttgctggtagtttatgactaattccaagaccgtccgaaatccctgggctgtgttgaaatgtgttttcatgctccctcgctcccaagcatagaccgtcaggagctccagggcatactgaggtggcagcttcccaagcttcttcttacaattttggtaccagtscttgactaggcggatgaggctcttgagcttggtggggcgctgcttcgggaag

SEQ ID NO: 215900 - DNA, 931 bp, Homo Sapiens
  misc_feature (22)..(22): n is a, c, g, or t
  misc_feature (26)..(26): n is a, c, g, or t
agaaaatggcaggacagtgggncaanccataatcccagtactttgggaggccgaggtgggtgaatcacttgascccaggagttcaatacctgcctgggcaacacagtgagaccctgtctctactaaaaataaaaaaagaaaaagaaaatagagacagtctagatgtactgaaatttccaattatgtaatccactgacagaaaaaagtgtggatatgccagaagtagtaacagaagtctagaatttataaatactgatgtatttttggattgccacaggtcaagcaaattcttaaaagttatttaaagcatataaggttctaatttcagctttgttctaatagctaatctactttttacttcatagaattgtcttgattttgaaaccctggcattcggaaacatcctgacttctagtgtttcaatggttcattcaatacttgtattataattggaaacagacgctggctgcctatctttatttctattgtaaagtttccatatttgcttcaattaatttacatataattactgtacatgagagataatgttatgacaagaatagtttctgcaacattaagtatgggtcaaaaaaagaagaaatgggccaggcgcggtggctcatccctttgggaggctgaggcaggtgtatcacaaggtcaggagttcgagaccagcctgaccaatatggtgaaaacccatctctactaaaaaaaacacaaaacttagccaggcatggtggtgcacgcctgtwatcccagatactcaggaggctgaggcatgagaatcgcttgaacccgggaggtggaggttgcagtgagccgagatcacgccactkcattycagcctgggcaacagagcaagactccatctcccaaaaaacaaagaaatkactttagacaattggctggaatgaaatacaaaraggggtgc

SEQ ID NO: 215901 - DNA, 945 bp, Homo Sapiens
ttcagttaggtcctctattatcctaaatgctctctggtcatgagcaggtgaggttctatttagccaagataagtggctgcctcagagtttctcatagggaaaactgaaatctgattattttcttttcttcacatagtctctaggttgagaactccaagtagtaagaggcacaggataaggatgggagagactgagcatttttgagagaatactcctctgctgaatgccactttgaagggaaagaagtcgaatggccatttccagtccattttgggttggccccttggaggctgtggcttctgggtaatgtccacaaagttcacaagagttgtcaaagatacttctgtaacttgctgagaatcctgtatagactggcactggtataggaatcgaactcctgatacatgagcttgcgggttggacaggagacctacatatgcccacaatacctggatctccagggaaactggtatgagacagcaggaagtacagtttatagctgaaatgctgcagtgcctgttgaggatcctggtccaccctcctttctgggctgggtcagcattaccaaagatggcaacatactctggtctgggccttccatgaagagtctgataaatctcctgctgcaagtggctgcagtctgccttcttcaacctgagcttgcatccagatattgcattcactccaaactgcacttcatgtcttttaacagagcaacttccattaccctggcttgagtaacttatatcatcagtcagagccaagagtggcttcccaactatatagccaggattccacttctaggactggtgagagaagcagctgtgctctgttgaaaagccctgaagcgaaggatgaagtgttgctgtaaggaagcgcctggctcaaaaaaaarrwdgrttgtccmaactgacagaaactttcttgattcmaaagtccamttgg

SEQ ID NO: 215902 - DNA, 1000 bp, Homo Sapiens
ctgtagtgaagttaagtaataccttcaagatttcacaactgtaaactcgatctggaattcaaaccagatctatatgtttctgtaaatccaggctcttttttctgtatcaagaagcttttggactggaagagtgtttttcagcaggaattgtggtattggccacccatcaccccatttaattaaaaatccctggcctcaggacctacagcaatgtactgaagaacttcagaacctcaattagccatttgccatcttgagagagtcttgtccatggttcaagtgttcccttggaactcttgaagggcttggagcttagtctgagccatgggaaatggccaaagagtctcaagattcccactgtatcctgtgccttggagcaggcaaggagaccatggcagccctggccccggtcagttcttggctttggcagttccgggaccaggacgctggtacascggattatcccttcatcgtgtagccgcttccagacttctctctccagcttgaagtcatggtttatgtaaaagatcagccgcttccatgatgtatcatagtagtgatcagaaaagcgctcatggccctcagtgatgaagccataagcactcacctggtcacagagctgaagggcagtgagcagcaggagggccccagtggtggggcggtatatcctccagtgggcaccatccagggtcttagacctcagaaacctgttcttcatgtatcggagaaagtctgggtgcagcaacaggtacctgtccatgtgcagggcttcccgaaaagcttcctgggggtctgtgccttcccaagaggcacgttcttgaaaccccgattgcccaatataaggagtgactgggtcagggagaaggcggtaarscgtagaaggatgtccgagtcccacatcctgttcgtagcctttatgagagctcgsycaatcgggacacgtrtcgtgactgtctatctcctggccatgtgggagtgttcaggtgccccgtkgccmcac

SEQ ID NO: 215903 - DNA, 1000 bp, Homo Sapiens
tgctcatagcatggaagctagcttcccccagagcgagtgagccaagatagattgggggcrgtgggtggcagagagagagggctcaagtagaagctgcagtgtcttttataacctaatcttggaagtggcatgccatcacttctgccatattctattggtcacaaagacaactttggtacattgtgggaggggacacacacagaatgtaaacacgaggagacagggatcattttagcagctgtattagtttcctagagctgccataaccaattatccttggtggcttaaaacagccgaaatttattctttcttcgttcaggaggctggaagtctgagattaaggtttcagcagagccgttatccctctaaagcctctagggaagaattcttctttgcctcttccaagcttctgatggttgccacaatccttggtgtttcttagcttgtggctgcaaaactccgatctctgccttcatctttacatagtcttccccgcgtctcctctgtctctgtgtcctctccttttcatacaaggaaaccagtcatattgaatttaggtctaccttcatccagcatgaccttgtcttaactaactacatctgcagagaccttatctccaaataaactcacagactgagattccaagaaggatgtgaatttgagggggacacaattcaaccagtacagcagccttcttagagactggatccaatgccttggaatcccaggggctgtgatccttctaggaaagaattaccagatgatttttgttctttaagttccttacccagagattccagccacacaaactcatcacagcctcctcctcagtggctttgctgagatctgtttctgatcactactacaacmamcagagmaacaaavwcgattcatttgaattactctggggagtggrgstgrggacatcarrrtgwgtctgyctgytacycagattatttctttytwttttwtmaaggatcwctcatgtagaaataggaaa

SEQ ID NO: 215904 - DNA, 988 bp, Homo Sapiens
  misc_feature (20)..(20): n is a, c, g, or t
  misc_feature (22)..(22): n is a, c, g, or t
  misc_feature (27)..(27): n is a, c, g, or t
  misc_feature (31)..(31): n is a, c, g, or t
ataattgacagaaataaatngnatggncggnggacacggaacccccgcagccccaccccttagctggctctccggttctgcagggggcagaagctgccggacccgcacttggtgccagtgcacaagaaaccactcgcagaggccagcagaatccttccccctcaagtgccttggggatcctgggtggcagactccactcgctcagggccatggggaagtagagccagctgtacagtaccatttcccacagcagccacggcctcttgcttgctttgggaaggaaaagaggaaggaggcatctgtcctcagggctgagcacaggagggcagcctcttaggccacaatgggctccttcgtggggttcacagtctgatgcgcggctggcctatccccaccagtgtctctcctcccaggaccctgggggcacagggagctggaggggaggaacccctcatgcccagtgcctgacactgtgggcacccattcacggccatccactgcccaggcctaggcacccaccagccccctctccctggggctcaggacactggcagctgaagccgaaaggagctggagctcagacccctgaggctagtggtgtgagtcggagagggagggaggaggcacagggaaggaacagagggttctagctcagggaggcatctctgccaggggcgaggctgctgcttccctggggagaggggaggaggtgtgggcccaaggggaggtgggagctgggggctgctgccggggggtgggctgggttctctggcacaaggagccagggtcactgaggctgtcagaagtggactgcgaagtccactggattgggaaggaacaagcctcaatggggactcaagggcacggcccacctcccttccaggtccctttggcctggggstgccctgggtggaggctctcctaaggccagagaamtcacttgggaagaagggacagrggggcagacagtctccactgggcaaragag

SEQ ID NO: 215905 - DNA, 971 bp, Homo Sapiens
  misc_feature (23)..(24): n is a, c, g, or t
  misc_feature (27)..(27): n is a, c, g, or t
  misc_feature (35)..(36): n is a, c, g, or t
  misc_feature (39)..(39): n is a, c, g, or t
  misc_feature (893)..(893): n is a, c, g, or t
tttccgcttttctacattgtagnntcnagagtgtnnatnaatgtatatcgatgtcttcaagaatatatcattcctttttcactagaacccattcaaaatataagtyaagaatcttaatatcaacaaatatatcaagcaaactggaaggcagaataactaccataatttagtataagtacccaaagttttataaatcaaaagccctaatgataaccatttttagaattcaatcatcactgtagaatcagagtctgtaattcttttcttgattagagtggtaggacactgtaatactgttcctccatgtttccatgcatacaatgttatgtgttactctacactgtaaatgcagtattcaaattcacttgagccgtgggcctggaagttagagactagcttttaccttattactttcaatgattttatctgagttaagctgataaatctcttcgcggctgaatccaaattcttcaagtatctcctcagtgtgttctcctatgaaaggatcccttttgaaagaagggatggctggggtgtttaacagcagaggtgcagggcgggggctcacgtcctgctcctcactggtgataaacgagccccgttccttgttgtgatcatgatgaacaacctcctcaaaagtcagaaccggagtcacacaggcatctgtgccgtcaaagatttgacaccactctgccttcgtcttctctgcaaatacatctgcaaacttcttcttcatttctgggcaatcatccatgctcatctgattggggagttcatcagamtttagtccaagtcctttgatcagcagctcgtagaactggggttctattgctccaacagccatgaattccccatctkctgttctgttagttgtwtwgaaaggtgcycaccantcmacatgtcctgtckycgaggkgttccacacrctcaattcttggktttcmcatraaaracttaawatgctgtccttc

SEQ ID NO: 215906 - DNA, 967 bp, Homo Sapiens
  misc_feature (2)..(2): n is a, c, g, or t
tnttattgtaaactggttctttactttctgatattacttgtaaacactggttccttctcaaccaccgtattctgattgggtctataagtagcacccagtccacaccacagcacgcttctggggtccaggagaccgccttcactactgtgctggccccgcctgtgtacgggccccggggccgggccatccagggtgcctgtggtgctcacacccccatggcgctcttctcgctgtctttggggctgggctcctccggagtcttcttcatctcccagcccctgacccaggtgtaggcggaggagccgcccagcaccatcatgttgctcgtccaccagaggaagctcttggtctcctcgtagtagagcacggccagcactgtctgggcacaggccttggccgtgcccgacacattgtgggtcagcggactggtgaacttgatctgcagtcctgtcacgtagccgatggcaaagccaaacaggccgcccagcgtcatcatcccccagaagtgggcactgcccagctgggcaaagtcacgcagggcctgaagctccccgagcagcaggagcaggggcaggaagaggatgcaggcgttgacgttgttgtagaaagtcaggcgccagawgctgccgtccaccgccgggagcaccttcgtggtgtagatggcgttgagcgagacacagaggctagccagcacgccgaagacggtgcccagccacgacagggtgccttctgccccctcctggtccacaccaagccagaagcccccgatgatgataccgcagtgaggcagggcatagaaggaggtggtctgcttgagcagcaggtaggagagcagcacgttgaagacggtggtgagtgagcggcccacattgtagaaggscacaccgacgtacttkaggcagaggttattgaaggtgatcatgcgatgaagacaacgacagggsaggagsygcgggcaccygaggtc

SEQ ID NO: 215907 - DNA, 1000 bp, Homo Sapiens
ctcatgtgcaggcaccttcctgggcaggaagcagacctagcagaactgcagtggtggccctcaaaccagcaccccctcttcctgacagcacaggcactccccccggggcctgcgccacagtgagaccagctctatgcagatacagctctgtcctgtgagggggtgagacacaggctctgctggggactgaggctccggctgcattttcttacctattgtagttgtccatcctccccaaatatggctgggggcagaagagagtggacacattcacagacgggtgggtcagtaccaggacatccaggattgccttggttccagcaagatgtctcaggatgggctttccacagggaagaaccagagaagccagggcagagttggggtctctggactaccagggctcagggcatagaggtggggttggctcgcccctgacaccaaccccaaggagaataaataaataaatagtgtataattgtgcagtcccctagcctggcttacccctcaacaaggggtcactagtcactgtcgatctcagttcctctgcatgtcatcctcccagaaacagaggctggctgccagtaggggtcctacccgaccctggggattgaaaaaccagggctgagagtgcccatacagttcaggtggccagggcaggcaagcgagtkgaggtctgggcccagcccacaggtgagacaaggtcctgcctgtctccccatcctctgacacatggctcagtataatgaagccacawgcggcctgggggcatttacctccaagttgtgtgacaactcccctctcccatgccttgctcttgctggctcttcctgggccagctgccagargtatgcaggcaccaggatgccttggaggagggrmagttggggccamartccagcgggggckratgtccctccagggtgcgaattggtkarggtggsaaaatgcccgtaaadtaaaaactggaagggtattttggagtwktggcaatcscggggca

SEQ ID NO: 215908 - DNA, 1000 bp, Homo Sapiens
ggggacatgcacagacacttgtgccccaggaaactggggtggtggaatgggggctcaaaataaaaccaaatcgaggctggagcaggggtgggaaatgaacattacaatgaaaataatgcccccggtgatacacaatacagcgtgtagagacacagggatggcgatggggtcctgctgacattccctcttgccaccaggcagggccccctaagagaggaatgatgacttcgaaatgtcttgtggaagctctgctccctggccccagccccttgctggtgggggtttgtggggaagtggcttatgccggagtccagttcccccacctcctatggacagtctcaccaggccattggccctgcaggtcctggggcctgggggagagggatggtgcgttgccttccgcccacccccactatccagtctaggcgaccaagggcagcaggctccagtccccgcccctgctcaggcagtggtcacttcctgctgtggagtgtgtcctggaacttggtgctggtgtatcgcaggtggaaaccttttttggtgatggtgtcatccgagtggaacttcaccaggacagaatctcccgccgagtacacctcctcaggaggccctgagccacagtagcgccccagcctgggggctgtgctgtcgtagccgtcgaagagctccatgtagtcatagccgcagtcggtctcctcctccacctcaaaggtctggaacacgagctccacgccgtagccttcctcggccacaatgacccactcacagtccacacccccagggtagttgttgtcgccaaactgggcgtgggaagtaaasgtccttggtcttcacgtctgcccgtacctggccccgcactctgtggcgtgggaggctkgaagcctttcgctggaccgagtatctgagtagarcgcagramatgcggykcctgtggcaagacgggytcggctttttctccacaaaacggccgagrcggggcyttgskytycccgtcgaaacc

SEQ ID NO: 215909 - DNA, 1000 bp, Homo Sapiens
gtgcaggcgcaggccagcatctctcacttcttccactcgttcttttcgtagtcccacttggaggctaagccctggatggggttcaccttcatgtccagcatcctcttggtctgcttggccacccactctttgtcaaagctttgsggsgdgggggccgtacactacggtgtgagacaggttatggggcaagactatctcaacaggttgtttctaggccaatccctcacacaggttaaatcctcccgacacaccagccaccaggtcagcagagccacctgccactcaacacccgctcaaacacacggtttctgaccactgacaacactgacattttaaaattagccctttgtttgtaaaaagttagcaacaaaataagctaaaagcagaaggtcctctctaaaggctatggataacaggatctgacaaacagagcccaaggtgacctggaagatcaaatagattcgggtcgttattaacccacatccacattcaaaccaaaagtacgagaatatacctattcagaatgcaaaaatgcctgttctgcctggacagaaagaacctcggggaagagtcattaccacgagcgagcaacccggcaatgcccacacacaaactatcaggtcgggacccccagatgctggctgttgagatgcagtyctcaccacagtcgagacagttattaaatgaatgagtccccttatccttgctcgaaccttcacgaagtcatcttttgctaagtgactggtgagcacataaattgctactgaaaacgtggtgtgctgtacaaagtagttagggtatttcaccacccaacaagcatggctatgaataatcagatgctggcttataaamtaacctcccacgacttcagttctccaggtcaccaaggctgggaaacaatcctgagatgractctgggatgcagtcctatytcatagctcmaggkatggaggkccccmcagcccmcaatggggmtgsrggtggggsccmgtycggggcc

SEQ ID NO: 215910 - DNA, 616 bp, Homo Sapiens
  misc_feature (2)..(2): n is a, c, g, or t
  misc_feature (10)..(10): n is a, c, g, or t
cncctgcggncttctccccacctcccagtctgctgatcagtaccctctctcccagggctccacctggmtggtcctgaggcccaaaccctgcctctcagctgcctcctgccctacaaactggtgactgctctcatccagcttctgatctgtttcatttaagatgattaaaatactcccctccccaattcgcttaaaaataattttcaaagattaaaaatttcatttgtgtgtgtgtgtttttttaaataagaactttaaatgtgggatatctccttcttcccctaggtccagttgaggactctggggtgcctgcctcttcaccccaggwagccagctgccacttgatgccccttggwaattttcaggaagtaatttctttcaaattttccctgcagtcacaaattccacaaactgcttgcataaacacgctgtcttcattataggcaccactcctcagctctggaaacctgatctctttctgtcaactagaccacatgcttcagattccctttgatgtagttgaggatttgttggattcggtggggctcattgcggtctggccggcagcttggcgtgatttccagcacataatcaggaccatatgctgtgaaaaact

SEQ ID NO: 215911 - DNA, 894 bp, Homo Sapiens
atagaaaaaaaatgcaaactagaccaggctcggcggcttacgtctgtaatcctagcacttcggtaggccgaggcggtggactgcctgagctcaggagttctgagagcagcctgggcaacacggtgaaaccccgtctctactaaaatacaaaaaattagctgggcatggcggcgtgcacctttagtcacagctacttgggaggctgaggcagaactgcttgaacccgggaggcagaggttgcagtgagccgagatcgcgccactgccctccagtctgggcaacaaagcgagacgccatctcaaaaaacaacaacaacaaaaaaacaaactaaatatagaaatataaaaagaaaaaaattactttcaatcccactacaaataactaaccacaactgtactacaactgtaaacgttatggatatgcttttctaaaattacggtggacagacaaatgcacagaagtattccaaataagagttgagattgccagaaatgtaaaatatgtcagaaatgaattcttattacatcatgtcaacattcttctcaagctgcagaacaatttccttaagggcaggatcctctgcccaattgactttactccccaaaataaggttctgggacacatgttgaataacagtagtaatttttatctccatctgtaggttttgtcgtatgatctttatcctctctgagttttccatactgtccaaatcaatcttctgtttgttcttttcagtctgtatttctaaaagcttactttctgaagcttgttttaattgcaatctcttctttctaatatcaagcagtttttcctctaaatcccaagattcctgctgtgatttcattattaatttatttagctctaataggtgtttcatgttatccawaaacamac

SEQ ID NO: 215912 - DNA, 1000 bp, Homo Sapiens
tggaaatttctatttccaaccgtcattgaaaccaggatccctgctcaacccctctggaaagaaatcaacagcaaacaaggacctgggtcacccacagaagaggcagctggtgataagggttaggagctgatctgggctatgaccatatgggggtgcagagcaaggaaggggctcagggtgagggaggcagagacagaaaagcatctgttgggggactgaggcaacagctcaacccaggagtcggcaggagggaggaggaagccatggagatcagaggataaggctaggatccagcctcagaggaagaggatttttcggaagagtacaggtgagaggctcagctccaagacctggtcccatggtcctgcctactttgatccagagggagaaaaaggagcccaaaaagagtttctgtgtggccccagagagactagaactgagctgtttgtcctaaaacttgggaggcctgttctaggctccagccagaaaactgtgcaggactctgcaaatggtagagggggcacatggagctcagtggaacttagagaacaagggaggagctggtgaccaagtccacagtgtcttggaggagagatgagggaagtggttcaaggcaacacgtttttctggctatatcattacaagagagcaggtgcaaaaggttactttggtttcctcaaagtagagaaagaaaatacagggaagaaacggtaaaaatcaaagcttcctgggagaaaattgtagcctagaaaaaawcatctttcccctgggggttcctgtattgcggcagagaggagggggtaggggaagggggtcctgtgtgagtgctgcaaggccatcgattgttcctgggagcttctccagaccttggctttccccgtcamamgtttaccaaagaagacagagtctggctcaaaaaaagaatgtgtaargaaagartttactgccctcctcaagkgtagggcccagacagctctgagtgkgtggtggggaggttggg

SEQ ID NO: 215913 - DNA, 973 bp, Homo Sapiens
atttacattgttttatattgatataacctagagaatgttccaggttaccctatagaggcagtgctcttgcttgtttacatgccaaagtgctctgtggaagaggtgacgaaagggtggcatccctgggtaagtgagtgcctatgaagamgtsgcccaaccaatggctttgcvgcacacaatgtcccagtggggaaactgagggccagagaggggaagggrcatgtccaaggtcacatggtgatgggacacccagggctgggccactggtccgtgcctgacctccagtgggtctgccagccaagggtgagggrggctgtggggggggggggkggccaagtcaggcttccccctccacctcgtcctcgctggcacagccctcggacacagctctgcgccgggatgcccgcctctccaggtactctgccttaagctgctccagctcccgcagctcagcctccagccgctcccggtggaccatgcgcastgccgcagctgtttcatgcggaaggggttcatgtcattgaaggcgatgttcatcagcttccggctgttggagatggtcttggtgaagaagcgcaggtactggtagatttccaggccattctgtagcctcaagatctccttctcgttgtacttgaaaatsgccaaggcatagcgaaacaccaccttcgtcccctcgtacaggaaggcatcccagacccgaagaggatgttgctaatgagactgtccgcaaagaccacgaggaaccagttgaaggtgacgagggagagatccacgtggtgctgccccagatgggccatcagcctgggcagcttctccgagagcaggtcctggagcaccgctggtccacctgggatgccgtcagcgtgttgcagtagtaatcagcgggcatgatggtctccacaatggccaccaggcaccagaaggcgctctcctcctcctctaggaccagcagggcaatggcgccagactg

SEQ ID NO: 215914 - DNA, 1000 bp, Homo Sapiens
ttcttctttttcttactgataacaaattcttcctctgtttgctatgcttagtaaggaagtcaatgagagccagtagtcagtggttccacacaggcaggagcctaccagcatagctgttgacctgcagcattggtacccagccccaccaatacataatttgactatcacccttaaacaaatgctattttgcaataagaggtaaaatatcagtgcaacttaaaaaacaacacttgtacatatttttattcaacattttacattattccacaaatatgtacaatttcaataataaattaaaaaaatgagtaaagtaagtctgagagaagttcatagtcactatattactcaatgacatttttctgccttcatttctaagagttcatctgatccaaggtctgatcatcttcttgacagaaaaacttgttttgacagcacatttgaaatgccgagtgttttgttatgtctaagcagcagagtgatgtttgttaataacagaaacactttaaaaagaatcaattgcaatcaagaagtgttgatgaacatttggacaatatgtacaaaactctgcaaaaattctttaatatttttttcctccagttcctcacattctttgcatccagattctgttacattcccattagaagacaaactgttgtttgctaggatgatcagattttctactgtatcatgaatacttgcatctccggactcaagtgaaataacttgtaactccaagagaaagcacttcattgctgttactttgcaactggggtgaacatcactttccgtatataaagtagcatcaatatgcatagattgaataaaaamwwcaatttttttcaaatcacttattacattcacccagttggcttctgttttaggaagccctgcactgaaacagcccaaaatgaagacatgaatgccagcttcagttagaaaatgactgtwtagaagtaamacaagtagcctggatggaaawacttctcaawgkggttcggaa

SEQ ID NO: 215915 - DNA, 1000 bp, Homo Sapiens
tagtttatgagtcaagcttctgaaccaaaagttttactttgagccctattcctaccttacaagctagcaggtgaccttgggcaagccaacctattagaaccctgggttcacgtccatacagtgaagacatcataacctgtcctacctacttcacaagcttcctctaccgatcaactagatcaatatatgtaagattttttttgacaactgtaaagtactataaaatgacacttacagataagtcagtgaagttaaccatcaaaacaatattcatgcctataaccaaaagcttttaaacaaaacagcttaataaaaagtggtcaggtaagcaaataaagattatattacacaaactatgttcctcacctactctcatactgagtctaatctttggaaagataattcattttaaggggaaaaaaatctgttaagatattttttagtatttatacaaacaagctgcaactactattcaaaaataggtttttttcatccaataggagtatactctttaatagaactgtatttaaataagaattccatacaaatagaatatataccttaacacaagaaagcaagaaaagaatattttacattacatagaacattcaggtgattcgatcaaattatccctccaactaaatacttattttccctatttactacaaatattgcagtcagtcagtatatgccaataatcatatagttttaacatctagtagtgtgaagtacacttgactgtttccaaagggagagaggtgatgtagtcttcatttcaggggagaagaatggacttwattactgtctgctttttaatgtttcaactaaccattccattgcctcatcaaggccggtgcctttggttgctgacgttttgaatatctgccattttcggtccttcaaggcaggtaamccaagtaatttgccatctctgaggragtmatggctgttcmtktcctgtttatttgcaamacactaaaatggctttctagcyctcttc

SEQ ID NO: 215916 - DNA, 1000 bp, Homo Sapiens
gcttttctgatcatcctaaaggctgaatacatcctcctcctgtgtggaggacacgaagcaatactaaaatcaatacactcgatcaggtcttcatcagataccacgtcactgtgggtagagtgctagttttcaacaaatgtggtgttcttagggctccacaaggtagtcctttctcaaggtcgctgggccactcatggagttgaaatgccgctgcccatctaagtacaacatggactctccatatgtttttgggaaaaccaatggcacttctttttccgacatgaacgtgaaatgaaagacattggtggttgtatgctgcttctcctgcagggaggccacttcactgtgtactctgacttgaatataattattctgagtaaagcatacctgtgaagaaagaaagagcaatgagccaacctcaacaggtttctgaaacatgatgtcatctactgctaccacaaacggtcgagaaccaccaaagctacaagcagtagcccacgcaagttcatatgccttcctcataaggaaaccaccaaagatccgattgaaaatgttaagctcctgagggtggcaaatttccaaactcttcagttttgaattctccatccacactgcattagagggtaaaactcgactccgaaaacttatagtctttggatccagtgtgctgagaaacatctcatgtatggtggtcctctcctcagcgctgggggccattttcagtaacgacgtggagctgaaggcaattcttctccccttgttcaattccccttgtctaaagagctcctcttcctctgggctttcagggatgagtggatttacaaatgccggccctttattttcagaatcacgagccaccattacaaatgttgcatccaaaacaggacaaaattcatcaccatgtwactggkaacatttgcatcttcacttccatggatgtcttcccgaccmgcyaacatggccactgaacttaatgtcctgtctgggctcarctcttytt

SEQ ID NO: 215917 - DNA, 906 bp, Homo Sapiens
  misc_feature (7)..(7): n is a, c, g, or t
  misc_feature (14)..(15): n is a, c, g, or t
  misc_feature (901)..(902): n is a, c, g, or t
caaaggngaaaacnncaataattaaaaatcgaataatactgaaataaccacagcagctttcagtataatttgacttaagttgtwctagaaaacactagctaattttttgtttctgcagagtcaagtatagaagtgagcagattggtaaatttataaacatcatggaaagaattatagagaggaactggagccactcgaatgccatttggattccgcttgtcacaaaccactcctcttttttctagttcttggaaaacatctttgtttggaacagaaaatgttattgttagctggcacccccgctcctctacatgagacggagtaattatgttcacaactggtttcttggttgctgctttatctttgccatagttatgcttgatcaggtattccagatagccagttagcaaaacagattttttccgcaatgccttcattgtcgcttgcttaaagatctctaaactagcatgcaaggaacagaccaacaaaatgggaggatttgaaattcggaatccacagaccccagggattaactgcagtttgttatccatcttaaatctggtgctgagttcatggccaaaccatcccactaatgcaggtttaatcgtatgggcatgcttttcatgaatgaaggcaccagcaattcctcctgctcctgcatttaaatacttgtaggaacaccagcaggcaaaatcaactccccagtcatgtaagtagagttcaacatttccaactgcatgtgctagatcaaagccaacataacaacccttcgcttgtccagcttttgtgatggcaggaatattaaagtgctgttccagtgtaaaaatgcaccccactgaacaggatcactgcaattgagtctchytccttctcaattacttcaaggatatctctattattnnggtt

SEQ ID NO: 215918 - DNA, 882 bp, Homo Sapiens
  misc_feature (404)..(404): n is a, c, g, or t
ttgaagtgactttgaaggactgataatattatggggcaggcagactctcactatcttaaggtggttcgcctgasccttcttaaagtggtaccctcaggccgggcgcggtggctcacgcctgthatcccagcactttgggaagccaaggcaggtggatcacctgaggtcaggaattcgagaccagcctggccaacctggtgaaaccctgtctctactaaaaatacaacaacaattagccgggcgtggtggtgggcgtctgcaattccagctactcgggaggctaaagcaggagaatcacttgaacccgggaggtggaggttgcagtgagccgagatcgtgccatcgcactccagcctgggcaacagagcgagactcgtctcaagaaaaaaaaaaaaaaaaacamnhtktgtggcaccttactagaatacaggacttggggtttgggaagcagggagacggaaaggatgcagggggggtgatcatgtacgagccatggcactcctcattggcaatcccaagagagacttttagccaggccccaagccttctgactgcccttgcaccctcccctacctaggagagagcaagccacatcagtgctcctggcagatccctgcttccagctacgctcaatatgctatctcctgggacagccagagcccccagcacctggcactgctctgccagcccctgaccggaagcgcttctccctgcagagctgtgagtgggctggtggggcaggtcagggaaatctggggctgggtcgggtcaggagccttaagaacagcaaagtcctaggctgggaatattcaagaggcatcacatcctcagctacctctgacttgacactacctaccactccccagatgcggattatatcag

SEQ ID NO: 215919 - DNA, 900 bp, Homo Sapiens
  misc_feature (25)..(25): n is a, c, g, or t
  misc_feature (656)..(656): n is a, c, g, or t
gataacagcaaaaaactgataatanagagagadatatatcttgtggtgttgktkgttgctatttgttaaggwattgaagaatgcagttcttgcycaggcaacctgcccccagccagaagaytyakgggcaggscaagagacgcaggcctccccctcttcgtgtcagctctctgaagtttccattgtksattgctctttggtgvctgaaagcsttatctgcrggggrsagtcggccaatcccagaggattagtgggtccggtttctgtataaattagggggcaggggtgctgtagaggcttcttgatcgatgattgacgccgaggccgcaggctgttgtccgtcacaggagcaggcacctagcctctcctccagcagcagcacctggtcgctgagagattcgatccggtcaccccggccccacagctcgagccacctgttctggctgcagctcttcaggcggcacgggcagcaccgctctgacccaggccccagcctgaccggcccactgctccagccgctccaggcgccctcgcagctcgtgaatctcctgcttcagagcgcgctcatctttttccgcctcccgcaacggccacgctgagtgatgcgggcactggtgtgggggctctggggasccctccatgcaggtgcgcccgtncacgcgctagcactaggtcatgggggcagccgcagtgcaagctgcctgccgtattaaaacaatggtgcgagcagagggtgatgctggtcctacattcatccacgtccacatgacagtkcttccctccccagccgggggcgcactcgcactggtcaggcctaacgcagacgcctccgttcaggcaaggcttggcgcagatggcttcacaggtgagcgcccccgggtgccgcttcttccagccctg

SEQ ID NO: 215920 - DNA, 950 bp, Homo Sapiens
  misc_feature (19)..(19): n is a, c, g, or t
  misc_feature (21)..(21): n is a, c, g, or t
ttcaatattaaaagtaaantngtaaatgtgycbbkrkgracaatatgcatgagagagatagatcatattctaaaaccttttctttttaaaatgctttttcacagtaaatttcttaggygtcagattttccctcagaatagtgcaactggaagaagggaaatgttggcagtggctcaggactctctgctagtacaagtccttgtagatctcctgcaggagcgggtgaagactcatgtctgtctccgtcttcttgatcacctgcagtagctgcacgtgttccgtgacaatctgtctgaggtctgtcattttctggagcagcttggcaaacagctgtgaggactcagggtggttcagcttcagctggagctccagggcttgtagcaggttgtcttgaatgtcttcaatgggcttcacattcagcaaacctgggcggtctccactgagaataatgacagcaataaatattgccaagtcgctgtcatctaattccagtgcattgaacttcacagcaaactcaaacttgggctccataaagtcaccaaaaggctttcgcaggctctttagaaactcccttgtcatgaagccttggccctcggatatgagaaccccatctttattcatcaaggaggccagcattgtgtaaatgatctcgtggactccatatttgaggagagttacttggtcgttcaagtcaagatttacaaaaccaggaatgcttttggcatactctgtgatctcctgcacagcctccacggagcgaaactggcagccctgaaagatgcggatggccacctctttgctctgctcctgcagggggggtgatgtgtttgaacttgattttatcttctcccatcattaaggaattcatgtcatagataacgaatggtgatttgtctgttgtctttcctgttaagatcgccctcgcctttgctttggtcagcgggaaggac

SEQ ID NO: 215921 - DNA, 969 bp, Homo Sapiens
  misc_feature (2)..(2): n is a, c, g, or t
  misc_feature (16)..(16): n is a, c, g, or t
  misc_feature (21)..(22): n is a, c, g, or t
  misc_feature (43)..(43): n is a, c, g, or t
gntggtctaaaaatcntgggnnaagmgatcctcccgtttcagnctcccaaggtgctgggattacaggtggagccaccgcgcccggcatcgataatctgaatctctaacgagctcccgggcgacgttgatgcagctggtaccgggaccactcttcgaaaatcatcggtttagaggttttaattctgaatccattgcgaaaactgttgggcggacagagcactamtaactcctaamttttctcagaaagctgggctctgctttcgccagcaacccggtccgaagtsgcgggcatattctgtctgaaatcgtgtgcaccgaaatccccgccttgcgtggaggctggcgctaggsggcctcagcctcggcctgctgcgctcaggaacccgcgccccggctcctcggcgatccattgctctttcctctggcgccggccgcagtcggtcacgcccccagcggcccgttggtttccgggtcccgcggggtgcccccgcccamacgctatgccttaaattgggccaggctgaggcgctgctgctggagaggccgathcgagacgtggctccctgggcggcagaaccatgttggacttcgcgatcttcgccgttaccttcttgctggcgttggtgggagccgtgctctacctctatccggtgagcgccgtcttggctctctggggcccgggcgccgcccaagtctctctgtcgccggcatccaggccaacctgcccgctgcgggccgcagggggcgggcctgagaggagggttcgggktcwctccacragcttcaacascggggaccgaccccggagtcacgtgacagccctcccggcaagctctgarasmgmcgtgggctgcgtcgctacccatmargcgccgggccagggcgggcgtagarcatcwtargaaaaaccgcgccccgccggccgggctctmcatttcaggcacccgcgccaactctaaagcgggcctc

SEQ ID NO: 215922 - DNA, 1000 bp, Homo Sapiens
gtgggttgtaactgtgattcaacactgagtgctcgcttggaaaggaggtggagctcaacttccaactcagagggcctctcccactgctctcagggaaatgcccatgattcacttatgctgtatcaacaacaagtgcagctgggcgctgccttcccagctggccaagcgctcctaggggaatctccaccctcagaggcttaggaaagggaagtgtgacgagtcagggcccctgggctggtgtcttttccaatactgggctaatgctgggccattccattcagcagacacttcctgagggcctgagctcttcactgggatgccagaatgcttctgcttggaacaaagagggattaacccttgaaggcagacaccacttccagcctcgggctcacggggacgtctcagttttacccatatgcagaaggggacaatcttttgcttgcctgagacattttaccctggccttttacaaggccccaatttatcttttgacttttctctcacccctgacaaatggggcctttgataattaaacatgcttaccacttaaggtggggcatggagagatcaaggccacctgctgggacaagcagcaactgaccgccttgcagccacagaggcctatgggggccacatgtaggagagtcctggctggaggggtcatgagtcaccccatgggagggcaggacccaggcctggcctgaccccagaattatggccgaactgacccagatgaaacaggagaatcctaaatctcttgggtcgagatgtcagctgcggtttctagaacttccctggtatgctcaggagcccagagaaacagcaaagaggctttgcacagtctcatgtycttggraagctatctgtccyttycctgtytccaagrataaaaaagatctckgctgctggttatcggcrggggtaaaamtggtgcgrattggcrccactwagcaaayccccctggtktgamactggahactgggtgraattgcgccmggaa

SEQ ID NO: 215923 - DNA, 1000 bp, Homo Sapiens
agcactggggcaaacttcagacatggaacattaggcaccaagttcacaatcacactaaacatagttcacaatccttcaatccatactcttcagtggaggatgaggccttatttaacagttaactgggacagacagatgaagttttaaaatctaattcttggcctaactgtggagtggggctgactcagccttcagaactgtgaagtggatgccttaacagggccaagatctatcagcctcttaaactgactttcatttctctggttcagagaaaaagcttatggtatcttcacgttggatgaacttgcatatcgtgagagtcctcagctccaatttcgtgtctaggcacatctggactggcattcattttgatacccaatccatagattaatagggttaatctaattagaataaattaaatcgttttccaaaaagttgaaaagggtaaatcacatgagttcttcaacattcaagactttaaatatgttagcaaactgactactgttccaactgttgccagttaagaagtttaaatcagcatttcccaaaaggtgtgtcaggactgagttaatcagtaagctaatagaaacaactgcaatagactagggatgagatttctcaaagcagtctgatataatatgcggcaactccttatgtactggagcgtatccaatacattctcaaaactcctaaattagctaaaatgcaaggtaaagagcagtagaaaaatgcagctcttaggataggcaaaactttggaagatttatgtcctcacaccagggtccagcaacttaggtttgaatttatgwtaaggttaawgatawaataaacttgggktggctggtttcctggcaattgttaattcccttaaataaaaatatgtgawamttgtaaaaraagtwtttwcagttgaacyttggaaagggttttaaaattkrgtttttaaaggggaaaaagaggkgggmccttgtggcgacwtayyctarrwagagacttgttt

SEQ ID NO: 215924 - DNA, 1000 bp, Homo Sapiens
gagggacagccaaactcccaatggccaaagggctgtgaggaagggcaacacatatcagaagaattttcagcaagggctgaaacacagtaaggttagccacaaaatggaatgagagaagccctaacccaatgggagtttgcctaattttaatgaacccaaactctaacattgtactggaaaagcagcattaaaatccagcctgattatcasaatttacagaatttctcaccagaggcccacaggtgaaaaagctgcttactctaaagcccttagaaccgtattgtgaactgcgcatgcgagggatctaggttgcgtgctccttatgagactctaatgcctgatgatctgaggaggaagtttcatcctccaccaccaccccgtccatggaaaaactgtgttccacaaaactggtccctggtgccaaaaaggttagggactgctgctttagaatataagaaacaactcaagcagccaacgggtctggagttaacacttccagccctcccctttgtacacactcaacacttcttgctgaactggccgttaataaccacttgtgaaatccctccccacacctgcacttaggcgtttgtctcttcctaccttcctttactgagtagtggcaaaataataggagagtggaagatggtgatgggcaatgaagagggacctatttctgaagaggagatgttttaaaggtattttatttttcaataccagtcatgactgaaaattaaagaattaaagcaggaagcaaaacaaaaacaaacaagaaacccaaaacttgcaacctaaactctccsgggaaaaaaaaaattgctatwaatgttaaaagacttaaagagaacattgacaatgcagccygrtgktcctaatcatactycaacygsygggwgttttagctgagawytcccmgtgcyttytagtgtcyaaatctytccaamagwgagaatgaaaaaaaggctcctyytgagtccwattttttaaatksgkcggsccc

SEQ ID NO: 215925 - DNA, 1000 bp, Homo Sapiens
  misc_feature (278)..(279): n is a, c, g, or t
aggatttctggtagckakcgcgggcaccagggcctccaaactttttggactcgcagcgacgagggtcagctaccagcagggtccggwcatactggatgaggatgtctttgatctccttcttggaagcctcatccacatatttctggtaataggccaccagggctttggagatggactgacggatagctgtgagaaagacacacaattaaagggtacaggagcgctgtgaaggcctccctcccagagccacctcctccatgcgcccagttktgggactnnsataaatcgggcccacgtgaccaccaccctttacacggacacggatgtctacaccagcaaatcgctccttgccgagaagcagaactggctccagcagctaaaggaatggggaatgaacagggatttaagttacatgctgggcagcttagccatctcactgggcttcttgtttctgtggcttctgccaccactggccttcaagtactagtggatgggggtcagggtgtcactccaaggccctctacagacccagagaagaggaaagtcaaaaaagccagatatgagactgctgaagtggtgttaagaaatataggcaaggtaaagggaacaagatctgggctccctcctacttgtgtccctcactggacctcagacaccctacctctaagactggttcttagaaggctgaacagtaaggagcattccaatagcttctgaaactcccaaggctgtttcaagtagtcgaaagccatccctggactgttcaggtgccttttctatttcccacctgagctctctgccctttctttgagcctcacaggtttccagaattacagtacaacctgtccctggtccctagacccttcccagctccaggtcttttaccagtgcctctgtctggatacttcttttacctgctttcagctcacaggtctccttcccagttctgacacttttggatmrcttctggtattgggccagtcttctccccactaggctg

SEQ ID NO: 215926 - DNA, 916 bp, Homo Sapiens
cttgcccaccgctttttatttggacacagatggggagccccccaggctcctgctgagaccccccacatatcctcatatctagcctgagtatctgtcctgcaaaatgacagaggggctaccagtaggaagccatcctcccttccttgtgagatttgcctgcagggggaggatgggacctcggcagagaggctctgagaagaggtcagggaatggccactccaggggaggctctgcactgggagcctgaggcatgtaatgcagcaggcaggaagtgttgccaggggcctggagtacacagtctgagccgtccaaccactggtgtgtgctgtctttcggcacttctgactgcagggcaggcagctccagctggtaagggtcctcactggggagggcacgaagctggcgggacaacactccatgctcagctggcaggctcccccttgtgtcagaggagtacatagcaggtacaaggaggaggcagaaggagactagtaggaccaagatgcaggtgctgctgctgctggttttgtttgatatctcaatcaccatggcctggagtttcctcagttgatctagaagggacaaattctgttcctccagaagctvtactttgttctgaagctccatattctgggctgtgtatttcaagaccctgctctctaaacccccaacatacaccttctttttcctgcggctctcttgagcagatcttttatttcgaatcttcctccgcacacgtttcagaatttgttcctctgtcttagtgagaggaagtgtctcaggsagaataagcccctccttctccaatagactcttctcctcatctgtcagtactagcctagcaatctcctgctctgccagctcctccatatgctgtggagtcacytgggtccctcttttytaagcytyamtctct

SEQ ID NO: 215927 - DNA, 1000 bp, Homo Sapiens
tgctgaagattttcattgttcagcttcagatctccttgcatgaagactcagggtcacaagaggaacatggatccaaatattcattttgctcaacttgttaggtccacttgctccaaaggactgaagatatagcaatgtacagaaaggaagactatggaaacccatccacagcttgtaaactcgccactatcctttatgttttgtgcatgaggaaaggaacaaatttgattccccacaacactttttgcttgtcattccgtctgcaaggtaaaatctgggttgaaattccaaagtccaaagaagccttcttaaccaaacaaatgccctccaaaagaaggaaaataacatcaggtctgatatcaaagaggagttttgagcctgtagagatgaattcagaagacggagctttcacccgcctccctgggccatgatggcagctctttttagtaaacagtgcaccagttgctgccatcacttggcatcagccctccagtaattagcaaaataaggtcaacaaaccaccaaatcccaagtcctccaagcgtcaacagcttccctactgcagtgccagtgtgtcccaaacagaatcgatccacaccaaaacatcccaggaagaaggagtagagtaaagtggttatgaagtagtgtccggtatactttatacaaggtttattttctcgtagaaaggtcctaggactggcacactcaattccatctaaggcatggcactggactgaagtgtgttccacgtcgctgtaggcctgaccgccgaacttgagacaacataaccaagttcctgggatgcagtwgcatttccamatgatcactgggtcttcacattctataattcatcaggtaggtagagcagaggatgaccggagagtgggggtgccatattccagctcgcgcacccccggggccttcggstgggcgggcasggatgtkagccaggtmrcggtcgatttgsgrtagytcgrgasaaatgcgcrgagttattccc

SEQ ID NO: 215928 - DNA, 1000 bp, Homo Sapiens
tcccccgacttggacctggcacagaagaagtccaaacaactctgcatagttacattagtcgttttctggtgctgcagtcgctggatgcgggtagcagtgaaacattcccaagacaatcactaaacatgcagaatgccagccagaagcatgaatcactttcagaggtcttgctgcagggagcatgaggttgtattctgtgtgcattgacaactgtataggataagccagctgtgtccaagggagcaaagcaccccatattcttctgaacctaaaggggtttcctcctcaaagaagcatgttttcaatccctaaactttggggccagatacagctccaagtggcatttattgctctttggagagtcaaagccaagccaccatgagcacgaaagctgtctgagaccctcctcccctcctccccagcatggagagaataattgccatttcaccctacaaatccgaaagagtctcccccttccgtgggtttaagcatggacacaagccaagcaagcctcagatacccaggcctgtttgattgtagctatgttggtgtatctcgtgtacaagatggaaaagtgcttttgttgttctacctgatccagttgggggagcaggaatagggggtgcctgcctaacggcctctagcccatgtgcttatactgggatctgtcccgagggatctgcacctggttggcagtcattttgtggtggacgtggtaaatcgcgagtgttaccatgatgacgaggcccaagatgagccccaaaatcaggggcaaggtttcttccagttgctcccgctcatccactgggcatttatgctcttcactgaagacaaaatctgagataatgtcaaaaggttggatgtggaccgcagacaggatcatggtgaccgtcttctgcggatcactagaggccagtgaaatggtttgttgagcttgacactcataggactcccagcgggggtgacaaaggagagaggtgtgcgaktggstgtgtgcttc

SEQ ID NO: 215929 - DNA, 1000 bp, Homo Sapiens
  misc_feature (273)..(273): n is a, c, g, or t
gagacatcccagccccttttctggaacaggaaaggtgattggggaaggaatgcagttcagcatgaggaagagggtcatggtgggcacaggggtgggctggtctctgcacaaagagaagtcagggttcttgaagtcacaaagggacttgccactcagtcccacacagggcagctgtttcacattgcagcctgagagtagctccctccttttcaatctgagctcttctttctccacagcacagcagcgaccgcagctccagtgactacagctgcnaggacaaccaggccagcaacgatacccatgatggggatggtgggcagggaagactgcttccatctcagcatgaggggctccggcagcccctcatgctgcacatggcacgtgtatctctgctcctctccagaaggcaccaccacagctgcccacttctggaaggttccatcccctgcaggcctggtctccacgagctccacgtcctgggtctggtcctccccatcccgctgccaggtcagtatgatctccgcaggtagaagcccagggcccagcacctcagggtggcctcatagtcaaagacagggtggtgggtcacgtgtgtyttggggggggtccgcgcgctgcagcatctccttcccgttctccaggtatctgtggagccacttcacgcacgtgccctccaggtaggctctccttttgttcagccacattggccgcctcacacttgcgcttggagawctgagccgcagtgtccgctgcggtccaggagcgcaggtcctcgttcagggcgaggtaatccttgcatcgtaggcatactgtkcatacccgcggaggaggcgtccgttggaccccagggcgcagccaatcatccactggagggtgtgagacctggcctcgctcttggtgtwgtagcgsscagggtctgcaggtccatyctktartttgtcgtggscttggkgtccgtgtctctcttmccaatactcggccctctgcacacccacgggcc

SEQ ID NO: 215930 - DNA, 1000 bp, Homo Sapiens
  misc_feature (20)..(20): n is a, c, g, or t
  misc_feature (22)..(23): n is a, c, g, or t
gtgggttagggccaccattngnntttgattcttacaagaactttctttatggaaggaaacattatcctcttttcatctcctagataaaaaggtaaattatttagcatataaatgattttcccaaggctaattcggacgagacagtagagctgggatttggatctagttttctctgagtcaaattcctctgatctttcttgaaagtcactttcattttgtcccaacacatctgagcagacaccagtggtttcagaacacgtgccatgtcttcttactttccttgcccctttctttcttaacaatattacacctgaggaacagcgcagaggcggtgactgactggggaaatggtgatacccattctaaacttcaggctcagcttctcattgtttgggggcctgaaggtaaatttttgcataagggaagtgaagaaaataaacagctcagtcctggccaactgttctccgaggcatgcccgctttcctattgagaaaggcataaaggcttcccttttcttaaactgtccattctccagaaaatggtccggattgaatgtgtcaggggtggcccactctgtgggtccctgtgcagcgccgtcaaattggtcaggatcatggtacccttgggcaggtggtacccagccaaagtggtatcaactgtcacttccctgggaacgttcagggggatgatgttgcccattctctgcacctcatggatgacagcattggtgtagggcatggactcccgggcggctgtgctcggctgctgcccctggccaatcactctgtcaatctcagcttgtactttttcttggatttctgggtagagggccatataaagcagagcccatcgcagagttgtggaagttgtytcggttccggcaaagaagaggtccagggtgctgcagatgaggttttcttcatggaaacttgaagtaggattgcctgtgtgctttgacatttctttaaggtaagcatcaataaagtctcttgtttctgca

SEQ ID NO: 215931 - DNA, 1000 bp, Homo Sapiens
  misc_feature (523)..(523): n is a, c, g, or t
tttatctatctatctatctatctatctatctatccatctatctatctatctatctataagtytcgctctgtcacccaggctggagtatctatctatttatttatgagataagtttcgctctgtcacccaggctggagtgcggtggtgcaatctcggctcactgcaacctctgcctcccacgttcaagtgatgctcctgtctcagcctactgaggagctgggattacaggcatgcaccatcacacctggctaatttttgtatttttagtagagatggggtttcaccatgttggccaggctggtctcgagctcctgacctcaggtgatccacccaccttggcctcccaaagtgctgggattacaggcgtgagcactgcgcccggcctccaattccattttgtaggaaagcacataaggctataccaataaggcactgtggctggtctaatgctcacaccaggggccagctcactgcccagacttagcctccaggtaggctgctttgctatttaaaggcaacagtnttaggatccttattataaaagtttaaacaaaatcccaaagccgttaagtcttcctggagatggcaatgtactatcagtttggaatgtataccagtttggaagctgaaatcactctgctgtagccttttgagcactggcagcattttccaaaatttttcttttccattcttcataatcctgtgtyagatcttcatctttctgtggtttatgtggcatctcctctaccttctccatttcctttgctggggcttcaaccactatcttctttctcttccgtggtggagtagctacatctccaggttctctgttgacctgctgttcattcttctctagttgttacacagttgatcaaatatagctttttttacmcggatgttgctacaattttgtttttatcmcttyarctttarattttgcatgckgaamagttcagcagagttaaagtggctggatagttaagaccattgcggttttggg

SEQ ID NO: 215932 - DNA, 1000 bp, Homo Sapiens
ccacctcggcctcccaaagttctgggattacaggtgtgagctaccacgtctggcctgggataactcattgtaaaactggtgaagacctgggaccttcccagtagacaatgggacagagtgattgacaggatgagttctggagtacatggcagaaatgtacagagaagtctcccagagaaaactaactggctggaaacagagcctctcctttcttcttcgagaggatgagagtgtcactgtcttggatgccatagatccccagacccaaccagtcctgcaggacttggccttggaattccagctgctgctgctttttaggaagcccctgctggtcttcaatctgctgcttcagacccaggatgaagctgttggggttgatggcataggcgtastcccaccatcaggattcttcacgaagacctggatctcggaggggatggtctccagcagatagatgtgagtgtgggagaagatcccatatttggctaaggagcacctgctgctgagaagctgcctctcactgccaggaacctggaaggacagacgctgcaggccagagtagcccctggtcctccggattttctctttaaccttccttatgggctcataagggttcacgatgaggttgaaatctgggtaaccctctgctccactgtcaagtgaatgtctcgtgccctcttcacgttccagctggagatggggttctccctgttgtcatagcaacagtcctgtttcaggcactgggaggccctctgagcaacgatgtcccatctgtacccttctgccacgttgagggtggggtcggccggatccaggatgatgggcctctcttttttgagctgttttctgacacaatcycaatgattgcattgtggagtgtgtaktacttggtccagtagatacagatgacttcatactccaggagcgggtcatcacagtggkgaascytckccaamatgaaawtctcktytgytyatacccattcccaggmtagtgggta

SEQ ID NO: 215933 - DNA, 991 bp, Homo Sapiens
cacactgtgaaatcattaaaacacagatccaaatcaccacaaattattgatttctatgcgatgtaatgcccagaaggaacccctgtcctgtgtaggaaccgtcacttctctgcggctcagcagctggcaaggggaggtggcagtccccttctgtgtgtttggctggctgctgggactgggcgaggggttggaggcgggagccccacgcacagtgggctcaggggcggagaggcagggctcctctccagctaggaagagctggcagtctaacccagggaagtgggcgttccccccactcaaccacgtgccctggggaaatggtgagactgtccctcctgctggaagctgggggctcaggagcagtctccacagtctcctgcccatgggtcagcatttcctgagagtgagggagccaggcccaggccctccaaatgggctcctgggcttttattgccggcggccctgtagtcagcgtgggctggtcctgccctgcctgtgcctggcagggtcctggatttgaggctggggtccaggggttgctctgtctcccctcaggaagccccctgggccaagcagggtgggcctgcactcagcctgtgctacttcctggccatacatgggccaggccctgtgccctgccactgggtcccaaccaccatgccagtgatgtcaacatcaccatgtgggggccagggcgcttggggtaacaactcagacctgagacggggcccccacaccggccaggaagaggtggccttgctgagcccccaagtgcaggctgtkccagacagcatggtccatggggtattggggcctctgagagtggggctcttctctctggscttttaagargkggcctcttcararagggcargkggggcacttttggctccctytyactcargccattycccagcccatccctccyaggaccctcaayggggccyyctgggacggtarctgtcgtagtkggaggkkttttgggmagaaa

SEQ ID NO: 215934 - DNA, 917 bp, Homo Sapiens
  misc_feature (24)..(24): n is a, c, g, or t
  misc_feature (27)..(27): n is a, c, g, or t
aacatcatctttaaaaaaattatntantataacacatttctttgaaaaatatcatggccctctgtaacaagtctttcaatgtttcatgtaacctgtaaaattaattttaccaatgtttattaattatkawaatgcatgatgaattattatacctgtmsamgaaatgtcagtatttgatgtggasaycccaatgtscttggctatccaccacaatawgtbtcatattctagaccaagttagtgcctttaccttacaagtttttgtgagaaaagtaaaactgctgttttatcaaggcttcatgttcctgttaagattccttcagagagttgatgcgtgcacagatcttcaggsctggscctagcttgatattcattgcmctcatgagatggtcttctttcagcaagagaagggcctgtbcatcaatctcctgtgctctgaattcatctgcgatatcctggcatgccaggcaaagaatggatgaaggcccagacatcatcaactgtccatatagatggctctgtttgtgcaactggtatgcaagtcactgttctcaggcattttccgaattctcacatcccgaagctcacgttctctttcccgctcgctctgcctgcgcagacgagttgtcatagcagatggcacagaatcttcatgagaagccaagtcttcttctgcagatggataagtaattggaagctgcctaaggatatgttctctcgctgccccatcagggccacttggacgacggccacgatgcccaagactttgattatcasgcttacsattccaacgactaactscaaattttttasaacagctaacattstacttttggcacacgacatastscagaatcsttttsaccscaaaaattcattagcatatcccattttccacagaattcacacttcgcwact

SEQ ID NO: 215935 - DNA, 897 bp, Homo Sapiens
  misc_feature (4)..(7): n is a, c, g, or t
taannnnaatcagaattttgaaaaactttctcctatcaccatgacaacttcctcataatgagttttctgatgagatggatggtgatattaagtgattttttgatactatataatgtaatgtgtcaaaaatttgaatttctgcagaactctgtgaaccaacatttttcaagtgaacattcatttttccatgaaaaaccacatgttcaaagtgagagagaacagcggatttaactgccacagagcccaaaagtctattcatgaggcttcagattccatgttataaccagcctttaagaagctaccacttgttgagttttggtgtaatagcaaagaatgttcatagttagttagctgaaaaaggtactaaaatccttttccctgtttcaactataaaatgcgtgaggccagattttcttgatacagttcaactgaaacaacacatttccatagactacatcggaagcagacgcaaggtccctagctgtcttctattaagccagacactgacaggatttgtgaaaatgtacaacaatgctactctctcagtaaattattttttcattttggaagatgcttatcttcataaaattatttatgataacatgcaatggatttatatgttatttttaatgaattatacatgttataaatttctcacttttaatttccagtagagtaaatatcaatagacattgttatacaaaaagcctctttggggtcggtacttgttaagagcgtaaaggggtctccagtaatgcatttgaggcctgctagtccaggctggtcttgagctgcccttgaaatctttgaaaatggagctgtgattttttttttcttgcaaaactgggagctgggctggctccagccggcttgctttttgargagtgacatttctgc

SEQ ID NO: 215936 - DNA, 953 bp, Homo Sapiens
  misc_feature (8)..(8): n is a, c, g, or t
ggttggkntttttatttgctgaattctgtactttaccaacagaaaaaaggagcacaacaaacatgcacatgttactgacttctgcattctcgtcgcattgcacacatacatttcacctgctgtctgcagtgtgcacacactgtcaacactttacagtagttcatggatcctccgtgttcatgcacatcccattttcagtgtggctgtgaccttcctccaggtcacctactgtagagctcgctaagccattcccctctgcaccggcattgggcttgaagtgaactcaacaccattgctcccatgattccttttctctcaaggattattctgggaaagtgggctctccaagccacccagtgtgtagagtccttgatcattctcatcatacatttatgtcctgctctccagaaacactgaatcagtcagactgtagagtgtcaccagtttccctctagccttgcaagtgctgggtgtatttatgtgtacgtgtgtgtatatagagagagactctgtgtgtgtgtgtttagcaggtgtgtaggtaattcccccattacagatgagaaaacttaggaccgaaggagtgaagtcacttttcccagggttgctcagccagcaagtggcagcccccagtctagaggtcacatcccctaagcctcagtcagtgttctgttagacaaaccaccctgcctctgatggttgcttctagacttgtagacaacaggctcttcctacttctctcatcccttgtycgtggcggaaaacagaaacacaacttgtcccctcatggtttccatgtyatgcagaccaggttctcggcttcacctgggcccttccgcaaacctatgagatccaggccctgaggagttcctcaggagacatcacagccgtggcacaggcatccacctcctcccttctgcagctgattaacttctgggggtgaattggttattttc

SEQ ID NO: 215937 - DNA, 941 bp, Homo Sapiens
  misc_feature (22)..(22): n is a, c, g, or t
ctcagggtattataattaccangcctctatagtacagtcttaagagatctggagaacctggatatactatagaatattaaattcctttatttcattgacaacatcatgttgactgggatggatgagtaagaggaggaaggtacactagaggctttggtaaaacatcttctctccagagggtgaagataaataaaccttacagagattcagaagtggccactgcagtgaagttttacaggtctagtggttaggggcatccaggggtgtcccttccaatgtgaaagacaaactgttgcatcttgcatcctcatgcaaggaaggaagcacactgcctggtgagcctgtttgagttctgacatcacattctacatgtaggtgtattgctttgacccacactctaggtgacataggaggatgccagctttgagtggagcctccacaggaaaggacactgcagcagatccaggccatggcgcagtcaccatccttcagaccccctggtgctgaaagtgccagtggtggggtaagatttggggtggagctgaaccaagcaccagtaggagagtcacagtggagggcctgggattctggagtaaggccatgtcatccacagcacagaaatatgccccatccaaagcagagaaatatgttggaagcaacttttggcatgtkastgtaggccctgataagatagaatgcttgaccatgkgacacaaaacaaccatgtgattccaagtgcccctacgaattakcatctgtgtactcatgatgtcacacatttgacatgcccaacwgcacccatcatgtgattgaaatgcycctgtgwggtgwgcctgaaycccatgtmaacamccccagaaaacacccaaacctgaaattgccctgaacaaccatgctgatgcactgaaatawgccagcccwccccatttgtcagcccatgc

SEQ ID NO: 215938 - DNA, 981 bp, Homo Sapiens
tattgtkgttatttcttaagtatatttttggtgagtttaatatgkggtattatattaggtactacggtcaggttaaaaaaabwmctgatttttttagagatgtgtttgaaatatttttaggtgacataaagaaggcctgaaatttgcttccaggcaatccaggggcaagacaaagaggaaacaggggtcccgctgctgagacaggcgaggacatcagatctgcttgaacacatccatagcaaaaggatagtcacacacagctcagccctacgcttccagctcaagactctgtccagggtcccgttctctccctgggaggctttggaagggtttggagggcaaaccattagggaatggagcagctgagcagtggggagctctctaaggagtaatcaacccagtgatgaggggacggctctgcaggaaggaggggcctccccagcagtgccggcacaggacaagtctgactgccgccttccttccaacccaaacgtccccagcagcagtcccagcctgcaggcatcctcacttcttctgacaccaggacgacagcacagcccctttcctgggcaagcctgacatccttctgaagctgcaaaaatgggatattgaagaacttatgaaggtactttaggccgaagctgttcttcatggaagactcagcatagcggaagtaggaggaacctggaggtctgtccaggttgtcgatgaagtcacgcacgtcgtccggcaggatgactcggtgctcgcccatgtcccggtagttccccagcacgcacactggcacgtgggtgggcacttttggaagctcccggagaatgtaattgaaggtccactgcttggtaatgtcgaacatcatgaccaccccgttgcagttcttgtacacgtccaggaactcagcatccagggccatttcagactccgcctcctgggggtcgttctccatctttaacccgtcgcctcgctttttgcattttcctt

SEQ ID NO: 215939 - DNA, 905 bp, Homo Sapiens
  misc_feature (29)..(29): n is a, c, g, or t
ctcagcagcttgggtttcttgatgcagcnatgtaagaccagtcaagtcttctaagaaggaatgtgaagaattaaacaccttggctaggaagttaaatccttctcgttcatattgatcaagaactttggaagaacaagctgtacatttgtcaaatgccaggctgacgggaaggacattatcaaaccgtgaaagaaatccccggatctggtgaggcacaagcccaagagaggttggaggctcattcatccgatcgtcactgctgctggcaatggcatagcccccttctggatgctgcaaaacagataccatcaattccacggccagggctcctgcaatcacggccagtcctggacgactcacagtgcactgctggtccaaggtccggtctctggttgaatctcctggggccaccacatcattgcagaagtagcagccaagcttgtaaccagggatgttggcaaaaagcgatgagcccaggaggtcagcagatgccacagggtggtttggaacacaagtccccagctccttgctgctttggtttcttcagaccatgtctcatgacaacaaatgtgtcaaatcccaaagcagcattgatgaccagctttctcttgcttgcagcaatgacggcagggagccaccggctctccctggtgtccatcaataggaagacgacatcatggctttcgatgagctgctccagttgctccacatctctgcgggcttgctccasagtgacactggagaagttcactggatgccaggcataggtatgctcatgttgaatctctggcattcacacggggaatattttctggagcggtycgctgctgcagaaccttgggctwmcacccctaggcatcttcaamtctarraaggtgctcamagattgrgttggaatytggcat

SEQ ID NO: 215940 - DNA, 1000 bp, Homo Sapiens
tcaagttttcctcgtacttcatgctccctccctgccccagaaccttacaaaaatatttctgtctagagagggaaagagctggtgcctgctctggaggcaacgtccaggtccgggaaaggcactcgtggtctgtgatctgtctcagtgatgggaggtctccactcgccccacaggcagcctcggggccagagatgagaatatgctgtaatccagtacaggggctgcgtcgtgggtccccaacagctccttctttggggatagtgagccccttgttggggagtaggaagggactgaggggccagctccttccagatgtgtgcatggggaagggagttgtgtctggggaggtgggtgtccaggtatagactccttttagggtctaaacgttcaaggagttcaacagaacaaccagaggccatcatgttttggcagcttgcaagtgaacactccaggggagatgcaggagggaggggtgtagatctggggagcccttctctccctctctgcccgcaaggaaggcacagggtgggaatgggggtgccttcatgagaccccctgccatgccacacccccttcacagtcatgtgagatggggccagaggggcccaggctctagggccaggggagtggggagggagggaaataaggcctcaggtgggggttgccaccccctctagtggctggtgaagarcagtgggcccagagcagccacccgccaggttgctcccaccctagcctggggtagggatcctcatcccagagacamrsytcctctggggcacgtagaagtcaaagctgtagctcttctggcagctgcggatgccacacttgttrggcgtgggccggtcsccgctgtggcagttcttatacatkgcggggggtmcarsccagsmycaggccaaaatgccacarcagggstttccgcggtyccccmmcygcctgccacgaggcracccsccckctaygaargcttkggscaaactccgaaaaaaaatatcca

SEQ ID NO: 215941 - DNA, 1000 bp, Homo Sapiens
  misc_feature (9)..(9): n is a, c, g, or t
acaggagcncactcagcacaataacagtaagcgaatcatacaaatattgagaaaaaatgttcctatgaatacatacatgtatattcttaagagtagcgatcaggagtttaacaacaaatgtaaagtggttttctctaaagaatgctttctgacaggcttttgggttggaaatggacaggtaaatcactgtcacataacaggtaagctaagaataacttctgttacccaagtcatttgaaccctgtggactgtgaaagccctcttggaatttacatttaattccatcattggtctggttgacttccacatttcactaaatttggacaagatccacaaagtaactcctcaactctcagtctttcacactcaggtctttcaaagtgtattccgttgaaaataccatggaacattaaggaaatggtggaggatggggtgaggaggctggtaagtgaattgtttctttcactgagctggaaaacggaaccacctgctttccgcccacataaacctcttcaatatttcgatcatctcctagatagaggaacttctggataacagcctcagaaatatcaccaaaaaagtccccataaaacaggtcaatgggagagtcggatgctttggggttgatcaggatggcatcaaattccttgcccacttcaaagtttccaatctcaccatccagccccagggcttggcttcctccaagagtagctagtctgaagacttctttgagggtgaggcttttctcatttaccttattaattaaaaggatattggaaaccatcactgctcttctgattgcatcaagcatgggaatatgaatagccaccagccacgtctgttcccagccctatcttgacttcatgtttcaggacttctagcacatttagaaatccactgctgagcgataaattarrattgggacartgtgcgatggatgctccycgttccwbggatamgttcrttcttctgcagaaggtagcagcgkgtgcmayactgt

SEQ ID NO: 215942 - DNA, 1000 bp, Homo Sapiens
  misc_feature (5)..(5): n is a, c, g, or t
  misc_feature (21)..(23): n is a, c, g, or t
kgccntktttttwtdwdgacnnnatcacaaaamaaaaaaaamcagmvvgcycbbbtytbtyccctactttyctgccatgtttaagcccagctttttytctcccgcacaggtaagatgctgctgatcttyttttgacccgccatgttktttcccagctccccacgccaagtyagaatctgctcatcttctgcwacakgktttkktkccgttcttcaggkccgattccctcwgcaatggactttaagaagcwctgctcgtktgccctctggagcaaggagctgacagaagggttggtcttgctcaaagtctcatagcaggtgagggtttccaaggytaaaacgtagagtggctcacagacctccgggtggagcatggccatgatgtgcagagcatggcagaacacctgggtgtaaacaaacagggcttcctgggtcaggtcctgctctggtccttgaacccaagggccagctgcctgtatcgccctgactgagtccaggaggcgggtcagactgccacagaggagtttgaccacgtggttccagccttccagaggaagccaattacgacagctatggctgcagagaaactggaaagtcctcaggaagaggacggagagttgcaactcctgggcaaagggcttcaggttgagcaggggaacaaactgaatatattccaggctataagggacatggaggagctgcttctccagcagtctcctggtcagctggtgaaggcgctgccactcctgagggctgcaccaaggcatgacttgcaccagggccaccagaaagcctttgctgaacagtctgacctcctcaggattgcccacgtccaccaccaagagagacagcatcctctccgagatgccgctggagacgcgcagcactccatccaggcmagragcccgtgcaascccgtaccctgggtgggcctgggagatcamtcgtyttytgaaasttahartttyaaaartgtkggtggamttyacmttgaagkgccc

SEQ ID NO: 215943 - DNA, 989 bp, Homo Sapiens
aaarwacaagmaamatcacaaaggaggacaaagatataagatatagggtgggtttttatttctaccaggcccctctaaacagaggagcattttaagcaatgaaactcagccatagcttgcatggaagttcatctgtggccatatttggatctgtcttttctataagaagttctgtcccagccaatktgggggttggttcttggssgsgkggggatttctcccaatgatgggggctcagccggtcataagctcctgcctgggaaggctctgcyggagamctctccctgavatctctcctaggagtctgcggttgamagtmyggmagttcctgttctccaagctgagatccagttttctccaagarcaccttttgcccctgcatacaaacggccacccactgctttggtttcttggatgctctgtgaaaatcttccacgagggtcacaatctccttgctgctcattggacatcgatgcctgacccgagcctggatctccgggggcaggatggtcaggwactgctccatcaccagaagctccaaaatctgctccttggtgtgcagctcgggttgcaaccactgacggcagaactgtcggagctgggagagcgcctcttggggtccagacacctcttgataacaaaagcgtctgtggygtctggcggcagagctcaggatctgggcagtttttttgcagaggwgggccccgtttctcttctagtttggctattatgtgtctctcttgcttggwggragcttcagtgttggagcttaaagttatctccattttagctgccattttgggcgtyaggrgmaactctctccttgtaaacgggttaagcytttgggwyatracctggwgawrtctctgatwctagaaaratctagaamgaggtytttgaggtktkaggggadcggatgcramacaagcctsaytgctagcttwgtagcsaactcagacamgcggtccckggrtgggaargtttkctct

SEQ ID NO: 215944 - DNA, 944 bp, Homo Sapiens
atcctgtatgtagaaaactataaggaattcacaaagaaactactacaactagtgaataaaamaaggacgaaggatacaagaacaatggacaaatcgattgtatttctacaggttagcgttaacaacctgamamccaaaattmgamaacacttccmccattcaagacagcatggcaaamsaataamatacttggcaataaatttwmcamaaaaaattcaagactcgtacaccgaacaactacaaaacactgctgagagadattaaatttagagacctctgtgtcatggattggkwawctcaacgttgttgacagtkagtctccccaaattgatctataggttcwakgywattyctaccathtytyctkctkttttttttktttttttttttgctgatatkgtcaatttgtwtggtwctgtacaggtcccggcatagtcaaaacattcctgaaaaagttagagggcttataattccaaatttcaaaattcactataaagctacagtcagtaagacagtgcagtattagcatgaaggatacaccttcagaacaaaagagaactcagaatccggaaataaacccttatatttatggtcaattgattttcataagatgctacggcaattcaataggggagggacagtcttttcaataaaaggtgctggaataatcacacacccacatgcaaaaagataaattatacccttacctctcactataaacaaaacaatatagatcacagacctaaatgtaggagccaaaattataaaactcttaaaacgtacgagtaaattttcattacctttaattaggcaatgtttcttagataaccataaaactgcaaaagcaatttttaaaaatgatawataggacttcatcaaaaggtaaacgcttcaaaagatactactgagaaagtcacagaataggagaaaaatctgwtgagact

SEQ ID NO: 215945 - DNA, 983 bp, Homo Sapiens
aaaaacaaagcaacgtgagacaagcagttcccaagttggtgacttagaggctggaaaaaaatccatggaggtgtcacatgaaaccagtatgtcttgaaaaagacagtccttcttggcaagctgccaacaacactcatattgggttctctggcacaaagctgggtcaagtccatgccctaacttgtcagagaggaagactcagactattcatgatttcttctagcaaatggggagaagcagaggtctgcttccttgagcaggttcaggaggtaaatgatacacactgtgtggacctcacaggtggtagacatgatacggcttctgcctcagaaactgtcagtgacataaacggcaagagccataaatggcaggtgagaaagtctaacactttctaaatggcatgttagaaagtgtaacacatacctggaacttaaggggaatccgcccactgtatatccttagatgttggggcttccaaatcaggtacttgtctctctcacaggtgtactccttcagtataattacactaaaaggaaattgcatattctcagtacagctaaggcttttctccaatgtgaactctctggtgttgaatgaggacagatttgcagccaaaggatttcccacattgactgcactgataaggcctttttcccgtgtgaactctgcggtgttgaatgaggctagaactttggctaaaggatttcccacattcactgcactcataaggcctttctccagtgtgaactctcaggtgtttaatgaggttagatttacagctaaaggatttgctacattcactgcactcaacaggtctttctccagtgtgaactctctggtggttcttaaggttggagctatggctaaaggatttcccacattccccacacacatamaaggcctttcccctgtgtggactttccgatgtgaactgaagctggagctttgcttaaatgacttcccacatttactgcactcatagg

SEQ ID NO: 215946 - DNA, 926 bp, Homo Sapiens
  misc_feature (12)..(12): n is a, c, g, or t
  misc_feature (14)..(15): n is a, c, g, or t
  misc_feature (18)..(18): n is a, c, g, or t
  misc_feature (22)..(25): n is a, c, g, or t
  misc_feature (29)..(29): n is a, c, g, or t
gttgggactcangnncancacnnnntgtncctgggtagagtcacaactgctcctctcagctctcttggcacttcagggggctgcccctgcaggtcccctccccacgtccccgtttcctgcacacacgtctcttcccccctccctgctccccgagtctctcattctttcaccagcctgtagatgtggtgctgagccccgtgctcactggctgacacctcaaagacataggcaatgcacagcaaggtctcctgtgtgtctctgttggtgaccacctgcaggatggtgaagttctccagcacgctgttcatcatgtacttctcagggaggtgcttgagcttgtggatgaagttgatcatgtactcacagagcggggaccggtggatgcggtaagagtagtgtccattctcatagcgagcatactctgtctcaactttctccaccacctgcttgccgaaagagcagaccttcgtggagcaggtgatgatcatgttctcggggctctcatactggctggagaccccatagaaggagctgccttcatcctcgatgttggtgttgaggtctgcccagaacttcacaagaaaaaaggcattggagggtccccgttcgaagagatccttgagtccaccctttttctccgggaatttgtcatagatttggcggatgtccacggcttcgaggtaggggtcgctgtagcttgggctggactggccaatgtgcacgaacaggtgcttgttgtacgtgtccgggtcctgctgctgctccaggaaggcagagaactccaacatccagagcttggagctggccacgctgcggccctgccatgggggtgccgggggcsararggcgatggggcgggccctcaggagactcaaaccctggcagaggsagcggrggtkgaacagcataggtttgctgagaraaag

SEQ ID NO: 215947 - DNA, 859 bp, Homo Sapiens; identical to SEQ ID NO: 48714
  misc_feature (221)..(221): n is a, c, g, or t
  misc_feature (596)..(596): n is a, c, g, or t
  misc_feature (604)..(604): n is a, c, g, or t
  misc_feature (676)..(676): n is a, c, g, or t
  misc_feature (680)..(680): n is a, c, g, or t
  misc_feature (682)..(682): n is a, c, g, or t

SEQ ID NO: 215948 - DNA, 932 bp, Homo Sapiens
  misc_feature (3)..(4): n is a, c, g, or t
tanncttaaaaacaacatatagagcaacaggaattaaatggttaaattgcatcaacggccaacatttaaaaccagctctccctccactgtagaccagagatcctagtgctgctgacagggtcttgtggcacccctgagattgtcctggcaaagtcgagaacacatccaggtcaccacagattctggtgtgttctgcagagcatgtgttttacaagcaatgtccctccccatggccaaggtgaaataggcacaagttctgtgccctgccccccatgtcacaagcagcacaacagccattcaggccaacacatccagaactatgtgacaatcaactggtaagaacttgtttccaggttatgaatatttgtaatgcttccctctgaggccacaacaggccctatctcccagcccctaaagttgctccccatgtttcctttgccaactgctcccctggctgttgtggaacagcaattgcagagcccttcccagtctctgatgtcctggtgtgcccaggacaatggcagctacatgagccttagtctctcagttctggggccctggactgaggctggaaacagggcagctcccccatggccgaggctcctgcaacagccaggctttcctcaggacccctgctctgtgtctcaggggtgctgagatcctgttcttggctggaggactgtggcttacaggctgagtctcccttcttgctctccctgttggtccagggtgaataagagactatggtgaatcctcttctgcagggctgaggctgcagggaccagctctgccctgtgtcctgttaacgatgtttctagaatgctcagcatccaccagtgcaggtcctgctcttggggtgcatcttggagtctcaccacccacacttcaccaggctccagcagcaatttccagtgctgccctggggtcctcag

SEQ ID NO: 215949 - DNA, 1000 bp, Homo Sapiens
  misc_feature (4)..(5): n is a, c, g, or t
  misc_feature (12)..(13): n is a, c, g, or t
  misc_feature (27)..(32): n is a, c, g, or t
waannctgtttnngtggtgtttgttgnnnnnnacctaaacatcaaaccataagagatgaggtaaacaaaggatgctgtagctatgtaaatgagtactcttacattacaattgctgtaaactaagcttgttgctctagaaagttgttcatataagatattaagtgccaacgtgttttatgaaagactatacatgatattgtgacactacacttacattaaaatatatgtgtacatattatatatgtatgatactatatgactaaatgatcatcttgtctttggggtaagtaggatttggaagtagctttttcttctttttatttgtctacacttccaaagtttttgtaacaagcatgtgctgctttgcaataatgaaaaatagcaatgctaacatttaactgaaaaaagaaaagcacaattatcctggagtagggcaggcactaaaaaggcgggagtaagagcgatgagagtagaacgctgagctgaggctggcctccttcacggccaccttcctccaggggtggatccgtgttccagtcacctccaaacacacaaagatgtcagtgccacagaccatactttctctcacacatccagtcaaagcaccaggaggggacagagtcaccacagtgcaagtctcagctgggattgggcaggggagaggagaagggcatcaaggagctgaccaggagacacactgatctggccaggcagcctcttgcagaagtggatcccgttaacaatgaaacagatatgamatgaacttggcaacttctgaraamaggattgtctagtggtgcttctarcctaaagtgacccagtttcagatwagacagttttatccagaactcagaggggggaaaagattaawwtttctycyyagggaaggrtacccraascwmcmmragckgaaakgggaatamatgcttaaaggkgrtatagrtkgccaagtccatkgrgratggccycaggtwtgtgdtgaatcagtgcrgggggaggt

SEQ ID NO: 215950 - DNA, 970 bp, Homo Sapiens
  misc_feature (9)..(9): n is a, c, g, or t
  misc_feature (12)..(13): n is a, c, g, or t
  misc_feature (27)..(27): n is a, c, g, or t
agtattktndtnncagggaccgtcccncacactggagagattttttktkkkkkttcttgtctatccactggggaatatctgggccagcctaaaagtctgtggggcctaggcctgggcaggctctgggggctgtggagccgaggagccaggcagagcggggtccttgggggccaagcccatgcgtcggatgctgtcctggtacttgcggcggccgagctccaagactgcgcgcacctcttcagccacgtcctgccggtcactctgctccagggcctgcaccaggagccccacagcccctggctgcccagcctggcgctcagcccaggagaagagcatgtgacggatctgctcatccagatcatcccggaactcgtgccggatgcgctgcacctcccggtaggacacccccaggtgcagggccacggctggccagtccagacccagacgcccagccacactcagcaggttgctctgcgtcagaaagccggtctcggcatctcccagattcaagggtgccaaggagaggccagccccccgccgtggcccctcggaccctcgaagtctcggcagcttgatgggcagagtggccatccacagggcgtctgcgcccttcctctgccgggcagcctcagcctcctcgggcacccgcacaggcaccgcgccacggtagaaggacacctggccccgcacagcctgagcctcccggtccagagtggtggtcacgtatacctccttcacattcttcaggtgcgagtagaagamaaarcagattctgccctccacacagtcagggcggtcagcatccatgtcgatgccgcgctcgaaggccgcaaagaactctttcgccctcgaacatctccaccgtgtmaaagrgcycggggccccggtamcgctccarcagccgcgaaagggtggcgtccaccttgtttcggggcgagmctgcagcaggactsaycarggtycsgagcgc

SEQ ID NO: 215951 - DNA, 904 bp, Homo Sapiens
tctgccaagctgtatagtaaaaggaaaataagtcacatctggtcattggcatttgtatcgtcattctgtaaagacaaaagagtacctatataagaagctccacgtaggcaaatcgacatctggtaggctgctcgcccccaggcagcagctagagtctgtaattctctgcgtcatcctcttctttttcttcatttttgctttttcttcgcttgagttcttctctgaaattatatgcaaagagttgtgggtcttcatcacacatttttctgtatacatcacagaggctcttaaagtgtgagakggagagccggcggggccgaagagtagggtctatgtctgccaactctaacagcctgcccgtgctttccaagcgctgcgcttcagggaataacattctgagccctcgatggcagtatttccttcggaactgaaatacattctgaaccactttttccaccagcttgaatggctgctctatcttgggctgtatcaagggagtgaagtgcaccacgcccacgtccacctctggtttggggacaaaagcttgttctggaattgtaaagatgtgtcgaacattgcagaggtactgagccataacagagaggcgactacgctgtttgcttcctgtattggctgcaagtctctctgccacttccttttgaaaagtcaaagtcatctgagtmctgccataaacaaaaggtccatctctacaggaaatattttcaagccacttgataatcagtggagthgaaacactaaaaggcagawttccaataatatgtacatttggrggatcatcttcccagggtcttttaagactttctgaaaaagccttttctaccttaaatgtcaagacatctccatgacaattctcagtttcccaggtgstgcatcaggaagctct

SEQ ID NO: 215952 - DNA, 1000 bp, Homo Sapiens
atattaaaaaattcaaacagtagaacmstgtgtacgtagaaggcattccccactcccactccaggagtttgggtatcattctagaagtgttctgtcaatacataagcatttttcattcaaacacacacacacacacacacacacacacacacacacacacacacacacacacacacgggatcccatattctataattttygtgttttaaaaaaccaccatatttcatagatatctttccacttaagcacattcggagctccatcatttttttttttttttgagacagagttttgctcttgttgcccaggctggagtgcaatggcgctatctcacctcactgcaacctctgcctcccgggttcaagcaattctcctgcctcggcctcccaagtwgctgggattacaggsatgcaccaccatgcccagctaattttgtwttcttagtagagacagggtttctccatattggtcaggcttggtctcaaactcccgatctcaggtgatctgcccgcctcagcctcccaaagtgctgggattacaggcaagagccaccgcgcccagcacggtcttttcaaagaccagataatttatttaaccaactgtctaaagatggacattgtgattgatcacactattttatatgtaacattgaatggagtgggtgagttctaggaaacattctctcctaaaagtttacatttttcattgactagaagtgaccaaaatagattctactgatgagaaaagacttttgaaagcagtatggtcaggttggcaggtgaatggcctcaagagcttaggatttcattgctactaaaagaacaagactattcagttgtgaamaatgatttagtcaaatactgatgctgtctcagatgagtbactgcmaatcacttcaaaaggtagargggtagytaaatgtgaaaaggttctgccmytcatgtagggagatacaagctttgcaatwrcaaatagaagaawaatggttymgtacagcyct

SEQ ID NO: 215953 - DNA, 935 bp, Homo Sapiens
  misc_feature (24)..(24): n is a, c, g, or t
  misc_feature (31)..(31): n is a, c, g, or t
  misc_feature (34)..(34): n is a, c, g, or t
  misc_feature (38)..(40): n is a, c, g, or t
gggggtggaagaacatgagcgagngaggktnagntctnnnagggccctggaaatccatgccctccaccaagtcctgcaggtaggccttgtactggtcggaggtgagggagagtgggtggctgttggaaatgtgcaggtccacagtattctccagggaggaggcaccccctacccgggccatttctaccaaggccctgaggcacgtgggcacaaccttgaccatcacgagcctcttggtccacggctggtcctggggccatgactcccccacacagaaccagagggcatagcgtggtgagcgtccgcttccttccgtgaaggtaatcagatctacaatgaagggccccaggtcaaacacgcctccttccttgtccttggggacctcgccatcaggcccatgcccgctgttggggagcagctcctcgctcactgcccagtatgtgtggcagtgccccagccgctgggcccagagccactgcccggcccgccagagagccagtcccccacccaggcagctcagcacatgcctcacgtagctcatcactcccctgtctgtcagggacatgccagggtctggcagtgtgactggccatccaggcagcgtcctgtctcccacttcggaccccaccagccgcagccktccgggcaggagatggtctgctggaagacttggcggccccggtagaaggctgtcacctcgaactcccactcttcccccggcaccaacagccgcttcagtgggttctcagagggccccaggtttgggaagggagtgggattgtccaagctggggctccgcaggggctgagggcagggctcaggggctacagccaggcttgggggtcccggatctgggagtggggccaacaccatgttacacagtcactcatccagaatgtcttcctgggtatcagaagtactgcctccaccattgg

SEQ ID NO: 215954 - DNA, 1000 bp, Homo Sapiens
  misc_feature (16)..(16): n is a, c, g, or t
aactagaagwgdtatnttaactcggkaaacatackggsatkaagctcttkagcctcagaatggagctcagagggwacaaaacctcttttgaaattaaaaatattattcagctgaaactgatacttttgaaccaatatgaatttgaaataactaaatattttttcaaaatctccsttaacatcaaagttcaagatgattgcatttattttgatgtcactatataaatacaaggatgthaactgatactcacctaagtcaaatattccagttgcattaacaaacatacacataacaaatataaatttatatcaaatgtcaaatttccccattatcttctcctcttcttcattaggaatttgatgttctgaaaagtgccttttttgtctgcttcgattttttgttgctgttttttttttttttttgctttataatttctaagcatttaggcagaaaagaaagaggcattaaaaatacaactcagaaatatttaaattttgatgaaataagagtcttgttagttgcagtctcttttgaatactttccktgggagaaaatatgctgtgaaacagtgatctgccactacaaagtggttggggacattaggtcatttctagaaagcaattatatacacctaatggcttattccctacaaaatgaactattatggtgtmagaaaaggbtaratactttatcatctgaaagacaggttgctcagatgtatacaaatgaatttattctcttgacctctagttcagatgtcagaaatattttgtactaaaacagagataggttcctatattggaatatgttcaatatttactacctttctcttctattctctatccataaaactctgcctgattaaaatattttaaagtgtactttttacctgatactgttaawagcattgatgatcctggatttaaagatggstgctttagtctatttgatttggggaagccattttaacmaacaatatgtggtatmttwaartttataa

SEQ ID NO: 215955 - DNA, 947 bp, Homo Sapiens
  misc_feature (4)..(4): n is a, c, g, or t
  misc_feature (30)..(30): n is a, c, g, or t
tggnggctagtgccagtagtagtcaagacnatttgttggcatggttgattccctccctcccttccttcctttttttttacagggtattactctatgcccaggctggagtgcagtagctcaatctcagctcactgcagcctcaacctgctggactcaagcagtcctcccaccccagcctcccaagtagctgggactacagatactcaacaccacacccggctaatttttttgtagagatggaatttcaccatgttgcccaggctggtctcgaactcctaggctcaggcgatctgcccacctcaacctcccacagtgctggtattacaggcgtgaagccaccacgccccaccaagattgatttcttctgaggggtctcttcttggccatcttctgtgtcttcccatggtcttccctctgtgatgcgtctttgtcctgatttcttcttccttggctggtgaggaggccgccgggctccgggtccagaagctctggccggctgttgttctgagccatctgccggtctgctggtttcactgctctggaatctggagtgaggtcattgagctgaaggttggatgggagggacatgttctcccgtggcaggcgcacgtggttgagttttaggttgttggagtcacttgatatcagagatgggtgccgggaggggcctggggctggaagcgacgcactggtgacacccacgtcattggtggccaccaccgagaggttgtgtgccaggctgcggastgcagctgcaccgtgtggttggtgagccaggggtagttctgcgcatccaaaaamargaagwcarargtgtwgacagtcactggsccatcctggtcgatccaggtgacattggmcggmgggttggcacgcaccmgggsmmacmggacaacaagragcctgggcctgagcttctggtacttgcgcgacttgggcatctctgg

SEQ ID NO: 215956 - DNA, 1000 bp, Homo Sapiens
  misc_feature (17)..(17): n is a, c, g, or t
  misc_feature (23)..(23): n is a, c, g, or t
  misc_feature (30)..(30): n is a, c, g, or t
tgcctcactcacgcaangaggantcacctngctccagtgaacacgtgtggaacagaaatcagggccactgaaaagccaccacccacttgagagggcttgttctcaacaaacctgactcagatgggcccactttgggcctttagtcagatttagagaaaacccccggctcatccaatcaatgtgcaatcaatttctacaccatggcagaggtaggaaaagccagtcacatgtccaaatgatgagtgaaaatcaaggcatcgtggagccacctcctccagagggggagccacaatctcaggaccccgaagagcagacattttcaagtggctcctttacattaagcaaaatgtggtcctctcattcgggtctgaagcatcatttgtgtgtgagcccggcccactggggacctctggctgccaggtggagagcctcctggtgcagatagcaaggtggagggcagaactgcaaaaatccagggctccagtatggatgtgattcccacagagttcagtcccctttatttacccaagtcccatggtacaaatccctggcctgccacctgcaaatccaccgagctcctgattcctgctcccctgatcatggtgttgctctctgcatgattagctgctggttctccagacactgcttcagcttgtcttctgtcagtgtcaaccgctgctccagaatggagactgtctgagtgaggacatccagctggcccacaatgtgctccagcgtgctagtcagtgtctggggcacactcacgggctcctggggctggctctgcacagactccacactcctgcctctgcctggggggacagggaagtccacttctggcagattccccatggagctggccagtgtggctgggggcctcggcactttcgtgacttctccatgatcaacaatatcaaagttactcttccaaaccatcacttgttcatcagagcctccagaagcaaaatactcccccgttcttgaaagggmacagtggtgg

SEQ ID NO: 215957 - DNA, 1000 bp, Homo Sapiens
  misc_feature (432)..(432): n is a, c, g, or t
ttatatccttatagcaatgtagatgcaagarcaaatgaagaaattcatatattttttgttaaaaaatcatcagaaatgttttacatgtagaagatacatgtgataaagaagtttgttaatgaacataatagtaggaaaattttatagataaaatgtctctgaagaacacctttttgattttctcatggtataatacaattgattgtactgtgagtagcatttgtctataaattcaagttatttagagtactctatagaacattcatgctagaaacacaattcatataacaacaatttttaaagaactaatttgtaaattatgacacaaaattttattaacaaggaaatatccattaattgactactacagtaaaaactttataatgcttgtmtcatgaagaaagaccttccttttccttatatattaattgnactacataggcttgcygtacattttgttattcatgttataagaattctagattccattgcttttgaaatatgtttctttttaggaactaaaagtcaacttatagtttgatttctgttttatttgtactgtgtttctgatttwrtgggtttctaaataaaaagatcaaacccaccactttcaatatactgttttctatttaaacttttgarttgtagtmagaaactgttgttggactgcatagttttcaaaagtttttggtacatttctgactttagaaatctggggtaggaatccctttccatatgcatatagactattttctgagcttcttcaaaacatgtttcagtgggttcctgaatgttcctgatgatagtstctcttgtcgaactgtcaatgttaatctctctaggggrctgtggctggatgttaatcttataaagcttctttgccctagaaattctgctccaccgtgagggaatttttcttataggtttcacatggccwccagrattgaatattcycgtcactgtgctccatttttaaawatgsygcatagacyactggrcc

SEQ ID NO: 215958 - DNA, 739 bp, Homo Sapiens; identical to SEQ ID NO: 47233

SEQ ID NO: 215959 - DNA, 632 bp, Homo Sapiens; identical to SEQ ID NO: 45955

SEQ ID NO: 215960 - DNA, 663 bp, Homo Sapiens
tttaaaatgcgaattattttagcacaattttctaactccaatgaataataaattaacaacgaaagaggagcaaaaattattccatttgcttgaaaattgttaaacatctttctataataaatcatgagtaaagtcaaaagtaaaaactgaatgtataaacaaattggagctgaaagacaaggagaacaagatttataggatgtggtcaaagcaatgaaacggaagagttccctgattccccttgcagggcgtgcgacaggggtgtggctcacctgttcagtagccccctctgcagaaaccccttgcgagagggggagcacgcagatgggcaagtgcagaggccggggtgagggctttgggctctggctctgcggtagcgtctagaggtgggtgcctgcaaccccagtgttacaaagctctttcagcttggccaccacagacagctggagtgttaaccagctcaatggaccttctgctttttcacaagggcaaaggaccatgggacagctttttgtattccgagctcttttttcagaattcaagaaaaatcgggtcaaacacggacctttaaggattgaaatgcaaggttttatttgtattggggaaattggcttttaaccaagaattgatgggggatcttggaagggttggggaatgtattaa

SEQ ID NO: 215961 - DNA, 903 bp, Homo Sapiens
ctgccgctttaccatgcagcatttattttaaaattaaattaaattaaaaaaaaaaagattgcatcaccaggtagttttctcgattaaggaggcagcctgaccagggtgggccgtggccgggcggcagcagcatcacactgggccatttaaggcagctccttctggcggggcatctgtcttcccgtcctttgtcactgtccccagggtggccaccatggctggggctgctgtgactgccatgatgggccctagggggaccgccacggccagtgcagaagagactgctggggtgggtatggcggggccagccttgctcagtgctgtggtgatggccacagtagcctcggggggcacagccacggctggggcagcagtcacttcctttggcgcggggcaggcagggcttaacagccggctgtcagcacacccgaccctgccgaccgcctcctctgtcctggccactgtgggcagcgggggggcctcccggccgggacccctgctcaccgcatccatggcactcgctgccttctggtcgccatcctcgctgtgggagcccccagaggagctactgtcagaggccagcaggggggcccttcctggtgacacacacgttccaggcacatggagaagcccggctgaaggctttctcagggccttggctccggctgccctcagcatggctgcattttgtgtccaccggagagctgcacctgggccctgactcggaccagcagaaagggctggaagtccagtgaaccttggcccagccctttttccttttggaagcttgaggtgccaagctgcccaccacactggaacccaaaggtgccttaacccattctttggggcttgggggccccttgaatttcccttggcttaattaaaacacattgcgcggcccca

SEQ ID NO: 215962 - DNA, 720 bp, Homo Sapiens; identical to SEQ ID NO: 54918

SEQ ID NO: 215963 - DNA, 878 bp, Homo Sapiens
acaggactaagcacttgctgaggatgaaaggaaagaacatttggggccaggctgggcctggagatccgggtggctgggaggccatgcatgggttggattggggagctcacaggagagaacctgctggctgggccaggcctgtgtggggcagggccggaggcaggcagcatgcgggaggcctggctagatctgcatggagcagatccatccaggtggtggctgtgagccaggagggagggactgaggcttctctggggcagggggtatggatttgcggctggatagcaggcacacttgactcccactcccaggaaaatgatattgtaggacagtcaggacacctggctcctggtcctgttgctgcctcgggacttgatatgtgactagccaagccggacccttccagtgtcattgtcttgctgatgcttggacatttgccttggagttgacccacctagggaccctctgaggacatttgtggacaatcctggagagtttgcctagggcccaggagggcgggctctgcctatgaagcgaggtgattccccagcttcctgtcatctggtttttttcccatcggccagttaattttctggctgcgcccctacagggggcaccattttacactgaaatttgggccgttgttgggccaaggaatactaaatggtaagcctttctttttctggcccgcccttggttgcttctgactttcttgcctaaaggaaaaaagggattcataagcccggaatcctttttccggcccttttttctgtttaaatatgcctttctccctcatttggtaaagaaaaacatgtccccgtggttcacttcttcgcgggaaaatgtaagacgggcaattggccgcggttttctgggct

SEQ ID NO: 215964 - DNA, 857 bp, Homo Sapiens
ttaaatccgctgtttgaaatgttcaaaaggcacttcaagaaacatttaaaaatacatttttctgacttaatggtgatcacttaaaaataagcaagtcaccagacatttttaaaccattcgtaacaccattaccttaaataatttttaaattccaaaacacgaacattcactatgtagtacaacacactgcttagcagtaagattagtttccctctaataatatacttcatgtagattattaatttgcagggccccgcaaagttattaaaacttaatataaactgaaaactagagaggtaagggagttgaaatagagcaaaattcaactctaaaactttaatgttggttgctctaaagagaatttgtaaaattccttattctagcctgtattaaagtttttatttcaaatcttatatataaacacatttttaaaaaatcaacagaggttacattaacatttagcataaaatctaccacaggttgcctcccagattgcttcactatgtttctgtcaggcctactataaagtagaaaaataaaatgagttttgttttttgttgttgtttttgagaaaagggtgagtggaagaacccaaataactttacttcctttaataattgtagacatagaattaattttaaattatagatttttaagtagggcaagtatctcgagagccagcaggcattattcttagacttttactttcaatttcatagggaaccctagttagtaggcttaaaattatcaattaagtgataaaaattctaatcactattaacagccaaattaaccttgtgaaggcagcatttaagagtaactagaaaatggaagttagtaataaagcaaacaaagaa

SEQ ID NO: 215965 - DNA, 1000 bp, Homo Sapiens
  misc_feature (3)..(3): n is a, c, g, or t
  misc_feature (6)..(6): n is a, c, g, or t
  misc_feature (10)..(10): n is a, c, g, or t
agnaanaagncttawtttatcaaaaatavcaaagmtacacgctctttgtggagaagcaccacaasgsaaaccttagtytggcaggcttcattgtaaataaaaatagtaactcagccctccattcagggaggagaaaggcattttaaagctagtatattgaaggtttcccccttgacttcagtgttgaatggctcttgcaaggacttcttgaaggtttttttttctcactagccagtgtttggccgacaggttgcacctctgcctgagaagatgccaggttaaaccccttcacatgggtgctccattgccgccatgggctttttgtcagggataagggtgcagccagccagcatgtccagagaggccaagatagagtcatacaggcgatctgcgtggctctccagctcaccagactgctttgcgatcctcccaaggacatcctctaaaactggggtgttctccaacaggcactgaagaagaatctcccccttctgtaagacactctccgtcagagactgatgttcatctatatctttcttaaattgccggtaaagctgcagagaagacttgagacttgtaagattggacctggctgcagtcccgtggtcagtaacatctgcaacattatacagccagcagatcagctcttccagctgacagcaaaatgtcttcacacattgcaccagtgattcttttccctgttctcctcctttcctgggaagctgcccttcaacatctgggtctgagaatggscaccggtccaacctagctggcaaggaggggcgtgttttcagcagtccagaggagaccccgagggcctggctgctccccagactgccttcccctgcggagtcgtgggcacggacgaaggagcgcaggaaacagggattctggccctcaggatccccaratctttggagggsagctccagggggaagctggctttggctggagcttgaagggaaggaagctggccatcactgtctgacacttcaagggg

SEQ ID NO: 215966 - DNA, 586 bp, Homo Sapiens
aaagaaaattggccctgaaacaccatccagacaagaatccagatgatccagctgctactgagaagtttaaagaaatcaacaacgcccacgcaatacttaccgacatttcaaagagaagcatatacgacaagtacggatcgctgggactctacgtggccgagcagtttggagacgaaaacgttaacacctacttcatgctgtcgagctggtgggcaaaggccctgtttgtcatcgttggcctcttgacgggctgctacttttgctgctgcctgtgctgctgctgcaactgctgctgtggacactgccggcccgagtcatcagtgccagaagaggacttctatgtgtccccagaggatctggaggagcagatcaagtctgacatggaaaaagatgtggactttccagtttttctccagcctacaaatgcaaatgagaaaacacagctaatcaaagaaggatctcgaagttattgcacagactcttgatattgagccctcagagagtccacagtccctcctctcagttcagtcttgtctccagatggtcgtaggggagcgtgtggggcataaagtgctgtgaacttttc

SEQ ID NO: 215967 - DNA, 1000 bp, Homo Sapiens
tgagaaggaactctcattccctaaagattttttatatcaaggggacagtaatgcaaagcaatccctttctgaggcttttgctcttacaaagwttcaacacaccatagtaccaaaggacacacgtccccaccttgttacatcagattttaatatggcaataaatgccttgaaaaatacacattttaaacttaaaagggtattgaaagccattcttctccaggtaattaccaattacccctaagggtggtagctgtaaaaccacttgatcagacaaaagtcttggtcttttcaaaagttaaagttaagtcaggggcagttgattctgctttctttactgttcccatctgagagaagtatggaatttcttaattgggaccatttgtgggaagacattgagaaagctcctttgagacacttttttttctgcttkgccaactgctctagaaagaagaaacgtcaaggtgggtggagacagtggtctgggcccaccaccctcccggctgaacagcctgttatgctatttccaaagagaactcgccaggaggggagatgactgcagaacaccaggagatggatagaatagggtaggctttaggtgcagcgtgtggcccccccatcctggggcccccagggaggaagagggggcttccgttgagataaaggccacatgccttaggaaatatccccccagaaagaacccaaaggtccagtgttcttgcagatccaatggagttcttgtagaagggaaggtggatggtgacgcctgcwggggtmatgtagcggttgtmcagtaagcgttcttggggggccttgcatgtgtgcacatccagagcttccaggcagttctgacagcgcacggcgcacacacagtggaacttacacccacacttggtcatccgggtgacatgggaggtgtygtagcctctcccacagcacawgacttcacagctgtycatgcccsgggagtaaggtkcmcaamggsctgctgtacccagggagc

SEQ ID NO: 215968 - DNA, 879 bp, Homo Sapiens; identical to SEQ ID NO: 40275
  misc_feature (8)..(8): n is a, c, g, or t

SEQ ID NO: 215969 - DNA, 810 bp, Homo Sapiens
aaaatttaacatatgaggaagaggtatatcttacagaattatttggctatgtcataaggcagtaatgaagatggaatttttcctatcataaatctgacataagtgaaagtctataacatggtcattctccataaatctgaaagcttgttggttacagcaatatgatcatgccacactgtcgtcgttattgaactttgatgaaagtagactgaatgagaaaggaacaaatttggtgcctgcaccaacgtagaatttgttctgaaattctacccagtggaggcgtatggcgtgaagaaacgcagaaagcccttccatgatcagaaggatgaaaatggtcaaaactgcaaagagcgcgataaccgggagcagtagcaagacgccataggtggtgtcaacgcggaggcccacgcgcatcagcatggcccacaggacatcagacaactgtgcgtgagccaggctaagcgcccagagcctcaggtaggaggcggcgttggagatgcatcccagacagtcctcgatggaatggattacttgggccattaatatttctccaaaattaaactcttcacacgccattcctctacatccatcttccacctggcgattcccctcttctatatcttggcttcccagcacagaaacttcttcctcactatctttccttataagtgtgtagccacttcggttcaccccgaagcacctcgcccattggtgaagtcccaacacaaacagctgtcttttcccaagaataggacagggtccacactatgtctgtgacataccactagaattttcttggcactactcctg

SEQ ID NO: 215970 - DNA, 1000 bp, Homo Sapiens
ctggtaccccagacctcctggagcatcccatgcccactctgggtcggcttgatcctactgagccctatcggaaagtttgtccctgcagcctgagaattgatgaggagtgtgcctggggccagcagcctttggaaatatagctctggcctggtgtggtggctcacacctgtaaatctcaacactttgggtgccaaggcaggaagatcacttgagctcaggagttcaagaccagccctgaccagcatattatctacaaaataaaaaattagctgggcatagtgtcatgtgcatgtagtcccagctacttgggaggctgacatgggaggatcgagcctgggaggcagaggttacagtgagccatgatcaatcgcatcactgcactccagcctggatgacagagcaataccttctctcaaaaacaaaagaaatgaaaaagaaaatatagctgagctcccttagcccaggagcctccctgctggctgggaagccaatattccctatgcagcctgtaacagggaggcagttgcaatctgggatggccaggctcagcctttatcctcaggctagggctcaagacaaggtggtgaagaaagaaatgcccttcaggaagctggtgatggagcaccaagagggtggtcccttggtggatggtcaggggcccaaatgtttcaaggcggccttcagggacttcctcaggaaggtggtgttaggttctagggccatagccaggcccagcctctgggtctcagtgatgttagcctgatacttggtcatcactgtcagcatgagcttggcataggccatggaggtggtggctgccagcccctttttacagagcttctccattaagacactgaacttctcaggggtcatctccactgccgctctaggagtgactgcacaccaagaaagtttctccttccagggcastccagatctgtccagcattagaactgtgctctggctcaggactcmtcttcacaagcamaaataatytgtt

SEQ ID NO: 215971 - DNA, 807 bp, Homo Sapiens; identical to SEQ ID NO: 45706

SEQ ID NO: 215972 - DNA, 921 bp, Homo Sapiens
  misc_feature (544)..(544): n is a, c, g, or t
tttaagacgagatttgtattacgaagctttactgcagctgtttcccttacccagttgaagtggccagtcattttaatttgcagttctatttacattcccaaggtaaccacgttcagtaactctctagaggctaagctgttaaaatttccatttttatacaaatagcaaagatatttctttctctttctttctttctttctttctttctttctttcttttctttctctctttccttccttccttccctccttccttccttcctttctttctttttgtttgagacagagtttcgctcttgaccccgaggctggagtgcagtggcctgatcttggctcactgcaacctctgcctcccggattcaagcgattctcctgcctcagcctcccgagtagctgggattacaagcacacaccaccacgcccggctaatttcacccggctaatttttgtatttttagtagagactgggtttcgccatgctagccaggctggtctcaactctttacctcaagtgatccgcccaccttggcctcccaaagtgctgngattacaggcatgaccacctcgcctggccaagaaaaatgtaacccttgaaatagcacagcgttctcattatggaaacaggtgcaaagaaaatatagtacaactgggttacatgtaacaaaagatgcaaacaaaatagcatccaagttggttttgcagacagcccaacggtccaatattaggactacagaatcccagagtaaaccccaatggctttaagggtaggaccccgccaattaaatggttttaccagaaaaaaagaccttcccgcgccttaggtctggggccatggaagcctgacccctatgagaggccctttggctaaaaggggcaagacccaaggcctgggcttgacccaacttgggcgtggtgagaccca

SEQ ID NO: 215973 - DNA, 1000 bp, Homo Sapiens
cctcttgcaacaataacagaatggactcaactccatcctttgaatagaccaatttcatgattctcctaaaaagttttgagttgagtatagttccttgttgcttctctctgtgatccagagcttaagaatcaatccctggaaaccagccactggaaccagacctctccagaattgagaagagacagccatagaaaaaaggacacaaacccaaaagtcttgagcgctgtgccatatgcttgatttcagagcattcaggcactcaaggtcaagtgtggggccatatatatatatatcctgtcatctcaaatgccacaacggctacagttagcaggatatcagagagaggaggcatatcgtggaggaatgaatcagtcccaacaattatgtgagcctttctaaaaattcaataccaaggattcttgaaaatacaagtttacagacggaagctatacagctagccatgaactgaagtgcatgtgcaatatcaagaaggaggagctgtgcttaagaaaccacgcacgtsttatttatctctaattttaaaataattcattctcttgttgggtatgcaagtgagcagtggagaaagtggagcatctgcaatacccgctggtgctaaggatttcaatgcttccagaagatgtgggctagagaactttattaggcatcggaggggttctttcctctcagccaagatgctcccatttaaaccacttttgaatttcgtttcaagcttatattgtgcmaattctagttsgtggttgaggataatctccaaatgtttcttgagttattcgttggactctctctttttctactatgttttcatgaatgatccttgaatccatatttatatctagtccaaggcytctttyccgttatagatgtcgtaaagttgtgagtttyaaggtctgatatamtgtttaaaaaaatatgctmtaragagtcagatatcgmytctcmggkccattttcmcaacckgatggkgttgchaccattt

SEQ ID NO: 215974 - DNA, 987 bp, Homo Sapiens; identical to SEQ ID NO: 46663
  misc_feature (34)..(35): n is a, c, g, or t
  misc_feature (631)..(631): n is a, c, g, or t
  misc_feature (787)..(787): n is a, c, g, or t
  misc_feature (797)..(797): n is a, c, g, or t
  misc_feature (873)..(873): n is a, c, g, or t

SEQ ID NO: 215975 - DNA, 878 bp, Homo Sapiens
taaaaaaagtgttattaacaatgggctcagagtagaaaatgcagacagatgggttcactttaccatattttgggatcatcatcttattgcgtacagcactgtaggcaagtaaacgaaaccaaaggctggctcccctggccgaggcctgggactgatgcaagacagccagccagtcacctccgcctcccatgaacctcttggaaaacttctcctgtcccacttctgccaccctccagctccttgagagagccagagttgagaagaaaatgagcctgaagttgaaagggaaagttcttgcctgaaacagtgctgggaataagtccagaccatttccctcaagagccacctcttcactccttaagccagaggacaccacaaagacacagttaatggcctctcatgccactcctcaggtggcttgtgagggcagccagtgagggactgcaggatttcagggaagtagctcagatggcccactcagaacttctgtaagaatttgaggacaaggtcccgcagtcgcactctgagcatctcgtcattgtcgcagatgatatgggtcgagtcttcttcaatctggatgagcgtctcagcctcctggagcaggacgatatggcccttggctgtgtcctccaccttaatatcactgaagccatgcttctccagggtctgcacgaactgctccacagggatggaaccgctcaacaaggctttaggactttgcagtctggtacgtcatcgctcaccccgctttctcttctttccgctcggtggctgggcggccccaggagggggcttgaaccaagtgcttgttatctttggggggcaccacggccgaaacagttgccaaggaaaagcccggcttgatcttcatgggcacc

SEQ ID NO: 215976 - DNA, 996 bp, Homo Sapiens
  misc_feature (3)..(3): n is a, c, g, or t
  misc_feature (7)..(8): n is a, c, g, or t
cangacnncatcattcatcatatattcttattttcctttttttaaaaaattaaagtaataaaaaagtcactttataaaataatataaaagggcttgaygggtggsgccggtgggtgctgtctgagcctggtggactgaggaatccagtgcttctcttctggctaccccctcgttgtcaggaaggacccccaggccacagatggggatgacagcaggtcccttgtctctggctgggctgtgggagaggggcagggaaagccggggcaggagggcagtgggcagacccagacaggggggacggctggggccctgtcccgaagagacgggagggcctgctggtggggggtgaggtggcactggggcagcgggtgtctgggcccctcagtgccggctcctcctccagacagtctgcctagcttccgttgctcagcatccccagcagctcactgggctccagtccctgcggctgggccaccgtctgcatgtcgaagcccatgtgcatgaggaactgggccacgttcatctcttgccccgtgaactggtctcggacggtggggcatgaggggttgcagtggggccaggggcagctgtccaccaggtggacggggcagccctttgaggggggttttgctggccttgtggctgtcatggaggctcctgtcccagcagtgcagtgctcggggcagcgacgtccccttcacctggacatccgtccagtggctccggatgatgatctcatgggagaggcasgcgggggcaarctggccggcacgtccttgagtgtgtggcgcastckgcggscgaggttctggatgtasagssgcasgcgtcgstgcacgggctcgmssgtcaagtacacgttgttcgasggtcasstgtgcgtcgtcraacaacsayttcacgasgamcacacggcacgcasggtyggggtagacktcgtcgcgaasgagcrgttcgastcgygccgtcgtgaactgcgtcgasacgckcggggac

SEQ ID NO: 215977 - DNA, 896 bp, Homo Sapiens
taattttaaattttattatatatggttttctcaataaccttcccaacacaaagcaaaaaacaccaaccatttcccaaaaactacagatacatagttgagtctataagttagaaggcagaaaaatattaacttcaaagagtttaatgatgaattagtactgtatttctgaaaacattggtgatactgaaataatacaccaatagacatgaccaatatgatcctggcaaaatgcacatctcgctggtcaagcagaaatatatccttttacaaatgttctgaggaacaatgcttaaaattatacaagggtttaaaatataattttaatgaagtatatataaagtgtacatgaaaaggggaaatatgaaatctggcaaaagtcttttggctttcttacaaatggtatccttataattccccaactatcagaggatgacatatttttctagaaaaaataaaacgactgcaattgtatttcctatgatgctttatgtatcagagtcacttgcagattctggtctgctgtcatctggcccatcactttccttgtcccagtctttcatagatgctcccatcatgaaatcatcacgtaggatcgtccaacctgggcctttttctgatttcacttcagtcacgttgcaggtgacaaggaaagaagaaggagagaagagctgcagcccttcgggaagcccagacctaggagctctctgagccagggctgtgaacacctctttaaggtctctgcatttacttggaatctccaagctttcagacatccactacgttttcttggttgtcggccatgttaagcttgtttaaaggtaccaccttgtttcaatttgcagaccttccaagttagcccgtggtctcaatgccatttgtccgtgagtcttttgacc

SEQ ID NO: 215978 - DNA, 886 bp, Homo Sapiens; identical to SEQ ID NO: 49812
  misc_feature (46)..(46): n is a, c, g, or t

SEQ ID NO: 215979 - DNA, 860 bp, Homo Sapiens
aaagtcttaatgctattcagatggccatacaagctggttaggtaattagcccttgaagaattcttttataatcatataaaaatgttttgtcttgtttaaaaaaagtctactctaacaaaaacatccaccaatgggcttgcattttttccatttgcaggtttgtaagatcataaaaatatacacatatgcatctctgggcatatctctgtccactagctaatcagttttggcaatacactgcataggggtatactaccattggtttctgacattaagttagctttaagcttattggctattccaacaactggaggcagcttagaacccaatccctggaaagcacttgcaggattaactacccgtttccctgacaccttgtctatggtggtgagaggtctggggacagacttgctaatccaagggtgtcttaatgcttgagctggggtcaagcgggcagaggggtcccagtgaagacaccttttcaagaactctataaacaagtagtcatcacaccctttcagtgctgtcccccagtctttgctgcctgggggaccccgctttttacccctacgtgagcgaccccccacaagcacaaccctcccatctgcctgggtagtcacagagcagtagcggggtatgcccttggaattaataaagtacttggcacgtttgaattgctccagaagttttggtgggtggaatccctagaagctccatcatgcaggccaactgggcctccttcatcctctccagggaaagagaggctgtcctgttaaaaggtctggcagggatgcacccaaaactccaatatggaattggtggtgctggaagacttcctaaagaagaattctggggactct

SEQ ID NO: 215980 - DNA, 928 bp, Homo Sapiens
gtgatctccctgagaaataagagtcagtatagaccaacactgtccaaccaatagaactttctgccatgatggcatatcctgtagctgcactgtcccctcatgtggctgtctgaacacttgaatgactaatgtgactgagaaactgagcttttaatcttaattaacttaaatttaagtttagccacatgtatttagtggctactgtactggacagtgcaggtctagctagaccagtggttctcaattgagggcaattttcccccacagataacatttgccaaggtctggagatatttttggttgtcacaactgggggagtgcttctgatgtctagtgggcagaggccagggatgctgctgagcaccctaccatacaccagacagccccacaacaaagaattatctggccccaaatgtcaagtacgagtttgagaaaccctggtctagactgtctagcacctgccttttgacaaggacagaccctcaactgcagcctgggaactgggattggccaaaggtcctgggctgccctcaggaagacagatgggtccagaggcctcagggaagtccctaagccctttattccatcagccaaacaacacgcattactgggcatgtgctgagcttgtgccagtgccaggacaggacagagacggatcctatcctgtgaagggctgcctgctctccctccttccagggtccttcaaggatcttggcagggggatgggaggttggtgcagggagcactaaaggtcctagcagccattcataagtccatctatgtctccagccccacatggtatcagccgcttccctcatcctcataggcgatggcaatcctcgtctycactcacagcttctgtcactggcgtytgacccaggcggggctcmagccttgccagcyccgggamyaaggaatgagstgcaga

SEQ ID NO: 215981 - DNA, 809 bp, Homo Sapiens
ctttattgcctggagctcctccctgccgcccaggggctggtcgctggtccctgggcacagtgagcagggctgaggtcagacgggttcggcccttggccatggcagcttggttgggacagccgggccaagggaaaaaaaggtgcaaaagtccaaatgctggcacttcaggtgtggccggcacccagccaggcgcagtgggtgggcagggcgccatgcttctctcctggcgacaggtcggccgtgtagcagcgccccctcccagcagccactaggaacagctggtgattctcgccaggaactgctgcgcccaccactcgtctaggtcaatgggcacaaagttctgcagccggggattgggggtcctctccacgtactgcacaggccttggcccgccctcaccggctgggccaccatccagctgctgttgcacctgctgccaggcttcggacacaaagcggacattctcctcgtgggccactgtgtaggtctcctgggtcccctcgaaggatggggacgtggagggggcccgccggccattcacacgattgaacacaagccttggccctggactcgacaggggccagggtcccggcggttgcgcaaagggctgcgcccgttttgtctgcgaggtcgttggcgcggtctgtctgtttttttaggagctcgtcgagccggcccttcaactgttgttttgtggaacctgggcggcgctgcgcaaccagcttgctggtccctttggtgatgtgtaaatgacgcgctttttttataccggcggtggaccattgtcagatccggaccctgggccgggg

SEQ ID NO: 215982 - DNA, 866 bp, Homo Sapiens
catttcttagacatctttatagatttctgtaaattgaggcagcatgacaattccagataactttagaacagagttgaataaatcacagtaattggactaaaacattacacagataattgtgtaattttagaacttacttgcatagttaacactgtataatactcttataaaatatatgcctacaacgaagtttcctgggaatcattaagcaagcaacataattatttttctgtagtaattcagatcaagtatgtagtacaagttatcattgtgctgttaaagttttaaagtgctgtcagcagagtacaccaggacttgaaagaatgctgttaagacacacagctgccagtgagcaggagagaaaaagtcttaaaaaagccaaattccggaatgggttttgaccttttgaagtatgatagtgtttgaatttcaggaaagattgtactttcttaaaggtccgtatcaccgtatggcattgcatctctcccatcccccttgacttgcaatgaattttgcatggcattgattacattgattaagtttacattttttccttaaattaaggaactcatagtgcccttctcaccacaaaatccagagaggaatatcattagtgatagctaaggcagaagagtttagatgggcttaaaattcagtcctgtaaagataatttttcattctatattaacaattttttttcctaggtcgctggatttgtgactgttgttagcgggcccccccacacccagtaaagtgggcagaagggggaaaaacagcaaagagggataaaatagttttggactctaatactgtatatgcatttaagtggaaatatttggtgccatttacaactttattttaatgcc

SEQ ID NO: 215983 - DNA, 902 bp, Homo Sapiens
  misc_feature (410)..(410): n is a, c, g, or t
  misc_feature (419)..(419): n is a, c, g, or t
  misc_feature (452)..(452): n is a, c, g, or t
  misc_feature (630)..(630): n is a, c, g, or t
  misc_feature (821)..(821): n is a, c, g, or t
  misc_feature (835)..(835): n is a, c, g, or t
  misc_feature (889)..(889): n is a, c, g, or t
  misc_feature (892)..(892): n is a, c, g, or t
tctgtactgctttttttctaaaaaacaaaaatggcagtttacagatttacagttttgtgggctaaccaaaatctcacttgttcttgcttcttccccccatagcgtgactacactttttcagagtccaagaggtacaaactcagaaatgtcttcaacaagatcatggagtggcattttttataatttttcgaggcttccacagaagtaatccaagaaggtagcagaacaaagtatgaagtcatcttctgtttagcttttgaagctgggccagtgaatcttctttgctgatattctgcatctgctaccccagactacatgttgcctgagggaacagaaagctagcggacaggtctttaagaagttgatctgccctacctgtctttaagctgtttctttacaaaatcaatagnaacgggagncatctcattactgtgagttttgaaagggactgnattatctgttctttgagatttgccatctgatgatccataggccgtataactataaggaatgccataggatgagccgtaaggcattgtctggtaagtgctctggtagtacatattcacttctgcgggttgactggcttgaacctgagggatattaattcctttccttatctgctcctgntcccatcggctgagctttttatcctgttctccagttactaaagcatcattatcactcccctgaattcctatttcccttagcattttttggctttgcgacttttctttcacagaataaactattccgccgtctataatcggcctctctacccatcactcggcataattcctcattttctttaacaaggcggnacctccccaggctnctttatcatgagcgagcgacacccgcccaattcttagtgaccttcggtcgcttnatnaccttgtcag

SEQ ID NO: 215984 - DNA, 1000 bp, Homo Sapiens
cgctgcaaggatgctcctgggatttcggagaggccgcagagtcatttcaaacacatcatccatggccttttacctgcagccagcgttgctccgaagcagctgtgccacgcacacctcctccccgcagccccaacccatctccagagagaccaagatctgctctggcagcagccattctggcgacaacattgactgggcggacggttgctattcctcagcctcgccagaggtcccggtctgagagtgatgtgagcagtgttgaacaggacagcttcatcgagccctatgccaccacctcacagctgaggcctcggccaaattggcagagtgagatgggaagaagatcttctttgccatcctttgaaacactggactatggggacgaagaggacattgaaactcagctgtcatccagcggcaaggaattgggggatgtcagtgcccgggaggacagaggaggccacagtgatgacctgtacgctgtgccacacagaaatcaggtgccattgttacatgaggtgaacagtgaagacgatgaaaatatttctcatcaagatgggtttccaggctcccctcctgcaccacagcggacacaacaaaaagatggtaaacaccctgttctgaatttaaaggatgaaaaacctccattatgtgagaaacctccaccctccccagatataactggtagagcacgtcaaagatatacagaaataaccagagaaaagtttgaggcattaaaagaagaaaatatggacctaaacaatatgaatcaaagccttacccttgaactaaacacaatgaaacaagcaatgaaagaactacagttaaaacttaagggaatggaaaaagagaagagaaagctcaaagaggctgagaaggcgtcgtcacaggaagttgctgcacctgaattactttatctgcgaaaacaagctcaagaactggtggatgaaaatgatggattgaaatgactgtcmtcgtttgaatgtagactcagtcgata

SEQ ID NO: 215985 - DNA, 1000 bp, Homo Sapiens
  misc_feature (170)..(170): n is a, c, g, or t
tggaagggagggctcgtgggaggggggcattattacagtccaccagcggtgtctcctcctctgagaggccgtcgtcataaatcagggagtcagatggagtggacgccgcaaggtccaagtagtctctcctcttaaccatcatcttctccaggtctttgctgatgtccgcnaacaccggccttttgtccggctcctgcttccagcattgcagcatcaggcagtacatctcctcgctgcagttgtctggcctctccatccggtggccggtcttcagaaggttgaagagccgctcaggaggaatcccaggataggggtttccccctagggtcacgatctcccacagcaggacaccaaaagaccatacatcactttgcgtggtgtagatatgatcaaaaagggattcaattgccatccatttaactggaatccgaccctggctcctcttcacgtacgaatcctcttcataaacatctcgggacaagccgaaatccgaaatcttcatcttccgcccctcagctaccaggatgtttctggctgccaagtcccgatgaacgagcttcatctcggccagatactgcatcccctggtgagatctgccaggcaaatgagatgaggtcgcccatggtgagggcccgctcatccgggtggtccagggagctggagttgcggctgcctccactgcccaggtaagccaggccccactttgcggctctcgcggaggaagcccsgmagaggcgcgtattttggcgtactccacgatgaggaggagcgggccatcctggctgcaggccccatacaatttgatgacatgtgggtggttamctgcttcagacgttgamctctgacacmggtctcgaagcymctcggggaggsgtctctttyagcayctcacggccacggggtgtacctgcyctcctttmaatggaggcgttgcttgacactttcacaatcgcttycctaagtctttcaaracmaaktyttcgaggattccacttggatc

SEQ ID NO: 215986 - DNA, 678 bp, Homo Sapiens
aaaaaaaagcayktttcytttatgaggctctcgctgtattgttattttaaggactataaagagtttgatttaaaattatgcagggcccctatgtgggattttttaaaaagcaaactggtgtgtattctcatgtggtttgcacagcccagcctcacagcactattgtaaaccctgctctttctgtctcgctagacagatttttttgtttgttttcttttttctggttgttttttgttgttgttgttgttgttttacagctgaaaccaaccagcaagcccttgatgaccaagaggcgtttctttcaaagctatagggcacaaacaattgaccatagatgactccgtttgcattcttctgcagaattatttccttcagggacagattttccaacctaagaaactacctaccgtgtgtattctcttgacggggagagatgaacccttcagctgctaagatccaagaaaacgcctcactgccttaaccttaactgttcttcctggcgctaaaaagagctgtattttttaaagtgctggggcaaacaaagcaaccccaaaagagttgatgtgtgttttaaaagaaaaaacccaatgaggaacaattggagatttttatgcagaaactaaataatccttaataaataaatctctattttggaaaaaaaaaaaaaaaaaaaaaaaa

SEQ ID NO: 215987 - DNA, 874 bp, Homo Sapiens
  misc_feature (21)..(21): n is a, c, g, or t
  misc_feature (23)..(24): n is a, c, g, or t
  misc_feature (27)..(29): n is a, c, g, or t
  misc_feature (31)..(31): n is a, c, g, or t
  misc_feature (33)..(35): n is a, c, g, or t
  misc_feature (37)..(37): n is a, c, g, or t
  misc_feature (179)..(179): n is a, c, g, or t
ccatgtkccccccaatgccangnnggnnngngnnngnggggccagcggcgkgbbbgaggkvgggcgtggaggaggcttccttractgtbgtgcgaagtktctgamaactcmgggtattakggacaacacatcttagvatccatgkgcaaatcctctcttgtgacaggctcaacaatcantggcgcttsratgtagttctcatgtgattttctgartattcctggygtggyctcctgcggtcatcgcggckkcgggggtdggygctctskatgtgggkgtcrktggccgtccaccagcgagcatggtggttragggtgtgcsggttscsagaaacacgcttacacgggattgtcagtcttgaccccagagaagctgatatkgtcttgaggggggaaatgatcacaggaatggtctcttcttttttttttcttgatgcgtactcaatactcctagtgatgttgtattgctggccttcatgggcaaatgtcaggacacagcggkaatagccagcatcttccagggccacatcgtgtacgagtaagtgagtggtcccctcacacttagaaatttctcattgtctttatccaaaagaagagaatccttgtaccattgaatcttcacgtcagtattgtcacgggtgaattcactcaggtcagggsatactaataccccagaggktgacaaggttaaaatttgcgggtatgagatgaacggcaggraagcatctgtattctcaaaaactctgagctcaatggacattttgtcacagtaagaagcatttctagtagtgcagacgtaggtkccaradtcycctgcaagstggcagaagcmcagagcagcktctkggccacatcgtktttytcttctcctggga

SEQ ID NO: 215988 - DNA, 767 bp, Homo Sapiens
cttaatattaatcttccttatcaattttgtttttactataagcatgtattactcataataatgggaggtagatccaaattttcaaggaataatctgaacttttataacagaaactgtacttaagaacactaatagaggttggctgacaccctgaaaaactggtctgttacgtttaactgtgggccagtcagcttcaaactcaggaaaacctctcacctcagttgcaggggaaatgggcaacaataatagtagctactgctgacaggctgggccctgtgcttaactccatctatcatctccaccaactatcccacatggcatgtgctaccactattttacagatcagaccgtttacataactgagaccgaggatgcacatacgcccctcccctgaaacgcaagtctcactgaaggtagactaagatgccaccttggtgtaaataacaaattacaataaactctgactcagatactgaagaacagtctaaaaatattcattgataaaaggtaggtgttcaaagatgacccaacttctattttcgccttcaataattgttacacagttaaaatacagtgacaagctgcttccacatggctataggtagggatttgttatccaaatgcaaatctatctaggtctgaatttctaaaagtagaatcttttttttttttgaggtggagttttgctctgtcacccaggctgaagtgcagtggtgtgatttcagctcactgccacctcccaggttcaagagattctcctgccctca

SEQ ID NO: 215989 - DNA, 596 bp, Homo Sapiens
ttcccttcccatccttttgggatgtgctagaaaacagcttgaacatccctttatagcttcctggcctcacgagtgttgaatgacatgacgaattctccttcatagaaggtacaggtgaaccagaactggaggggcatttgggatccttccttcttcagaaagtgcgatcgcatcaagatgcatgtggttttcagtagaactggcccatgtttcttgggagcgaggtgtccaaaccactgttcatccatatttcctgaatgatttgctccctgcgctcaatcctttctgcgagctctgcagcttctatggaactgtatataggatatgaagtcctacagaaccccgacagttcccctgggaaatcagactcagaggggtcctcctcctcttcttcatcctcgctgtcctcctcgaccttgtcacttcctggcaccagctgctccctccccagctgcaagtcgcggaagttcttggcacaggactctctgatgaccagggcgcacagtgtgagggccaggccgatgcagacactggacacgaacagcagggcagctctcttctgggtgggctttaaagtaagcaaaggctgccagtag

SEQ ID NO: 215990 - DNA, 975 bp, Homo Sapiens
tggagccggctagatcaggagacctgtccctaaactaatgtactccatgtcttaagtctttttgttttgttttgtttttgtttttgacagagtctcagtctgtcacccaggctggagtgcagtggcgtgatcttggctcgctgcaacctccgcctcccaggttcaagagattctcctgtctcagcctcccaagtagctgggacaacaggtgtgcaccaccatgccctgctaatttttgtgttttaagtagagatggggtctcaccctgttggccaggctggtctcaaattcctgacctcaggtgatccacccacctcggcctcccaaagtgctgtaattacaggcatgagccaccgcacccagcccatgtgtcttggtcttttttactaatattgattataaaatggatgaaactttggataaaatttctgcgttagaatttctttttatatctgtcctaaagcttgtaactacttgctcatgattttttgtgtatgtttagcaatgtgcatgtcattgatggcctttgtaaagtatgttcaattgagttgtggagacagaggtgcaattggagtaggttgtaagaataaaaaggagtaggcaaaaaggcacgggtataccagtggacttcaaagggtactcagactttgttcttaagggatcaattcccagatcttcagtttcatataaactctttcctaaaattgacttgcctaaaagcatgttagtgttgtgggcacagcttctcttttcttatttctgcttttacagtcatcctttttccaaaaggaaggtatacatctcctccttgtctaacaatggcacattgccccagggtgtaaaagaggccaggggtgacaagcagagacacaattcaaagcatttgtattaagagagcagtaactccaatgcattatttttgcaagtcamatttttttgtttttgtttgttttgagamagggtcmmactmtgttg

SEQ ID NO: 215991 - DNA, 851 bp, Homo Sapiens
tggstgggcggccgggctcacatggtttgtacaataaatacatctgtggggcgggctctccgcagccgggaagggccaccgccacggttcagtccagcttccgggctcccagcttcatggggcccttggccaccttcctctcggcgcgtttggcctccatctcccgccgccgctcctcgcgcttcttccgggccagctcagccttgacctgtcgactgtcagtctcgaggccctcccagttgtcctcaccccaagagtctggcctcggctgggtgctgggacgtgcagacagggtagcgaaggggtcgcccttgtcgctggactctgggccaccccagttatactcgctggccagccgtgtaccgtcaggaggtggctcctgggagcttggctcctgccagccctgttcccaggagccctcagcttcccagctgctccagtcggactctggggatttggaggatttgtggtcggagttgctgacctgactagcacggctcacttgggcccccggtgctccagtcgtcctgctgggccagcacagactcggcctcctgctccaggctgccccagtcttcgtcgtcccatctgtcagcagtgctgctgtcctctgctgtgtccttgtcctcctcctgcgtctcccagtggcctgaggttgtaggggkggcaggaacaggggtgggggctggggsaggaactccttcaggcgstggstctttgggsaatsttggtttctsttgssccactgcttgsctcgcamccatcrcttggagctyactrrcasacccsgtmcscccagcctgccagcwgstggsstctccatbsarggctggrsctcatgacatcttgtc

SEQ ID NO: 215992 - DNA, 830 bp, Homo Sapiens
gttcaacgactcttctttgctggacagatcaatggcaccactggttatgaggaagctgcagctcaaggtgtgatagccggaatcaacgccagtcttcgggtcagtcgcaagcctccctttgtggttagccgaacagaaggttacataggagtcttgattgatgacctcactactctgggcaccagtgaaccataccgcatgtttaccagccgagtagagttccgtttgtcactgcgccctgataatgctgacagccggctcacactgcgagggtataaagacgctggctgtgtgtcccaacaacgatatgaaagagcttgttggatgaagtcttctttagaagaaggcatttctgtgttgaaatctattgagtttttgagctctaaatggaaaamattaatcccagaggcttctataagtactagtagaagtctgcctgtcagagctctcgatgttctgaagtatgaggaagttgacatggattcattagccaaggctgttccagagcccttgaagaagtatactaaatgtagagagctggctgaaagactgaaaatagaagccacttatgaatcagtgttgttccatcaactacaagaaataaagggagttcagcaagatgaagctctccaactgccaaaagacctagattatttgactatcagggatgtgtctttgtcccatgaagttcgagagaaactacattttagtcgtccacagacgatcggggctgctagtcgcatacccggagtaacacctgccgccatcatcaatctgctgagatttgtgaagaccactcaacgaagacagtcggctatgaatgaatcatc

SEQ ID NO: 215993 - DNA, 929 bp, Homo Sapiens
  misc_feature (647)..(647): n is a, c, g, or t
tttcatttattcttattttgctatgtacaaaactgacaccatgcttattactcaggaggtaaagataacaataattcagattatattgattatgctttgtctgtattggcacagtttatataatacttaaggaaacagaatcacctggaaggaactgcctcatgtcaacatagctaagagtgttctggaaaactggtaattaaagaaaatggctaaaacaaattcccccaaacagaatacaatgtactgcatagccaattcaggcttgctttaggtctgctaactgctcaagagaagagtgtgctagatttttatgaggtttaaaaaaacatattaaaatagtttaataggctacctgtgaaagagcaattggataaccatttaacaaagtctttaacatcctcagaatacaaggaaaccaacactgtgcagcttcagtttgccacattgcacacatctggatggcatttggaataaacagggacttctgagaaactgggatgtgggatttacctttttgttcctggagtcaaaagcaaaactcacacatccttacgcacccacccctctactcctggcccaggaaaaaaggctgtcattctcatttcctttgataggcttggccacatttgttgcatcctctgctntactttgaaccaggccacgtcctctgtctctggctggagggggagccggcaaggaggagatggtttgtctaggaccatatgccattaatgaccaccaccccccacccagctgctggccttcaagcctctctaagccatgtgggggcccagtctttgctcattctagaagagagctaaagctcacttctgggctactgggtgggcacctcatttcaattctcttgcctgcctagacaacaggggccttctttgaagagtgaggactttgctctgtgcaaactt

SEQ ID NO: 215994 - DNA, 1000 bp, Homo Sapiens
tctcgcgtcccgcgagctgcctgtctcgtcgtggcaggtcaccgagccgtcaagcaagaatctgtgggagcagatctgcaaggagtatgaagctgagcagcctccctttccagaaggatataaagtcaaacaggagcctgtgattacggttgcgccagtagaggaaatgctttttcatggcttcagtgcagagcactattttccggtttcccatttcaccatgatctcacgtacaccctgtcctcaagataaatcggaaacaatcaacccaaaaacataggaaaagaaccaaattcattgcctgtgattttctgactgagtggttatacaagtaagttgttcgtgtctgactattcagtgatcctaagaattcagtcgtgttaatttgcaagcagaatagcaacaactgacttgaattcttgcttattgttttcttgtcaatcaaacatatggcatcatgaccagccaaaatccaaagagggcaggggagccattcacagaatttttctccattccatttgtggaggagcggctaaagcaacacccacggccgccaatcccactctcgctcctgctgacagaagaggaagcagccctctacattcaatccttctggagagcctgtgtggttcgctgtgatcctgagattcaagaactgcgtcagtggcagaagaaacttcgcgaggccaagcacattcaccagcaagtcaaaattttctgggccaagcaagaacaaaaagtgaaatgcaaaatggaggacgatgcagtacctgcagccaagatgaaattccatcatcttaaccatagctaagacgtatctctgccmwtcgagcamarttacttgtgcaaggaaatgtccaatgatgctctctctctgtkatttctttacaaraytggammtgtgsaatggatcytttykktcaarwagggtcatgcmammrccttatgcaatagttagaaaraaggccvtctcccttytbctttccccctttwtymtcat

SEQ ID NO: 215995 - DNA, 907 bp, Homo Sapiens
  misc_feature (19)..(19): n is a, c, g, or t
ataatttccatttattgtnagaataatatagtactatcaacatagaaatcatgtgtataccatttaaaatcataatttaaatgattttcattttagcaattgtggctgctggtatattataaacctgcttaaatattgatacatagtgtttaaaataatattataattatgcatttttggaaaataaacattcaataccttaattagttgcatacaattggatggctgctattaataatgttttacaactacagataatgcttctaataatattaaaaggtatataattccctttctgttatttgttcaggaaaaattccgaaagtcttaggtcagatgatgcaatcttttttatgactcttaaactctaccatgaatgatttttaaaagggtcttaataattcaccaacaatatgtggctctaccagttttttctatctttggtagctttgaatattttctttgtttttaatttttcataattgtacagacacaaaattgtgtctcactgtactcacgttgatttttttagctacatttgggcattacggtactaacaatatcagaaacaatattttgagtatcttacatagatgaaaactttcatatttttcatttaagtttgattcattactatgggttagatgccgtcagtmagagtgctggagctctcttgttctcaatctctccttttgtccttattcaccacaatgttaatttggagctgagagattcatcactgaccgcatctattacctttctgcttcattttgggctgctttggcaacttcgcctttggcacttctagcatgacagacatagctgcgcttgagatcctcagaggtaactttcttgatgctcaaatctgagtccttgtttcatcttctgttctactatgacttatact

SEQ ID NO: 215996 - DNA, 1000 bp, Homo Sapiens
acccagcagggtcctggaacttcttggctggaattcagatatccagagttctggttacctacaacatctattctttacgtagtagcttacaagcatcaaaggccaccctcacctgatgcttggccggatctatgccctccaaaatagtcttcatgtcctcctgcttgtctaaatcagcccctgcttgaagtaaaacatctgcaacatccgtatgtccattttcacaagcataggttaaggctgtgtctcctgttgctgttgtagcatgcacattagcgccagaagccagcaaatatttaaccaattccaggtgtccctcctgagatgcctccatcagaggtgtggagcagccaagttctatatcagcccctgccttaataagaaagtctgcaacttcagaaaatcctccacagcaagccaaagtaagagcagtttcttgagtttcttctgtctgggcatttatatttgctccttgtgctaagagtagtgccaccatttcttcatgtccttcccgggcagcttccatcaagggagtgtatccttcatcattaacttcttcaagatttgctcccctttcaataagcagagctgccaattcaacatgtcctccacaggcagctagcgtcaatggagattcaaatgaatctgcaggcatgttcacttgagcaccactatccaaaagcaaacgtgccacctctacatgwaaaaaaaaaaaavccsccattaaggcagtgtgcatctyatctgttttgtgctcttgatctgcaccagcttcaagtagagagcgaaccatatccaaatggcctttgtagcaagcaagtgttagagcactttctttgaattcattagaatgagtgttgatgctgcaccatgatctaaaagactcttgcaacttcacatgactgcaytggtgcttcattaaggagtatgtcatttcattatgatctctatattgcacttcataagagcattytamatgtcamaatctcagccmtgcata

SEQ ID NO: 215997 - DNA, 929 bp, Homo Sapiens
  misc_feature (16)..(16): n is a, c, g, or t
agtcatttawtdhwdngatccagttaacataaagagacagaggttgaacaacaggtcttcaaacaatactgcatagtgtcacgagtwarctcttaagcacgtttgatctgtttatcttatgatttcgattccagtacaaagacagagaagagacttaaaaaaaaaaaaaacaataaggcaacagaagaagaatcttcctgtgacaaggaacgtccacaaataatgcacaaatatttggtgctgacacaataagacaccatcaggacaagttctgaagatgctgcattaaaatttaacaagcatgatacaatgacaagaaaattatactcgctttgttacgaatccttttgcaagtagaaatgactctcgggtaattgttacatacaaactttctgaaataaatggaaatcatacaaatttttccattgcagtttcttctttctctacacctagaaatgtcccatggcactgctccctattctcacagtcaacgcataaatagtcattaaagcacttgaatccacagtagtcttgtccttagaaaggttgggaggttttgcatgattttctatcagtaatccagaaagggctggcaggcaacaggttggaatgtaaaagaccgctttgtgcttggactcctgaactccgcgctgttcccctcaggagtggctcgcactgtggacaggcccagtgaggacagttataccgtggagtctctgccagamtttagctgtgcaatcttggtccggctaataaacggataagcgatgcagaracctccagctgccacaataaagcctaaactgcaccaggsgcaaaaratggaccagctgtaaccatgttccacatcagcaggsaggctataaattagctttgggagcsggttcaaatcatacgagatactggcggcataagttcagargggaatg

SEQ ID NO: 215998 - DNA, 687 bp, Homo Sapiens; identical to SEQ ID NO: 46461
  misc_feature (41)..(41): n is a, c, g, or t
  misc_feature (620)..(684): n is a, c, g, or t

SEQ ID NO: 215999 - DNA, 918 bp, Homo Sapiens
taattttatttactttattttaaaattatctgcctccctgtaggtatcattttttgaagggggttaacctgctgaagttttgccagaatggtgactggctgcgcttgggttcggtgaactcaaagacctgcgactgagcgatgccgtcggggaccaggtactggccgtggtttaacgggtcctgcggtggtgggtaggaaggaggaactgagcgggcagagttgacacctttttgcttagggacttttctcacagtcattgcagcctgcctcttctggttttcagaaatttcaaagccaattttttcatcttcctgtaccattttcctctcttctctgaaagccctgagccagcgtattttttcctccagcttcttggcaaagaacagatgtatctcctcagtctccttgttgtgaagcttaaaggcattcttcatgctgacattgaagtcatcatctctgccatcctcaatgtcaactacctcatatttatccatgtcaatgcggcctttgtagtacaggatgtctctccggattaggtccttcttgcagaggaccatctggtggtcaaacaggaagaagacccgctgctggttgcggccgtagggctggtagatccaggccatcctcccagtgtagatcagctccgagctcctgtctaggatgtcctcgccctcccagtctaggacagaagcctgccactgagcaatcttgtcaatattctctaaacgtcgcttgcgttcggtgatctgctggagtcacatttctcatgacagccatagcagctgccaaatacctgtagtcactggggttcttgggcagtttacttttaggggcctaagccaacttgtaagggattccttggcagattttttttgcctctggggtccaaagagggaaacctctgtttggccaatgt

SEQ ID NO: 216000 - DNA, 966 bp, Homo Sapiens
  misc_feature (72)..(72): n is a, c, g, or t
  misc_feature (152)..(152): n is a, c, g, or t
gtttgtttttaattcccaaagcttacaaccatcttttcatctaatctgtgaggtatttagtatacagcagtnattttctctctttccttttttataaagtgaagaggttcaactatccagagagtcccatctaactcaaaaaatgtaatggnctttggttggattgcatcttcagtcagtacctgcccatggcttaatcagtattttaagtgaatgaatcatgtttccccactagatcattacgagtaagcagtaagtaataaatagagaatattaagtattgaacattattagatgcagctttttgttctgcatagaagaaagatgaggataaaggagggcattgaggccacgaagagcttcccagacacccacggccatcagatcatcttcttcctgcaggcagtgccttctggtggaaggagctcagtctatcagagaataaaccaggagcctgaaagcagtcctgtgtctctgcctttaatcagctgtcacttattctctccccaagaaagggaaataggtctcagcagtttctgccatccatcatgaatcaatgaaatcatttcattaaaaattttttgtatgaatgtgcaaaattgccaactaggagttcaatgggaaarataaaaaaaacttagtttgtcaacatgatccatagacgagatgatcttcatgtgttccaaaggcagaaaggtgagaaaaakgatctagcttkktctctktccctcaaagacakaagakgtcakgaaktccaatgggcgatgctcctgtwgataakkcacaaakcatkatatctkattktttccatkttccatkccctkcatcacaataacccttctcccttkcttkawatcttttgaattcctgktttkattacagaratcattktcattkkctcaktaaccttccacccyktcawctcmwtctccyttggtcacdccgctgttttakamamagacatgc

SEQ ID NO: 216001 - DNA, 915 bp, Homo Sapiens
gtgtggaaacttactttattccagcctgattatcctagttgtcaccttgcacacctgccatccggtgccatctcctggctggcacatctatacccactctggctctgaaaggcttgtcaaccaaaaatgggcagctggggctaaggcatatttaaacaaaggctccaaaggacccctttcacttgggtctagcatccagcctctctctcagcaaaggcaggattgtggtcccttgtgttttctgaacagggcccagggcagccaaggcatgccatcactgcagcactcaaccctctggtcacagtggagtcgccggtccagcctgaaatattactacagaggagaaagacccattcttgctatgttgctctatcttccacgtccaaaaacagtcctatgtagctccagctgctccgaaatcaggtcacagaacagcaggagacattcctttggcaaaaaaaggacacgcttttgtcctgtatcttatactggtaagtgaagctctgatcccggtggactgcgggctgcgatggtctcctccacaggatcctcagctgcccgtgcacatccctgcagaagccagtgtccaggccctcagcccacagtatcagatggcttctgagactgaggccattcagcaggatgccattctcctcattcttcgtatctccactgccgggcacagggacccacatgtttccctttagttcccaacacacgttggctctgcagtattgaaagaagtttagcacaaccaccggtcccatgcccaggctcaggagcccactgaggggcgtccaccaacagcaccgggtactgtccaccgaaccctccccactgtttaccggtcttagggcccctctgttaaaacttcaaacactgggctctaaggttccccagtatcagatctccctg

SEQ ID NO: 216002 - DNA, 1000 bp, Homo Sapiens
ttgaattttgctggtcatcctcatggtcccgagcccccctactccgggtcgatggaggcggccgagggggaggctgggggcccacgtggcccgtcctggcagcacctgcagcactgggggagccgctgaaccccgtgcttcagcgctgggggagccgctgggccccgtcttccgccacaaaccatgcatggccgccacgtgagctcaaacgtccgtttatttcaaagcagtaataatttaaaattataaaaatctttccaccgctgaacgtttagagggtgaggttagacagaggacggggaggctggggacgccccagaggggaccatgtggcccacgccttcccaagccagggggccggtgggccgggcccgggtcctgccctggaacaggcgggacctgcagcgctgaccagccaagcgtggcgccgccggggcacccagtctgtgggtgccgtgtggcgctggctgagggtgggtgggaaaggccccgtgctttcccgacggccgacgtgggctcacgagttgcttgtggcgttctcgttgctgggcgagctggaggaggacgatgacgacgaggaggagaagctcaccccagtgaggccaggggggttcgtggccgtgttctgtcccgtgaggctttttcggcagacggggcagctgtcgtgctgctccagccagggcacgatgcagccgtcgtggaacaggtggttgcagggcagctgccgcacacgctcacccagcgcgtagtcgtccttgcacacagggcactcgagcccggagcctacgtgctcctcagtgacggggacggtggggagggcctggattttctctttatctgccggtggggggcctgtgttttcaaactgattgaggagctgtgtgatgatggcatccasgccgttggcccccaggcgtatycatarggtttgagtgaggactcccaggggccaggctggggatggtggcgssttatratccgttgasarctstggatgatc

SEQ ID NO: 216003 - DNA, 931 bp, Homo Sapiens
  misc_feature (13)..(13): n is a, c, g, or t
catcatcatctangtgtaataaattcccatattttcttcctataaagaatttgctttagtttttcaataaggcatttttttgtcatccaaacatctcttccttttaaaattttcttagagttaaaaccataaataagaggatttaaaccactaaaatgacacgtgccaacatcttcattcagccagacctggtaaattctatcaaaactagacagttaaataagamccacgttataaaaatattagccaaaaaaagactattagataattctgcaaactcaaatatgaaactgtactaaacaaaatatgtgcaaaggtacacaagcatagagccacgttgggggttatgcycagattagttttaaagctcgctctagtggatttaattcaagagttgtccacggtggtggtgtttactttgaactcacacgagtcaaagaaaaataaaatatgcacaaccacttccccaaaaggtgtcttatggagccggtgcttcatcgtgtccacacccaggactgcctggggtgtccctagggctggggggkggggaggacaaagacaaggccactgtcccaagtcctgggccaggcaacatcctggagaccctcgggctgaggttaggggcaagggcaacactgatgactccacgtcctcgtccaaggcctcagaggagccctgccaggacctcagtgctttggaggaggtggtgagaacaggccaggctgaggggcctgccttggaaggcgagggtctgagggttggggctgtaaagacagccctttcatcaggragctggagctgaaaagccctaatacccctaatcccaaactcttggatcccgtcccacagacgagagtccttgctcggcatcctccagcacaggtgctctgggtgggtccaggcccaggamtagagaargaaagggttgktt

SEQ ID NO: 216004 - DNA, 1000 bp, Homo Sapiens
gagctgccccggggttctgtccaccggggaggaaagccacgagcactgagcgcctcctgagagccagccctgacgtgaactcattttatctgccacgacccagaaggagtctactgctaagatttcagcatgtcctgtggctgagttaatcagagttatgacaggaaggtaccgggcacaccatcgcaatgctccatcaatgctagtatgttgtgttctttccttcatatcaagtcaactcaagcttgctctacttacctggtgtacacagtctaagaactgtaagaagactggagcaaaaccactcccctgacagttgagggtcaagctgctcctctgactgaatttgtgaccaaaagagagccactctttttcaaccaacatctggaagccttcaagtgtcctataaaagggatcactgagtaactgaaccagggatgtcacctagggcataagcaggatggattgtcattaattttagttctgaaaaaggcctattactaagataaaagcacttccttctgatgatagctaattcacaaatttacctggacagcaaatttgttcactaaccattccaggatggccaataaaattaattttgtaaacttgccagtaaaaactaaagctcaaattcattttggctacaagtttactttcagggaattgagactttaatccttaactggccggtttgctgacagcaaccttttcctaagttaatcagaggccagaggatcagttaaaatcaattctactttttggcagatgcagattaatgtcttaatgtagtctgaactcacacttttcactctggagtgagttaaggcggggcttatagagagmcaggggatggactgacaaaaccaggaagrtggtccmsgctcamamtgstggtcaagggwycatccgcaarctgcatggtamwyttktggwtggaracttkatgccggrscaaactcaggctcstagggctaaavctmwggtmgggtttttatgg

SEQ ID NO: 216005 - DNA, 709 bp, Homo Sapiens; identical to SEQ ID NO: 42774

SEQ ID NO: 216006 - DNA, 899 bp, Homo Sapiens; identical to SEQ ID NO: 43968

SEQ ID NO: 216007 - DNA, 943 bp, Homo Sapiens
aaaatattagtagcatgataactcaacctcaccagatattaacagttcatcaggtcaggcaatagaacaagtccacatgagcttcttaaaaagaaatggatgaccacttcaatagctgactccatcttccattttattactggatgattcataatccaaaatatgaagttttgggactttttctcaaaaggagaaactttgggaaagtgtctgaagcaatggtattgatcttttttttccccctttatgaaactttaactgcatacttcagtctggtggaatcttttgtgttattctgactgtcaataagaaccaaaggactatgttgatgattcctgatgatttcagcaacacttccaaagtactcttcaccatttttctttctgcccaaggcatattgttttgttgcttcaataaatcgcacaggaatattatatactcgcttattaaagaatacaactagtgtatatggttgtttggaatcatggccagagcttttccgaataagaaatgatccatccttgtttgatctgtgcaatgcctcttcagcagactttcgatcacaggctccagcataccatggcttgcagagaacgccagcgtcctgttctgaaatagtggaattagatgaaaagctgggtaggggcccatccacagttgggtttcccccttctgtaaatcttggcagaggtatgggtttttggtggatttgtttctgggcaggaggaaacactggtgactgcacagcttcttgtctgtgacttgaccctcggtggcgttcagcaggtataggtttttcttcacaaacacttgaagcattctgttgagaggcaactggagttgtcttcagtggtgtcgttggttttttcccggcccgtggcaacggggaatggtgcagctggtggaggtgacttggtttcccaggccccactgtttcgacctg

SEQ ID NO: 216008 - DNA, 882 bp, Homo Sapiens; identical to SEQ ID NO: 55825
  misc_feature (600)..(600): n is a, c, g, or t

SEQ ID NO: 216009 - DNA, 948 bp, Homo Sapiens; identical to SEQ ID NO: 46926
  misc_feature (50)..(50): n is a, c, g, or t
  misc_feature (601)..(601): n is a, c, g, or t
  misc_feature (664)..(664): n is a, c, g, or t

SEQ ID NO: 216010 - DNA, 1000 bp, Homo Sapiens
cttgcctcactgttctgaacagatgaactgctctcccatgaacacagtcctagagtttccgctttaaggcatgcagcttgatgtgcaggataattttacaaaatgcaaatcatcctattttaataagatacagtgtcagaattaactgtagtctttacatgtcagtattccagaaatttttatactttggctatagaagcaatgccatagtgttacacaatacttatttcttaaaaaaatacatgtattcatgttcatgaatatcaaacgcaaatttctattaaatatattttatcgaatattacttagagcaccttgctgtacaatttaaaaagattaaataagtgtctatgaaaactaaaaacacaataagtctcaacagagaagcctgcttgtctttgtcaagccaattacagcacgggaaggtgcaatgtaaacatggatgcccaccatttactttgtgagaaaaaaaacagaaaattatgaagccaccagcagccactttcaataggaagaaagatccagaacaaaggcttcggtcggtgtcacaacattgcactatctggccaaagaacttggactaccgatcaaatggaatattagcatgatactgttgaacactgggacacccgccatattctggatgattagagaaagggagaaaatgatagagccctgaaaagtattctttataatgatcagaatgcatcatcttcccccctccccacctttgccatatgtagtttcttttcaaagctattttcactatcacgtcttagtattttttaagtgttcggagcagaaaacaaatactatgagctctgtctaataagaagtcaataccaataaataacatgttattctatgawggaattccyactggattttttttttggggggggrggtaamagaggacycmtctgtyacccsggtggagkcawkgtgcmwcamggctcatgcarcyytwtttccaggtcagtgtycyccmcttamctccaag

SEQ ID NO: 216011 - DNA, 500 bp, Homo Sapiens; identical to SEQ ID NO: 54955

SEQ ID NO: 216012 - DNA, 1000 bp, Homo Sapiens
tttgtacatttgatcaaccaatatttatataaaactttcataaacactttcaaacagttttaccccacagggtgggcagaggtgcttgtcaatataataaaactgaacaacagtggtagaaaaaggtacacttgtacttatcttcaagtttaagatgtaaattttttctgttcaatggccactacctcatattatttttaggatctgggatcggacttagcaacacattatgactttcaagaagttgagctcactgttttgtggcgttctttgcagaacaccatgaacttccgggtgccccatgtgctgacaagtgtcagaacagctggtgtccagctgacgtgaggctggacttgtgtgataggcacgttgtggccatagctccccactctgtgaaatgatgagatcgacatgcctccatccatcagtaggatccccagcatggagaatttacaccgtcacccttcaaagaaaggagccaagtcctgggcacctcctctcaccttgactttcctacaaaacacccttctttcttggcaccagtatagcacatgtgtattggtcatttaggagcccaggtgccttgtggcagagtaaagacacacacagaaaggctggtcttttcttactcagcatccctggagcacacccagaacatgatgccttccttgagatttcctttaaagaccctgtcacccctgaggtttccatcccagctacctacagaagtcgtgatttcttttgtctttctctcagcttcacagacttcttggtmcaccatgggsgagggcttctattcccagtcatccactgtcctgtggatgaacctctctcctctcctyctgggccatttctctccmagtgtgtgctcagtctgccacawgtggscagatmwtytaaggttttgatcagctcctaaagarcactyaytgcccytcactctctcatytgamttccagcaytgggtttgcygctcwstgtykgagkctcwgcaatttct

SEQ ID NO: 216013 - DNA, 868 bp, Homo Sapiens
cgaccccggccccacgggcggacactcggccgggcagccgcgggccgagcgcaccgcctccgccaccgatgcgcctggtggccagactccaagtgggaccggcggacacgcagcctcgcgtgtcaggggaagctgatggagaatcgagctctggatccagggactcgggactcctatggtgccaccagccacctccccaacaagggggccctggcgaaggtcaagaacaacttcaaagacttgatgtccaaactgacggagggccagtatgtgctgtgccggtggacagatggcctgtactacctcgggaagatcaagagggtcagcagctctaagcaaagctgcctcgtgactttcgaagataattccaaatactgggtcctatggaaggacatacagcatgccggtgttccaggagaggagcccaagtgcaacatctgcctagggaagacatcagggccgctgaatgagatcctcatctgcgggaagtgtggcctgggttaccaccagcagtgccacatccccatagcgggcagtgctgaccagcccctgctcacaccttggttctgccgacgctgcatcttcgcactggctgtgcgggtgagccttccatcctccccagtccctgcctctcctgcctcctccagtggggcagaccagagactcccatcacagagtctgagctccaagcagaagggccacacctgggctttggagacagawagcgcctctsccactgtccttggccaggatttgtagactccctgagcctcagtttcctcaactgtwaagtggagatgggtttggtgtcgggaataacgggaccaataaatgatgctttactattaaaaaagaaaatccatgttaa

SEQ ID NO: 216014 - DNA, 968 bp, Homo Sapiens; identical to SEQ ID NO: 51633
  misc_feature (52)..(52): n is a, c, g, or t

SEQ ID NO: 216015 - DNA, 768 bp, Homo Sapiens; identical to SEQ ID NO: 48610

SEQ ID NO: 216016 - DNA, 623 bp, Homo Sapiens; identical to SEQ ID NO: 40766

SEQ ID NO: 216017 - DNA, 1000 bp, Homo Sapiens
tatctatggatgagtttgaaataaatcatagaagagaatcactttttggatttttaatccaggtccttgtgtgtgtatgaaatacacacatatcttccttattagtcatggaagggcaaaagtggaccaaaaacaggtcagctaagacaggcatgtctggcttctgggctgtagctcagcatgttgtaggctagagtccagtgaccttcactggcaggctgcctacagtccatgagaccctaggcagtcaggcactgagctctgtcctccagctgaaaataatgaagagcacacggcttctccccggtcatcgtcagggtgactcaatcctgctggaagccctgagggcgcacatgagagaaatgcttttcaagggagccaaacttgatctataagcttatctcagggtatagtccaaataacacttatgactccaagcataggcagccatgcttactactctctaaagaagccagtacttctgatgaggaattgaaagtcaagatgggagctctgcttttgtatccattccccataatagagttcagcttatatgttaaatgaattttcacataaatttgtccacttgaacttctgcttctttttgatagttgcctagagatggttctggagagtaggttcttttcccatcgtgatcagcaactgctcttcaaagtacaggagctggtccacttcaaaacagtcgctggcttgaggcaccactttttccaaacactcgcggatctctgcttcgctagcattctgatgccttgctctcttgaggtaattatagacctcttcaaatacttctgtccccagcttctgcatggctgattccctcatgcgtttcatcttgggtcctggccatcgcactgttgaaaattgggtggtcctkggggacatgtcttcagccatggtgggtgatggtctttktgtctagagaagtgcamccaggacattttccaaacacctggccaacgcttcgatatcactgttctgt

SEQ ID NO: 216018 - DNA, 721 bp, Homo Sapiens
aattgtcttcagttgctgctaagtgattttgcaaatttcatttataatcctcgccctacaattacctaagtactgtttctgcaggttaacctgtatgctacgctcagtcatatacctttcaaagttactaatgcaactgccaaagagggacagtgtcaatatcattgtcttcattagaaggacggctgccccacactgtgagaacactgctgttcctaacagtagtttacttttagagggatgtgagaattagtttgaccttaattccagatgtgcatgcctcaaaagaaaaatcccattctccttccttttggggagcacttttggtggcaccaaggctggtgtggggtagtggagagagcactgagcttagagtcacaaccagatgaaactgctctggtcttcactagctgtgtgacttgggcaagcagcttgcagtctctgagcctctgagatccctgatggacgaggagaacaatgaccccctccccaggctgtgctgagagagggaattgatcttggatatgaaaatgctgcsctggcacagaggtaggagctgagcaacactgctggatgaataaacacatgttatgcagggtgaacagaacatttcatctgsmacagctgaaggcacagsttagctatgsgcatggaaagaactgcgtggaaaattcatttgttgsatttttgscaggttgatgtttgsaagsagggcrctstt

SEQ ID NO: 216019 - DNA, 1000 bp, Homo Sapiens
aaatcaaggcgttctgagttctagatggttaatagcaggttcttcggtgtctgcagtcgacgaacgactggtgtaggcgtttgctgtgagaatggagaatgcaggggaacgcccctgactgagaagcgggccctgggaaacgattgtgaacgcgtgaatgaattgatgactaaaatccgctgcgggggtcctacagcgcagatggtaatgccgttctgactggctgggaacggcaccttagcagatacttaaaaggcgccttctgtgtgccactgtcactgccaacttggtgactcatttaaaactcataaccagccggtgaggtcggtacttcgctcctcctcattctgcggaggggaaagcagcacggaaatgccctgtgactggcagcggaaaaggcgaccaccgcttgtgtgtgggtgtcccgacgtccggagggggcaggagtttccacgggtcctgggacagagctcacctgttttgttttgaattacacttatttatatgcaactacaggcctgacgctagcggtgaagaaggcagatacagccttttaaggagttggcagatgagtgggagagagaaaactaatctcattatcggccacaggctgtggtcagtgttgaaggaaaagtacagggatgtttggcaactgtggtatttcaggtttgaccttaaatccttacttaaaccaatttttacaaggattggtctaggtgcccgggcgcggtggctcacgcctataatcccagcactttaggrggccgaggcgggcggatcacgagatcaggagatcgagaccgtcgtggctaacacggtgaaccccatctctactaaaagatacaaaaattagcsgggcgttgtggcgggmctgtcgtcccrctattcggrggckrggsagggatggcgtgacccggrggsgayttymwtarcsrrwcccccmtccmcycagctkggraaaaacaaatcckytmaaaaaaaaaaaaaaaaaaaaaaaaaa

SEQ ID NO: 216020 - DNA, 823 bp, Homo Sapiens
  misc_feature (628)..(628): n is a, c, g, or t
aaaactaaatgcaggaggcccagagctgtctatgggattggatctcctgcaacctgccttgggccccagaagagactggcaatgtcagcctcctccctgctctgcctgagggaggccacggagaacttccttatcgggcccaaactggagccgctgactgctcagagcaagatttctgccttgaaagcaaatgcagtagcctcagaaatgtgcagcgcatacttcttcctccccctctccccctccaggccggcagagctgcagtaaagatgcctgcaggtcatgacctcatgtttcctgtccacttcccatggcagggatcagagctttgggagatatgtgaccaaggaggacacatgaacttgctacccctctctctaccccagacatacccacatgactttgttttactcatattgcattggtttaactcggaaatgggtgacctcccaccacctaacctgactcagtaggaggggaggtaaagcagtttaggccctggtatctgtttgagaagttaaaggaaagggcatgggtggtcagggaggaggcagagcttggggtcaaagggatacatgtcaggggaggtttgcttaatcttgtctcccaccagctccaggagccaggngatttctcttttttttcacaacacatttcaaacctaggaaagggaattttccttatttgcctcttaacccagaagggctaaacacttcagctgcttgaagaaaacgcctgggggagctggctgccctgcccaaaggaattgggattaagaaacatttaaccctgggccagggggcccttctggcggtgaaatccc

SEQ ID NO: 216021 - DNA, 825 bp, Homo Sapiens
ttgtttaagaaagacatcaaagggtagaaaacaggctcggcacactagactaccacacgtgtggacactgttaccaccgggagagggagccccgtgggcacggggactgggcagggccgccccaaaagctatagcacgcggagcacacaaaatagtgatttttatacaataggtcagatttccatttttttttcctttttcttgccataaacatctatctcacaggctgaaaacactgagaaaactggaacagataaggccatgatggttggaaaaaaacccaacaagttaccaactccgctcgggcggcgctcacgaatcgcacaatagtcatggggtgggggtcgcacggcacggaggagaagcgtggtctccgggaagataggggcacagaaaaggttccattacaaaccagcggcggagggcgggggcgcgggggctggggtctgtgggcactccccggctccgcggctcgctgctctttggaagctggaggccgtgccccctgccgccctcctcacagccgggccgggcagtgcccccttcttgagcttgggggcaagggagggcccagcgctggagaagatgcgacacccacggctttaattgcacttaataccaagaaggggaagcagtggggttgctgggggtagggtgtccaggggctgctgctgacagtggggaagtcccaggtgacgcccacctgcgccgggcccggggcttcaggcttggcccaggacaggctgtgcaaagacagcgagctgtataagttaacagtttcgccggggagggggccctgctttgccttgccccctgggtttgtgg

SEQ ID NO: 216022 - DNA, 1000 bp, Homo Sapiens
gatcaatttaccaggaatctaaaactattatgcctatttatttatgtgtatatgtatatacaacattagggctccaaaatacgtaaagcaaatattgacaaaagtgaaacaagaaatacatagcaacataataattgtagacatcaagaccccatttttaataataaatagaaaattcagagaaaagatcaataagaaaacagaaaacttagacaacgttacagaatatattattttgcacatagaggaatacctgasastggataatttataaataaaaaggcttgtttggttcatcgttgggcagactgtacaagaagtgtgtgccggcatctgcctctggtggaaggtttcagtaagcttccacaatggtggaaggccaacagtaactggacatatcacatagtaaaagacagaaccaaatgtgaggtgaaggggccaggttcttttaatgaggcagctctcatctgaattaacagagtgtaaactttttgattaccaagaggatagtacaaagccattcatgagaaatttgccccatgatctaaacatctcccaccaggttccacatccaacagtgaggattacattgcagcataagatttgaagaacacgaacatctaaaccacatcacagaccaactaggattaacagacatgtacaaaacttttcagtcaaaagcaagagaatacacaacattcttatttgcacttgtgtattctgttaggacacataacaaatcttattaaatttaagaatactggctggcgtgaacaggctcatacctataatcccaacactttgggagaccaaggtaggaggatcatttggagccagaagtttgagactagactgggcacaaagtgagactctgtctctatcaataatcaaaaattagccaggcatagtactgcwtgtctgtwgtccaagcttctcgggaggctgaggtggrcaawcacttgtacccaraargttgaggctgcagtgggcayaatcttgc

SEQ ID NO: 216023 - DNA, 1000 bp, Homo Sapiens
ggccgggtgacgctccagaatgggagacaagccaatttgggagcagattggatccagcttcattcaacattactaccagttatttgataatgatagaacccaactaggcgcaatttacattgacgcgtcatgccttacgtgggaaggacaacagttccaggggaaagctgccattgtggagaagttgtctagccttccgttccagaaaattcagcacagcatcaccgcgcaggaccatcagcccactccagatagctgcatcatcagcatggttgtgggccagcttaaggcggatgaagaccccatcatggggttccaccagatgttcctattaaagaacatcaacgatgcttgggtttgcaccaatgacatgttcaggctcgccctgcacaactttggctgacctcctctcagctaggcactcacgctgtttcctcctccctcctcttcccaatactattcccactcctccagatgctccaaatatcatgcacaaatgagcagggccgcggtgggagtgggcgcagtgcgctgctgccactgaggtgttgtgcatgatgtttggatgctagactagttgcatctgacgggagaagtttgtgttgtaccagcgcatgccttggaaagacttaagtaatgcaaaaggttgtccttttttttttttttttttttttaatctactgacaagttgctctagtaacccaaagaagtgaaggagaaagcagctgcctcaccgcccagacattgatttgttcagatgtttcaatgcctcatgatamaataaaamcacaaaaattttcttaacagtttaaattgttttaattagtttactagttggctgggcatcagaagcyacccagacccgttgtctctctcatktttcmccccccmcttctgcccmactctgawacctgttgsagggggaamtgstgaagagcactccmgctagctytmraagcgkgtggggrgtytctccmcycmmagggggctggttttgraa

SEQ ID NO: 216024 - DNA, 924 bp, Homo Sapiens
taatgtctgacattattgaaaataaggaaaagactttctcaggtagtgtattagagcagagcagaatgcaggggttactgtgttgaacaaaaggcacacatcagagagacagttgcaaactcagaatactgcgttatgggcaaaactaactggtccacaagagaaaatgagagactcgatttggctgccaggaacacctgggcctaggcaagaacacaagaggtttctgggggtggggaggaaataggtctcgctgaaggtgacagatcccttggggggcggccagctgtctggatcactgtccagggactgtggccagcccagatacctccgaggtgagtccagatcactaggagcagcagtctgtcggtgggatgcgatggatggcgatggctgtggcagcgcaggtctgtgggcagaatgatgtagtcgtctggcagtctggtggggaggagagggcttggcagcggcggcagtgggtggtctgtccagtgtgtaacaggagcccagcttgcagctggagcgcaggacagcgtccaaatgtacatgggaggggctggctggctggaaggagagggcggccggctcgcttcagagtgaggccccaggggccgcagcaagaagcctggagcgctatttcttggaacaaagggaaagcactaccgcgggacgggaccaggagcgcagggggacattggggccggttcgagggggaaggaaaggcccgccaggcagggcccccctttgctaacccttggcggcgggtgagattcacagcgggtcccttttcttaaaacaccctatcccgaggacccgaggtagtgcccggcggctaaaaagggtgtgtgcgctaagggatcgaaagaatgagctattcggggggtgccaaaaagtcgcggttgttattttgggaaggctatcttt

SEQ ID NO: 216025 - DNA, 861 bp, Homo Sapiens; identical to SEQ ID NO: 40193

SEQ ID NO: 216026 - DNA, 839 bp, Homo Sapiens
tggacggcgaccctgggctttcgggagaaagccagaggggcagggttctggaaggttccctggcggctggggtgcggtgcgggctgaaatccgagcaggagctgggcgcggccctcggggaccgactatgggggacggcgccgcgggagtggggcaagtgcgggcctggacccttggggccaccgcgtcasagtcggcggggccgtgggagggacggtgcccgcccgctgtgaagggcggtggcccttctagggtcaggccaagcgcagaggcctgaaggtcaccgggtgaggagccagcgcgggtgcctcagaagccaagcgccccgtcccgagccctgcgcgaaccagtatgaccttccaggaaccagatgagagctgcgttttcaagaagcagtgccagacaccttgggaaatcgacactctcctgtccttgggtgggggtgggggtcctggaaagaagctccgtcagcgtaaagtgaactcttagctttgactttgcagagggatccgttgtgtcacagtgacccgcattcctgtcattggtgtggtgtgtttcacagccattgcctccctaggtagattgtaaaacggcgttcgtagagcctttgacctcataatattatgttggaaattacacgatagtaaacataatgataaatggggaatgttaaatggtagtatgggaacattttctaatggttgcatccttaaaattttctgtttcaagtttttaaaggctatagccttaaaaaaagctgactgtaggaaaatggtggaaagagtcgtggaataaaggtagctttgggggattatgacgtgaataaatgacagaaatta

SEQ ID NO: 216027 - DNA, 863 bp, Homo Sapiens; identical to SEQ ID NO: 52141

SEQ ID NO: 216028 - DNA, 926 bp, Homo Sapiens
  misc_feature (681)..(681): n is a, c, g, or t
  misc_feature (778)..(778): n is a, c, g, or t
  misc_feature (881)..(881): n is a, c, g, or t
cctatagaatacatgcaattctactattatgtttattaaatataaagctgcgtcaagttcctagatgagtcaaagaaaataaacacaccacatcactgcttgctttggcaattacatttatgttcttgggagcccagacactgatataaatttccagcaaaaaccaaagcagacccactgcctggataaattcagaccatacgtcttccctaattgttccgggaacttttgctgcttgaagaatgcgtgaattgctatattgttcaccagaaagacagaagttaatccccagatggaaatttcagatttttcttttggttagctttttggtttttcatttttgaagacatggggggtgttgctatgttgcccaggttggtcttgaactcctgacttcaagcaatcccccagcctcagccttttaaagccctgggtttacaggcatgagtggcctcacccagcccccagattttctactttaaacagccacactaagaactggaaatctgtgcgtggtgctctcagagcaggggtggaaagcctgtttgtgtgtgacagtttaacagcctataagatgaagtcctgtaaaggcacacatgggcacacccatccctgcctcggtggattccttctgatccttcccacagtctgtttctctccatgcttccatactaacctctntctcttgataactttctcttcccaaatcacaatatagcggactttgtcattttccatggcccctgaacttagttttagcatctcttatttgcttaanaagagagagagagaaagagtgagagagactccccattgtactgctgcatctccaaaacagcttaaatctggcaggaacttttcgggagctcaggctacgcttnttagctttaaagggagctcatgaccattatgtaaattgtcccaga

SEQ ID NO: 216029 - DNA, 544 bp, Homo Sapiens
gattcccaaggatttattggcaccggacctagcctggtgcccgccccttcaaggaaagacactaacaaggaggagtgccggcaccgcaagagccctcccagaagcgcccagactgggggtcggggaggacgctgccattcgtggccaggaagggaagggagattccggaggagggtgggcacggcgcagggaaaggccgggtggtgggatgggcagggaggcggggtaccggccccgctagaaggggaactcgcagacgtagtagagacgccgctggcagtcgtggtcccaccaggagccgtcgtcagaggcctgcgccacgcagttctcgagcgtgccaccgttgggctggtccgggctgagcggatgcggcgaggcgctgggctgggcgccgagctcggggcggggtgagcgatgccaggcgaagaaggacacgcgctggccgttttcgaagaggtagaggccctcggcgcgccgatcgtgcacgcccagccacacgggccagttgtagggagcgagcgccgcgcgcaggtaccgagtgagc

SEQ ID NO: 216030 - DNA, 873 bp, Homo Sapiens
aactgcaaattgccccagttttatttgtagtccctacaaaagggaaaaaaaattaaggttttctaacaccacctacttggggagatggggaagtgggactgtgccgctcaccatcagctagaacattagtggtcagcagggacttggatacataccaactgactgtcccaacaggaactcagtctcaacagtctacagagggacagtcagggtaccctggactgctggcacagcttggcacataggaaatggttaagctgaccctttcctggcctccttcccatctaaaaagaaaaaggcgccggcgacctcagctgcaggttgcttccccatccagacgaccttaaatatcgcgcacaaaaataaaagggagccaggaaaaaaataaaaacataaaagaaattcccattctggggagacaggaggcagggtagaggggaaaccgcagatctagagccagtagcaagatttgctgctgaggcgaaggaacaaagtaggttactgccgaacacttaacaggatcatctcctggggaaggcccacatggtagagggcatgaaaaaccacaaccaggaaaggtatgggccagagtagttataacctggatctgtaaccctacccacctcttttctccctccctccctgtggtgccccatcccaggatggccctacatgcggcgctggtagccagagtgcatctgagccgcccgcaggtaatcattataggagcccgaatagcgtgcgttatcggaatgggcatcgggcaggcgacggttatccagcgaggactttgtcggcgagcggtggaacgaaagctgcgactctgataaacgcgggtatcagaaagctcggctaacggcggccggaacatac

SEQ ID NO: 216031 - DNA, 1000 bp, Homo Sapiens
  misc_feature (4)..(4): n is a, c, g, or t
ctgngggaaaaccgtggctggcttcaccatcctcctaataggaagaggcagtgaggagaacagtagtctggggaaggtgggagccccaactgaggggcctgcacccagcccctcagatccgcctcccctcccatgtcactccagctcttttgggatgatcacatggtgagaatctgctttgaagatatgaagggcttcatggaggcttccaaggcagactggtagtcctgcagcgggacctgggagcaggcaggggctgtgagctggcctcggcggatgagatcgcacagtgtgaggatcagctccttgaactggtctggactgtgatccttcttccactgggacaaccaaaagcctcgaagtttgagatccttaaaaatgagcaggctcacagaggctacgacgggctgcttggccatccccccataggttaccatggttcctccacgcgctaactgccgcagcagctctgtggagcttttcccaccaacacagttgagagcaagccgtggctggggcatgtccttaaagaagtttttcatttcgggccttcttagctcctcttctgtgatgacatgctcagcccccagactcttcagtctgtcactcagcttctggatatcaggtctgtctcggaccacattgatggttcttaggcccagggctgcggcgatctggatgaccgcttgccccactccgctgttggatgcattctggatgacagaatcccctgggtgcagttgctcgaagtccatcaacatcctgtaggctgtgcagggattgacacccagggtggcagcgctctgaagagggatgtcactcggaacttggatcagtgcttcctcgctgaacacagcctcggtccgccaggttcctaaaccagcatttgctggaatcacccagtctcctggcttcasccggtcacattgctgcccaccgctaccacctgtgcaaaccttcgttcctccaacagcrggagtcagggaggagtcgtagtttc

SEQ ID NO: 216032 - DNA, 1000 bp, Homo Sapiens
acgaggcgacgcagctccaccacgcatgtcaagcaagccattaacaagatgctcaccaaaatcagtagttaggcagcccagctgaggtggaccaactaattggaaacactcttccccttctgttcccctttcaaaaataaaacaaaatattgcattctttgtttggattctgagaaatgtctgggcttcccattgtttctggcctctaataggttgggaagttttagcgtgttttatgcaatttcagtgctaacaatttcttcctttcctgcttgaataagatacactctaatggcatttgaacatgtaatcaccagagattctgaaatgactggtttatgttaagctatttttaggcatcttcaccttgctttaagtaggttgaagtttttgcaaaggcatttaaaaattcaatttcttgtcagatactacaaataattttcttaaaagtctaagatagcagaaaatacagtaaaaacacaggagaagaagctgagctattggaacaggaaatagaaggaactctagtttctgtttgaagtgaggattttctgaattatctaatatcatctaggttttctttaaaattttattttgttcttcagttcaagcatcttctcactaatgtttttcactataacagagaattcatttcaatttgagttggttctctcaatgatctattgatcattacaccctaactctccttccttggctcaaacaatattttccctataacaaaggcaataggacacaaaattcacatcctgctgggccttttttcatcaagtcagggtgatataaaaacattggaagtcttttcaccaaaccctgactttattgaatgctagtagaagatgtagaattagagacatctgatttgtttatcacttagcagaaaaccacagtccaaagacagcaattaagatggagcttamcatgcytcattgggagtctagacttgagcaggacagtagaaaaatagctctgwtcatwagtt

SEQ ID NO: 216033 - DNA, 1000 bp, Homo Sapiens
caatgtctttggggaatctcacaattaagggtcaggaaatcaggaataactaatataagagacagaaggaccagcctaagaggtaggaaaaacagaaagtaacaccagaatcgttatactcaggcactggtcaaaatactgactactgaggtctgagaaacagtcactggagagagggatttcctactcccatcaagttcatgggtactccatacttgatgttttcttttcttatgtccagtaagatttgagctcactctaaaagcttttccacattcctcacattcataaggtttctccccagtatgaactcgcttatgtccaatcagagctgagccctgacggaaggacgtgccacactcactgcaggtgtatggcttctcaccagtgtggattcttttgtgctgcctcaggactgaactatgatggaaggccattccacatacctcacatttgtgaggcttctctccagtgtgaattcttcgatgattggtcaagtttgacttcccactgaaagctttcccacactctaaacatttgtaaggtttctctccagtgtggattctctgatggatggtaaggcagtgctgatcttggaaggttttcccacaatccctgcattgatagggcttctcccctgtatgctctcgttcatgagccctgcgcttacagttatgacgaaaggctttcccacactcctcacacctgtaacgtttctcttcagtgtggatccttctgtgtttggtgagttctgccttgatgctgaagtctttycacactggggacacccatagtgtwtctcccgagtatggattcgtttgtgtttgcttaggtmtgagcycgactgaagggccttcmyacttgcwgcactcataaggcgttcccagtgtggattctawgarttaggtgaggytgacyyccatgraggcctcccgmatcctmmaktcwatggctcycccagtgtggttctgcatggatggaaggawtcttaactagaagg

SEQ ID NO: 216034 - DNA, 901 bp, Homo Sapiens
  misc_feature (684)..(684): n is a, c, g, or t
tttagtgtaataaaatgtagaaggaccattattgtgttccagctctggttcagtctggcagtgcccagcataaaccgtcaaaacttgataaaagactgtcttggggttatcttgctgtcatgattccgatgtgttttgatttccttctggagtcataaattgcacctttggtaccatgagggaagaattgttccttcggatagaattgttcctcctcatggaattgtttcttctcatggagttgcgcttcctcagagaattttgatgagacagttcactcttttggagggtctgaataaggatggaaggtttctcatccagctctcgggcactgcaccgtggagcagctactttaacagtgttgccaaatttggagtaatccacagaatacactccttcttcctcagtcacaatggacacaaagcggtggccccattggatctcctcagcaatgtaggaggttcgtgcttgtgtggtgatgccagtagtttcaaccactccttccagaataactatgacctccaagtcttggttggccaggtcagttgctgagatgtcatacaggggactgcgcttgtcaatcacgtggcagatgatcaaaggggccaccagaaaaatgttattgctctcgattgggttatcaacaggaatgtccagttggtgaataggaaccacctccccttncaggtgtagttgttttcttgaccacctggatgcgcacagaggcactaatgatcatgcttttcctcaggtcacccacttcgaacatgaagcacagcttgccatttcggacgggcatcacagcatggcggctgaaaatcaaagttctgcccttctgtgagcctgagctgttttcatgaaaatgcagccttacatgactgcattgatgatcaaacccaca

SEQ ID NO: 216035 - DNA, 889 bp, Homo Sapiens
  misc_feature (29)..(29): n is a, c, g, or t
  misc_feature (628)..(628): n is a, c, g, or t
cattatttcttatttttagaaacactttntactcataaatccaaggtgacaatggcattaaatggcattaaaaatatctacaggaaaggactaccacgaaatacaatattatgataacagttattgcattaaagtggttacttttctgtattcttcacatgtcccattgtatcactatacatttttataataaaaaatcgtaaattaagaaagaattcaagcaaagtattgttgactttataaaataattcttaaaacaaatgttcagaaagaaggcattcaactaagatagagaagatgctggatggagaggcttgcaaggtcccgggaggagctccagggtgaagctcatcactagcctttccagcagcactgtccctggagaccagaagcagtgggagccccttccctgtggcaccacggactcccaccaaggcacgtatcatgaacactgtacttgtacacgtttattacccttgggtgtatggggaatctaagagcacctctgaaatccatacttgattcctttttacattgaggaaagtgagattcacacacaaataccaagatgaccaatgaatggtggcctcgctggcaaagcagccattgcaggtaaccaaaatgcctncctagcattctgtaacccatgggcttagggaaagattaagtaacatttctttttcaaattcacttcaaatactcaactgtgttcatttaaaaaacaagcactttttgcacgagactaaacagatctcattcacactgccagcccacagaggggactcctccgtccccttcaaggagggttttgggcaataaagccaaaatctggactaaaatagggggggctcaatagacaaatttttaaccctatttattaagggtcctg

SEQ ID NO: 216036 - DNA, 629 bp, Homo Sapiens
tgcttctaaacaaaataaaataaatgaacctaaaacagcgcttaggcagcttggaagggaagatacattccatttaggttaaaatacatgggaacgatatgtacatttgggcagatattctgaactctactgggttaatggttatgcctgtacttgagcacatcagtgagaagtttcccatcacattttatctgaaatgaacaagatgtcagggcaatctgctagcaaaacctgcgctcggggtcagcgatgcttctccctctggaacactcatcatgcccgtccctaggacacgttgcctctcttcttttgcaaagctttcatgaggtctgacatgaaatcttgctccccgcctcctgctccgccggggtgccctgggttctcttgcctcttggggggcacaggaggcctcttggccaccgcggggggcggcctggcggagtcggggacgggggcgggcgcgggcgcgggcggcggcggcggcggcgggggcagctctgagcccgcgatccctgcgtacgacggcgggggcgggggcacgaagtctgggggcggctccatgaagtccgggggcggcggcggcggtggcggcggcggcaggaagtcgtcgggtggggcgggcaagcccc

SEQ ID NO: 216037 - DNA, 799 bp, Homo Sapiens
ttctctattcaaagtgtttggaatctttattctgtttaaaacactgatgacatttgccaatttttgagtgttcttcatgttactgatttgtaggagctctttatatattgcagatttagtctcttactggttatgtatgctgcacctgaggagtagcagcactgccaaggacactgagtgtcttgtctgtgcagagcttcacatgaagctggagagaagggactggggcaagagggaaagataaaaaggggcaagtaagtaacagaatgaatccttgttgctaatctcctggcccccatcccagacccttcaggggatcctggcgattcgaagcagcatagcctgataggcctctggtgagggtgttgggagggttttcttggccgcctgttccaggatgctcaagatgatgctgtgggcctcctggcatagctcagcacccaggaaagcctccactcgtccacgccatgctgccagtcgtggccgtccctcaaacagttcgtagccgagagccaccggctgcatcagctcctccagggccatgagatcagccagtgtcacctgctggccagcgaggaagggcctgtcccccaggaacttgttctccagccattgcagggcctgtgccatggcagtcctgttgcgttcaccttctcctcgggcacctgaaccccatgagtggccccaccctggaccacaggggttaccaaggtgcacggtgcaatcgcatgcaccccaggtctttgaacacgcacgagcttcaggtaaatggtccagggcccggcgttgtactacagct

SEQ ID NO: 216038 - DNA, 436 bp, Homo Sapiens; identical to SEQ ID NO: 53214

SEQ ID NO: 216039 - DNA, 388 bp, Homo Sapiens
tgcccttaccttttacttgtcttgtcatccggaaaaattcaacacttattgcatagcgtgcaacatctgtgatcgttgcaaagggaaatacaaaggtaaataagatctaatttctgccttcaatgaacttatgatttaatagaagggatacaggtaccaaaaatgcctataaggcataacctggaagggcaaatcattatattaatgatctccgtgtccatgtccctttacaatatggcatagtcatttctcacatcagaaaggtggcatcaatttctccatccccttgaatttgggctgttttttaaaacttgttttgataaagggtcaaaggtggcaggagtgacagtgcaatatctaggacccgggcaacccatgagacctcatg

SEQ ID NO: 216040 - DNA, 455 bp, Homo Sapiens
ttttttttaaatagatacagggtctccccatgttgcccaagctggtcttgaattcctgggctcaagtgatcctccctcctcggcctcccaaagtgatgggattaaaggtgtgagccactgcacttggcctttttcttttttcatcttttaaaaggaagaataaaagggaagtaaagttgaaaaccaaaaaattcacttcggattcaacactaagaccccagtaggtaatctggcaaaggaccagaagagacaatgcagtacaaaaaaaaaaaataacctcacatggctggtaaatctaagttcaatttatctagtaaccaaagaaatgcaaattaaaataataagattgtttctgcctaccaaaatagcaaagattacaaagtgatcatattcaatgctgccttgggtgaaaaagacccacaggtggacatgtaatttaatacacattaatctgg

SEQ ID NO: 216041 - DNA, 823 bp, Homo Sapiens; identical to SEQ ID NO: 44074
  misc_feature (14)..(14): n is a, c, g, or t

SEQ ID NO: 216042 - DNA, 781 bp, Homo Sapiens
  misc_feature (677)..(678): n is a, c, g, or t
  misc_feature (719)..(719): n is a, c, g, or t
  misc_feature (738)..(739): n is a, c, g, or t
cttttttatgtagttttattgcacctgtaaattttcctagagagtacagtcattgtagttgcttttaactttatttttaaaaggcatagtgctgtaagtcatcattgggaacatgctatttttactaatatttatgatattgccagagtccacctacatcactgaagttatgctgcagttaatgtgtttggacagctgtataatattccattgtgtgatcgtgtcttcgtgtattcatcccttctcccactgatgggcatctgggtggcttccaggtttctgttattgtgtgcagaagggctgtgaagtcccaggcatccatgtgcagaagttactccgggatacccttaggagagaaatcagctgggccacagtacggtgtgtggatgtggaactttaggctttactgccggagagtttttccaaagtcagcacagcaatttgcattcccaccagcagctgaggaaaagcagaacagcaaaaacttgcgacacactggaggcccacgagagttctgatcccttctctgacccctcatgttactggtcccttgacagggagcaaacagacgcactatgacccagcatcacaaactaatgtgtggaaaggctgggtcttatccccgagccaacctgactcaaaccccaagctcctggcaccaacgcctcccatgcctnnagggcagaagccacaggggggaggcagctcttgaaaggcanaggatgaggttgcagtcannagatcacatcaagatggacacctccagagggtcaagttcacg

SEQ ID NO: 216043 - DNA, 562 bp, Homo Sapiens
  misc_feature (11)..(11): n is a, c, g, or t
  misc_feature (18)..(18): n is a, c, g, or t
agaccaggggncctcctnactgccttgctgcaggaggcacaggctgccagtcctctgcgagtgctggatgtgggctgtgggacttccagcctatgtacaggcctctacaccaaatctccacacccagtggatgtgctgggggtggacttttctcctgtggctgtggcccacatgaatagcctcctggagggtggcccaggccaaacacctctatgccctggacaccctgcctcaagcctccacttcatgcacgccgatgctcagaacctgggggctgtggcttcttcaggctctttccaactactgctggacaaaggcacatgggatgctgttgcccggggaggtctgcctagggcttaccagcttctatcagaatgcttgagggttctaaaccctcaggggaccctgattcagttctcagatgaggaccctgatgtgcgactgccctgcctggaacaagggtcctatggctggactgtgactgtgcaggagctaggcccgttcaggggcatcacctactttgcttacttgattcaaggctctcattaaagacattttagta

SEQ ID NO: 216044 - DNA, 863 bp, Homo Sapiens
tttaagacgtcttgctttccttaagaaagcacactttcttttttatttatttataaaggctaaccatatccatttgtcaatattttcggctttaaggaaaatagtttaaaaaacataaaaaggtaaatacactcaagagtaactgctattaaacagttctgaacaggcagaaaatgtagactttcctttaacagaaaatgttaaatctgtaatagcagcataatttatatatagaaaaaagctggttttgaaaacccagatttatacccaaaacattttttttctgtacaactgcgtttacactgggaaataagtttcttcacattatgttcattcccatcaggtacaggtgtgagcttgagtttgatcagccagccctgagcgcaagctcagcgctcagcacaatcttcaatccaacaccatggcagaaagcgcatttagatctttcatgtatgggtgggccaccaagatctggtctattttcagtctttgctctgagtcagggaagatcttcagaagggcttccctcagctcgttggtttctgcagaagatctctgagctggcatggccaggttctgctggagactggggagggctgtcaacagtggcaaatggggctgttgagggacccagtggcttgaaggggcttccttgaattccggtcggaagcttgcgggctgtggctggcttccttgggggccagggacttttaaactggtggtaaacatccccccttttggcaggcccctgaatacggggctgcttaacaataaaaaagaattccttttgaaaaaacttctttatcgagggacccttcttttccccgagattcttaggtacactttattttttccccccctaa

SEQ ID NO: 216045 - DNA, 873 bp, Homo Sapiens
ataacaaaaaacatttattaaggtaggcaccaatctaacaaggccctgctcacctgcctcttctccttcctgtctgggagggggctccttggtgtgcagagcccaaggtgggggtccaagttggggagctcccagttcttccccataggccttgctgtcagtcagccatgggtcccttttggtaccagagacttgtgaccctggactcgaacctcttctgcccaagcactcgcctgctggcaactctggctggagggcttggcccagcttctggccccacagccccctgaggtccatgcagccctgtgccagccaggcctacttgagcacgagcatggcctctgtgccatccttggcggtcaagtagaggccatgtgtgaggtagtactcccgccgcaggaaggcatagaagtaatcagagatgagcaggatctgcccaacgttgaaggtcagtgtgatggcataaaagaaattagagttggcacttcctgcataaatccagaggtgccacaggacagggaagagcagggaacagacgatgatgatgcaggtgaggacaaagatgtttctcaggaatctgtagagatggttccacacggggaagaggccatgtagagcccacgtccccactgtcgggtaggacttaaagatgccgatgacagcgatctggataacatgaagaaaaggggggctcctttagctttagggctaaggggagggtgtaaagaaaaactttgtcctgaacccccctcccaggagagggctgaggggctaaaacatcttttgcaagaaagtcccagaaaagccccatggtttgggaggggggatctggaaacaaaagggtttaagcccttaaactgggggggtagaaaa

SEQ ID NO: 216046 - DNA, 355 bp, Homo Sapiens; identical to SEQ ID NO: 50379

SEQ ID NO: 216047 - DNA, 872 bp, Homo Sapiens
tgtcccagtagcgtttattaaaatttcactgaaagcaccccccccacccccatcggcccaaagctgaataagttagttagctgtgtccctggtcctttgcgatggtgtgaggctacatcctcccccagatggctacgatgttggagtccgtcagggcggtgaggtaggtgaaggaggcattggccaccactgtgttcaccatggtcttggtcaccacctggccaagggcccagggctggggccacttcaggatctgtgtgggggcctgcagggctgccggcagcaggggtggctgcttcaggatgttgctgacgtcgtagagccacacgttgccctcctcatccccacagagcacaatccccttatcagggcaggcgctgagcgagaagtaggccaactcggtggacgaccattgcagccgcgccaggaccaccactgccaccgtggactggctgccccggcccccccacgtctgcctccagctccacaggcagatggtgcccaggccgctccccttggaggccacgatgtcctcattcacaaatgccagcccatccactctccgtccagatgcctcggagccctcagagaagacgaattccacttcacacaccctcctcttttggggctggtccagccgcacgtcccagcagcagcagccgccctcgcagccggccagcaggcgggcgtccgggcaggaggcgacagggcagaggcgcagggggatagaggtggtgtccagtgtgagcagctggctggcctggaattcgtagtcctggttgggcaccccgatgtcccagaggatgatccgcttgtcataggagggccgtgaagagatggttctcggggccggggctgaagcacaggtgccg

SEQ ID NO: 216048 - DNA, 628 bp, Homo Sapiens
  misc_feature (2)..(2): n is a, c, g, or t
  misc_feature (10)..(10): n is a, c, g, or t
anagttgagnataaatgctaaagaaaccatgaggattgctgagaagctctacactcaagggtacatcagctatccccgaacagaaacaaacatttttcccagagacttaaacctgacggtgttggtggaacagcagacccccgatccacgctggggggcctttgcccagagcattctagagcggggtggtcccaccccacgcaatgggaacaagtctgaccaagctcaccctcccaaagtgctaggattaacaggcaggagccatcacacctggtctcttcccccatttttaaattgtgttgtctgtctttgttgttgagttgtaggagttcttaatagtttctggatatcagatgcctttgtggttttcacatctctgcaggcaactgtgtgtctcaaaagcaaactgcaggattgggctgcaccatggactgggccaggcatctgagatcagacagacccaggctcagctcccacttcctggcctcttctgccaccctgggtgtgcagcctcatccttggagccccagttgcctcatccgtaatggggtgtccttgttcatattgaggctctctagtgaaggcttacggtcaggcacgactgcaaattaaagcttcacaaatcaaa

SEQ ID NO: 216049 - DNA, 1000 bp, Homo Sapiens
ctcgattacaacatttacatcagtggaaggcaaagactaccaagcagaagcacgatggcacggtgggcctgctcacatacccagtactccaggcagccgacattctgttgtacaagtccacacacgttcctgttggggaggatcaagtccagcacatggaactagttcaggatctagcacaaggtttcaacaagaagtatggggagttctttccagtgcccgagtccattctcacatccatgaagaaggtaaaatccctacgtgatccttctgccaaaatgtcgaaatcagaccctgacaaactggccaccgtccgaataacagacagcccagaggagatagtgcagaaattccgcaaggctgtgacagacttcacctcggaggtcacctatgacccggctggccgcgctggcgtgtccaacatagtggcggtgcatgccgcggtgacggggctctccgtggaggaagtggtgcgccgcagcgcgggcatgaacactgctcgctacaagctggccgtggcagatgctgtgattgagaagtttgccccaattaagcgtgaaattgaaaaactgaagctggacaaggaccatttagagaaggttttacaaattggatcagcaaaagccaaagaattagcatacactgtgtgccaggaggtgaagaaattggtgggttttctataggaagtttcaacgaatcacagcaaggcttttgtgccttgcactccatgcattctgataacggcagctttcctaaaaagaaaaagttatagttttgggacatttaatttggtatagctgattattggctttatttgatgaatattgctttgtagctttgaaatacgacagtgttccaaatcccatcaacaawatgctgtgaacammacaacaaaaaataaatcargaggcatagctgtctgatccccawtwttggrggccctcctgggctgcagaatgtgrttgagkdagggkaattgggrawggggttcwttgtgytt

SEQ ID NO: 216050 - DNA, 914 bp, Homo Sapiens
  misc_feature (6)..(6): n is a, c, g, or t
  misc_feature (663)..(663): n is a, c, g, or t
  misc_feature (772)..(772): n is a, c, g, or t
  misc_feature (786)..(787): n is a, c, g, or t
tctttnttatatctctttttaattcttccccctttgcttattcccttttttttttctggaattacattttaaattaagttttagagctatgtggtaaattatttggtccaattcctttatactttggatgaggtaaagtgactaacagaggtccccaccagtaggagcccaagtcagtctgtgagctcagtgctcctgatactaactaagtccagtgccctttcaaccacataacatggcattgctttacaaaatcaagtcctacaacagacctgagaggtaaactgacttcctcttgggattcaaacactgagtagctcagatggcagtaaaaagtcgtgggatccttaaggctttcgctcccacctcttttgctctttcaggtcctttggagaatggccccttttcctcctgcttttctcttgtgtcaaattcaagtagaccagggaatcactttcagggtgctgtgtgacttatttagggctctcggtcctgattccggtgacgtttccagtacagtaagattgagattaggacgagaagaattaccagggaaacaatgcttagcaatagcggaactgaaaaccaatagcctttgttgacggtttgcttaaagtcggtcacagtccccaggtgcagcacctggcagatcacctccttccncacctgattcttagggtctttgatatggaggatgctggtaacagatgtggtcccatttgggtgagacagagtcactgtactattttcaatcccctgaccgaggaccttncagaagaccatggnnggctggcgggcagtggcagagcaagtgatattttaggtggtcttcagagaatttgtagtgaagggatactatgggctgtacatagacggtgagggcagcccgtccttgagatcttcccaaaccaaag

SEQ ID NO: 216051 - DNA, 862 bp, Homo Sapiens
gctcaaactaattttattggattcccccttggtcctggggccacagtatatcttcaagctcttacttcccccacaatgccccagacaaccgaacacatgttgcaggggctcccagactggcttacctctgacggggcccagcacccggtgggtgaccttttgggtactagagcccaggcctggcagccctgcaggccgactgccatgaaaaggaaagctgggggaattcttcatctgtggagaattttgttggctgctgctgctaccaccggcacttgtgccggtgctaaaacttcgtgcccgactcaaggtgttttcggagcaggagacaggcaacccattgtgacttttgggtggagttcgaaggcccctcttcttgttgacacccacattcagagtgctgcttaggcctcggctgttgcgtacatgtttcagcatccaggcccgtagattagtaaggctgctgtgctctgacagtacaattcggggccacggattacattccgccatgtccagggctgcaatggccatagctcgtcccacctgctcaaatagttccacagtgtatctggaggggaaagccggcgggggaggggggctggcacgcccattgtcatggcaatcagcagggatgcttgtttactgagcgtccagtgttgtagttgcattcaagtgtgtagctggggattttccctgaggcttggtagattgcaacacgggcggtttccctttttagactggccatcttttacggtcttggggcatacaatatttttcttttgggaaattggcacccctggaagtccaaatgggcttgaatctcaagggagaataacctttgggatttatgcatgtttttcac

SEQ ID NO: 216052 - DNA, 902 bp, Homo Sapiens
ggtaccggtccggaattcccgggatctgatgtgtctgctccccgcctccaggtcccaaatgccagtgagcagccaacaggcctccccatgcacacctgagcaggactggccctgctggactccctgctcccccgagggctgtccagcagagaccaaagcagaggccaccccgcggtccatcctcaggtccagcctgaacttcttcttgggcaataaagtacctgctggtgctgaggggstctccacctttcccagtttttcactagagaagagtctgtgagtsacttgaggaggcgagtctagcagattctttcagaggtgctaaagtttcccatctttgtgcagctacctccgcattgctgtgtagtgacccctgcctgtgacgtggaggatcccagcctctgagctgagttggttttatgaaaagctaggaagcaacctttcgcctgtgcagcggtccagcacttaactctaatacatcagcatgcgttaattcagctggttgggaaatgacaccaggaagcccagtgcagagggtcccttactgactgtttcgtggccctattaatggtcagactgttccagcatgaggttcttagaatgacaggtgtttggatgggtgggggccttgtgatggggggtaggctggcccatgtgtkatcttgtggggtggagggaagagaatagcatgatcccacttccccatgctgtgggaaggggtgcagttcgtccccaagaacgacactgcctgtyaggtggtctgcaaagatgataaccttgactactaaaaacgtctccatggcgggggtaacaagatgataatctacttaattttagaacacctttttcacctaactaaaataatgtttaaagagttttgtataaaaatgtaaggaagcgtt

SEQ ID NO: 216053 - DNA, 927 bp, Homo Sapiens
  misc_feature (22)..(22): n is a, c, g, or t
  misc_feature (474)..(474): n is a, c, g, or t
  misc_feature (504)..(504): n is a, c, g, or t
  misc_feature (508)..(508): n is a, c, g, or t
  misc_feature (536)..(536): n is a, c, g, or t
  misc_feature (565)..(565): n is a, c, g, or t
tacataacataaaacttttaancatttatttttaaacattttaagcttcttattgaaatataacaatataggaaacacatacacagtacaacttgtaagtacactgctcaatcagatttcatctggatcaagaacagaatattccaatattccggaaaagaaaagaaacatgttaaaaagaaaagatttttatttaamaaaccwagacatagtaattaaaatgggggtwaagagaggtaatctcatctatccctattagatgtgtgtgtgtaaatatatatatatcatacataatcccatatctatgcatcwataccacaacacctataatgtaccattttcagaaatgggtttgcagaagactttcwaaggggwatttgtkttattgtttaavagattatgtggtaatrrctttgggatacactaaatagagtaatcraacasgtttgtsgcccaggabbatttatacscaanttaaaaasaaacaaggacacaaatggctgnatcnatactccagataaagaagaagaggatgngagggaatccttcatgcaccttctcratntcttttttcaccttaaaaaaaaawaaaaataaaaacacctttamacttttctcactaattctggataacatattagtggcctaaacaaaamaaatgaagagacaacctaatagaaaaccaattacagcaaatgtacctcacccmccrcccawcwaaacwcraaaaaaaaaaaccccccccccctttcctcctccctgccgtccctggcmcccyctattctcctttctgtttctgtgmmcttgcctatgctggtmcctcctcccmgtggcatcctctttggccttttgtgtctggcttctttcccttcgcctcgtgwwttcccggtttttctgcggtcgtctttctccgccttycttcytttt

SEQ ID NO: 216054 - DNA, 1000 bp, Homo Sapiens
  misc_feature (103)..(103): n is a, c, g, or t
  misc_feature (539)..(539): n is a, c, g, or t
tcaaacagttgggattatttttgtttcttatcatcccaattatttgctcaagtttgcctccattgggccccgttcagagtttcttgggctgcttgtactagtnacagctccacttccatctcttctcaggaagaggtgggcacaagacacatctgagccccttagtattgtgatggtggccaggaaatgatcaaagggtagcatttaggaaatcagcaaactaaagcctcaaatcaaaggtggacaaatgcattctcaactcaaacaggttgggtaatgctttcataagatacattatgtttttgtgtacacagcacacaaattttattatgtctacaaacagattcaggaaagacctccaggctatttccccaaatgattgacaaagtgcaaaacaaaacaaaaaagaggagagcacaaatgaatagcccacttagaagctgaatagaaagaatgggaagccatttcgtttcataaaatcttttaatttttggccaggcatggtggcttacgcctataatcccagcacttcgggaggncgaggcgggtggatcccctgaggtcaggagtttgagaacagcctgaccaacaaggtgaaactcatctctactaaaaataaattagccgggcatggtggcaagtgactatagtyccagctacttgggaggctgacataggagaattgcttgaaccagggagatggaggttgcagttaccactgtwctccagcctgggcaacagarcaatattccatctcaaaaaaaaaatcttttaatttttataattaacttttatcatgcagcccaacatgttatcttttcataaaatcytagtagargtgcactccagggatgatctbgcccycagttaagggctgamttttcctgtagctatgytgacacagmggktactaaaagctgatkttaasggggraaaaktggtgytttttccwargtcttctdwaraascrcmgtccccathayaaaggtttttccaawgc

SEQ ID NO: 216055 - DNA, 1000 bp, Homo Sapiens
agactggcatagatttgaaacttacctatctcccacctagaaatgggaagagcctaaagatatgggtcataagaaacaaaaaaagggctggattagggcactccttaggggaaggtagactcacatgggccactgaaataaaggaacctgggtggtcagctagggggcaggataaagttttttgacatctggagggggcaagaggatgaaccaatgaagatacttcatgtactttaaaattttggtgggaccaatcagttacagtaattcaaagaaaggtagtaagggaaggagaaatggagaagaggcagattatcagggtaaatgatggtaaaaattaatgagagactgcattatgatgtttaacaacaaaaacagatccaaaaaagagagccaaaaccaattcaaggcatcagagcctgggcaaatatgaatcaggaaactgtgaaagttaaaagttagggcaatcctagctgaagaggatactgaagctggtctttcccacattaactgtaaactgtggtagtacattaaagtagatatgtccttatgcaaattaagatggatgatgaaggggtgtttgaaaaaaaaggcagagagattaaggttggtgatatagatcattaccacccacatggaaagagcaagggctaaaaatgctgtttaaagaaacagctacacttttggttctattacattttaagcttaaacattacatatttcaatacgcatcttgaaaaaagtagcagctttctaaacattatgttcagcactctctcttttcacctctaaacttgcacagaagtctctccttgaacttcttcatctttattttgatgttcaactttctgcagaagcctggggcccagtaaaccaataagcagacttccaattggggctgtgatgaggatggacaaaatgcactgtcaacacatcmatccatagtctctaattgttctctcatgtgacttgctgtgtcaaagcamagatctattgcagc

SEQ ID NO: 216056 - DNA, 518 bp, Homo Sapiens
tttatggttggtgtcctttttaatacatttatttttctcaagaagtatatacaagagtggccaagagtacaagctttgggctggggctctttggacttgaatcctggctatagtcttttttgatttgggctactcatttaacctttttgtgcctcaactataaactggagatgataacttatactttctagagctgatgacaggattaaaggaatacacacacacacacacacacacacacacacacacactctatatgtaactataactttctagatacatacacacatctgtctatcttcaaacagcagcctagttcataagtattattgttaacattgtaccatagaaggagaaaatgttttcataagtaatcaatcagaattctaagacagctagaggatatgtatattttaatattctaaataaccaaaataaagtgctttgaatggaatccatattttctttccatagggaagtttcttcatcaatcatcatggatgaattaattctgtttg

SEQ ID NO: 216057 - DNA, 581 bp, Homo Sapiens
tcagagcaaatgttttattaacagatttttctccagtagtcttgaaaatctcccctgggggagaaaactggcaaaagggggcctgagggttgttggaagaaatgaaaagtacataggatgctattttgaagaactgatttgtcagaagccactttattttaacaataatgtgactgcacctggcacatgagacaggctctgggcctgtttctcaatgttgtgaaaagcaggacagtcagttcccatggagtagattacagcgtgttggacaaggacattcccccgcgtgaaggcacactccatggagccagtggggccaccattcacggtgtgcaagctgtggccttggagagaacatgggcagggcttccccagcctctactataccccagctttactccattgatcacaacaatggcacttttttcttttggtgcaaatatttccattttccaattgagcctagactttgattttataaaaggaaaagagaatatctatatatgtaaatatctgcatgtgagtgtatgtgtatatatatatatatatgtatatacgcatttatagataaaattattatg

SEQ ID NO: 216058 - DNA, 498 bp, Homo Sapiens; identical to SEQ ID NO: 61999

SEQ ID NO: 216059 - DNA, 422 bp, Homo Sapiens
tatttttattttttattatactttaagttctagggtacttgtgcacaacgaaaaagcactccttttttaaccaggttttatttagaagaaaacaaaaaagaaactcaaagtcaagcagttcctagttaaccacggttaaatatgtggcatttatttgtccctcattaaaaagaaaaagcatcctaagaattccaaactcaccaatttaacactctctgggactggaaaaatacattcccaagatagttttcctaaaaatttcccgtagagggcactagagaggtatgattgaggctagcttgggaatcacagtcatttctgggtaaagttcttttgtgtgaagaatggtccagtctggtacagttgggcaaagttcactctggggaaattttgtgtgggtgtgggggggggggggggggggg

SEQ ID NO: 216060 - DNA, 796 bp, Homo Sapiens
gcaaccaaaaataacaagccttttatttggttcatttgaatataaaacaggcgttatcacagatgtacaaagcgtactggtggtttaacatacaagaaggttgctgtcctttgcacataaaaattttgtttgaaactgtggctggttgagtacatgagtttctctaaccagtcaccacactctgaaataacgctgctaacattcaactgataaaagggaccatctcccttgggtaaagtgtcaagcaggattaaatatatataataaacaagcaccatgaggaatctgctcctgtttgattaggtctgtgtttatatgttcactgtgtaccctctttttgtgcaagttgattacacggttttgtctgacttcaaaagcacaaggtcacaagacaaacattttttacaatctcatgaatgatttatctacagtacaattttgaatacagaatgacccttctttattgctgaaactggtggtactaagtgtctcctttcctttctcttgcacaaccaaatttcaatctcagtccaccaactcttttgagcctaaactctaactaatcagagttgacaggatgcagaagaggcggctgctaactgccctcacaactgcactgcagcgtccacactccttgaatgtagagttgatctggtgacagttgaaattatgcttgaagtgacatctacatttgttctgcttcctgacttcagctggacctcaaagctgtcctgcacactgcagctaatgtttatagtcagatcccgggattccggaccgttaccagcctgctttt

SEQ ID NO: 216061 - DNA, 889 bp, Homo Sapiens
ctttttaagtaacctttaaaattacttcctttaatataaaagaaacacacaagacacaaagaaagcccaataaagctgtgagtcccagtttggtagctgaggaggagtctaagaaaacaagccattcctcagtatccctgggaaagaaggggtgagaggacacagatatcaccaggccctgggtgactgcattgctggggccatgcagggcctagctctccaccaagggaaagtgctgattttccttgtcatggtcctggccttgctcccatgctcgtcctccagttttcagaagtcgtccagttccaagaatggctccttcctttagttcactaacattttcacttaggggtgaaggccgcttaccctgtcgtagtgtcagggtgccaggggagttgtcatcctgcaggatggtgaggggggatctccctagtaccttgctgctgtttggtttccatctattgcgcatagaacctggggtgggtaaggcgttaaagcaaggacccaaaactaggacttacagtttattcctgccacactcacccatggaccttatcccaaaacattatgctagtttatcttccctgcatcttgccttagattctgtacctgaagatctgggagtcctcaggacccttgagggcttgtcggagctctggctggccacaggggtttctgtgggctggcttgctttctccttggaaaacacctgttggaggggaactcaagctggttccaaggtggcttctgcggcccaacagataaccggggacccagaggcaagtgcaattcagaagataagggcgcctatgggggccacgaccgccttttgggcgaaaatgcccataggagacttagagctctgagataccccgcttccggtggtttc

SEQ ID NO: 216062 - DNA, 462 bp, Homo Sapiens; identical to SEQ ID NO: 58099

SEQ ID NO: 216063 - DNA, 715 bp, Homo Sapiens
  misc_feature (121)..(121): n is a, c, g, or t
  misc_feature (679)..(679): n is a, c, g, or t
ttttttttttttttttttaattatactttaagttttagggtaccatgtgcacaacgtgcaggtttgttacatatgtatacatgtgccatgttggtgtgctgcaccattaactcgtcatttnacattagggggaggggggagggatagcattaggagatatacctagtgataaacctctaatttaaaaaataatctgcaaggcttcaacacacacttcacaaaaaatacatatcaacagtcaagggaaggcatttttaagttaaattaaaagtgcaatgaaatatcattccatacaaactaacagagcatatttaaaaagactcaaagtacaaagtactggtgatgatacagaataatcagaattaacattttgagttttggttatttgctaaattttccattacacattctacagtgtcgagtaaggtgagagctgcagctaaaggactaaaggacttcccgcattgactgcactgaaagggtttttcaccagtatgaattctattatgttgacaaagtgtggaggaagtattaaaggccttcccacaggcatggcatgtatagggtttctctccactgtgtgttctcttatgagtaacaagggaagagtgcgcactgaaggcttttccacattccttgcatttatacggtttttctccactgtgtgttctcttatgangtacaagagaagaatgggcgctgaacctcgtgccga

SEQ ID NO: 216064 - DNA, 574 bp, Homo Sapiens
ttttttttttttttttttcaattgccaacagactagtttatttgtttctcttgtaatacgaacatgctattctcttagtttttatcttcaataacatatgaaagatccaaaatcaaattggctgtctctacagccacctgtaggccactaagctttgcagtcaaacagtccaaggtcaggttgctggctgagcccacagcttcatgtggaaggcagctttgtggcacaaatggacgacgtgtgcttcttaagaaagaccagttgagttcttcctggctattgtataatccacagccacactgtgaaagcaaatctggccagttagcaacacagggagaatctgcctgaactgaccaaaggtgtccatacttcatgtcagtgagaatttcacctccatcatgttctaaagagccaacaacagattctagggcactgcaaaatgcttcagcaattaattgaagttctgtttgagtacattcatcatctttgagaatgctttctgggtcgttgtgagtcttgtgtctgatatatgcagccaaatgagtttcagtacagccacctcccacctcgtgcc

SEQ ID NO: 216065 - DNA, 732 bp, Homo Sapiens
  misc_feature (629)..(629): n is a, c, g, or t
  misc_feature (640)..(640): n is a, c, g, or t
  misc_feature (723)..(723): n is a, c, g, or t
ttttttttttttttttttggacaaaacaatttttttttaatctgtcttgtaaaatccttacttccttttgagtctctgatggctacaacatttcatttgagatgtttggcagtcacagcttcaggggttatggttactgattatctaaaccccttaggtcagaatgaacaaacacagttcatgtaaacctggctgttattggagtcctctgaccaagagataatagtgaagagtgtggagagcctgaatgcccatggtggaaatgctggaaaaattaaaggtaagaaataaaacatagcacaggagattcagagggctgggatgacttctgagctgctctctatacccaaggccctttcaatttctagctgtgaaagatttttcatgcactgtggtgcctgatgtttcctgcaatttgacaaaaataaatactttacacaagaaaaggatgcaaggcttctacgttacactttggggatgctcaggagccaaggctcctgcttggctttcatttcacagggcctgcagccttgtctctggaaggtgctgattaggactgggaatggcctcctctggtcgagactctctgacccctaagtaaatgaacttgttcccatcccagtctccanacagatcccancactacgtttgtttttctatatcctgattgtcacacctggaagactctccttagtatacatgaggcttactgccatgagacanatgactaga

SEQ ID NO: 216066 - DNA, 602 bp, Homo Sapiens
  misc_feature (568)..(568): n is a, c, g, or t
ttttttttttttttttttaaagtattaacaaatttttcaaagctttattctttattaaacaacaacaacaacaatcttagtaattctaaggttcaaaactcagtaagggtcaagtgaaagacactgtctaggggcaagaaagctgaattctgttcctggcactgccaccattggactatctgatctttggcaagtcacttaatctgcacttaatttcctcactcacaaaggaaggacgttcaaccaggccatctttaaagctccttttagaagtggaatgtgatgattccaaaagagcagattgagggcgtagagcaggcagcgcagacacttcacggaatcttctctggccattgtgagccccgtaagggagaagccccatcctttcaccacatcctactcccaagggcaaaacggcagcgatcgtcggcgctgggcccggtgccccacgcccgcctggggatagtcggggacgcacggcgggggctcatcggggcagggaacttcttcgcggagagccggagggctgcattggcttcagctggagacgcttctttctcttcctctncccccgccgccgccgtcggcgcctcctgggaaaa

SEQ ID NO: 216067 - DNA, 582 bp, Homo Sapiens
  misc_feature (566)..(566): n is a, c, g, or t
ttttttttttttttttttggaaataaagattttattacttacaggtcctgggggcacaccgcacacccaaaggtgacctccccacccgtcccaagcacacacacagacacacacacacacacacacgcacactggtcagggagctcgtggctgtgaggggccaatgggcggtatccaaacattttgaggagattttaactggtaggttcaaagcaagcaggctcgacttcaggaggtcatgctgtgcctgagagggggtcactgtggcatccgcacagttcagtggaatgtgggggccagcggggccgtcaagtaggctgtctgtggctgactcaaagggagggaggtggtcccccggaggcggctgcataacggagatatctgggtcaaccacacggaggaactgggaggaggtggaaaactgcaaactgctgacggtgaccgagccttgtttctggcatgacaaagtccagcttacattaaaatgaatcccaaggcaacttctgtttttgcttcatgatgtcctcagtgttgggaaggcaatttgtccatggcagaaaccgtanagcacttcagcatgca

SEQ ID NO: 216068 - DNA, 712 bp, Homo Sapiens
ttttttttttttttttttccattgctcaccagaaacttgctttaatgtctaaatgttctaaagatgagaggggggagggaaatgcataaaaagcagtgcctcatggaaaacacacacatgtgcatgcacacacacccaaagtcctttgtgctttaaacattcctggtaacttcactgaccatcctggccggaatcttctgaaatggttaagccaagaatttcagtcgcgaatatttctgcagtgatttcgtctggaagttcttcttcaaggcaaatttctgaacctttgacggagcaggttgcaggctcggatttccatccctcgggattcaggccaaacagtgaagcaaagcaatccaacatctcctcctccgtcatatgctcacctttagtaacgagcagtctcaggaagtcctctcttcgaatggcctttttccctttggagttggtataaccgagcacctcaaagctcttgtggatgccactcatggtgttaccaaaaggtggcttgtggttaaggtaacttttaggaaatctggtaagttgatcttgtcgattagctttccagtgtccacatattcaccaaatttgatttcgttaaatatatcatcaatcttctcttcagatgggtaaaagccaattgctctcatgacaaaaggaagctctgacaggcaaatgtgttctgacacctttctggtctccattgtgtcca

SEQ ID NO: 216069 - DNA, 699 bp, Homo Sapiens
ttttttttttttttttttaagctgcttggtttaattttttagcacttgaaaaaaaatgtacagtagtttgaacactcagtctttgcaaacctccattgaggtcaaagatatcattcatacgtacaaaattagtttataaatttttttggcaatttcatcttagtaacccgttttgtcctattgccattgtcccaaccattgaaaaagtttacaataatttacatagaaatattttcaaagtgcttaagaatagtgattgttctctgggatatttacagatggcctatacaatgtatgtacaggtggtatacactatagcacaagtttcactgctggaatatggctttctagggaaagtgcatatttggccagaggtggcaatactgtctagaaattcaagggttacagatactcggtaaccacatccaaagctgaagtagaatgtggacaagaatatttacaaaagtaatataaaaacggtcaagtacacaagcttgatccacgcaaaggtatcttgatgttcttccagccgagaggaagaaaaagagacttcagctgctggctcggttaccattccgacgggggtattatttgtttagacctcaaaggtcaacatttgtcacagaagtcaagctagatcatcatctgtgcttacaactgatattgctgggtacgtgtgtccaacagaagcactgtgtc

SEQ ID NO: 216070 - DNA, 555 bp, Homo Sapiens
ttttttttttttttttctgtctaggattttattagactgctttttttctcaatatacctgtattggaagattgagacaaaaaggcacaaactcacattaaataaacaaggtaatctaatcaattctacaaagtgtagtttgtaaaacaagtagcactaggaaccaaccaaagtaagtcagggagtcccagcagggactgtaaaagaacttgggaagctatacacatgcccacgatactgaccctgtcccggacctctctgcatgagaaggccagagcccagcacccctcctacagaggcactgctgcttctgttggggctgtgaccctggaattctgatggaagcagctggtctgaaggggcatggcacacactcaggtactacccctggagctgaacctttatcataagtccctctgagtgctagtcagtttggaggtgggtgaggaggaaagggggtacttaaaagaagcaacactgttgcccagcagcaacaccatccgtggggatggaacagaccagggacatcctcctttatgtttatgtgggctgcatt

SEQ ID NO: 216071 - DNA, 548 bp, Homo Sapiens
ttttttttttttttttttgtactacaatatttataattcctttattgttaatatcacaaatctgaaaaccacccaaataccctgttgatacaatagcacaccacccataatgaaatacaagaaatcacacaggacagttcatattgttcagttctatttatacaaagttcacgaagaggcaaaactaatctatagtgacatcagaatagtgtttactggaggaggcagtattttctgcaaaggggcatgatggagcatcgtggagtgctgggctcttccgtatcttgatctgagtcatggctacatgcatgcatgcatttctgaagcttcactgagctgtatatctaagacctgtgcacctgtgctgtatatctaagacatacagcacctgtgctgtatatctaagacatacagcacctgtgctgtatgtatatcacacctcaatggaaacttgtaaaagaatttaattacttttttttttaaagcttctaagtgaactttacctaaaggtatatcagtaacagcggcaataccttcatttcctcttc

SEQ ID NO: 216072 - DNA, 774 bp, Homo Sapiens
  misc_feature (700)..(700): n is a, c, g, or t
ttttttttttttttttttagcagtgggctaccattattaagcacttagtgtttgcccagcatggtacaacaatctggtaggtgggtagtttatctccaatgacacatggggacaagaggataagttatcttgcccaaagtcacacagccagtgagtgttggaagctggattcaaacccagacgtcagattccagagtccattctcttcaaggctggacttgaccccaccctgacccagggcccagatttgagggctctctctgagcccacctgactttcctccagggtcaaggctggctgggtcccctggagccctctcctccacccccacacccagaggacaggctgcatcaggggtcttcccacccccaccccataccaaggctgctggagaggagcctggcccaaggtggcgctgcccctcttggacctccaagaatgccgcatggagcagcccctcagggctgtagtccctctacacctacattgggcccctccagcctggacccccacccctcccacttcctggcttcccatccttcaggtctcgcagaagcctcctcaacaccctccctgcttggtctctatccttcagaaccctcatcacaacctgtccttgcctctagaacggaagccccatagcagcagggaccacgtatctgttttagcttcagtttctagcccagtgcagcattgtganaatccttacgtatatttttaaaaagttttcgaattctacttttctttgctgacttggcatgtgctttctcctct

SEQ ID NO: 216073 - DNA, 774 bp, Homo Sapiens
  misc_feature (683)..(683): n is a, c, g, or t
  misc_feature (732)..(732): n is a, c, g, or t
  misc_feature (755)..(755): n is a, c, g, or t
  misc_feature (757)..(757): n is a, c, g, or t
ttttttttttttttttttgaaaaacagatgcttttatttattgtattggaaacaacttaataatttgcatctctacatatagaaagctgctttgaataactgggaaaacaactattgcataggaaaacatatgcaaactagcatcattgtctctagactaggttcttcttattgatctcacgtcatcacaaagcagcaacagcagcttctagaaaatggagaaacagtaaagtcctgcaatgaagctataattaaggttgaaccatacattccgctaatcctgcaactttcctacaatcatttttctgcctatacaatcctgcttcttataggatgaacacctagcaaaacaatataaatttgctgaaaaacaaaattacaaacaaatgaaagaacttaacagaacacacagcattaaaaggactaggaagagcaaggtcttaatacccagtacaataaagccaagaattttctaatgctgaccagtctgaagactgaaattaaatatcagttctttttacttctctaggagtgattctagctcctcttgcaaagagctgagttgctccttttctcggtcttccttttgtttgagctcatccagtacagcctgaaatctgttcttgagagccagattttccactttcatgatgagatcctcttgtcgttttgccctgtcctgngtctcttggagcttgctttcatgttgtcatctgcttctgattcccatancagctgattggtcttcatttccntntgctgtcatctgatcat

SEQ ID NO: 216074 - DNA, 636 bp, Homo Sapiens
ttttttttttttttttttaatatacaatttttatttgtcaattagaaagtaacaataaagagtgagcttataagttatggagttaaaattttatgcagaagcaagggaaaatcttcctccagtgaaaaaattctaatgagattttgaagacagaaacaaatcacattttttttgtttttgttttctaaatgttttacaagagaaaatttcaaaagcataatcagtaagagggagaaaagtgtgctgaattccatgtatccagcttgcagccattgttaactcaggactaatcttgtttcggttctacttccctttcaccacccccacaccccaaacacaaaattactgattctagatcatgtcatttatttacaaatactttagtatgtatctctaaaaggcatgaactctttaaaaaacataaccatggaatcttcaataatatagtaccttaatatcctcaaatatctagtctgtgttcaaatttttctgattgcctaataattgattttagattttgctcaaattaggatctaaagtctatatgttgccctttagttgttaagtcccttataatgtatagattccccaacatttttttggtcctttgcaatttctttcttttttggttgaaga

SEQ ID NO: 216075 - DNA, 724 bp, Homo Sapiens
ttttttttttttttttatcttttaaaatgtagtctgtattattttcaccaaccaaaacacacataatatattttattataaaacattagcaatgttacttttgagatatgcaatctgaaaggtcacacttgtatttattaccaggaggaaataccagaggagtcacattagaaatcaaccagacagactcgtacgtggttatcgcaacttacacagcattaaatgcgggttgaagcagcacccgctccgtgtttcagacacggacttggggtgggcaaggggccctgtaagagggcttcctcctctcagtactggggctctgcgtctcacctgctcccatctccaggcccacggctgacacggtatgcacagccagggtttccagactgctctcctgctctcacagaactctgtctgctctctggactctgcccttgaaactgagacctggacatgggggagacagtcgtttccttcttggctggaaactaagtcaacaaatgaaacaaacctagtctaaattccaggataatagtaaattacctggtttataaaaatacatgtccaaaatagttacttcctgggttgtgtacaatataaattacaaaaataaaatagaaaagatgaaacagttgagcacatttttcagttctttaaccaacatcagcatttatccatagagatcagtttgaaacatttgcgtggcacaagaccctggcaatct

SEQ ID NO: 216076 - DNA, 709 bp, Homo Sapiens
  misc_feature (688)..(688): n is a, c, g, or t
tttttttttttttttgttctccaaatatttattgaggtcttactatatacaagactatataacaagttatgcttgttatatatgttatatatgttatgttatatatatatatgttatatatgtaatataactatattacaagttatgcttgaaataatgctgttaccaagataaagaagctccttcacccaaggaaccctggtgttaaaggcaaagattaaccaaataatcccacaagtaaactatcatggactatgtaaatgctgtgaaagaaatgtatgggaagtcgagagaggatcccacctgggggctggacagggtctcaacacagtaggtgagggttctccatgcaagagacatgtgagttgaattctgaaggatgaacaaaagtcacctatacaagggtagggttggaggaaggaaggtgaggagctgttcaagcagaggtagtagcaggagcaaagacccccaggcaggagagggtgcagtgcatctgaggacctgaaagaagagtggctgacagcagacagccaacaaatgagggggttgagatgagatgggagaaggcatggggtaaagacttttgcctaaagagaaagtgagccattggagggttctaagcaggggactgacatggcaagatttgcacttcatgatcactcgggctgctctaaagaaaatgaactanagcagagaggaagtgggagct

SEQ ID NO: 216077 - DNA, 670 bp, Homo Sapiens
ttttttttttttttttgtaggtacaataaatctgattgatttttattacacatcttagtttagaatcacttttacattcctagacaaagagatgatacaaataaatatcaattgtaaaacttagagccccaagtattgattggcgtattctttgtctaaaggtagccaaagagaaggtcaagatcagtaataacttcaaggagccatgaagcccactgcctcctgcctgccccaggatcactcctttcataaataaccccagaagcatttcattcaggaaacaagggcaggcagaaaggtgacagatttctgaacagtacaaaacaaagccttgcgtgatagacaatcaccaggcccactattcttagccagttccctcagagcatttttagtatggcttttagagtatattaacagccccattttcatccactgatggggttcagatggtctgaggtgttgtctccagtacgcctcaacctcaagtgggaaatgtgaggcagaactgatatccatgttaacagggaatcgacacttctcagaaacttggcaacgattctacattcagtgagggaggacttgtcagagtcagacaggaaaagcagagagcggcccacgccccagttgcagcactctggcgcccttggtcatggaggtgtgggtggagcat

SEQ ID NO: 216078 - DNA, 659 bp, Homo Sapiens
ttttttttttttttttttaaaaataaagagacatatttatttgtaataactctctttttttggtaataactatctttaacaatgctattatttatttttacccatggggaatgcataagtacaaacattgttagcttatttaacatttattaaaaatacagactctttatactaatgcagaaggataagcctcttcttcccactctaaaaatctcttctttgctgtaaagaattctcagtgcatgtgagctaagactctggagcactcagtagagaggtgtgtgggatgaccagacagaatcactaggttttctctgttttcaactagctgaaaataggaactctagttctaaatattcaaagtctaaatattagaaaaataaggagaggggatatgacaaaatgcttttcaaaatacatgcctgaggtgagactgcttgtatgtttgcatgtggtagcttccagaggaaatcttcagttttaatcttcaggttcatattgtgccagtcttttcctcagatctttgatttggtcattcttcttggtaagaatctctttcatgtttcgataagctgctgtttgctgaaatttcttttctaattccttttcagccatgtgcagctgctcctgaaccctgagtagatcgtgcttggctgtcg

SEQ ID NO: 216079 - DNA, 628 bp, Homo Sapiens
ttttttttttttttttttcggctttgacattttattgagaaacatttttattttaaatgatagtacaaaaactgtatatataatatagatctgtataagtatatatacatacaaatgctcatacacacatatacacacaaacttgctcatcagaataaaaccctaaataaagaagtatatttaagtttttctaaaaatacgctgtacataaagctgtcagacaacctgaaaaactgaggacattgtgagaacagtctgggcgcatccccccacacacacacctgccgcagtacacacacaaatggccttgacagaaggagagcacatggggcaaggtcagggagagagctgctaccatcattgttgctagaacaagatgtctaaagccaactagaaagcacaggatatagaaggtgacctagattaactttcagaaacaaaccacctcagaataaacaaaaaatatgtggtagggaaggaggggaacggagagagaaaagacaaggcccagagattagaaatgacctactaactaaattcgaatgcctgggaaagcctcaatgagataggaacaatggaatcacaaaggcagaaaaggtaggaggagggggagatagggaatcaattt

SEQ ID NO: 216080 - DNA, 665 bp, Homo Sapiens
ttttttttttttttttgtaagaaaatgcttcatagtttattcacatacacaaaaataatctcatatgattcttaaaaagaacaggacaatgaaattctgaacataacttaaaagtgaagatattgtctgatcagactaaataatgataagctccctacttctctcatctctaaaatgtttacaccaaaagataaatggaaaatatcaccaggagaagaaagccagtgctgagcactgaggtcagtgggagagcaagggcatgaggagcctcaagcatcaaaagctcactgggcctgggccttgtctttttattctgtttctcgactcctacaatctgtgatccatgatattaaatatcagaagtcatggtgttccttatggttgatgttctttgttgtactttcctttctttttctcatcctgctatgggctgaatgtttctgtcccctcaaaattcatatgttgaaaccctaacctctaaggttatagcattaggagatggccctttgggaagtgattaggtcactggggtggaatcctcaatgaatgggattggtgggcttttaaaagaggctccagagagattacttgttccttccaccatgtgaggacacagcaagaagctggaagtctgtaatctggaagaggatcctcatcagaatcca

SEQ ID NO: 216081 - DNA, 748 bp, Homo Sapiens
  misc_feature (554)..(554): n is a, c, g, or t
  misc_feature (656)..(656): n is a, c, g, or t
  misc_feature (672)..(672): n is a, c, g, or t
  misc_feature (712)..(712): n is a, c, g, or t
  misc_feature (739)..(739): n is a, c, g, or t
ttttttttttttttttctaagcagttcctttattcattgtttctttgtcttgccaatagcagagtcaatcaatactgaaacatacagtttgaaccaagcatatgtgatgcctactgcacaatacactgaggttagtaacaaagggatgaaggggtacttcaccttccaggaggtgaaagggaatacaaattcacagcagacttccagaggccccaggccaagcaggtagaaagtttccatccaattaaaaagaggtttttcttttctgaataaagtcttcagtgacgaaatactatatatggtgaatagtaacatgagtaagattttaatgggaagttctggtgcagtgaagagcagaggaaagagggaataatgtcctgttgtggtcagaatcagaaaaatcgaagcgtctcctgcttttcccacagacaaaaggctcattgggagaattgctagaagtatggctttttcatgaacatgccacccaaacataaaggagctcaaggcacaaagagttagacatcggagaaagcctctgggcccttggggtttanaccaaagacagaaaatagagggcaatatggcaatcagtgtgcagatgagggttgccaagggagtcactgagggaaggactgtgtgttggaactgctgaaccnaccacttgtcattgangccttgggaatattgttgggatcaagaatttcaatttcanaccgatgacagacagcactttgtccanagcattgta

SEQ ID NO: 216082 - DNA, 741 bp, Homo Sapiens
  misc_feature (687)..(687): n is a, c, g, or t
  misc_feature (728)..(728): n is a, c, g, or t
ttttttttttttttttttcccaattaggacttaaggaatgtgctgggacaaagttggcttcagtgatcaggttgtttcaagtcttagaattcaaacttcaattctaaaaaaattttatcaacaaaacactgtgaccaaaaaatcactttaaatcttaaatattgaaacgcaatagcatataaagatggtataacctaagatgcttttatttcattatattttcaatatctttacgcattataacaacagaaatgtaacctactcacattgccatttgttccattatgcaatttgaagaaacatgttttccttttatttttatgaacagatatttagacatttcacattttgtaaaaccacgtctacaatctccaattccattcttctgagaggcaaaattttacaattaatatagaaggcagagttttttaaacaccttaagtttacttattaattagtatagtagcatatttcagattcttagaatatggagctagagggtgctctttcatactagaaaaccaactatgttggtttttgtactattgtacagtgtgttcaaatatagatactgaagacctctgcaaaattttaatcaaaatctcctttcagtttgttaaataatttcttgggaggaccactgaaagagataagtgtcctcatggtgaaatcgtgaatctcttccanattaattcttataaaggcagttctgattatgttgatccaangtatgcagtggtg

SEQ ID NO: 216083 - DNA, 454 bp, Homo Sapiens
ttttttttttttttttttacacaaataagtggttttatttatgttgatttgtacaccaaatctgtaagatgtatggacttaaaaccaagattatcgttgatttaaacacatgaaaagcaaaaaccgtagtccaggcaacaggaatttatagtagcagcataattagaccaccaatctgagctcattctgtacatactataacctttctgcagtaaaaatctaatggtttttgtcgtttcattttgtttttccttactactattcatattattgtataatatatcctatcagatgggaagttattgctaattacatgaacatacattcttcctctggagtcaaaagaactgccaaagatgttattggcaaagcaaagagtctccaaaaacttggtgagttttgagaagtccatttgttactttaaacacctatttttaaaataacttatgcaatt

SEQ ID NO: 216084 - DNA, 823 bp, Homo Sapiens
  misc_feature (641)..(641): n is a, c, g, or t
  misc_feature (726)..(726): n is a, c, g, or t
  misc_feature (741)..(741): n is a, c, g, or t
  misc_feature (810)..(810): n is a, c, g, or t
ttttttttttttttttttagggcagaacagttttaagctgaacttttatttcctctcttttgaaatattctgattcaggttttgactgtggagaaaagagtaacaagaatgtcagcagaggcatttcgtatcctaattttaacatgatacttaaaattctacctacatttgttaaatgctattatttcgtatgtaaatcataatgcacatttattgagagctacattttaagtacaagtttgtatttatttaatcttatgtaccctatgaggaaggtattggtatcatcctctgttttacaggtggggagactatagcatagcagcatttagataacttgcctaaagtcccacagctcacaaatggggaggaaagatttgaacttggtgccagagcatatgtttaaccctggcaataagtgtctaagcatgctggtctccccagtaagcagcaagctgcccaagatatcagacttcttttctttataaaactacttaaatgatgctgcttgcaatggcactcaaagttgctgaccaacccccaaaagaagaataatgctgacataaaaggctatgaattaaagaggtaccttgtgaagaacagagattttacagtatcatcttacttattatttgtaacanaaatggaaaacttacagtaatgacctgcattgagaatttgatatgaatcatcaacatagttatgttgatatgtatatactatgtntgatgatcatgtcanactcatattatataactcatgatatcaacatatatattgattcgtatcataacatgagttagatatganatgagacatagat

SEQ ID NO: 216085 - DNA, 671 bp, Homo Sapiens
  misc_feature (603)..(603): n is a, c, g, or t
ttttttttttttttttttaataatgaaatcttatcttttgcaacaacatggatggacctggaggccattaagtgaagtaatgatacagaaagtcaaaaaccacatgttctcgtaagtgggagataaacaatgtgtacacctggacgtggagagcagaatcatagacactagagccttcaaaggtgggagtggggtgagagatgggaaagtatttactaggtacaatgtatactatttgggtgagggtatactaagcccagatttcaccactatgcaatatatccctgtaataaaagtgacataaatccataaaaattacaaaaagttgctcaaaaaagattggtagtcagaagctgaattctagatgtgctttttcaactatctcattttgtaaatgtagtgtatgaatctcaaaatttaacaatagacaatttttaaaataccaaactgccaaaattaaaagaaaccgtctttttaaatatccaagttttttggccaacttggctctactacttgattttcaaagggattagtggttactcatccacagtttaattgttttgtcattttctaatgctgctgatgcgatgaggttttctgtangatgacaagctgctgagatcacaacatctgtatggccttgtaatttctgcacaatctctttagtctga

SEQ ID NO: 216086 - DNA, 662 bp, Homo Sapiens
  misc_feature (489)..(489): n is a, c, g, or t
  misc_feature (624)..(624): n is a, c, g, or t
ttttttttttttttttttgagtgtcacaggggaactttattgagaggaaacatggtcacacccagcagacatgctttccctcaatctcggtcttgcactggcgcgcgcgcacacacacacacacacacacacacacacacccatctccagcccctgccactgtccagttctaagccacaaggcgggacactcctcaattcctacgatcagaggcagcaggggcaggagggaggcaagaggaggggagaagtagcctggtcctggggtcgggaggaagcgggtgcggagagcaggggtgggggcatgaccagtggttaggtgcgctcaacagctgcaagaagagtgggatccccagccccaggtggcctcagctctgccagtccctctccacggagccctttggagcaagaacagcgcctaggggagaagggtgggggcctcccaccccatactagtcctctcggcagggtgggggactggagggggcanggcggggcggtggcgggcaacagtcagctctggggctcctggggagcctcgcccccctcttccccggcgttgtcggccgtccacagtgtcaggttgtctcgcagcagctgcatgatgagggtgctgtctttgtangagtccttgctgagggtgtgcagatcagccatggcctc

SEQ ID NO: 216087 - DNA, 830 bp, Homo Sapiens
  misc_feature (749)..(749): n is a, c, g, or t
ttttttttttttttttataatgtatatattttaagtaggacaggtttttttttttttaaacttttggatgttttataaatttgtccaatttagtcatccaactgacaaagcaaagcaaccccgcgcttgatccagtgccgagtaggttggtctgtttttaacaacattgcaatgacaaagttagtagaatgtcccgtagtggaaagagttcctttacgttcacttgtcttgtagaggggacagacataggcatccgactttataatccgagatttttgagttggttttatccatatgatgggcatcaggtcaaacagaagtttgggatattgttcagcaagcaatccactttctcggtcccagcgtgcgccatcgagatacagtccgtggatataaacaccatcttctggtgatgtgtcagatgtatcagatgggataacctcaaattcatatcctagcaaatcaataggggtggtatattttctggcataattctgcatagctccagttaaaaaggcctgagtgaaaaagaaacctgacagccaaaacacacaaggttttcctgaattataccagtcctgtaaaaagttcaaccgggctaggaaatctgtgatgtaacttcccaggggcttaaggcttgggtatgaacgtttggcccatatttctggaacctttccaacaagtaagctactggagagtgcctccaatgcagaatccatcacaaccacacccttaatagctttttcaanggtccgtagagtgttacgtatagttataattaaattggttaatctttccatttcttgtactacacagtatcatgcttcttc

SEQ ID NO: 216088 - DNA, 787 bp, Homo Sapiens
  misc_feature (772)..(772): n is a, c, g, or t
ttttttttttttttttttagggtatcaagattttacattactaattctgaattcgttatcctttgctttcagccatattaaaactgaaagccttccatacctgatgtttttctatctcattatacagctttcctgtcagatcttcttttagggtgactttgaagaatcagaacatcagggctccaactctcagtagagccagtaaccagcttcctgatttaaaaaaaaatcacctttggcctaattttgtcacttataaacagtggtattgcagtaccctggtatgattagttatgatatgtttaacaataattttaaaataccaaagcttgtgaattattttactttcaaaaaatatgtaagttagaattgtaattctaaaggcactgtcgtttgcttacacattctaacatatttctaataagaaagtacctgctttcttaagagaaaaagggataagttaccaaaagcagcacgttctcctgggctcataccccggattcatccatgaggccacttccattgtaaagcttttagcatctcttgatttctcttcacactgaggcacaaaggcctgctacttataggcattacttcatttttccttatgaagggtactataccaacacagactttatagtatgtttaaaaatcccaactgcaagatacacaggatgctgtaggcctgatttcctgttgtagaacctccagccctgtgttgaatgaggaggtgcaatatatagaccttaagatcagacacagcaggcatcangtggaggggatgact

SEQ ID NO: 216089 - DNA, 696 bp, Homo Sapiens
  misc_feature (654)..(654): n is a, c, g, or t
ttttttttttttttttttgagattcatattttatttacaagtaaatgaagactgtccctgtaaactctaatttgggatatgaagaacaatataaagaagtagttgctggtgccacagtgatgtgtgaaggagtctatgccactgtttctttaaacagtgattttgttattaaaaaaaaaacccacctacacgatttcttcatgttgcatatgtaaaataattaaaaataaaagtgacttttcaaaactctacagtctgtgatcaaatgcgtgaggtggccaggatgtcactttcactcagtgacagcccctactcttcaagagccaacagcctctgggcaaaagattagtactcatcaagagtatctgctcgaggaatggaaagacctcggtccttcagggcctgcactttcaacttctctgcttccagcttggtctgctgttccaccctttgttcttctagaatttcttcaatggatacttgctggaggggtgtgtcactctccttttccaagtctatttctcctagtaggaccacattttctcctctgaccacaaaaatccctcgaggaatatcaccgtattttttgcccacatgaatacgctccacagtctgatgtagcactaagtttgcaaattgatcaatgcttcttanaaagcctataagtgtccttccatctcgaagcagaccaagtgc

SEQ ID NO: 216090 - DNA, 735 bp, Homo Sapiens
tttttttttttttttttcaaaaattactaaggtgatatcatgaataaacacaatagaataaattgatgaaattcacgagtagtcctgtgactagtgcttatgtaacagatccataaacgcatctataaataacaacaataatattatcagatgatgctcttaaaaacattatacaaccttttagataaatgaaacttttagcagggtaaagactactgagataggccacatgatttgcaattaattctaaaagtgatcaccaataaattcttctggctctgtgtagatggaaagccattcaatcttaagaaaattaggcagaggtatctgttttaaatatggtagaaaacttacaatacaaacgaaaattggttctgaactcacagcagagagatctcccactgaaacgtttatctggagaaaatgcctctcttgggacaaatccttttcctaaagttatcatagggaaagtatgttaaatgatattaccaagtttattaagactcactaatttacattaatatctggtaatgacaggatgttgtgctcgtaagtgctgctctatagaacagttaatataccataccaggtgagggagaacttctggtacttcttaccctggcatcatattcaaggacaaaaggaggaaagtcaatctgttctggtgatatggcagaaaacagctggtggaggctgtccacatggtggattttgtccttcagtcctgagacagaa

SEQ ID NO: 216091 - DNA, 701 bp, Homo Sapiens
  misc_feature (662)..(662): n is a, c, g, or t
tttttttttttttttgttcttctataccatttaattaaatatgagatggttattacatacattgtacgcttatatactaagcagctctgcgaaatgtttgtaatgcatgtggatagtacacggttaaatcagagatcttcactgtagtgaacaatggatattttaaagaatagtcccaacaataaaccacagagctgacaaaaatgccacctaatctgcatcatttccaggagctctgccacatattcttcctggcccgtaccaagtctcttagcccctctagaagagctaagaaaatgcaggtgtgcacctctgaacagcccatacttggcttttctgaagcaaattcccatggaaaccacattgaaggaagaggcaaaggctggtaggaaatcagctgaatcagcctgggtgccctagacccagtcatgtttgttggaccaaattagctgtcttttcatttcatgctatatagaactggcagtttacacttctgattaatacattgtctccgatcaggaggtttatttttttttcctaataaaatctgaaaggagattgggcagaaccaattagtaatcttacattacacattgtccctaggtatataatcaagaattaacagcagttatgattatatgattataatacatgcattttanatactacagtaacagacagaggctcagacactaaattcc

SEQ ID NO: 216092 - DNA, 718 bp, Homo Sapiens
  misc_feature (597)..(597): n is a, c, g, or t
ttttttttttttttttttgggaaatagaactctttatttaaatatcagtacagaacaataaattactaaaggaaacaatcattaatataaattttttcttattaaataatttaaaaattctctttcaggacacggaaagaatccccagaggtctgaagtctaacgtgattattttactgacaatatcatttgcaagaaagagatcatcattcaaagaagtacttgattttccaaacaaaaagagaagaaagaaaatgatatatcttgtttagtcagccagaactttaagtgcaggaattccatcaggtagcaccaagagaaaattgcataatatgttaggtataactgctggtaaaattgttggcaaaaggaatcaaggcagtgaatgagctattgggtccatgatgtcatcatgatctgctggaggccactggacatacaccgtaggtcgtgggcagctggccagacagaagggcgagtttgatcaagaccgtgctcacaggagccttttggtatcagctttaacctgtcactctaaaggactctcctcagatgccagggaggatgaagcaggggaggatgatgaggaggcaacanaggatgagggtggtggctgtggccctgagttgggttgtgcctgaggacatggcgagtggtgctcctgcacttggctccagggtgctgtccatgcccatcaagaagtcctcaagccatccta

SEQ ID NO: 216093 - DNA, 679 bp, Homo Sapiens
ttttttttttttttttgtatattcctgaacaattgtaggattcagtcccgtgaagcaggaagctcttgatctttcttcagttaataaagcatcaatttcatccaatgtgtttggaaggtcttggaaaaccatggggagtgaggagttgtgtccatttggaatggtgggtacttgtgtctggtattcttgaggaagagtctgctctgcacccaggttacatacttgcctagctcttttcataagttccttgcatttctgcaataatctctgtctattttcatccaattcaatgaaatgttgctctgtaagacggagttgtgaagatgcggccatataatctgattctaatttgttcttctcagagatcactgtagtattttggagaattaaatctactttttgtatatgcaaagaagtacaaatctttattaggtttgttaattcggtaacaagtttcgctttttgaacatttatttctttgattttggtacttgcttttcgctcttcctcttcaagattgcaagtatcctgttccatcagctttaaacttcctagtttggaactgattttttgttccagttgtcttttcttggtttttctctcaagaagctccttcttcttttgtctaagttcattgtctttgtgctccagatgtttgcttgtttcacgttaggcaatc

SEQ ID NO: 216094 - DNA, 700 bp, Homo Sapiens
  misc_feature (641)..(641): n is a, c, g, or t
ttttttttttttttttttggcccaaagtaaacatgtttattctcagttctgccttaggggtctctagttttgcaagcatgagtaaatggaatcaacaataatcctctccttaaatgtctggcattaaaatttgtcacttaagaagtttcctgttttgcctaaagagagtgtgatttgagggtgacctgaaacaaggcttgaggcttgtggacacatagggttaatcgccttatttcctgccaaatcgcagagcagtgaaaggacaaaggcaactataaatagcagcccggcagatctgtccttccaagagggaaagaacttagcaacaaagagagacacgaggggtgaagtgggcaaagaatcattagcccagtttctgcccatgccagggcatgtgacccttgggaatgctgcgaggcccagcagaggaagaagaggatcaaagctttcataacctccaactcagtgcatcccaaacccagacgggcctggaccgacctgtgcatttactcctgaatgccctcagtcagcagacacgggagccaacaggtgggaaaacgtgtcctccagagtgctcctttttttttgaggtggaccacagctcccagccaagaaatggcagagaggagagggatccttcnccttggagtggccttctgtcttccagggttcacaggacagtctctcggatgacccaatg

SEQ ID NO: 216095 - DNA, 552 bp, Homo Sapiens; identical to SEQ ID NO: 53225

SEQ ID NO: 216096 - DNA, 726 bp, Homo Sapiens
  misc_feature (639)..(639): n is a, c, g, or t
  misc_feature (709)..(709): n is a, c, g, or t
  misc_feature (712)..(713): n is a, c, g, or t
ttttttttttttttttttaaagagacaaagaaactttatttatacaaaactccaccccttctgttccactctcctcagcaaacacagataacaggtgatgaaactaaaacacacagacgagcattactcaacccaaggttcccgccttccctagcacctgaggtctgggccaacatgcagggtaactggtgccttatgcctgctgtctggattgcccggcccacagggtggctgagcatatttattctgggggttccatgcatacgaggagcccccagccatacagctgggcatgggtgtttggcagcaaattgtccctgctttagtcatagcaatttttcatgtcctctgttgctccccttaactgaacaccccttgacagccgggattctgcctccagcatcaacctaaggaagctctgttaaatgaatgagcacctctaggcaatgaccaccctccctgaagttcaatttctcatcgatttcccaaggccgcccaagtcattcccttgatggctgtgttagtttctaggctcggcttctagttcagtgagacagaggcaggtgggcctccacgtgggccatgatctggtgggcaaaacatgccttgggcagttacaacagggacagtctgctgcanaagctgtggagggagcagccaacaactcgttcacaagtcgaggtgcccaagggcctcagttttcctgcanggnngctgcgtggggca

SEQ ID NO: 216097 - DNA, 670 bp, Homo Sapiens
ttttttttttttttttttaatgaaattatatctactaaagtaaatgtggcaaaatgagagaagtaaatcatagagaattgaccaaaactggcatggttattcctcctctaagccaaacgcgtccttcaaaaaggtccagtagtcaatgtatttcgcaggaataggtgatggcataccaagccaaacatcttcacatctctctttaaggtatgatgctggttgcaattcaggcactggattctttctccagttcagggcagagaaaaatgacttataatctatttgtttttcactgtcttcaaaccttgacaataaggattctagaagatcatcactcaaaggtaatctggaggatttgcacagccttttaatgtctttggtgggtaatacattttttttttctcgatcttcatacacacaggaataaatgaaagtgtcgaaattctcaaacatatttttcttgaacttttcgtgggccagtgcgattaagaaatccatatctgaacatgtgccctcaggcacacggtagtgacgtgcaatggttacaaattcttgctctgcaaggtttccaacagtcaaagacatcaatatgtctctgaatgtattataatccaccatatttgtgtgcttagagtcagcagctttaaataccctcgtgccgaattcttgg

SEQ ID NO: 216098 - DNA, 665 bp, Homo Sapiens
ttttttttttttttttatgggaagaagttctttattttatcatgtgacacaacataacagatgcctaaccacacaatgtagatatgaataaagaagatggctcagaagagtgtactagtatttgtgactcagctagtgaccattatgataaaaagaataaagttttgacttatttacagttttaaaatgcattttatattgagtagttatttcatgttttcttaaaacaattattgtattgaactaaaaataaactaggtagtttgttcacataacaaatctacattcaaagtcatgcttacaaattttccacttagtccatttttctgttctcagcattactacaaatgcctcattccgtcatcacattgaattcttcaacatcctctatatcatttccaggggcatctctgggaagtagtgatgcctatcttccctcggaagcactaataaccctaatatacccacaattcacaccttttcccttctttgaggtgtgctgctttttggcaagacagaaaaaacacactactaggatttgaaaaactaaattctgggcctgtttaagtcataaactacagaatcttcggtcatatattctccccaggcacttgtttctccaccgcaaaaaataattcctatttgcttggtctcctcgtgccgaa

SEQ ID NO: 216099 - DNA, 575 bp, Homo Sapiens
ttttttttttttttttttcacagttttgtttgtttaatggataattctattagtttggtcaaaagtataattttgctttctctctatgtggaaattaaatacagtcctgacaaatgtacatgatttccaagttggtagaggttgagttctgttggattatgatatgtcaagttggctaaggctgggagctgttttccagaatttccttccctacgtggttcctgggtagagttgaccatgaagaaaggtgttatactcagtcattgccatcagtcgcagtgatggacagatgcagagggacccagcctgctgcagctgatccttgatctccaccactgtgtgtccatcccatctttcttaccgcaggcctgctgacgaaggctggctccaagcccacccaccaggatcttggccacggaccagaagggtagcagataaatagaggcaacaatttcagcagcatgataatttccatagacctctccacaagctcccaatcacagtcctacttcagcttctcagattctgtgcaagttctgaattgtctacctgtaccagtgcttcttcctcgtgcc

SEQ ID NO: 216100 - DNA, 443 bp, Homo Sapiens
ttttttttttttttttttcctgtcccaacaccttttaatacagttgaatggataaaaacatggatacaaacacatggatataggtatcattgaagcagtgtgacataaaataacatctatatatacaacactcctctgcaaataacaaatgtaaagtaaaagatacccaacaaatcattttgtttatcttgctatcatttcttaatctataacgtctccctcccatgtatccatgcaaggaagcagtatcagctgcccgactagagggtagctccctcccttgggttacttttttttttttttttttttgtagagacagagtctcactctgtcgcccaggctggagtgctggagtacagtgggcgaaagagcaagactctgcctcaaaaaaaaaaaaaaaaaaaagaaagcaagttaaatggactcagttaaagcctcgtgcc

SEQ ID NO: 216101 - DNA, 658 bp, Homo Sapiens; identical to SEQ ID NO: 51871

SEQ ID NO: 216102 - DNA, 699 bp, Homo Sapiens
ttttttttttttttttttgctttcggtgaattaaaatgtatttggtgccagtggtgctgaacatagaataaaaaacagaaaaagggcccagacagggacatccaggctggaggttggagtggagcacagtcagatgtattcacttttctagcatgggtttcaaagtgcgtaaggggagaaaacgcatcatggattgtgctgtgcatcctggacaccgtgcgaggtgctcatagctgtgatcttgtctcccacaactctcttgggtgacagacgtccactgtccacattttatagacaaggagaaagggaagtcaaatgtctcgtccaagtctacacagctaaaaaggggcagaactagggtgacgctcaggcctcatttagagatcgggggttggcgagaagtggggtgggcttctggaggggctgggagagccccacaaggctgcagagggtggtgagcccggagtgggcctggcctggtgtgggctgggggtatgggcaggagctgcagacagcagggctgcaccagcggaccagtttcagaggcaagggttctaggcccttgagaatccacagtgccaaacagacccagatagctacggggttggtacctggggaggccttaggacaggcagaaagtcccagaggcgagggcgttgcctggggacgtttttgctccctgtcctgctgacagagcat

SEQ ID NO: 216103 - DNA, 792 bp, Homo Sapiens
ttttttttttttttttttcatggtattttacacatttattcatgcaggacaaaaatttgtatacaattaaggctaaaattaaacaattttttatctaaaacatgcaactcagaggacatgctacttcaatttcccagtaagaaagaaaaggaaatcattttacccaaatgaaatgattttttaaatgattgatttggccttgtgttttcctgccagcgtttttacatttgaacaagagcaggaaatgttttcattcttaatctttcaacttcagtctgtagtattgaaatctgttcagcttgttgttttgaaatatttgttaacttctgctgttgcatcatgttttcataccgttctttgacaatcttttcacaagtcagtttagaccccattgcattacagatgtcttttctctctgagacagctaccaactcttctcgtagattgcagcttagggcataatttgctatatctttttgattgctgaactttccaagttttttgagtagtttcttgcagttttccacattctttttgtgcatcttatctaaaacagcaatggtttgttccattattccaatctgaatactaatcagagcctcatagtttggttcatttaggtacttttgacgatctcttgaaaaaaatagcatctgaatatcccaagccttctgatttagatcttccctttccatctccattttcttatgttcccactcaatctgaagtatcttttgtgtacatctttactttccatcatgctagcactttcttttgtccttgagtccgatc

SEQ ID NO: 216104 - DNA, 587 bp, Homo Sapiens
ttttttttttttttttttcaagacactttttattttgcattgctttcttagacttaccgaaaatttggtaagatagtacagagaattcctagatagccctcacccagtttcagtttctctaacgttatcatcttacattaccctgctatatttgtcaagattaagaaatcaacactactgttaaaaatactccagattctattcagacttcatcagttttttcattactgatctttttctgttccaggatctgatccaagaagcacattgcatttggctcacatgtctccttagtctcatgtggtctgtgattgtttctcaggattcccttattttccatgatttttacagttttgaggaatactctaaaataccccagggatattttgtagaatgtccttcaacttgagtttgctggatgttttagctcataattagattgggattatgaatttttagaaagattatctagaacaaatctgaatgacttatcactggtgacgttaattttgatcacttggtgaagacgtcatttgtcatttttctcccctgtagagttactatgtttccctttccatactccactc

SEQ ID NO: 216105 - DNA, 770 bp, Homo Sapiens
ttttttttttttttttttggaataccattgtgtttattgatcaagcctggcttcgagtgtgacagagccattcttggttctccttggaagtaacaagaacactgggtaacatgtgaagtgcatggagactcacctgaatcccaccaaagtagtagctggacccagtagcctagcttattgtcttggcagtgccccctacccagtaccattagacctggctttgtcccttacataggacagactgggcttctccactcccgccaggctggccctacctccacctgtccttggaagctagtatgtaagtaagggaggagtcatcaagtttatagatgggtaggctgaggattgaggcaggaggggacttaatggctgagtccctggcttgttccagagccctggcccttgagcccctggactggtcagtgcatggacactctcccctcccagctcgggcggaagacttttcctgacttagctgctccatacacacaatctataaatatgtatttgctttaaaaattaataaattagatcttgggccagcctgaggtcatctggccagccatgagtcctgtgacatggacatttgtcatgtgtcatatatagaccaacaatcatgtatcctgctacttgggatgccagcacccatgccacagaacacgtgccacactgactttcatgtaacgccacatgtcaaggggtcacactgccacatataaccgtacgtgtcatgcattgtcatgacaccctcattgtgtgtcgcatgt

SEQ ID NO: 216106 - DNA, 739 bp, Homo Sapiens
ttttttttttttttttttgacatgacaaaagcgtgcatttaatttgatgctttgcagagatacatgaccaaagttgtatgcatggcttgtcttttgggatggtcccagctgtttattttaaaagaaaaaaattaaaatagagccaacaaatgcaattaagaaaaaaaaagtattgagacacaaggggacctacatgttctggtctaagaagcatgcaagtattacaaagcattccagatacagtatgacagaggaacagtgaacaagcattggaacgatgctctttctttcagaaacgggaagtctaacagttatgttttcacaatggtagtgattaaaccatctttatttttaaggaattttataggaagaattttagcaccatcattaaaggaaaaataataatacctttttagccctgcctatctccagtcttggaataataacagaagcatagcacctttcagtatctaaaatataaacaagaatagtaagtccatcccagcttctagagatgaggtagctcatgctaagaaatgttgggtcatttttcctatgaaagttcaaaggccaaatggtctaattccaatcatcacatttgattagagtcagctccacaactcagtttctagatctttttcttcattataggcttcaggatgatgagattgtacatgtggaagagtctcaatttagagtccttggacatatgtttgtaaagttctatatgtcacctcgt

SEQ ID NO: 216107 - DNA, 651 bp, Homo Sapiens
ttttttttttttttttctccttacaaaagaattttatttatactgcactgattcattccttcaaacacatagcttctaacaggtggagttagaaaagcgggtgccacaaactatggtttaatagtatgcaggccctgtacctgtttatctaactatacctgaaatttgctgataccccaagccagctacttacactaaaggcatctctggggggcatcatctagatgaagtctttaacctgatgggaatatctggttattctacagtttaaacaggatgtttggcttatgcttttgttcagctgactggtgcatgggaaggattaaagcccatatctaactacagcaggtcttcaagcttattatcctgtcatgagttcataaagatgacaaactcatcatttgggagctataaggtcaaagtggccagaatgcaactgcgctgttacactgtgcaaaatcaagtcaactgtcttgtaggtccttggctgtctcttgttataacctcgaacacttaaaaaaggaaacctcaagtatgctgagataattatcagaatgttcaggtacctttgttcctgaatatcaagtaatagggctcatctctgtgactgcttgcgacaagcacatagggcaactcattaccaactgctca

SEQ ID NO: 216108 - DNA, 686 bp, Homo Sapiens
ttttttttttttttttttattttatcagaatattttatttcaagagttaacacttttttcaaaaagtaaaaacaatataattacttccctgagtataaagaaccaattctacaataaaagaccattacaaaattaagcaattagaggtacataattctctgcattcaattatactctatttcaaatttattcttaaaaatgtcatgttttggaactttaatgtttcaaaaaaacctcagaacaactcattttgcacctatggtgttaaggttatcagtctgatctgtctttatcaaattcaagggcaatcttcaaagcggtgctattgaggccaacagattgcatgttacatatgatagaaacaatgattcctcttgggggaaccttgttatttatagtctctgtatccagttcttcaggaaggaccagcaggacactactggcacccactgcccctccagtatgtgaagcataatgccgttgctttctacacgaaccatacgtttgtttcttttccacaacaccccacgccattgcatatttaccctctttatcccaagacatctctgtgttagggactggggtccacatcataaccattgtttctggtttgaggtatccaggtaaaagattttcatttgagttcttaaacagcccaacttggtaaccataaagcattgcattcc

SEQ ID NO: 216109 - DNA, 699 bp, Homo Sapiens
  misc_feature (673)..(673): n is a, c, g, or t
ttttttttttttttttttacgtattcccagatggtccaactattccgaaaagctcacggtatatactcttgagaaaataagcatgtaaagcattcttttaaagtacttgccacaccatattctactggcaaatagggctaatgctggagctcagaaaacaatactccaaaatatggcacttcagcacacaaagtactttgcactggaaggtatcagaagcagcctcagaacctggatctctctcatcttctcctgccctcctgtctcttgcccctcattctcccccaaagcaagtacagacaccagaattcctcctcaccaaagcagataataaagactagatctctcttctccaaagccagccataaaaactacaattactactctaaccttcccctcacctttctgtctaggaactggcctagacagaaattctgtctagaaattctctgacctacccttgtcccaataatataggtcataagaccctcatcagaggggtcctgtcccatacctgggaggaagaaacattacaagagagaggccaagaagaatctgaacagacaggtcttggtgagtttttatatgcagtctattaatattagatcataacctttttgtccagtcctatttctacatagctgtccatttttcactgaacctaagcactganaaatggatagttggtccatatgtttg

SEQ ID NO: 216110 - DNA, 656 bp, Homo Sapiens
  misc_feature (647)..(647): n is a, c, g, or t
ttttttttttttttttttactgtggagaactttttattgtttaaaaatcataatcgaagcttcaaaaaacatacaagccaagacatcccagttctagtcccccactccctaaaggagtacacagaactatccttcccctcctgctcccacactgctggccaggaccctgcccggggaggttgcctgcccaccctcctgcctgctgtacagtaagtcaccggctggggaggagccctgggggaggtcagggtggctggctcccagcacccccaccccctgcacgaatgcagcatatgagctgtgtgtgggaaaatggggacagtgccctgggcaggggacccccaagggggaaagagcctgtccccattccccctacccctccccagccccccagctcaagggaagctgtcatcatcatcttctgccatctccttggcaaactccaagtcctgctgttctcgctcacgccgttcctctgcagactccaagtccttgttgtacgatttgggaggaaacctcatggccttgacagacatgttgtggatatctaggcagaaggagatgcgctggtggaaggctagctggggctctcgggtggaatagatgtcaatcatctccttggattggacatagcccttctcctcgtngccgattct

SEQ ID NO: 216111 - DNA, 704 bp, Homo Sapiens
ttttttttttttttttttaacaatttaataatttattacattacagtggcatcacaccagcagtcaataaggccactctagggaaaaatctttcagtatttccatgacacattctgtttacaataattcataaactggtaaaattcattctaagaaaacttggcaaataaaactttggactggaattggcatttctttctctgcttttcgttcccaccatttctttcttttatactacagtattcatattttaaaatgttttaaattatttcagaacattaagatagcagttacattttttaatagttatattattttaaaatgactaagataaagttttagagaaactatattatggatagggctgatttacattttcaaattttctgaaatcagctttggttttagagctgatttttttttttttcatttctggaaaattaggttgaatcaaatacttttaaaatgattattatatattgccatctttaaataggtgttttgattcttcctacagacattaaaatgtattcagtggaactcacagtttaaaattctatgtttctgatgaactctaacattccaatgttgccttctaagcaaactgaaagcttccttatactgaatgaggaagagtaaaatactcggctgaatgaggtatcgcaaaagactgcatgcacttttggagaaagacttaagttatt

SEQ ID NO: 216112 - DNA, 699 bp, Homo Sapiens
  misc_feature (531)..(531): n is a, c, g, or t
  misc_feature (635)..(635): n is a, c, g, or t
  misc_feature (651)..(651): n is a, c, g, or t
  misc_feature (658)..(658): n is a, c, g, or t
  misc_feature (691)..(691): n is a, c, g, or t
ttttttttttttttttttgtatggaaacatttgactttatttaatattgagacaatacatatagttctgattaagagcatcagaaactctgaatcaagtgtattcttcttggtcaagagcttaataaaagtccctctcttaaaggctcatcttgataggaatagaaacaaaaggttaccccatagttctcttacatttggaagttagctatatagagggtacaaggatattcattttccttcaggacaaagtcatctctgtacgccctttattgttgaattgcagtttgatttaggggattagaggtggtatggtaccagtaattgagtaatggtggaaatgtgaaagtcagtcacaggactctcattggtgccagtgtcatagttaagaaagaaagaaagaaagttttatatatcctgtaatctagactggaagctaaataattgctaggaagcaaacttaagtgatagctgttaagttttttggtttgtttttgaccagagatgatgaagtaggtgatcttttcttggnttgctcctagactcttccattttaacttatatttttagtttggtgcaaaagtaattgctgtttgggaccatgaattttaagtcattataactaggttcacacanatctttattaattaanatagganacattacaatcaacacatttttgccaatgaganataagttt

SEQ ID NO: 216113 - DNA, 738 bp, Homo Sapiens
  misc_feature (706)..(706): n is a, c, g, or t
ttttttttttttttttttcatcattaaatatttattgagtgcttactgtatgcaaggcactggggatacaaagaggtataattcatggctctgcccttaaggagctcacaatctagttggaaaaacaagacatatatatatatatacatacaaaaatcagtaacaacacagaggcctgaacaattgccaagtggacaacagtacagataataaagaagcaagaaacgagggttcactaaaggctatagtggggaagggagtgcttcactgagagagtgggacttgaactggtattaaaaacaagagcatcccgggcaaagggaacaacactcacagctcagaggcaggaagacactctgcgggtctaagaaatgaagagttaaatgtggctagattggaggtttggtgcagggctaagagagtaatactcgcttagccaggaaaggatgcatttgttttacgcattttgtgcgtctgaggggctggcaggccttgcacgtggcagtgtctatcctgtcagatttgggaggtcagctattaattagatcagctattaatcagactgttctcctaacactttaacttcatggatgtaccttccttcctttcctaatgccaactctgtttcccgggtaggtgtttcactgcctgaatgaaatcctagatctctgtcacagtttttgttcgctggtcagtcagaacctangcccactggatgagcgtggagcgcccagctga

SEQ ID NO: 216114 - DNA, 684 bp, Homo Sapiens
  misc_feature (656)..(656): n is a, c, g, or t
ttttttttttttttttttacagcttacaaaacataattttatttaaatttgtatagataaaaatctaccaaaatttaaacaaaaattttatccaaatcctttcccacaacaaaattggacatcatggaaaaaaaaaacacattcaaataaggttcccatctttctaccataaactggtagattctgggaggatgaggagtaagagagaaacgaggagagaagatagtgatactaaacacaatttgatcttcagtgttgtctcatcttgaaatatcttaataacagagatttccataagaatcaggattcatttttgacacaaaaatggaagcttccactcccaaaatcacaaataaggcttctggttttctttttagtgtgaggtaaacagtatattcaatattaaggcaaatggtaaaaacacatggatggtatattaatgcagatattccattattaaatatattttggaatactcacggatttttcaaacatatgttagaattagaaacctgtaaaatctgcagtagtgtgtaatagctatttgcttgaatgtcttagcagtgcctttttagtagctaatatgttcagtgtaatcttatgcctttttagtaattaatatattaaatataatcttgtctgagtttttaaatggnctgtttttctttttcattatgtaggatt

SEQ ID NO: 216115 - DNA, 659 bp, Homo Sapiens
ttttttttttttttttttgtacaggtagggtcttactatgttgcctaggctggtctcaaactcctggactcaagtgatcctcctgtctcagcctcctgaaatgctgggattacaggtgtgagccatcactctgggcctaagagtcatattattaaccatctttttttttttctccttgaaacagctcctatggaaaaaggtaattaaactccaaggacactctaggtgcctttcagagttgttatgagtatcaaagttagagagcttcataaacagtagcatgttaatcttgccacctctctcctttatccttgctgatcaccgtactgattattcacatgtagcattttataaatattaatgtgtatagatagacgtgctgcttctccattatctccctacttggtatagctcgaacatttggccaaagaacaaggaagtgtatctctggataaaatgatgagatatgatatgatgagatgagatatgatgagataatagatagaaggaagaatctttggaacgtaaaaaaaaaaagatgataattgtaacgatgatgatgcattaatggcaacgtgaatagctctcatttgctgggcccttgctacctgccaggccttccgctatgggctttatatgaattatctcatttaatcctc

SEQ ID NO: 216116 - DNA, 648 bp, Homo Sapiens
  misc_feature (638)..(638): n is a, c, g, or t
ttttttttttttttttttcctcaaaagtttttattctttttcatctttttaaactggcacactgcctggtatacaccgccaggtaggcattcagaaaagtttcttttttttaaatacacaatttataatactgggaagatttcatttcagtgtttcccaaaacattattcctggaaagggtgtactctcccatgactctggataatagaagttttgttctgattttttaagtcacctcagacagacactggaacacgttagatctaacacttaagtgctttgaaagggcagtaaaaaatccccaaggaattcaagaattgtaataattgctgggaagactgtggtttctgtagcccagggtggcttcacagttgtcagaggtcacagattctatgtccctctccgaccagggacctccaggacagcttccctggttggttctcgagtctttcagcagaaggcagaccaacagagaagggttgtgaccttctccaaccagcccaggcctcacgccgctgcatcgcagacccagtatcagcagcagagctacggagcacgtcatcctgggagtggatcctccgtgggtcacaccaagcagcgcagcagggaaccagaatgaggttcagggccaccatcanaagagtgacc

SEQ ID NO: 216117 - DNA, 739 bp, Homo Sapiens
  misc_feature (649)..(649): n is a, c, g, or t
ttttttttttttttttgtcatcagatttcaactccttctatcagcatttttcctgaccagcaatcacaataacacaaaatgaaataaagaggggcttcacttgtttttaaaagcatttatagaaatcaagtcagagagacaaaatatttttcagagggtaacttcagaacaatctctcttccttggtaactgcagaagatgggcatctgaactcttccaagtaccaaaattactgtcacaaaaataatgaatttaaaaatagggcaaactttgggaagactacaacaatgcagtcaacactgagacaggttcccccagagaaaaaccttctgcttcagtgggcccctgcagaacaagttgctggctaagaaatttcaagagggtaaaggaggatctctccatagcccaatattaagaacgcagggccaggagaaggtagccatgattcctcctccctcatgctcaccaactataagtaggaatactggctgatcttggtaggactcagcgggtatccagtgtaaattgttgagcctcgggaagacccaatgtaggattgggtggcaaactggtgttggtactgagcaggggccacgctggcagaagtgaggaggctgggcccaacactgacagggacctggtgcaccanagtgctagggtgagtggtataggctgcagcatgccttgagggatcctgtggggagaaaagatgagcaatggagctggttgagcccagtgc

SEQ ID NO: 216118 - DNA, 789 bp, Homo Sapiens
ttttttttttttttttatcaacccaattgtcctttattttggctcatctaatttacagacatgatttctgaagtttaacagtatttgtaatggcaatatccaaagtgattttggctgagtaaactgctatttgttgaacaaaaatgtagttgtttgtgcaagtttaaacatttcacaaggccagctgagttcatttcaaccctacttacaaaataattattggcaaatgaaatgggctgagggggtagagacaagatattttcaagcttctgagagatttacaaagccaagttcttcaactattgaaagtgaaattgaaaggtcacagacaattgaaaggtacaggtttaaatctcaggattaaaaagagttccaacaagaggaatatttacaatggaacaatgaggaaaatgttttgttacagtcagaaacatggaaaatatgctgttcaaaattgttggctcaggaataaataaaatccagacttggactattaaaaatatcaaagtgatccactgtgtgccaactccattttctcctgttgtttgttataaagaaaatccgttattgaatataatgcagttctggttaaattatcaaagacattttccatatgcaaactgttgtttaccatatgctatatattcttcgataacaattttaatacacctctatcacatggttccataggtgcagcgttagaaggaaatttgagtatattttatctcttaccaaggtacaacccctttgtacagcattcactcatctgttgacactatataacaaata

SEQ ID NO: 216119 - DNA, 604 bp, Homo Sapiens
ttttttttttttttttttcacaccagtttggtggagtcaccaacaaacttcaaacaaagatatgccaactatgttcactatacagtacagccacggtcacacactacccacagcgcggtggcagccgctgctcaatgaggagacgatcacaccatttcggagataagcagtgccattgtgtctggaggagaagagagaattaaaaataaaatagaattcaacaaaaaatatatatagaaaaaaaagaaaaaaaaaaacgaaacagaaacacaggtgggaaggaactgactttggttggtggcctcactccccggccgagggctacccacgcaggacagtcgcctcgctccggatgccatggacacacacacctccacggcactattcccttttgcacaagcaaacacttacagagagcggctctcaattaaaggcttgtgggggagggtcggggggtctgttcaaggcaaagtcagtgccagcgagggggtgggccggcctcgcccgcctccagcccacgcaggcctgccctggcctcctgggagcgggcggcgatggctggggtgtggggaaagactcccggcgggcaggaatcacgaacgtc

SEQ ID NO: 216120 - DNA, 706 bp, Homo Sapiens
  misc_feature (671)..(671): n is a, c, g, or t
  misc_feature (694)..(694): n is a, c, g, or t
ttttttttttttttttttggcatcagaaatgctgtttatttctctgctgctcccaagctggctggcctttgcagaggagcagacaacagatgcatagttggggagaaagggaggacaggttccaggatagaggttgcaggctgagggaggaagggtaagaggaaggaaggccatcctggatccccacatttcagtctcagatgaggacaaagggactcccaagcccccaaatcatcagaaaacagcaaggagcaggaggagcttgagcaggccccagggagcctcagagccataccagccactgtctacttcccatcctcctctcccattccctgtctgcttcagaccacctcccagctaagccccagctccattcccccaatcctggcccttgccagcttgacagtcacagtgcctggaattccaccactgaggcttctcccagttggattaggacgtcgccccgttagcatgctgcccctgagaggagagcacaggcaatgctgttagcagcaatgagcaccgcagacagtgagttaggggatcaaattctatcctagtcactagtttggagcaggtctagaagttggggatagcaggtgctctagaagagattagaaggagaggtaggaaaatgtgaagtcacccatgcaggcctcaggagttgccanccccagacccctgcagcacttanaggggcattggt

SEQ ID NO: 216121 - DNA, 720 bp, Homo Sapiens
ttttttttttttttttttaacaaaatgctttatttctatttttaaatggagaggcattcccatgaaatatcaaaaggcatttacatgtgttgttttaactcttcttttttgatcacacaaagtaggtagaaaagatctgctgaaatagagcaaatcagaaaccaagtagtgtaaggcattaggagatacatgaagagaatcgctatttgcttcttgtacagcgtgtggcaagtcatggttagtagtcatcgtagttgacgctggctccatgcctaaagccgtaggggctccggggaccaattgcagagtcttcatcatagtgacgttggtagtaatcgccatagtattcatgtccatttcgatctctgttaagccaataggtgatgtcatcttcaaatttcgcttcgtcaaagcccatgtagagaaactgctggtaccactgctgcacctcgggccgagtccggtcccacagctgccgcttctggcgcttcaggctgccaaggaattctttggctttattctcatcaacggccactttagtcttagttggaacaggtgcttctcgtttttgaagcatcagcttgagtttatttccacttatgccacctgggccccagcacaggagcaggagcagcgccagcccggtcagggccaggacagcaggccgcgccggggaggcggccatggcggcggggcgcgagcaggagggcgaggggcgca

SEQ ID NO: 216122 - DNA, 746 bp, Homo Sapiens
  misc_feature (602)..(602): n is a, c, g, or t
  misc_feature (671)..(671): n is a, c, g, or t
  misc_feature (719)..(719): n is a, c, g, or t
ttttttttttttttttttggaaataaagcatttttaattcagcccccggagggcctgcccaacgccccggggcaggtctctaagcaccaaacacgtgagaattgttcccctcagccccagagcctcccccgcatgggaaccccttcctccttttcactgggcccagcctggaccccacacccccactcacacccacaaccagctccccacactttgtttcaataaataaccccaaaaacaaagctcggggcaggggacctggtctagcactgagctccaaacaggcaaaggggactttgtgccaaacgccagaactcccaagggtagaagattgaaatcagggtcaaaatacgcacgagaagtcagagacggcttctgagctgggagcgggtcccttcaggctagggttgaacgtcgtcccctgggtgctggccccagagtcaccgcaaactccattccataccacacagcaacaattgtcttcctggtgtttctaccatcggatgctctgggttcttgtctgactctgagttctggaaaggggcgggaaaggggacccagacacctggggagggggctgtctggagaagaaggaggggcanaacttcctggggtcaaaggagtctggagggaggtgggaaagcgaggcccctgcccaggtcactgccggnacctaccccggcgggtgcggaggggactgaggccgggcctgtgctgcngcgctcgctatctcctggggtgtcaca

SEQ ID NO: 216123 - DNA, 657 bp, Homo Sapiens
  misc_feature (576)..(576): n is a, c, g, or t
ttttttttttttttttttgagctaagtttttttttaatttttcacaaagagctccagaaggcaaatagtttatcacttccccactctgaaatagcacgcaagacagatgatgcaggggaacgggtgtccactctttcttgttctcagagctcctgcagcaggcctgaatgaaccgcaagcggggcccatgcagcgtgtcctctgcaaagtgcaggtgttcagtccacacacagcagcaccagcactgctgatgtcacggttgtctgtccagaagatcccacgttagatcccaagagaaatccagacagggtttagcctccagaggcagagagcgggtgccaggcccagatgcaaaggcctctatactgacgccctcacatgacactgcaaaggtcaaatgtcaaaggtcaaatgtcttggcttaggactataagggagagataggacaaataatgaggtcaaggaacctctggattgctgaagagatgactttaaaaaaaagtcacatctgcggctcacagtgttcaccagaaaagaacactgcttgggattctagacctgagcagggagaaacanaccgggctaaaggagacagaactttcttcacagtagaacagtcctagtctaaaatgctagaatttaagtccacagtctttt

SEQ ID NO: 216124 - DNA, 666 bp, Homo Sapiens
ttttttttttttttttttagtagttaaaatgtgtttattcatttacaaacccagtaacatgagaagaaactcagtggaaaccttgcttggtggagacagtgcacagtgttagtgccacattcacaggggcagaaatgctcggtcaccctgtgcacccaaagtcacccaggatctctagaaaagatcccacttactgaagtgcctcggatgtcttcagggccagattgtaactacacaggaacagggaagggctaagctgaactgcacactgacaaacacaaacgatgagtcacaggactctacagtagttacaatggcatttttatatgtcccaagtgttgactggagagtaaagtgttaactgagctgctagaacacccttcactgaaagagctttctaccccacgcccattgttccgaagaaggagaggctatgtggggcggatgggaacccacacaccgagatgaacttttctctttcttcccatctgcacccaccatctgacattctggagtgtaaggcactagaacctggcttagagaatagtggggctctaagctccagttcttggtgtgcaaaggaaattctgacatacatcttttgaaagagatgctaaaaaaccctccctatctcctggtatttctgtctttgacagacaggaaaat

SEQ ID NO: 216125 - DNA, 701 bp, Homo Sapiens
  misc_feature (37)..(37): n is a, c, g, or t
ttttttttttttttttttaatgcaggaagcatttatntgggggccagagctgcattctacaagaggcaagaggcaggacacaggcaatctctagtgggttagaggagaggttggggagagggcagtgacaatgagagaacagccaggcgctggcttgggaactgccggtttctcaaggctgcctcctgctagtcctctgggaaatgcaggtagaaatggatcctctatgctactgcctcagccagaggcctgatggtgtcccttccctgggaggggcccttagccccagtctcctgtgctacaagggacccagcagcaggtaggggctttggtaaatatagtcactcatcattaactgagtaagagcaccttctcatcttcacagcagcaggagcattcctgaggcccaaggagccctctaaggtcactctttcattccaaagcaccctgtcccaaccctatcttccatactgaccttaactccctccagcctcacttgggggttccagatctaacatcaccccggtaagtcccaaacccaaactgtccctcacctttagcaacatcctggtatcctttcacctacatacgtttgatcctcagccaattccatacccccagctgatcctgaagctagtattctgaacctctagaaggctctaccagccaactctggaaactacagaactcagccatattcc

SEQ ID NO: 216126 - DNA, 745 bp, Homo Sapiens
  misc_feature (605)..(605): n is a, c, g, or t
  misc_feature (631)..(631): n is a, c, g, or t
  misc_feature (700)..(700): n is a, c, g, or t
ttttttttttttttttatagttttaatatttatttagcagaggggtaaattgaaacatcagttctctagaccagtcaggaaatgtatgctttgtgctttataagcttacattcaacatagatgacataagttaccatactcaaatgtaagatagggagaggtagaagaaatagctgagaacttgaaaagatgtactgttattgtcaacaaaccaatgtcttctcccttcataaaattgtgtttagggaatattaacaattaagcttgtatacaatagtaattttgaatgtatttttaaatttattttttcaaaataatgacattagtaaaaattttacatagcctgtattgaattcacacattcaaatgaggctttaccagtaatgatggggattaatacagagctagtgtttggcatttgactttatctcaaatgagctaactgctcaatgaattacagaagactcatactctttttattttttcctggaaattaaaaaagaaaagctttactaaatattgacatatatatttactccaaattttacatttagtgaaataagaatatctctagtagctcagttaacatcaacagaaagcttcanaagatgattctgaaaatggcaggcanaatttctttttattgtagggcattacttaaactggaaatttggctttatgcataataagtcatgtgggntaaacatccacattgcagttaggtttccagtatctagcttttatt

SEQ ID NO: 216127 - DNA, 697 bp, Homo Sapiens
  misc_feature (670)..(670): n is a, c, g, or t
ttttttttttttttttttaactgacaaatcgtctttattaaataagcaaatagtctacacagatacagtcacttgtctgttgcacacgagtgcttccccttctcttgggaaagatcactctatgtgacaaggtgcaagctaagcagcagcccatttgaatgccctgtaataacataaaaatgaccggcaagatacagattcacgctcaagttcccttgagtgtgactcgagtcacagcacaggcaggagaaaacgaacatttcaattcacagagacttaggtgaagaattattagcttcatttaaagtgcccatattgtgccttctacatatctctttcaacaattaagccagctgttactcttcaaagtgtgtgtcactttctttgcatttgggtcaaactccaactgtgaagatccagtaaagaaataaaagaacccaaattcttcaaaaacagcatcaatctttgagtcaatccctggaaagtcttcagctatttgcttgggaaagcctggctccatggaatttctcttctcatcaaatctccagtatttgtcctctacaaagaaatatgttttgttcttttccttatcagaaatggctgcatcgattttcctcacggttggagggaaacctagggtgtggatgcctcttgggtatccagctcgtanctcatttcctccctcgtgccgaattct

SEQ ID NO: 216128 - DNA, 716 bp, Homo Sapiens
  misc_feature (659)..(659): n is a, c, g, or t
tttttttttttttgttttgatagtaaaataattttatttagtttcttattttaaaaaaggtagcatttcaacatataaatttagactcaagattacagtgtatatttgccaaaaggaacaccccgaaagacggccagcctcagagctgagagggcacagggaggcacactcctcacacatgggagtttaagcagaagtgctttaagacttcacagcggcatttccctgttcctcagccccgcctccagggccatcactttggggcaacagcttttgctcatgtaactataaaacatctctaggaatgaaagcacagaggtcaatgatccagattttccacaacaatcatctgcagcaacaattcgacaggtaaagattttatttttataattcaaaagttcttttaaggagaactaaagaacacaaaattcatttataaagagaatttatagaattaaatgagcaaaaatgaaaaattattttctccatattacaaatgcctctataggataaggcccaggggaaagacccattcaaatctgggctttcctttcccaaataaagtgtttggcacaaccaacaaactgtcatgagactgacaggcctgacagctgaaagatttctagaagtggtcccatgacttttttgttgagcttcancatagcgtacacaagagttgtcttaacaagctgcacaaactcaggccgaactacgca

SEQ ID NO: 216129 - DNA, 612 bp, Homo Sapiens
tttttttttttttttcttaccaaccaacacttttaattgcaaaaagtaaaaaccttcattacaataaactttaatttacatacatttttcacatggtggaagtctttaccagtttgtagtatcctgcacttgaacacatactaaaagctcaagccattcagagccgctgtggctgtgacagctgcctgcctccctctgctccctgggaccatccagggccaccacaccctgctcccggaaggagagctgcagctgaccctggcacctgtccccgatgatggcgggagcactgcgctgagtccctgtcttgcctgtgcctcctccttccccgaccctcggcattggttactgacccttccccagggtggaggtgaaggaagggaagactgcagccaacatttttctgagggtaaaactgtggaaagaagtatggagggaagcctgtctggataagatggggctttctgggaatgtcatgtgtctgctggctcctgtcacctccctggaagggtccacagtgctggggggttgcagtgtgaaaaatgggatgctactgtgagtaagggtggctgcacaggtgagccccctgccccaaggagctgctgtggggag

SEQ ID NO: 216130 - DNA, 722 bp, Homo Sapiens
  misc_feature (634)..(634): n is a, c, g, or t
  misc_feature (681)..(681): n is a, c, g, or t
tttttttttttcaatgctaacagttctctgttttattgcaatacagcaaagtctggttaatattaagtgatatcaacataaagtattggtgaggagtcttttgtgacattttttaccatcccaccttaaatatttctgtgcaaaagaatccacatcattgtttggtagcagaggatctcttataaagttccctaagacactgagggcataaaaccaaacaaaataaaataaggagtgataggctaaagcagtatcttcccctccatccacatttgtcagcattatattctaaccaaaaaatgatcacaccaggccatgcaaaactgtacaatattacaacgagaaaaaccctaaaaaatttataaaatgaatgatattacactatcaaataaaaagacaagtcattttgttttcatgagatttcaaggttgatttgagtcagcttcccccggaactgcacggtgtcctgtgtggggagggcccagcgtgctgccagtgctggggggcagggcttacactccttatctagcaaaagtgcacagagaactctggacttgagtaacaaagtcataaggaaagaggttttaaaatgggctccatgaaatgcagctcatctagttcagggctgggccanagagacgggggagtggagtgcccattcattccctgttgtgctcacanacatgggctacggcaaagtctgctctgagcgccctctgtct

SEQ ID NO: 216131 - DNA, 668 bp, Homo Sapiens
ttttttttttttttttataacacttgaaagtataaaatgctacatttccaaaaatatatatattttttttctgcaccagcacccttgtatagtaaaagtatctactttttgttcatttgtttcaatgcactacactttatctacaatttcattacatgtatacagcaaataggcaagcatggcttttacatccttaatgatttttttctatacagggaggtttaaaaaaaaatacttgaacagtttgcccagtaatgtgacacataatgcatgtaccttgttctcatatttttttaggtgtaaaataaagattcagtaattttaactcagatatttatctttttaaaaatagtgttgcagttttgttatttgcattacttttcaaaactccttaagtttttctctcatggcacactttcttctaatacttcaaattttggcaggcaatataaaaaaggctgcaacttctgccctttgagggcactgtagtgactaaacagcatatcaaattttgaatactttttgaaatcacttcaccaatgatatccctgaccgaaggttcatgcatgatgcatcatcacacagtacattcagagagagctttgactttgctatgagaagaaaagattcctagaagtctctcacagtaactgcctctgtcattgagt

SEQ ID NO: 216132 - DNA, 703 bp, Homo Sapiens
  misc_feature (650)..(650): n is a, c, g, or t
  misc_feature (682)..(682): n is a, c, g, or t
ttttttttttttttttttcacacaagaaaagtttattgaaaaataaagttctccctagttttctctacaacagtggaaaacaaagcagtgctctctatgccaggacagtacatttggacggcgacaccttgtttgcagaatcctgcattacttaacccccgaagtgaatcacacaaaatggctgtaaccaggatctgtttgaagacacagatgcaaacggccattagcttaaagacgtcaaggttgtgacagcaactacagtggaagggacgtcaccatctcctttggcatcaactattatgctattaatacttgggtaggacaatgagcaaaatgcttcccaagttcgctccctctcagctttggcagatgtgaagctgctctgaggttcctgacacgctgtcctgagaggcgtgtagacctccagcaccacagatcctttgagcaccaccccgtccccgccatcctccatcaacagtggccctgcccaccacataagcacagggttctccagccgtggggtcagggtggcattgagggagtgtcttaaggctccacaaaatctgggctacagagatgctttgcagatgggaaattccagtcactgcatccacaggacgagactgctgatttggcggaacagaatccanaggaatttgacgaagtcaccaaactccagcanattccacacctgcaatctatc

SEQ ID NO: 216133 - DNA, 718 bp, Homo Sapiens
  misc_feature (685)..(685): n is a, c, g, or t
ttttttttttttttttctgtttctccaaaattttattttaatttaaattacagggccagccagatattctgataagaaattcacttttccttaggagaaagaaaatgctttcatggcattgttaacaaatgtatacatctccacttttttaagggttaaaaatcacattaagtaactgccttatgtaaaattaaacctttataacacaaaaaccacttccagtataatagtcttggtaatatgaatatattaaatgatcataacttcaaatgcaacatttcaaacttaaatgttttcacattgttttgcttaaaaacaaaacccacgaagtctgaactaccttcagattccaatgtaagagtaacatgaatgttgtgtctgacacgctgcaccctcacttcttccacctaaaaggctacgacctcactgccaaagtggaagctgttctagatgtgtaagttctaagaatgagcttggcaagaagacgtttcttccacttggtgtaatccatgtttttacactaactccatacacacagcactacaccacaaagccaggacaccacatcacggccaagtcttccttcctaaacatccaagggattttcttttcaaggagactagattgccttatttcacacagattctggtaaagacagtcttgagaaatgccaattatgatgtanactgccattttaataaaaataaatatatctata

SEQ ID NO: 216134 - DNA, 659 bp, Homo Sapiens
tttttttttttttattttaaaatagaatttattgaataccatagtatattaaatacataaaaaattgtttttcttgtcagtattggcacataatgataaagtactgctaaattaacacttcaaaaatttcaaattttaaaacattccataaaaatataaagcctagtagtgttataaaagtattaatttacactaacttacatatcaaagtgttaaaaaagaaattccacactcaaaccaattatctgagaagtaaaaattcaatcatgttttaaaaaatgttttcatttgaacaaaatgcaacagaaggtataaaacaggcaaaaattacctaatttacattgacttgtcctactagaaaatgttgcaggttaactttagacattaaaaagattcatattccaaaggaatagaaaagctgtttgcaatactttttatgcctaatcaaagaaccacataatgacattttgtgggttgctccttaattgccagtaatggaggactactataaaaatttagttttaaaaataatttttctcccaatgaacatttttatatgcagaggctgtcctcaatatggaaagattaaacgaggacatttatacttatgatcttcactataatatggcctatatattaccctggtcattttttttcac

SEQ ID NO: 216135 - DNA, 592 bp, Homo Sapiens
ttttttttttttttttttggagacggagtctcactcttgttgcccaggctggagtgcagaggcgtgatctcggctcactgcaacctccgtctcctgggttcaagcaattctcccacctcagcctcccgagtagctgggattacaggcgcccgccaccacacccagctaatttttgcatttttagtagagaaggggtttcaccatgttggccaggctggtcttgaactcctaacctcaggtgatctacccgcctcggcctccaaagtgctgggattacaggagtgagccactatgcccggccttcattggattctttctagggaaattcatcttgtagagcaaagcatgcagagtgctatttcttttttttttctcttgaccagaagatttgtttacctaccatttcattggtagtatggcctgcggtgaccatttttttgtgtgtgtacagcgtcatacaggctttgcctttaatgatctcttatggttagaaaacacaataaaaacaaactggctactggacaaattgtatattaccagatcatcactagcagctttcagttgcacttcagtcctttatcaattcataaag

SEQ ID NO: 216136 - DNA, 619 bp, Homo Sapiens
ttttttttttttttttttagtaagactattttatatacttttttacattgatcaagtacattatttttaccaaacaacattgtttcccactacatccatggttatgtataaaaaaacgccattgtcaattaagatgttaaaaaattatttccataagagtattaaattctaatctatgattcacttaacttcctactttataaacactaggtaaagtaatctcacaagctgccaaagaacacatcccaagcagtaatcacagacgatgaagcaccttacaggacccctccaccctcaaacgcgcatgtccagagaagtattaatgccttaatagactactgaaggttaactatttacatcattctaaaaatattttaagctgtattacagtgctataaattctccttttaaggaaaaaagtaatagattgtttccttaccgtgtttgaaaggaaaaaaaataaatccatagtaactaatggtctgccgattttttccctgaatttttaaactccaacaaagcattattttgcaaaaagtcctttagcccaaagtcagtgtctctgttttgatctctttgtaaaagaatctctgttcatccattctctttccctgggacc

SEQ ID NO: 216137 - DNA, 625 bp, Homo Sapiens
  misc_feature (89)..(89): n is a, c, g, or t
ttttttttttttttttttccctgcacacacactttattttgtcctctctgagcccttctcacttccccctcaggacggccaccccttgngggctgggtgcagagcccccatccagccgcggtgagggtggctgtcatccggcgggtcctcaccctggtccctaggcttgccgcagctgatgggtctcatagtcctctgggatggtgtcattgcagcggtaacgcaggttggcccagatgatgttctcctgggagaagcagaagacccccaggcggccaccccgcatggttgtgtccaagaccacgttgctgtcggccaccagctcagggccctcatagaatcgcaccctgatgtagcccacttggggccggtgctgcaggaaccaacgataggacttcttgtccttccaacccacgtttcgcgggtccttccacagcagccgcacctgggactctgtgtctcctgtatgccacagagcgttccgcagctgttccccggggcctgtggaagacttcacagccttgagttggatgccaggctcggccacagcacggaaggggttcgcctgccaatacgtttgctccatctgcttccacatgaccacgtagaagctggagctgtcctg

SEQ ID NO: 216138 - DNA, 540 bp, Homo Sapiens
ttttttttttttttttttgctgtttctgctgtttgtattttttttttttttctccaggcagacccataaagcaagtttttgctgggcatgttatttgcatggtgaaaagaacaaggcatctccttattgagggaaacacacataggggctggggtgggcggggctgggctgatgacccagcttcctttcacggctgcaggcggaggggcagggcccctctgctgatgttctagtgttcttcccggggtgtgggagtgagggtgtccttccccgggtgcgtgggagtcggtgctgcgccaggactgcactcggaagcggcctgtccctctccaggcgtctgcagtggatggcaatggcttcgggccacagatggcaggcagggcaggcgtgtcctccgcgctcagttattgtctctggtgtccgaggaggcacttccgaacaagatgtcactgtcctgggacacgctcagctgcgacttggttttgatgaggaactgcgccctccggaacatcaccctctcttgctcctgcttgagctcca

SEQ ID NO: 216139 - DNA, 687 bp, Homo Sapiens
  misc_feature (592)..(592): n is a, c, g, or t
  misc_feature (665)..(665): n is a, c, g, or t
ttttttttttttttttttgagatggagttttgctttatcacccaggctgcagtgcagaggcacaatctcggctcaccgcaacctccgcctcccgggttcaagcaattctcctgcctcgaactcccaaatagttgcgattacaggtgggcgccaccatgcccagctgatttttttgtatctttagtagagacggggtttcaccacgttggccaggctggtctcaaactcctgaccttgtgatccgcatgccccggcctcccaaagtgctgagattacaggcatgagccaccgtgctcggccaaaaatgaagcatttcttatttagtagaagaaagaagaccagctaaacaggaagcataatgaactcctagctaagctcagaggaatttgtctgcaaaacccttacagaacaccacacaatcaaattatttgctccatagcaactttacccccaaagtgcagatctgtttggcttattggcttgagggctacctgcacaggatctaggcccatgttgtcttgccctctgatgctctgtctttccatttccacctgttttctgctgggggacctcaatctggactgggcactgnaaggggccctctgtgagagcactcatcatcacactgccatggatgactctaaacccaaagctgctgcattccncaaacatcagaagcacactgct

SEQ ID NO: 216140 - DNA, 706 bp, Homo Sapiens
ttttttttttttttttttcatcattacaaatagactcatagctctttaatttttccatttaacactttaattttccataggcctagattttcaagaagtccaatatctctcacttgaagtgtcttttccctggagtagattgggagatttgagggatatctgtccaaagatgagacagtctgtttctagtttcccatccagcctgatggggcgtctacagtttttaccacaaggtgtcgctgttgaacagattctggtgcagtctagtgcatagctgtccacttctagagtgatcacttgctgggccaagttcctctccttaagtggtgtctcacattaaggttcccaaattacagactcattaattcaccctaataagctcatccaggcagtttaggtcttcaggggcttccagcctccaacacacattgggccaaaaccagcctgtaccaccagctccaagccctgtgttgaatctaggtcattggtccagatgccccttcattctgggcctgtggtgtcctttccagacagcagacctcagttaagggcatcccagtccatcagagaagttccaggatcacagaccctcaaaaggggcagtgttgaggattcagtctgttttctgcccagaggccccattaagtatgttgtatcacctcctccccaggctgtttctacataacccagggaagcattcagggaa

SEQ ID NO: 216141 - DNA, 718 bp, Homo Sapiens
ttttttttttttttttttagggtttaaaaaggggcttgtttaattaattaaatacaaggatgaggccaggcagggcgggggaggggcgccacccacggaaagcacacgcctctcggagccgcctcccctgcaaacggctggaaccaggtcccagtgatcagcgactcctgggagagtggaggggtgggcgcaggtctctccaagcccctggacactggagaggggcccagttatagagttctggaacccacagccctacctacccctgctccagacaggcccctgccagggctggggccaaccaagactcacaaaggaaaacggggccccagtcccccacccacccccacagactaaggcatctcactagcgctgccagaagagggtttgaggctagggacagagaacacagagagccgagggctggatggggcaggaccctccgagcccagctccagaagggcgtcccctgcctccctccccccaggatcccaggcacccatccctggatcctgccaggccggggctgggtccaggtgcacaccagtgccatccaaagcccccctgtccccaagcgagaggcaggacggttctggaacaaaagggggtaccaaaaacctcctgcagccaacagtggggggatccacctttctgggtctgacatggaaccggggacccttctcattccaggctgggggtcctcaatacccccccaaga

SEQ ID NO: 216142 - DNA, 678 bp, Homo Sapiens
  misc_feature (617)..(617): n is a, c, g, or t
ttttttttttttttttttaggaaacaaaaatctttattaaaaaaaaataacttacaaattggggagaactctctgaaatgcaactgttcgttgtgtgtgcagatttgcagtccagaacagttttttgtttattttaaaatgtaactttacaatactattaatgtcacaaactgcattacaaagcagttttcgttccatatcccgtgccggtacaaaacaccacacagatataaaactatggtaaataaaacatttcagccaagactggcatatatttatatatttatatatatttatatatatataatttcaaaacagctaacaattagtgtcatccttagtcaaaactgaagtcacgctaaccttaaaactacaacactctgaatatatgtcagcactatgcctcccaaacaatatttaaaatatatttaactttcaaatacatttataaggtacaccaatagtgagaaaataaagtcttaaaatttaaatacaaatcaccatataaaaaattcaggaaacacagaaaatcctatcttacagaagtccaggcaagcctgtcctcagctggctctgacgcacagcactgctgtgcgacacagctctgcctgttgcanaactgtcagcacgcacagccaaatgacagctgcgtcatcaagagaaagagagaatggatgc

SEQ ID NO: 216143 - DNA, 636 bp, Homo Sapiens
  misc_feature (605)..(605): n is a, c, g, or t
ttttttttttttttttttggctctgaatgttctgtttattggggtgttgtcatgggtaggaggctcagcagagccattctgcctcctgcttcccagtactaccccgtccagcaactgcctctcgtataaataagtatcaagatggtcagtagaaaaggagagcatctcctcagccctggaagacagtgtgggagcttcagcttaaggaagaggtaggtgcctgtccgccagcccagcctcaagggccaggaagacctggctatgggtgctggaggggccgttagccacaccccagggttctacagtctttggtttggatcaggctgcaggccagggtcctggctggcagccccacccaccctgcgcctctgacacacacccagcgcttttccctgcaggggcccgggattggatggggccctcctgagtgcagcagctctgagttgcaaggggaggcccactttcccagcctctgaacctcctttctgccactgcagtttgctgggagaaaggagagagaagcctgggggtcaggcaggaggtgtaagtcctgaggccggatctggtgcacagaggagcgaggtactgtcacagtgctggcacanaagctgggatgtggctgtggtttgggtctgc

SEQ ID NO: 216144 - DNA, 690 bp, Homo Sapiens
  misc_feature (680)..(680): n is a, c, g, or t
ttttttttttttttttttctggaaaacaaggtttttttttatttgtagctatagctacaacttggcagcatgggggagggtgggaatgtcctggagggtctcccagccctccgcaagcagagtacaaaggctgctcggggggccggccgagggcgcgggtgcagcagtgaaagcagcagcactaaacctggtgcccccctcaggtggggtgtctggaagacggtgggcaatccctgcaggatgggcgaggaccagaccccagggcggggatcctgcatccctagaccatgttgggtcctgggtcagggcacctgggatgctagggaggggttggaaatgggaggggctagacatcaaaacaataactgaggtgggggcaggtggtctcagtgtgggtggtccacaatggggcatggactgcggtctgaagagggcctgtcctcactcaggtctgggctctagcagtgtggcacttccgacagagcacgtgaccgtccagggggaagcagccattgtcatctgcctcaatcgacaggggcttcccgcagtcctcacacttgtaacacttcatgtggaagttcttgtccagggcgaccactcgcacagtctcatctcggccaggctcaggcatgatgggctcagagcagacggagcacctcggggcgtactgcttgtggtantcggggacac

SEQ ID NO: 216145 - DNA, 736 bp, Homo Sapiens
ttttttttttttttttttcagtacagtactcattacatgtgtcaacactttattataagataggttttatgttagatgataacaccagcatcttgctcaataaattgaagccagctttttcaacagagaacattattagaatgaaactagatgcaagaacaggaaagtaaacacctgtgtcatgttcaacaagactgaactacggagcaaagaatcacacagtgttgcaagatcttgaactgactagatgataggattacaaaaaccacacagctattgctggaaaattatgtcatgcagagaacagactggcacgattacatatgtgggtttgtcctacacaaatcagacctttaagtgaaacaagtctatccaaccatcttcccataaaacctagtttctatggaaaacaatcaattaagctaaacccccacattttagatgtatattcatttatagaagcccaaaaggacagtggggttacaaataattttatattttagatgctttcataatttaaaaagttaacattacaatttggtgttactaaaatgcaaaaacaggattggcatgctgcctcatgcctgtaatctgaacattttgggaggccgaggcaggaggacttgagcccaggagttcgagcccagcctagggaacacagggaaaaccatctctacgcaagacgtaaaaactggccagctgtgatggcatgccctgcagtctgagctactgggag

SEQ ID NO: 216146 - DNA, 733 bp, Homo Sapiens
  misc_feature (631)..(631): n is a, c, g, or t
ttttttttttttttttataccaatatagtgttttattgaacaatatataccaatatagtgttttattgaacaatatataccaacaggaaaatagtaagatttctttggagttctttttgttctcagatcaactcatcttgaaatctctacacaaaaattcatacgatgaaaattttaaattttgagttgatctataccatataccaccaagacccataaagcaggatattacataataatgtagaatttctagagctgaaaaggctagacaccatgtaacttgaagcagaatgggggctggaaaacatacaagtttcttgactgttcaatgctctcacagaaagttatataagaaaataaaatattttcattttttatagatcttagaaattacattactgaaataactgactttacagcttggaacagactgaactatgatactaactaaatatcttctgatcttgaaagactaattgcacctaaatttttaaaaatataaccatgtcagctttaattaagaattttactatctgtagtatttggcaaaataccagaacagtttgggacaccaagaacagaaataacctttttagttctcattaagaactcttctcacagactcacccanagacctactcccaacaatcagtccttcagtttctcaatgatcagataatcttttgatcatttgatcataatcagaaatgatcaaataatctttgaatcatct

SEQ ID NO: 216147 - DNA, 644 bp, Homo Sapiens
ttttttttttttttttgtgactcttgagtggattttatttttgcactccaggatgcagtgaagacggtggaaggttcatcttcacaccgagggccctcagtgtcgaggtgactcccggcctgaggagggctgaggcatcctgaattttgagagttcgaggttgaggtctaagaaggtgtacgtgctgtagtcatgatgctgcaggttcttgtaggtagtgttgtcaaacggctcagcaggcactggggctggctcctgtgtgccgcctcggtcgtcccctggcgcggctgcatcttccatggcctcgccctcggcctcaagcttcagcgctgctgtcttttcatggaaaccgtggttattctcaacaggaactgtctccaaattgcttggtggtatctgatcttccacgattgcctgtccacccttcaggtggccttctattccctgcgtccctgaggtttcctttctgggcaggggaggggccgccttgcgctggggctctggcacgggtttttccagatgcccctctgccgccccaggaggactggcttgcagctgcccctctgctctggcctcttctgccaacacagcaagcgctgggctgcccttcggtggcgcagacaccctgattttgtgtggacagg

SEQ ID NO: 216148 - DNA, 555 bp, Homo Sapiens
ttttttttttttttttttgaatagattttttagttttattgaaatcttacatgaacaagaaattggaaatacaatcacatcaaagaacaaattgtcacggcttttgacgtttaagccaaacaaattttgtagggcagatttcaaaaaggtgtgaagttataacaatttaaaaacacagttaacctacttctaggaatgcaaaacatacaatcataggttattttcaatacaagaaaacttaaatttgtttgctttaatttcttaaaactactaagacaaagcactagcttgtatttttatttacagcatactccatactcctatgtaatctatcccaaatccaaaaaaatgaaactgtccaaaaccaaaggttctgcaaaatcatgatttaacagtgtgcccagcttgttttgaagctaaaatgaagcctgaaacgataaaagcattgtaatccccagaataagggaactctgcaagcccaataatgtccaagagcatttatgaaaagaggaaaaataaaaagacttgagtatatacacaatagtgatttcttca

SEQ ID NO: 216149 - DNA, 633 bp, Homo Sapiens
  misc_feature (43)..(43): n is a, c, g, or t
ttttttttttttttttttgagtttttaaaaataatatttttcngggaaaaaaaccccaacaaaacacgattctttcagcagaaaccagaagattttctcatagactctcctacagagagccctgataaagtaataaacatgctaacagtaagaaccccaaccaatttcatagggcagtttgcggtaactactcccagtatggagcagacagtcctcttgcaaaacccgatttagcaaactttgctagctccatgtggggcctccaaaggacacagctgggcactaaatcctggctgaaaacaaaggccgatttagaggatccgtagaaacggatgcacagaatatccctcagtcttctctatgtagcaggccctccatatacgcgggttccccaagaccgaaaatattaaacaaatgaatttcttttttaaaaaaaagtacaacaaaagatagtaaaaataaaaacagtataacaattacttacatagcatttacactggattaggtgttacaaagtaatttagagactatttaaagtacacgggaggatgtgcatagttatgtgcaaatactacgccactttctatgagagacttgagcaacctggatttttggtatcgggcgggggccctg

SEQ ID NO: 216150 - DNA, 713 bp, Homo Sapiens
  misc_feature (663)..(663): n is a, c, g, or t
ttttttttttttttttttacagaaagaaaatccatggcatttaattagattgcattttatttagataaatgaaaatttgccccaaacagaactaggaatcaaatattgtcttggactagaggtaattgctaagctggaagcttatattgaaaactaaaatttccagcccttgactatctgtagttccaaacatcaaaggaaaatattggaacaatttatctatgtacagagagaggcaactcatgggtaccataagcaaaataacctgagggggaacatttgatattacaagaagtggtgagagtttacaagtcttgcattgctttctattgtacatggctctgtagtaatgccaaaaataacaaaatgtaggcacttgctctgacttctgcagtttacattagattattatgtacttcataaattaacagcagctttagaattataaaacagtattatatttcatgctactgttggtgttcttcttgttaaaataatgttctcaacggacacagatacagagcttgtacagaagtaactctgggcacatccagatagtacaaaaagcagtcataaagcagctactcatggaatcgcaactgtgatggccagcgagcacctggccacaggtggtaggaaaagacaaacgcgggtggaatttanacaaaaacgtcaatttcccacaaactacacaaatctttaatctgttcaaa

SEQ ID NO: 216151 - DNA, 687 bp, Homo Sapiens
  misc_feature (612)..(612): n is a, c, g, or t
  misc_feature (665)..(665): n is a, c, g, or t
ttttttttttttttttatctagtcatctttattagctataatttggaatttgcaaatgacagaaaaggagaaaggcttcagacgcaaaggacttttaataagttaccttttgaagatgagacaagacaggttctaagctaatcagacgtgtccaccaggtggacctgcgctcttttcacaggtagcggttcctgatgtactctcggtacatggaggagtcctcttttcctaggggctgcatgataccttggctggcctggatgtgggcttggaagatctctgtagattttctgtctactcttgggggctgaacttcatagatgttatcttgcgagaaagctgagatgggtgttagttttataactccatctgagcacctagaacagggctgctggctattcttgtcttgtttatgttgactctgccccagctgaacaaatcttgaataaatggagaaatcttcttctgagaggccatctgagaggttaattccatatagctccttcatgggttggaccacattctcggtcactttggcactgtctcctgcatcagtcatcttcacgggagtggagcgctgagacacagagccctcttcttcccgatcagtcncagagtcatcctcagagctgctggacacagcctcctcgctggggggcggcggngcgctggctgccgttttccgct

SEQ ID NO: 216152 - DNA, 705 bp, Homo Sapiens
  misc_feature (688)..(688): n is a, c, g, or t
tttttttttttttttttgtatttttagtagagatggggttttaccatgttgcccaggccggtcttgaattcctgtcctcaggtgattcatttgcctcggcctcccaaagtgctaggattacaggcgtgagccactgcacccagcccaaatgagatgtttctaaatctaaagtttcttctgcttctgcatttctgtgaatctcatttgaaatttttcagggaagggattttatcatttgttcagagatgtctttatttttattaatacccataaaacgtttgtgtatttgcttcttcctctttctccttttgatcacattttagctacttatctagaggatctctggccaagtattcccttttattgtattgataacaattcttaatggctggcctctcttgtgtacaatgagccaatattcttttttgttctatatttttgtatcttcccctttcctgaacaaagcatatttagagtctcaaagaaatcctctccacaaagacatgttcctccctctggtgtgggtagacatagggtaagagtttggatgaaacttttgtaaattgtagtgttcttggcataaatatgaattaaatctttttttatatttaaataactagttaaatatgtgcttcttactaagattaggtattttttgccaagataacaatgataaaaacattttggngggggaaattgacctta

SEQ ID NO: 216153 - DNA, 768 bp, Homo Sapiens
ttttttttttttttttctcaatcatcttttatttctgtaatatgcagcataaagatttcttggttgagatacaataagggtgtgaaaaaagaaaaaaaaaattcttgacatctaacaataaagaagccagaaacagtaaggaaaattgcactcatatttttctacctacttgcaccaggaatgagctagccagtttagaccttctagctgataatctcgaagttccagattctcccctcctaaatatgcaggttgtttctttaaagctacaaatcgtggtctctgcttcagggccttgcattctcttgttgggatggtttttgagttgttcctactgtggaagctgtcaatgcaattctggaatttctttccaatgagggcttcatcttcccagctacactctgaataggggagtcccatccatttacatagatattcgggctcatttgagggtgccggcttccgactatgagctggaaaatctgtttgacccaatgtagatttacttgtcttcacagctattactctttctactatctgatactgtttattcaactctgaagccagctcctgttggcaattgaaatattctacatcttcaggagaaatttccctaaccattgtttgatttcgtcctcttttttcttgaagttctctagtttttttagggccttcactttctgttgctgtaaggttcttcactctcccatgtgctgtggatgtaagacaaccttccacttgatgaggtactggattcacttcatcttt

SEQ ID NO: 216154 - DNA, 750 bp, Homo Sapiens
  misc_feature (649)..(649): n is a, c, g, or t
  misc_feature (668)..(668): n is a, c, g, or t
ttttttttttttttttttagctttattcttttattcaaagtttattaaaatacaagaacaaattgtataagcacacatagcactcagcaccaatatgataacactctttctactgataatctcccaaagcagttcattttctgcaactgagaagcacatatgtgtagcatatgcacgcgtgcattctcaccacatttacccaggactcttagcatcatgtcccgcatattctccttgccagggagacaaagatggggagaggcaaactaatgtgactacatccaaccactaactgagtcgatgactctttcgtcagtagttatcatccgcacactggtcaactctgcacatctctgtctccctcttcgggcgcccgattacttgggctagtgagtctggtgacaatgtgatgcaaaactaaacaaaactggccaacattccctacccaatatcatttaattgctttggttataaagtactggatacttatttcttcacatcccccaatcctaatacacataaaaaccacgctgaccagtgacatgggcctggagaagtcttgagagaattttctttatttcccatccccttctgtgggtttctttcatttatgtgtttacctgttggctttttgaggggagggggagangtggagggttttgagccanaatagtgacttcattaaacatctgctgggtcttcgaagtctcagtaaatattgaataagctccctggagctctgctgttgct

SEQ ID NO: 216155 - DNA, 717 bp, Homo Sapiens
  misc_feature (657)..(657): n is a, c, g, or t
  misc_feature (684)..(684): n is a, c, g, or t
  misc_feature (695)..(695): n is a, c, g, or t
ttttttttttttttttttaacctcatactgtttattctcccaatattttatgagtttcaaagtattaaatgtattgtgttgattctgacaattctatgaagtaggaaatgtggagacatttatccgaagagagaaagtgaactacctaacaaaacagttaggaagtggtgggatcccaggtcggctcagttcttctggctggctgaccctgagtctagtgctttttccaccataatatacatgtgttgaattcagcaaagtgactgtcggtctgagtgaaaccaaactgatgtagaatctcttgagcggtcagcatgtttgactgctttaacttagactgttgtgaggaaactgctggtggtgaagtaaatgagagatttttgttgacttttgcagcacaggaacgtatcacctctgtgacagtttcaagcctctgttttactagctgcatcttcgttgaagaactttcagtgtggacaaattcatcaatctgaaaagagccttgatggggtagttttggacaggtacatagggcatcttgactttggtgtattccaggtaatggaaatgttccattgtagcgtttgaacatttcagcctcctgctgggcaacatggaaatcgtaaatatacagaagaattggctcattttgcccanatgcacagaatgcaaccatattttcanatggatgatangaaatgtctcgaatgggtgact

SEQ ID NO: 216156 - DNA, 673 bp, Homo Sapiens
ttttttttttttttttatattgtaaacaaatttaatgaccaaatgatagactggtaaaaaatgtgcctatcaccaagggctgatacctttcctgtggcccaggccctctgctctttaaaaatggggcacaaatacaggcaggtaagagacagacagctctcatcctgcactcttggctttctgagagatatgaccccaaggtcctggagtctagctgctgcttcctcctctgggaaatagaggagtgatattggtagtacctagggcatagcactgctgggacaattcagtgatttggggactgatctccatatcaagatgacctgatcctgtctgtgtgcgggacagtggctagcacggagcccttgttaggcccgcctaccatctgacccttctcaaaccttcccgtctgaggacatctgcatgcacacttgtccctccaatgctgtctcactctggatggccctgacacctgagaggccagacagccaagtggtttctaggacctttgtgattctaggcctgggttcctgtttcatttctgcctctgatggccgagtggccttgaggaagcaacatctttccaggcctcctttgacccacttcactagttcatggggccatctgaggatccacccggtgtcaggcacttcgctcgggcctgacagaggac

SEQ ID NO: 216157 - DNA, 734 bp, Homo Sapiens
ttttttttttttttttctactaaaaataatttaattagaaacggagttttggcaagggaggcagaagcggctccttttctccccttggccgcccactcagcaaccaacaaggaggaaagcccccgcagtgctcggccagtgccgcgccatcgccaccagggagcgccccgcgcgcggtccacgtggcagaggtcgcggcctcgcggcgcggggaggagccgcacgccacagtggcaggtcccaggccgtcactccgagctctcgccttccgggccgctgtccggcgtgggcgggaggaggggtctccggcgcgagcgcttgacccggcgcgagggctgcagcagcctccgcttcagcacagcagccactgtgtcctggctgtccgctgtgggcccccagtagatgctctccccgcgtcggaagtttctgtgcagccgtgtgcagagcgtggccagggtgagcagcaccagcaggaaggtcagggccatggcagcccaggcggcctcttcagtgcgtggggtggggccccgggctgcccgtggaggcgctgctgcgcgaggggccggggaagcctgacttgaacagacacagccccctggggctgccttgcccgttgggcacctgagcctctgtcctggagctggcattgcctccaggcgcccccggcagcagggagacagtgggcacagatggggcattactctccctaccagggattcccgccatggactgct

SEQ ID NO: 216158 - DNA, 751 bp, Homo Sapiens
  misc_feature (695)..(695): n is a, c, g, or t
ttttttttttttttttataacatttaaaactacttatttttatttatatcagagtaacaaatacttatgaagtcctttgaagttcagcgcacaaatttctcgtgtggggcggtgggtgtggccatgttcttgctcttccttctttacacatttgagttgtgccttctgttcttaaagagattttcctttgttcaaaggatttattcctaccatttcacaaatccgaaaataattgaggaaacaggttacatcattccaattttgccttgggtttgaagagtctctcatggtggcacagtcctccagggtagctatgttgttgggctcccctacatcccagaagctcagagactttgtcaaaggtgtgccgtccacccattgccactgaccctcgacaacctggtctgacagtccaataaaaaactctctcattttaggtttcttgtaggaaaggaattcctgctcctcctgtgagttgataaccaccaggtgagcccccatggctgagcagttctttaaacttaacgcccaggaaatggtgtcagtagaaaagaagtagcagctggattgaaaatattcccagttcaatggacaacaattcttgactgaacctgatccataattgtagcaggagagctctgtgaaattctcaggtagctgaaactttttctcatcacaggtttgaaagatgcganatgtcacaacacatctggtgatgaaacaggcactgagaaataggatggggatccag

SEQ ID NO: 216159 - DNA, 738 bp, Homo Sapiens
  misc_feature (574)..(574): n is a, c, g, or t
  misc_feature (612)..(612): n is a, c, g, or t
  misc_feature (720)..(720): n is a, c, g, or t
ttttttttttttttttttcaggtttcagtgcaggtttatttcagttttatattttattccaggcaagtgcttattacatggatagtattcatgtctcggtaactaaagtcttggagcatgaacagccactagaatacagttcaatagtaaaaatacagtatgtacaaaattagggtttttgtagtttttttttttttccacacagcagatgtatccaaacacataaaaatctctacagtctggggtcgctacagtttatatttcaggaaacagagacacagtggccgagtcctcactgtaaacaagggccacctctgggggttgggggtgggaccctgggatggggggagaagcagctgtttctggagagagaaggggtcatggtggccccccagttaccctccaggcattccctgccttctttggccccccaaggaaccaacctccccctctccccgaggtaaggactcccagccagtgagccactctgaacatcaaaaggtaaaacacgcatgagaggtaagatgtgtgcgtgtgcgtgcgtgtgtgtgtgtgtgtgtgtgtgtgtgtgtcncaagctggaagggctagggagggagggccaggcggtcncacagggtgaggacagatgtggtcccgacagcactcctgggggagacgcccaaggaagggctgggtggtgactgcccacttgggcacacagcatcacagcgttcacanacgacaagaaaacagcac

SEQ ID NO: 216160 - DNA, 676 bp, Homo Sapiens
ttttttttttttttttttcctcataatatcgtttatttaaaaaaattattttttgtacagacagcgtcccgctatgttgcccaggctggccttgaactcctgggcccaagtgatcctccctccttgacctcccaaagtgctaggattataggcatgagccaccgggcccagcccatcctaatcatattaatattaattaagctagtctgtttacatgcactgtcactcatttattcattaggaatccttctgagctaggcatttatcatcattctacagatgacaaaatggaggttaaaagaggttgaataagctgctcatatagaggtcatatagcttttgagtggcgcagccttgacccaaattcaggtctgcctgacttgaatgctcatctctttactactaagttatatttccttaaaatcgaatataaaaatgccaagtccatgggtagagaagaggactattcaatagtctttattcttctgtcacgtgtttcaccctagggttctcatttttatcctacttttgcacccttcatgtaaaacagtccttaatgaaacaaagggtttgcggagaagtactcagaatgggaaacgttggtgtccttggggttgttagcagagccagcagtgatcctgtgaggtcagtcccagccctggaaacacaggtgtct

SEQ ID NO: 216161 - DNA, 911 bp, Homo Sapiens; identical to SEQ ID NO: 45303
  misc_feature (29)..(29): n is a, c, g, or t
  misc_feature (688)..(688): n is a, c, g, or t
  misc_feature (813)..(813): n is a, c, g, or t
  misc_feature (872)..(872): n is a, c, g, or t
  misc_feature (910)..(910): n is a, c, g, or t

SEQ ID NO: 216162 - DNA, 902 bp, Homo Sapiens
aaaaagaaacatttaataatgagggggaaagggcagaaaggtgcaatccaggcaggcaggttgagggcaggacatgccgccttctagggtctccagagaagctgtgtcaacggaggacgtgggccggggagggcccaaggctgcagcacatctacacgaggggtcagcagaacttccagcggtttccacactcgttgcagacaacaaaggtggtcatgggctcatcagagctgcgggtctgcacctgtgtgtaggtgcagttctttttcctgcacttgccgcaggtgaacaggtctgtctgcgtgccgccagtgcgggccatctggtgctctcggatggcctccttggtcatggccttacggatctccttcagctcatcactggccatctcctctgaggtcatcacagcgatctgctggggtgttatggccccacacagcacattccgccgcaggtcagggttcttggcatccttcaggttggagatacgactccgtacacggttcttatacttcatgtctgtgtttccaacgtcccggaagatgcattcctcgatctgagccgacaggcgctcgcagtccgcaccgatggccacgtggtcatggtccgtctgcagggcagcggtcagcatctcgcggcacttgttgcgcacggcatcacaggtgacaggcaccggaggaaatgtggtgatcctcggagtcgacggtgcccctgggcagctccggcctcttgcggctgggatcccgggccctttgaagcatccctcgaggacgtggggcagaggcatgccccttccccggttcctgggtttggaatcgggagcatacaggagcctttttccaggacttggagaaaagacttggccagtgcaatgaccttctaaatcgagctttggtttccga

SEQ ID NO: 216163 - DNA, 1000 bp, Homo Sapiens
cggcacgtctcaagcagccggctgccacagggccctcagcccacccttcccagtggtcacccctccttcctgtgctgggctgcaggcctgtccacccatgagtcagtgttcctgtttcccagttccacagaccatgggtccccaccacctcagcggaacagcagggtggcaagggcgtgggcaccagaggagccactgggctgcaggaggacagccctgtgggaacactgaaccaagctctactgcgcccatgctcggagcccacagccacagggccatgtactctccaaggttctgtggattaactcctgatgactttttcacgacttccttgtgggtgggtgtcacgtggtcacacacggaatgccgtgtcttacagtgaaggctgggagcagaacggcctctatgagttcttccgagcaaaaatgcgggcccggcggaggaaaggccaggagaagaggaacaggtaaaagcgcagatgtctgcagtggccggggggccagggtccacagcttgtgatgggtgggagcagaccccagatacactcatcacgtccaccctcacacagcctgtgcctatggggcggtgttttccacaaggcctgaattcacacagcagcaggctcggccacactatttaggaacttggtaccgttgctgtggctatggcgccacatccacagccagagcccctgcatctggggtggtctaggaacctgagggccagggtgggctgggtgcagccatccactggggcactgatcatcaggcctctccccacagcggaccctcgaggtctcggagcagatccaagagtcgagggcgttctttcctcccgctccaactcaagatcctccaagtcttcaggctcgyactcaaggtmaggtcgcgctctgctcccgttctactccgctcagatctaggtaggagagctgctyaggsagtgctgaggcctyttctgtggctcccacgagcttgstgykstgaccttgggaccttcc

SEQ ID NO: 216164 - DNA, 887 bp, Homo Sapiens
  misc_feature (19)..(19): n is a, c, g, or t
  misc_feature (24)..(24): n is a, c, g, or t
ttaattaagagaaaggagnagaancctgaaaactgaatgtgcgaaattctaattatcaaaaaacccacggcgcatcaggtagacatgatcatctgcatttcttttccacgctgcaaatcaccgcgatcccagattagtccagccggccgggtgcctccctcccgtccgcctgggcagttgaggccaatcagcagtttaggcgcacaggtgcgggctcagaaagcagcagcaatctccggcgtgttctggaatcagaagttgaggtccacgtctgattagttcccttcgtttcattagacttggctgaatgtgtgccagtcccactagagcttcgatttcagacttcctatgacaggtttgttcacagaaaactctggccaccaggatgcccgctccaacaccttgctttcctgcaggacagcgccccagaggtttttgtagagctcgccgtcggctctgccaatcggtgagtccagaacaaagtcaggaggagcgatcacgtctaccagggcaactgcatcgtctttcagctgggaacacaaagccaggacggcgctctccaacacttctcccgcctgctcaccggagaagtatcctcctcggtagagcagggccgcgtggcgctcagggaccacagggcgtacagagcactgagccgccccagcacggcccgcagcgagggcggcacggaaggctggtgcacgtgctcgtggaacctctggaccaccgtgagctccacgaaggccagcgccaacggacggccgtgggacacctggcatttgttccttgcttcaaagtcactgcttcctsatcttttctcttgstttaatttttsataactctctcscagcagsyagcaaaccagccacttgctatgctgccagsgc

SEQ ID NO: 216165 - DNA, 592 bp, Homo Sapiens; identical to SEQ ID NO: 44211
  misc_feature (568)..(568): n is a, c, g, or t

SEQ ID NO: 216166 - DNA, 924 bp, Homo Sapiens
  misc_feature (787)..(787): n is a, c, g, or t
  misc_feature (835)..(835): n is a, c, g, or t
  misc_feature (846)..(846): n is a, c, g, or t
  misc_feature (892)..(892): n is a, c, g, or t
tgagggacctgcctgaggcccccacagctgaggcgcagcggagccctgcctcccagcacagactaaaatcccagcaacacaggcccaccggcacctccagcctgccttgcgggatgatcttcaggcgaatatacaaaatacaaaagaaactactactgtattttgttgccctgtcccttcaacttggctccaaattgcttggctcatcatcacagtggcctccagaaggtggcgagctctgcttctcaagtttcaactgtggaaggcacatctggtcccagaggaaggatgaggggctctctggggcttgagggcagcccaccttgtgtcctcagaagcccattcgaggcttcttccggaggggctgagagctagagaggacgggtgtgtgctgctgggagcgagtggcccggacgctggaggcctgggagtggggaggtgtggtggcacagcctggggtgtccctctggggtggtagcttggccatgtagtcacggagcatctgccgctgctctgatgggacgccctgggcgcatgcatccggagtcaactcctgggagggcggggtcgtggggggcaggggcagagcatcagcaggtggccactcagggctatgaggggagctggtgtcctctgagggatccacatggccactgagcgaaaagctgctggacagctgggtctcagggtccctgtagatttgccgcagcccatcctcagggctccacaggcagacggctcccgagcggctgcagatggccagctccccgggcaggtgagggctgangctgatccccgtggcccctttctcacctgcattgcctgcaaaaaggtnggctgccactngttaccaaaacttcacacggcacaagtggtagtcagagcggacggncagcagaagttctccctggacggtgcatgtca

SEQ ID NO: 216167 - DNA, 457 bp, Homo Sapiens; identical to SEQ ID NO: 48090
  misc_feature (16)..(16): n is a, c, g, or t

SEQ ID NO: 216168 - DNA, 899 bp, Homo Sapiens
  misc_feature (15)..(15): n is a, c, g, or t
  misc_feature (793)..(793): n is a, c, g, or t
aatcctgaacatgantcccattacccagcaacagatatgtggaatattggtataatagcatatatgttgttaactcacacatcaccatttgtgggagaagataatcaagaaacatacctcaatatctctcaagttaatgtagattattcggaagaaactttttcatcagtttcacagctggccacagactttattcagagccttttagtaaaaaatccagagaaaagaccaacagcagagatatgcctttctcattcttggctacagcagtgggactttgaaaacttgtttcaccctgaagaaacttccagttcctctcaaactcaggatcattctgtaaggtcctctgaagacaagacttctaaatcctcctgtaatggaacctgtggtgatagagaagacaaagagaatatcccagaggatagcagcatggtttccaaaagatttcgtttcgatgactcattacccaatccccatgaacttgtttcagatttgctctgttagcacttttttctttgactcatttggactgaatttgaaattttatatccactccagtgagattatgatttgtagcttcatatatgacatgtttatattgtaaatgcacttttccatggaataatttagggaagtgttttaatgttaaattactagttgctagcatgttatgatttcatatcctgagatagctctgcagataagaaaatatttaaatatatgacaaaaagtaaaattgtccatgtgagtttacatgttaatgaaaatattcaacttcaaatgaacttaccangatgttttgcatataaacaaaaaaagtgccttgaggttttatattagttggtgtaaactgaacacaagggaacacattggaattttaataggttctctctctaagg

SEQ ID NO: 216169 - DNA, 930 bp, Homo Sapiens
ggataccagctccagatgggttttctctggaggacaagcagttagaggagaaaaaggaatggagcagagcctgtacccctaaccctaacagctaaatcaaggacctcagccttatataatcattgtccccaccactaccatggactggacaccttcactccagctggacaaagactctggagagagagccattggctggagttgagactgtccccagaacccttggtcttgccactcccccactccttcttccctctctccctttctcctctccctgctttcttgaaaaggactgaatcgccactacagcctgggtgcaaaatcagcaagaaacattgagtatttttttttctttgtatgcctttggccttgcacaacccatttgtgagcaaaagcagaagtggaccaccatcagctcccacccacccagcgatttttccttggaggtcagcccgttacccccataactgatttacctacttaccatactgggaggtagaagagatgcagagaaatgtggaatttgtggacctatgggtaatttatgctttcctcctaaaaaaaaaaaaaaaaagccckcyyyybbkkkbbyttyyyttttcccctttttgaatagataatggatccaattatccatataattcaataggtatttattgagaggctcccttctattccccatccctaatccctaacgaacccacgggcacacacttttggaaacctggtaaagtaacacttagggggaaatggggacaaactggctctctggattagtgcgggtatagacaccccaaataggtgggtaggcccattgattcagctccttgcagctgtctctgttcaaaggaactgtgcagatttagaacgaattggagcttgagcttcacaccaccagcttccagagattaaagtttgtacaaaacattg

SEQ ID NO: 216170 - DNA, 603 bp, Homo Sapiens
tggaagagtgacccaatacctctgcatttgaggactgcagagtggctcagcggtctggacattgaagaggagccaacctcaggggtaacacagtgccgctgggagctgagatgagccaggtggtcggtgggggacacaagcctagaacaaattcaataaaccagccacagacgttatcatcagatgtgcccagagacaaggtggacaggggcatttgctgtggagaccagagggccagagagagtacagggacctggatagatggctccagcacctcttcttctccctacacccatatgccatcttgataaacagcagggaaatctgaaaaataccaagtcttcccatagggacagtgttacctcccaaaaactgtttgaataattggcttgaactggattttctgaactgaactaatgctattgttttgtgggtttttttcttcctactgagtagagtagttgtttatgggggacatctgatcctttcattttcttccagagagctaaccacctgttctgacaccatttattgaatagtacctcttttcccccactgatgtgagaggctgcatttttcatctaataaaatcgaatattattt

SEQ ID NO: 216171 - DNA, 852 bp, Homo Sapiens
atgggactgaggctgttgcgcacagagaggctcggagccgacgacaaggttccacgctaccagtgcccaagggccgggctccatgcagctggccgccacggtggaggacaccctggcccaccacgtgctccacctccaggggctccgtcagggctgtgggtgcctggaagaggcccccaaaatacagggcgccccctgtgaagaccttgcccaaggccacattgagggtgagctcggcattatcatagtggcagcccagctccaggtcctggcccggtgcgtatttgaccacaaaggcccggtggctgtcgagccggcccccgccacagtcagggtacagcagggccatcagcggctgcaggaagcgctcccgcagtggtgtcatcagcggctcgtccagcccgagctcgtgcagcagcaccccgtagttgttcatggtgttgggcctccccttaggcatgtccgattgcccgaagtgctccagctcttccagcagggcctggcagaagggcgctgtgaaaacaggcacccggtagatgcgcttctcctctgtggaaggagggatggtctgttggcctgaatgtggccgtgggccggccaggcctgggcttcagtcttcctgtttcatcacatatgggtcctgacgcccagagagtggaacggagtagcccaggacacccagcaggccagtgacagccaagtcgggatcacagagtcaacttcaggctctctctgcacatcctttcatgtgatgagcccccggagtctggaccccaactcaaaagtgggttttggagccctttgtcccccacaaggaaggcaaaaaggggctgttttttttttgctgggccc

SEQ ID NO: 216172 - DNA, 687 bp, Homo Sapiens; identical to SEQ ID NO: 45280

SEQ ID NO: 216173 - DNA, 1000 bp, Homo Sapiens
  misc_feature (944)..(944): n is a, c, g, or t
aaaaacaaacaaaacaaaacaggcaattgataaaggcggcacaatggggaaggagaggtgaggtgtctccttagccacccgacaccatctcaattcagttcaattgtgaaccactaggagaaacagaattaaataactatcaaggggtacagagttaagagttccagccttccctcttggggaaaactaaggcaaagtaatactgagaaaaagtggaggaagccacaccttcaggtcactccaatgaggagactggaggggacagaggagagaattccacgcagacacagcaagtaagcgtggcttgtaaacctgggactttggcaggtggggctgggagctgatggaatttgtaaaccaggctgtggtcaagggaggaggcaggagctgtaaacaaaggggcagtgacctaggaaatgaaggagatgtgcctataaatggagtggggtctgggcctcccagagagacgagtgcttaaatcccgagagtccccacgggatggtggggaggaaggctgtggggagagtgtaccctgccatggggggcaggtgctccatctccaccctccagggagttctgtgccccttctcaggacttggcgctcactcttggatgacctaggatgcaccagcacgtttaaccccacccacaccagggactttggattagggtagaaattgggcaattggctctgccccagaaamagggtgggggaagcaagttacaagatgttggttgcccttcccttscmagctcattatcagggtctgtctgccctgaatcttccgggctccaggatttycagttataagaaggagggrggtatatccctatkyttggaaratggtcaccgcggsaggrctyatccacawbcagggccttgtkcgccccsccctggasccytggttccrgagcarcasycttctcayctyytygtcktbggnttggytctkgaggttgggggmtggggacyyaggyccggcccacyctccatwcckaa

SEQ ID NO: 216174 - DNA, 868 bp, Homo Sapiens
tgaagtggttagaaaggtttattttgtgcttaggatatttttctaaggcatcacaagttacacatccaaactcttcaatggtacaatattttaaattctaaaggagagggctttaaagaaaacttgtatattacgatactgtaaatctaatggattcacacagcaacagagcctagaaagaaggggacattacagaaattgtctactacgtaatggtcagttgattcattgtatttatgattttcccccttcttttaaggtgaaaactatgtattctagctctttaaggagtaaaaatacactaaaatgttccatcctactgacttttacctgtgaaatcccacacaatattaccagtcaggaaagaacacaggataatatgaagtttgtcttttaaaaaatataaaaatgttattattttaaaacatcaagcattacagactgtaaaatcaattaagaactttctgtatatgaggacaaaaatacatttaagacatatacaagaagatgctttttcctgagtagaatgcaaacttttatattaagcttctttgaattttcaaaatgtaaaataccaaggcttttttcacatcagacaaaaattaggaatgttcaccttcacattccaaaaagaaaaaaaaatcaatcttcagttggaagttcaggaacgaatgatgtaaatatttgaaaataagggccaacacttttatttttacaccagaatggttcaatgttgatgggatctcttagttaaacttccagttgtggaaaccaacaataaatataactggttgtgctgaaaaaccatataaataatggtgtctccacggcatatctattcatttcccaatttctgggaaataataaa

SEQ ID NO: 216175 - DNA, 840 bp, Homo Sapiens
aggtagtacgtgtggtttatttgacttccttcctgctgggcacaggaagctctcacagggctagggtttaagctggcttccacagagggcagtcacgtgcacgtgggcctgaggccagccccaggtcaggtcccgatccccggtcctcaggtgcttccactcaggcttgaggcaggagtctgacggcagcagctcccgagagcccttgccgatgcctggctccatccagagccagcccagcccagggaggctgcatggggccagcgctaggtggctgactcagcagcagccatggggctggagagccttcctgatgccagtggccagggcttgtggcgtggggctctctgcagtgcagcttacaggaaggccctgggcggccagcgcgcgagccgtagtggggccgatggctgcaaacttaatttgatcgatattgtcaccagataactcctgaatgtgcttgagactgtatgtgaggccagagggactaaaaaatgtgatgctggctggaaccccctgctgggaatagtagctgttcaggttcccttggattcctgggtgtgcaactgtctgatacacagttatgctttccatggcaatccctttgtccttgagcgcttttggcaggatttctcttttgaggtttccacaggaaaatagaagaggcagtgctgaggactccctggaacaaatatattcttgcaagcttttctgcatttccacaggtttcctctttttgtatccaggccaatttttacttcactagaggaagcagtagcacttttcaaaccacatacactggacttggcaattccatttttctttcaaagaccctttccc

SEQ ID NO: 216176 - DNA, 833 bp, Homo Sapiens
  misc_feature (9)..(10): n is a, c, g, or t
  misc_feature (27)..(27): n is a, c, g, or t
  misc_feature (33)..(33): n is a, c, g, or t
  misc_feature (36)..(36): n is a, c, g, or t
attttwtwnntaaaatcacagctttanaggcanaangtttttaagccatgaagaaaaaccctcaagaaatgctttagtttgacatggaaccaacaatcttcatgggcaaccttcaaatccagacgcaaaaagatggtcatggagcaaccttgggcttttcatccaggatctgctgacgtatttccttgtgtttctctacgagtttttcttgccgtttactttgcgcttcttctaacctcttgatatactgcaccacttcctggatatatgaccggatcatctctgtcttctcctcttccatctgacttttktctttkgatttagcttctgttatcttctcctgcctctttttatccattttcttctttaattctttcttttctttctcacagatttctttgagcttctttaactgattgttctgacactcttctkckayatckgttawcttttgaataakcagtttaatatgttctbkcttctggtatttttcactataatactgttcttkccgaagattaagcagctgctgctgttgtttgtccattcaagtctattaacttttgggtcatttcagcatccagggcagcgaggkcttgctcaatcgttgatgaaccatgatcagggctgctgggttccgattttttcttactgtcctttttggcggacttttccaaagcggctctccttctcaagtagtcattctgaatttcattatacttkgkagtgtgttctttgataakgtcagttkgtttccttgttktgtctctwaaccatttshttsmtckstcttgtttttktsyttttawttttsasaaattattbctgttgct

SEQ ID NO: 216177 - DNA, 1000 bp, Homo Sapiens
gatgcytccctgtggccctcctggggcaagggtggacagactcagacccccagcatggttagcgctgaccttcattgaggtccctttggmaccagatgtcctgttacagacaccttcctctgtgtaagtctcctcaccttgaggggtctttagtaatgcatctgggctagcatctcaactgcyggtagcatttatctgacttggaaagttggagaagaggcattcctactggagaaaaatgtcagtgttttcctataagccctgtgttagcyattcattatatttgtgcttaaagatgttccttcattcatcaacyaggggaagtccagatgcgggttatcttgaaagaaacaaactgacattctaggcagacagttgtctatgtggtctgagggtcagcagctgttagtctccttcctttggctcttgagacccacacatatcactttagccctaacaagggctcctcccacctccacctgttgccccagttgaaaagcatccattatgagctgaggtcagcctggatctggaattgcagcccacataaacataaaggaggatgtccctggtctgttccatccccacggatggtgttgctgctgggcaacagtgttggcttcttttaagtaccccctttcctcctcacccacctccaaactgactagcactcagagggacttatgataaaggttcagctccaggggtagtacctgagtgtgtgccatgccccttcagaccagctgcttccatcagaattccagggtcacagccccaacagaagcagcagtgcctctgtaggaggggtgctgggctctggccttctcatgcagagaggtccgggacagggtcagtatcgtgggcatgtgtatagcttcccaagttcttttacagtccctgctgggactccctgacttactttggttggttcctagtgctacttgttttacaaactacactttgtagaattgattagawtaccttgtttatttaatgtgag

SEQ ID NO: 216178 - DNA, 597 bp, Homo Sapiens; identical to SEQ ID NO: 50765

SEQ ID NO: 216179 - DNA, 720 bp, Homo Sapiens
gccatggattgtggtgaatctcgtggtggctcttctggttggattatcttggctatttttgtcttataggccaggcatggatcttagtgaagagttaatgttctcctcagaggtggaagaatatcctgataaagagaaagaaatcaaagcctcttcataataccagctcacctttggaggaataatgacccagtatttgtcccatttttgtttttaaatgtatttttataagatgtatacatgtgtatttgtaatagattttttgattatataatactgaaacatctctcaatattatgaaaaatgttaaaattgtgtttgctgtttatgtctaaacattaatttgtctagcattatcatcttaatgacaaagggaataatgaactagaaaccagcaagtgaaagtgtttatttcctattttctcaaaacagttgtatttataactattaccttaaaaagcactggtttagaaaaagccataacttaaatagtgttataaaayatatatcaggtttaaacataaatttagcgaatatggtagaagggaaaamagccttcatttttgacctccccttactgaataaattgaaatatgaagtttgtcttttctgaaactggcttagtgattgagtatcatgtaataattatmataymmttcmgcttgamagatgctctacattatgaccaataaaaagggaatgtatgttttgtttgaaaaa

SEQ ID NO: 216180 - DNA, 463 bp, Homo Sapiens; identical to SEQ ID NO: 55746
  misc_feature (459)..(459): n is a, c, g, or t

SEQ ID NO: 216181 - DNA, 775 bp, Homo Sapiens; identical to SEQ ID NO: 42745
  misc_feature (520)..(520): n is a, c, g, or t

SEQ ID NO: 216182 - DNA, 850 bp, Homo Sapiens
cacaaaaatattttagttacaatttattctccagcccttcactcttcttggaaaagtgcttaaagttctctatgcccctgaagctgtctgtctcctaggaccaattcatactacaggctttacatggaattttcatgaactcctcagattatgtatatcagtctttatcctctcacaccaactttgctgtatctctaattagaaacatttttaaaccttactttaaaaatgcagaatgctttcttattacctctgaaatatggcccaaactctataccctattttttagggcttttcataacaggatccctgctttatacgtctccatctgccactgtctttcctctctgtgttccttgaatgcacaaaaatatctttgcttgattggcgcatgttgtttcctctgctaggagatccccctcaccttgccctgtcttctctggtgagccccattaatacttggaattattctttccaacagttgatgatgttcagggatgtggctgtagatttctctcaggaggagtgggagtgcctggacttgctgtgtttcctctggtcttcaggtctcctcactgctgagggatccaggcgcagctctttaatcgcgagacaatacgggtcagaggtcaggaaattatgtcagcaccaatgcgggcgcccacgagtgcggtggaccgatgtgaaagggccgggacgcagcccgagtcccagttcccgccgtagcgatggccgattttcccagccggggacgctgaaagcgaggactccccgcccgagacccctttggcgtcccatgtccggcgggcgcctgggccaaacagcccaagactggggaaacacacttgcc

SEQ ID NO: 216183 - DNA, 1000 bp, Homo Sapiens
aaaatgcaaattgtttttatttaaagatggtgagaaagtgttttcattaaaatatgttttcaaaaccattttcaggccgggcacggtggctcacctgtaatcccagcactttgggaggccaaggcgggcagatcacctgaggtcaggagttcgagaccagcctgaccaacatggagaaacccccatctctactgaaaatacagaattagccaggcatggtggcacatgcctgtaacccagctactcgggaggctgaggcaggagaatcacttgaacccgggaggcagaggttgcagtgagctgagatggtgccactgtactccagcctgggtgataggatgagactccatctcaggggaaaaaaaaaaatttttttttcactgactaaacctgctgcagctctcttttactacagacttggagattttagtttaatttggtttaattctctgtcctttccctttcactgtttcactccaaaacatgtaagaatggcaatgtttgaacatctgcgtttgggtctactgccaccttagcaagcctcattaaccattttataaaaattgcgttagtattgttgttgttgtttttgagacagggtcttgctctgtcacccaggctggaatacagtggcatgatttcagttcactgcggcctcgacctcccgggctcaagtgatcctcccacctcagcctccagagtggctgggactacaggcagtgtgccaccacatccagctaattttttaaagttttttcatagagacagggactcactatgttgtccaagctggtctcaaactccygggttcaggccatcctcccgcctcgscctcccaaaatgctgggattacaggcatgagcactgtwmccaccaaaawtgttttcttttttaartaaatbcaaaattcykgtgagtggyctttgsargamactggcaagkgttgggaaaccaarctgacaaacatggyccccctttgggcttamrkcgttybggggaa

SEQ ID NO: 216184 - DNA, 1000 bp, Homo Sapiens
ctgakccatgaacaaagagtcaagctaccttttaagcattttgtggggcggtgggagatctgtgcagggggaagcatattacagaagcaagaaacaaagacagttatttaattaagacatgcattacatcatttcttactttccaaggaacaacatgttttacgacttgagattatctgcctagtgaccttgcagctacacagctagagaaacagagtcttcacaatgcctgggaaagggagagataaggctcactagccacagaaaaacaggcagtcaatttttaamggacttcmgctttttttctttctcagggagaattgggttttcttacatacaactgagtttttgcttacacattctttaatttcttttttttttcttttgagacggagtttcgctcttgttgcccaggctagagtgcaaaggtgcgatctcggcccaccgccacctccgcctcccaggttcaagccattctcctgcctcagcctctggagtagctgggactacaggcatgcaccaccacacccggctaattttttgtatttttagtagagacagggtttctccatgctggtcaggctggtcttgaactctggacctcaggtgwtccgcctgccttggcctmccaaattactgggattacaggcgtgagcactgcgcccggcctctttaatttcttttaattccttcataacgccccagggagaggagaatcccagtaatgagtgactggaaataataaactggctctgacaggagcctaggtgtccagatgtaggcagctccaggctgactttgtggttccacaatccagagtgagaaaattccaaggcttcctcctagaccacatccagctagggaaagatatttactaaacaggaatatccagcttaatatggtgrtgaattgctcagtttattcaccycttgttgattcttcatgatatkgsttagggagrgatgsacatacatggsamatcytkgmtccytycatytcc

SEQ ID NO: 216185 - DNA, 1000 bp, Homo Sapiens
tgatttaccggcctactctcgacctgccccccacccccagctcaggggaccttttgtctgaacgccagagctactgaccaggtcggggggccgcgggtggggagtggaagagccggtcctgctgtccgccctcccagccccaggtggaaggctcagttgtcggaaagacaaaagcgatttcttcccactcctgcagggccagaagttcaggctgccccgcctccactgggggatcgcacctgtgaattacctgaggtatgcatttcccagaaccgtgggcgtacccaccttggggggcatgttggttctggggggaccacctctccttgcattcaggggctgtgaagctgagtaattttcggtcacagggcaggcccctgttgaaatttcatttgtcctgctctgggcccaaaggtggtggtggtttgggtcatcagaggactgcctgggacggttcagcgggcacggagcgctgtgctggcctggctggggatggccgcggaggtgcccttttcctggtgctttgtggtggctgcagaagaccagttttgttgagaactgcttttcagcctggaatcagacatcttccagatggtttggaccctgtccatgtgtaggtcattatcacacaaagagaccaataaaaataaaaaaaaaaaaaaaaaaaaagacgaactattggaggtggtggccaatgatgcatttcctgtttgcaggatagttaaaggtgtttaaagggtaaggcttttggtgtaaatgctggatggggtgtgtgtgtgtgtggatatagggacctccctctgtaatgtgtaataggaattaataaatagaataatatgtatggaatttaaaattatattagcataatgattggtttggatgagcacaaaagctgaaggtgtgtgctgaattgaaagatggtatttaaaatttaaaaaagggatgtttattgtaatataaacggggtgataatgggttttaggaatgttgaaaaaaaaaa

SEQ ID NO: 216186 - DNA, 596 bp, Homo Sapiens; identical to SEQ ID NO: 53183
  misc_feature (592)..(592): n is a, c, g, or t

SEQ ID NO: 216187 - DNA, 808 bp, Homo Sapiens
caaaacattttgttttattaataaaagtcttacttaaaaaacaaaatagaaaagagttaggtgtcacattgaataacatgttgatagcctgtgtatggttatgggttctaatttctctacaaaatcaaccagccatgatggagtaaagaaagttagaaagagtaaatatggtcatataattttttgaaacacttccaagtacaaaaagcagcatgctaatttttaagtgcaaagaaagctcataataaaatagacttttaaaattacaaataaaatctgtacatcaaggatatttttaaggctttcccgtgtgcatgtcactatgtagacaatgaagaggaattgccaagagaggaaccatcatgtcaggtgttacaggtctggctcatttcggcttgtaggaccatctcttcttttctcaagggaaaagtgtcaatcaggttgaacagggccacaggcatcaccagggagacatagcgctctttgtccatgccatgcttatccactagcaccatactgaaggagtagagtgggattcgcagcaacagcctgagctgtagcgctagggctggaggcataatctttgctcctatcctgccaatgagagttgtgaacacacccaccagctccaccacggtgaatgtgctcgaagatcaaggccacatctgtgcttgctgaaagattccctagcttgagccggcaaaggggggtttcggcctgcgggctgtgcacacaatgtaggagtttccttttttcataaaaatgattccacactgtatttttccgttttttacatcttattttgacg

SEQ ID NO: 216188 - DNA, 653 bp, Homo Sapiens; identical to SEQ ID NO: 44088

SEQ ID NO: 216189 - DNA, 572 bp, Homo Sapiens
  misc_feature (15)..(15): n is a, c, g, or t
  misc_feature (17)..(17): n is a, c, g, or t
  misc_feature (23)..(24): n is a, c, g, or t
  misc_feature (27)..(27): n is a, c, g, or t
gttcaatgagctggntnatttgnntgnaaaattattttatctaatgtaaaaatacttggtaaagaaaagttcttaatggggctggaagacaaaaagtctgcatttaaaagaaggttaacaaaatcaataatatatgggtaagcataggcacagaagaataaaaaatttaaaaakgttaaaatcaataataaagccactaataaccacaaaaggaaaactatggttctttttactttgtcaaagttctgcatctgttcccggttggtcagccaggattccatgtcctgggcagtctgaatgacaaatgcttcgtaatctgcaaacatctgtgtaaaacggttagcaaagacctctcggagctgtacattgagctggtagtcccttagttctgcctcttcacaatgcagttttaaatccttgtctttttcacccagagaagcagagaggtccattttttccacagccacaccagtacgcttggccagagcctgcaagcgggctatggtttcattgcccttcagtaactcatacatgctgatgttattagtacagacattgccgttctttttgtc

SEQ ID NO: 216190 - DNA, 868 bp, Homo Sapiens
tttaattctatttaaaatgtaaaaactgattaggaaaaaattcccactctacccatccccccaatatctatagaacaggattcagagcagtatttgtcaatgtttgcctaggatgatcaggatgtttgaaccactgggagttttctttaaactgtgtatttctgggtctactccagatctacctaatcagaatctctgagggtggtgtctacaactgatttttaaaaaacgctcccaggaattgtttttatactaaaatttgagagctactggtttaaggtacaaaatatgaccttctgtggtttcactgtgggtctaaaagtatatattaaaattatttgggaagtctagtcaaatgccataatggtctgtaaggtaatctatgattgctgatgtgcttgacagagcattaaatacccttttttcctgccttgaagttatcttttccatcatgtacattaaatgttgatggaaacacatgtaaggagtcccgagttcaagagcaatgtcaacccagtcccagatgcatttcagtggggtttcctcatatccagcaaacatggccgggtttgctaagagtcctcttgcaaccatcacaccatttgtccccagtaatccgccacacattttttgcttcctttaagcttctgatgtctccattagcaattaccaggttttgaccttattttccttaattattttaatggaatccatagcgcaactgtctggttgtcctttcttaagacagttttttccttgggacctgtaattccattgaaacctccctggttggtttcaggctcttttgaccaaaatatctccacagtttctttttaaggggcaatcatggaatccccttcattttaaa

SEQ ID NO: 216191 - DNA, 844 bp, Homo Sapiens
gttcctgtacacggcgagatgtattttgctggtccttttcatcctggtccagttctgcaactagttcttgctttctctgtaataacaatgcaatttctgtttgaactttatatattcttgtgccattttacaatgctgttcaaacactgccatagattctttggagtttgggcacggtgctagaggctgtagttggtgatccagtgtaagataagccattgggatggagttatctgatccattggtatctgtggaatcatcaggggtccatggatgacttcgagttggcttttctgaggttggtcctgaggtagtaatcattctgacactgggactggatgacctactgctcacctgaccaggttctgttccagttacagtcaagtcttggatggatctacgtcttggctgtccgttgcctgatatgacgatctcagggacatccagaatgttgccaaatgaagcagttttacggtggccccgtttaggcttggaataggctgtggttgcggcgatcctagcttctatttcagacatgtcagcactcatcctcttgccctcagaggttgggggcaagctctccacactgctcccacgggaggctcccaagcttaaacgtccagattcactctgttgctttgcctgatttttcaacaattttgattctaagcgcttaatagtatcatttgtggcaggaacttgctccatattagtgtcacttttgttactcgtatttgtagaagcaatgtccatgaatgagcctgtactggtggcagagttgctctgtccttcatctgaatactgacaaggatactgtaatggctcatctgctcctggaaagtac

SEQ ID NO: 216192 - DNA, 861 bp, Homo Sapiens
aaaaatgtggttttcattgttttaaaacaagtctataaaagtagaaatccatacaaaaatacagattactctgacatgttggcaaaatagcttatggctggacttgagtttggaagttctgtatgtttgagggcatccgatgtcagagtccaaccggatcctaaccccagctcttgtcactaatagtaaagtttcaggtattatatcatagcaccgactgagtgataggtgttggaggtagttgagctggaaaaattcctgaaagcagtcattctttagcatgacactatcacttaagtctagatggacaagattggggcatcttctaactaaagtagagagatctgatttctggagattctttctgtagccgctaagattcagctgggtgatggtctctgacacatgcgcaacagccacctgtacatgcttttcagtgaaatcaaaacaccaggagaggttcagctcatccagtctggaacagctgcttagcaaagtctgcagggcaaattcagagaatccagaacacccagaaaggttaagtcgcactaaatttgagttttttgcgagagtattgacaatgggatccgaaagccgcaggccttccaggcttagattctgcaacttggaacactgagacagtatgccgtggagggtggacacttctataactgagttcgataggttcatgtgctgtacacgaaaagggctgaaatgtccacccaatggttgggtccataaaagaacggtgggcagccggaaggcaattacctctttgtgacagcaactcgaccgcccccattccgggtggcaggattttttaccttgtcgaggctcttaatgtgcctgccttaagagact

SEQ ID NO: 216193 - DNA, 584 bp, Homo Sapiens; identical to SEQ ID NO: 52230

SEQ ID NO: 216194 - DNA, 619 bp, Homo Sapiens; identical to SEQ ID NO: 43123

SEQ ID NO: 216195 - DNA, 645 bp, Homo Sapiens; identical to SEQ ID NO: 47440

SEQ ID NO: 216196 - DNA, 604 bp, Homo Sapiens
ctttttttttttttttttttttttagatagagtcttgctctgtcacccggactggagtgcagtggcatgatctcagctcactgcaacctccacctcccaggatcaagtgattctcctgcctcagcctcctaagtacctgggattacaggtgcctgccaccacgcctggctaatttttgtatttttagtagagacgggatttcaccatgttggccaggctagtctcgaacttctgacctcaaatgatccgctaccttggcctcgcaaagtgctgggattacaggcaggagccactgtacccggtgccctattattgcttcttaacgaggcccaaagaaaaattactcataccagtttagttctagctctgccataaattagtaaagtgtgacttgggacaaatcccccacctctttaacaatttttatttttttagacagaatcgcattatattgcctaggctggagtgcagtggctattcataggcatgatcagagcacacgacagcctatagccttgaactcttgggttcaagcaaacctccctcagcttcccaagtagctggaactacatgcatgcatcacatgtccagctctccattattt

SEQ ID NO: 216197 - DNA, 623 bp, Homo Sapiens
cagtaacccgaccgccgctggtcttcgctggacaccatgaatcacactgtccaaaccttcttctctcctgtcaacagtggccagccccccaactatgagatgctcaaggaggagcacgaggtggctgtgctgggggcgccccacaaccctgctcccccgacgtccaccgtgatccacatccgcagcgagacctccgtgcccgaccatgtcgtctggtccctgttcaacaccctcttcatgaacccctgctgcctgggcttcatagcattcgcctactccgtgaagtctagggacaggaagatggttggcgacgtgaccggggcccaggcctatgcctccaccgccaagtgcctgaacatctgggccctgattctgggcatcctcatgaccattctgctcatcgtcatcccagtgctgatcttccaggcctatggatagatcaggaggcatcactgaggccaggagctctgcccatgacctgtatcccacgtactccaacttccattcctcgccctgcccccggagccgagtcctgtatcagccctttatcctcacacgcttttctacaatggcattcaataaagtgcacgtgtttctggtaaaaaaaaaaaaaaaaaaagggc

SEQ ID NO: 216198 - DNA, 618 bp, Homo Sapiens; identical to SEQ ID NO: 53201

SEQ ID NO: 216199 - DNA, 1000 bp, Homo Sapiens
  misc_feature (1)..(2): n is a, c, g, or t
nnttctacattggattagaagaatgacacagggggcagcaacactctcgcagcccagcctccattccctgacactggaggcagggcctatggctggcagagggacggtgttccatgagtgccactcagaagcctcccccggcattctgggcccctggctcttccagagtccacattcaaggcaacctgagcacaggcttgagggagagtggagaaaggccaggaaaggatgcccacactcttgcctgccaggcccaggaccagctctctcctacactggacccaatttccttctgatcacagagctggtctggatcaagacaatgtggagatctggtgtggaggctgtggccaggtgaggcagccgggctccctgttagacccccaggctctcttgagcaccagatgggcactttaccaacaggtttgggtaaaaatgtctacagagagctatgcacacctgggtccccttctggctcctacagtcaaggggcaagtgttctctcgaacattgttcccaaggccagtgtccgagtcagctgcatgtgattgtcggggctgggattggggcaggcaggcgagctgtaccttcgtccacagggcatgcacatccagctctcagaaattcttcctgtcagccaggtggaagcccgggacaagtggactcttggtggctggactggaaggggaccggcggggaccagcctggaccagctgaccagagggctgcacatctctgctctgcagccgggcaagcagaggacatgcagccatagtcctcactccctttctttggttgtttttcaamcytcaagatagttactttctgaggktgactgaccaatcgcmaggtgccagaattgtgaaatgtccagtagcmcagggatkaacacasctgccctccagacacagatggcacccttttwctcctcctgaggcgtmtttgyyttggtkwgaawsgycaaaacctggaagkggggggggrtwagsacaggggaaaa

SEQ ID NO: 216200 - DNA, 1000 bp, Homo Sapiens
  misc_feature (114)..(114): n is a, c, g, or t
ttaaaagcctgccttcaaaacaagaggctgaaacagaaatcattctaaaagttaatgtcctaatgaccagcagaagagggcaacttcagttaggtagagaaaaacttgtgagtngctatggaaactgagaaaaactttcaacttagtagggaagaaaaacatatcatggaagaagttagcctattgttgctaaaatagttttacctgccactgaaatttatgctctaaagggaaaagaagactttatcatcttttttgaggaaagctgctatttatatatttagttcttttgaggatagcaatggcccatgactgtttcactggggagagtttgaaatagtctttaaactcaaataaatggaccaaattaaatttgtcagtatagatttagtaaaataagattgctagccaataattgcagaaagaaaaagtatcatatttgttcacaaagtccaatattttgttcatttaaaacagctttgagtggagctgttacctgtttatgttatttttcttgttgaaatgaacaaaataaaattccctaaaaactgaaataaaatcagagaattgtacacctccttaccagagactataaagcatctagcaaatatggtgaactgggaccaggtcaaaggaggatgttgagcatatcttctgttatctcaaactgagtttagaactccaaaggacctacccaatattttaccttatgcccactcttaggattaaatagaaaagaggccatcctgttggtttcacagcagttacccatgaagaacagctgttccttctaggtgtttgctgtttggtctgctggtctcattcataamattggtgtggggtgaaggaaccatattgtccctcaaaatctttccagctttagagatgtytgagggagaagttagtggctggtgctcacaccggtggrcmattacttttgatacaatgaaaagaagtaatgtatgggttyttggtggkgggaggtttattcaargagctg

SEQ ID NO: 216201 - DNA, 568 bp, Homo Sapiens
ggatgatgatgctgaagctatccttgctgcagacttcgaaattggtcactttttacgtgagcgtataatcccaagatcagtgttatattttactggagaagctattgaagatgatgatgatgattatgatgaagaaggtgaagaagcggatgaggaaggggaagaagaaggagatgaggaaaatgatccagactatgacccaaagaaggatcaaaacccagcagagtgcaagcagcagtgaagcaggatgtatgtggccttgaggataacctgcactggtctaccttctgcttccctggaaaggatgaatttacatcatttgacaagcctattttcaagttatttgttgtttgtttgcttgtttttgtttttgcagctaaaataaaaatttcaaatacaattttagttcttacaagataatgtcttaattttgtaccaattcaggtagaagtagaggcctaccttgaattaagggttatactcagtttttaacacattgttgaagaaaaggtaccagctttggaacgagatgctatactaataagcaagtgtaaaaaaaaaaaaaaaa

SEQ ID NO: 216202 - DNA, 915 bp, Homo Sapiens
  misc_feature (54)..(54): n is a, c, g, or t
  misc_feature (620)..(620): n is a, c, g, or t
  misc_feature (723)..(723): n is a, c, g, or t
  misc_feature (859)..(859): n is a, c, g, or t
  misc_feature (863)..(863): n is a, c, g, or t
  misc_feature (904)..(904): n is a, c, g, or t
atatggtgccgtgacttatgtgaacctaccgtccccaagactaaggaatcaagnagagagaaccaacgttcctaaagtacagtgcaacatatacaaattgactgagtgcagtattagatttcatgggagcagcctctaattagacaacttaagcaacgttgcatcggctgcttcttatcattgcttttccatctagatcagttacagccatttgattccttaattgttttttcaagtcttccaggtatttgttagtttagctactatgtaactttttcagggaatagtttaagctttattcattcatgcaatactaaagagaaataagaatactgcaattttgtgctggctttgaacaattacgaacaataatgaaggacaaatgaatcctgaaggaagatttttaaaaatgttttgtttcttcttacaaatggagatttttttgtaccagctttaccacttttcagccatttattaatatgggaatttaacttactcaagcaatagttgaagggaaggtgcatattatcacggatgcaatttatgttgtgtgccagtctggtcccaaacatcaatttcttaacatgagctccagtttacctaaatgttcactgacacanaggatgagattacacctacagtgactctgagtagtcacatatataagcactgcacatgagatatagatccgtagaattgtcaggagtgcacctctctacttgngaggtacaattgccatatgatttctagctgccatggtggttaggaatgtgatactgcctgtttgcaagtcacagaccttgcctcagaggagctgggagccagtattcattttagagggcataaggcaaaggccagnattnaaaaaaaaaatcatcaaagacagaaatgccctgaccaaatnctaaaacctaa

SEQ ID NO: 216203 - DNA, 821 bp, Homo Sapiens; identical to SEQ ID NO: 46227
  misc_feature (669)..(669): n is a, c, g, or t
  misc_feature (712)..(712): n is a, c, g, or t

SEQ ID NO: 216204 - DNA, 687 bp, Homo Sapiens
cctttatgttttatttattaaaacactcgcaaacctgacctcactcaccaacacacacacacacaaccaggacacatgtgccaggccttatgaaaggctatcaagtactttgaaggacaggaaggaatgaacacacccaggtggacgtttggtttcatttgcaggggttcagggagggttgcaggggttcagggagggctcttgtcccacaaccggggaagggagagggcagagcaaggcaataaatagaaccctgggcccagcctgctttggtacattgtgggtgcatccctgcatgtggccttggcagcatctgctcccggcccttaaccatcagcaggagtcaggagggtggggcccaggcagctggtgcaggcaggccagatgtgcagcccaaggtccctccaaatagccctggagccctgcagggcacgaggtaagaagggggcagatgcagcagaccctagctgtccacgtgtgagggcacagtctttttcctcgtccgaaccttcagggagcgcgaggtgccctcccgtaccggtggctaactcttgaccacacgcaggctctggctgcggattaggggcttatgttggggccggactggcgcccggtggactgtctcagtttgtgaccaacacttatcctcggtgatatctgacctgcagttccctcgttccggatccc

SEQ ID NO: 216205 - DNA, 881 bp, Homo Sapiens
aacaacaatgcagtatttatttttacagctgacctgggcacattgtgaagtaagctataaaaattccaaataattatctctaaagcaaatcctttgttagttacatggctttacatattaattactctggaaagtttttgaactctgtttagtagcagatctcctttcttgatagtttcttggtactgccagttcttgctatcaggtctgttggtttctactatttcattcactttatctattttgcagtgtagtctcccggcagcaataaacctggacagttcctgatcaatgaattccacaccaacaccaaacgcttctgccatatagccaagggttaatgacctatatgattccagcagctgactgtatgcatgaattctcatttctcttacatagtatcgataatgaggggcaaaaagccagtcctttttcatttcctgttccacaaccgctaatgattggaagaaaacagagtaacggcattcatagagtgaaaacagatactgccgaactgctggaagactgtgcaacacttcaagaatctctgctcctttaatgaccttttccctgagatctggtctttctaaggcaatcatactgacatagacagtataagtcacaaatgttttataatccatgagttcataggatgtaaatgttgaaacagtgtcaaggaagagttcagctgcctgtttgaaatcacgaatagccacacaataaagaccctgatacacttttaggcggtttctcctgtcccagtctcctccttcttctattaagcttttggccttttctgtgtttcgggtgatgagatcattatccatataaaaaagcccatccttaggagatagatacaatatccaaccggtgacccaggg

SEQ ID NO: 216206 - DNA, 859 bp, Homo Sapiens
agagacattcaattgaaaatttatatgttcctggtgaaggcagcggttatgcaacaataaagtccaagaccataaagaaaagattaataatctgacagcttaaaaatgaagcatcaagaaagtattttaaaaattgatggaaatgacaaattagttgcataatatgtgacaaagagtgatatatgaaaaggtgctaaatatacatcttataaaccaatactaaaaagatgaacattacaatagaaaatagtcaaagaatatgaacagaaaatttaccattcattcactcaacaaatatttatcgagcacctcttctgtgccagacaagtttacacatgggacacagcagtgaacaagacaaaggacaaaggtccctgccccaaggagcttacattctattggagaggggcaaacaataaacaagtaaattatgaagtattttagacggtgataagtactactggcaaaaaagaaaaagaagggttaagtaaggcgatcaggagtgaggcatggggagctcaggggctggggaggtctcatcaggaaggagacatttgagcaaagctttgaacagattcaggtagttgaccacacagagcaggggaaattgccatggtgcggcggaggggcaggagaaggccaagttggctagaacagaaagagcaagggaccaagtggtgaggaccctggaggccttgaacaggactttggctcttaacctgagaccattgcagagctttaaggagaagagtgaaattttgacttatgtctcaaaaaggatcattttggctaccatcttgagagcagacttttggggtacaaaggtaggagcaaatagaccattttaggaggtcagcaa

SEQ ID NO: 216207 - DNA, 1000 bp, Homo Sapiens
  misc_feature (884)..(884): n is a, c, g, or t
ctgttcctgtgccttgaaatagaaactcagtttctatgtaataccacttctctagtccattcttctttaagtgatgattcttgctttctcttgtagagctaaagttgcagacaagatccagctcatcaataatatgctggacaaagtcaatgagatgattattggtggtggaatggcttttaccttccttaaggtgctcaacaacatggaggtaggaaacaaatgccaagtggatgtgaaatagctctccatgataatagcaggttgtataaatgtaaaaagaaaacagtcttttgacatgagccctgaaaattcccatttttatttattttggcaagtctttcgtctttgcattgttcctttatattgtattgtgtctggttcctgtctgctttgtgaggcagtcttgttcttagtatagatgctgacctccatcattttggctcccctgtgtagattggcacttctctgtttgatgaagagggagccaagattgtcaaagacctaatgtccaaagctgagaagaatggtgtgaagattaccttgcctgttgactttgtcactgctgacaagtttgatgagaatgccaagactggccaagccactgtggcttctggcatacctgctggctggatgggcttggactgtggtcctgaaagcagcaagaagtatgctgaggctgtcactcgggctaagcagattgtgtggaatggtcygtmggggktatttgaatgggaagcttttgcccggggaacmaaagsctctcattggatgaggtggtgaaagccacttctagggggckgcatcaccatcataggtaagcggkcctatacaaagctaataccwatataagctggcagawttttgwtcagrrggaggtggantggagaattyttctatttttctttwttctrggtaaatgtwagarggaaaaaggtrggawttamaargagcccyttggyaaaaaaaatgggggtttwhaacmtcytttdgkgtgggg

SEQ ID NO: 216208 - DNA, 1000 bp, Homo Sapiens
ttcccgggatttcctgttgcaggcagtggcgattttgacagccacataccctgtgggtcacatgccatacggctggttgacggaaatccgtgctgtgtatcctgctttcgacaagaataaccccagcaacaaactggtgagcacgagcaacacagtcacggcagcccacatcaagaagttcaccttcgtctgcatggctctgtcactcacgctctgtttcgtgatgttttggacacccaacgtgtctgagaaaatcttgatagacatcatcggagtggactttgcctttgcagaactctgtgttgttcctttgcggatcttctccttcttcccagttccagtcacagtgagggcgcatctcaccgggtggctgatgacactgaagaaaaccttcgtccttgcccccagctctgtgctgcggatcatcgtcctcatcgccagcctcgtggtcctaccctacctgggggtgcacggtgcgaccctgggcgtgggctccctcctggcgggctttgtgggagaatccaccatggtcgccatcgctgcgtgctatgtctaccggaagcagaaaaagaagatggagaatgagtcggccacggagggggaagactctgccatgacagacatgcctccgacagaggaggtgacagacatcgtggaaatgagagaggagaatgaataaggcacgggacgccatgggcactgcagggacagtcagtcaggatgacacttcggcatcatctcttccctctcccatcgtattttgttcccttttttttgttttgttttggtaatgaaagaggccttgatttaaaggtttcgtgtcaattctctagcatactgggtatgctcacactgacgggggggactagtgaatggtctttactgttgctatgtaaaaamaaacgaaaaaactgacttcataccctgcctcacgaaaacccaaaracamagctgcctcacggttgacgttgtgtcctcctccctggacaatctctcttgg

SEQ ID NO: 216209 - DNA, 924 bp, Homo Sapiens
ttttaaaaactttatttaaatggagactcttagtcaatgattggaaaaccaataacgaaaaatagttcttaggttcttctcctggaaaggcggaggacacaccaaactgcactggccctgtcaggggacacggcaccctcgtgggaccaggctcagccctcggggtggcacgaggtcctgcaggctgcaggaccctcacactccagccccgtctggtgacccaacccgggcccgtggtgcatgctggggaaggccactggccggcccctgggcttcggctcctgaggaggcatggccccacaccctgcccggccataaatatatacagattcctgggcatccagggcaccaggaccgacgcagagctggggtcctgtccctaagcctgtggcacagcgactcttgacatgggagccagggagctgggaccgccgcacccctcccctgcctccctcctggggtcaccaccctcaggcggctgccagctggcctaggacgcggcggaactgctgggtgctgtggcccagctccttgaccctctccaccatgtcctgggccgcggaaggcgatgggtactgcaaggcagcggccttgggggtggccacgatgccgcgcaggagggtcgacaacagtttgctggaaggggtcacctggctgcgcccgtaagagcccttgccctgccgggacaggtggcccccgctgaacacccaccttgtggccgcctggagataaccactctgctgggccccacaaagaaatttgggccgcttgtttgtgtggccccgggggcgcaaaaagggcttcccctgcggctggtacaatgggggttcaggttggccctacacactctttccacggttaaaaaagcaccatcttgcgcgcccccttggggccctacgtccgcccttgtcccgcccctggtcc

SEQ ID NO: 216210 - DNA, 868 bp, Homo Sapiens
  misc_feature (767)..(767): n is a, c, g, or t
  misc_feature (792)..(792): n is a, c, g, or t
gccggactaaaacttaaaggacttattctacttttagaggccgtttaattatggtatgaagtagaaggttcctctagcgagacaactgccagtcataccagcttctgccaacggaccacctcacagggttgttgtgaggagcatatgaaaccaaatcaggaaacagcccatcacagcactgcagcacagaataaaatccatgctggttgagatgtcccattatatttgcacaaatgtggttcatcgctggtcgaagactttcaccttttccccgaagaattttccacgttgaagtgtctgtgaaggtgacaagcatcgcgaggtacagggtgatgagtcgggagtcctgcaggattttaggcttgagctgcttgagaaaatcacagtagtaccacaaaaggttcttgatctgttgaatccaaaggaggttgaggtccttagaacaagccagggacacataccacaccttaggcttattctcagcatccctgcctgctcaggatgctgttacacaccttatcaaaatttctccattaccccccttcgattcctgaattggaccacgcagttttcttggcattccttgaaaatacaaaggcgtactttttttttattgaacttcagcgccccccccgcttttataaaagtgcactactctcttcccctggaattttttttttggaggcggacttccgccagagaaaaacctttgtatttggtccccgggatcacaaaacagccgtccgttttccgtttttctttggcgnaaagaccttctatcatgtaccctgnagggccttctttgaataaaccctttttctttgaaggttccgcccagggttgatcaaattctgcaacatttgccaca

SEQ ID NO: 216211 - DNA, 695 bp, Homo Sapiens; identical to SEQ ID NO: 49346

SEQ ID NO: 216212 - DNA, 1000 bp, Homo Sapiens
taatacttatatatgtacgaaatatagaaaaataaaataggttaacataataaggatataggcaattatttttyttaattttataaaaacttttatttttccttacaaactggggtagttaggagacctgataatagcttttttattttcttggcaccaaagcaacttacttatgtgttccttcttgcattatctgttccagatcatagtcaagttttccaattcgttttactaagctagcaaaattttttataccaaaaagagtaaaatcaaaacaaatgctcctttgtttatagatgaaaatctggagcaaaataacacaacattaaaaaaacaaaactttgcaaacacatcctaaagctacacacattgaagcgtttacagcaatatgctccctgggttcgttctcccttcccccaatcctctaaactgtgcctttgggtctcagacccttgtcccgggggtccctctgaatccacctttcaagaggatggagctgggccactaggctgaggtctggccctgttctcctcatctgccaaagcctcacagtactgcgctggccagtccttggggtcttgattatggaccttggccacaaacttaagaactttcatcttgctggtttccaggttggttcgcgggccccactggaattcgtagtcgacggggtcggtgtggggtatcgccggtattccaggtaacgctgtcgcacaaagtcctcagtaatgagtttctttggatctccgaaaattaaatgcttctttggtggggtagaccctaagcgccgmgaaagtccaggcttcagtttcyttgatggtgttgccttcataaagatgagcctaagacgatmtcaggaggccgtagtggggtgcttggtcaccctcactggcatctcmtcaaaggtcagggtgtgatgagwktagtttgtmttgggtcagttcacagctatacgraragtmtggagggtcggggcgttgagagtsgggaragtctttgt

SEQ ID NO: 216213 - DNA, 1000 bp, Homo Sapiens
ccttttaagggctcacaacaccgaagatttcacatgaaagggtcgtcattgatttgagccagcaggcggtacgtgacaggggctgcatgcaccggcggtcagagagaaacagaacacggcagggagtttcacaaatgttcttctatacaatgtctggaatctatgaataacatcggtttctaagttatgaattgattttcaactactgggtttaggccaggcaggcgcaggcctggtttcgggcctagcgccaggctgcctgcctgtctttggttttacttccttgttgttttttcttaaaacaggtactgagtataaaacactatgagagggtctctcttccctcattgccacaactcattctttgttgaagtatggagaaggctggagctgcagggtcagtgggccctcctgggagctgggggccatccctggtccagccaaggcctgtgactgcagctcaagccacatcccctactttctcccatcccctcctccggaagcctcttccctgatgtcccctccaggcaggcagcctcagccagagagcctggaaatcactggggcggtggagcctggagcctgctgtctggctcagcccgtggactctatgccctcacactccttctccccccctccaagtwcaggcagcgctggggcaggtcccctkagggmtctgggcamctcggccmactgcgtccgcgagtggggctggccctcggctcagcagaagcccacggtaggccatgccctcgctctgcagccaggtgtaggggggtctttcggagcagccggtagcatccactgggcaccctgttcagcagcarccggcaactccamgtggcttcccgaragcgtgwagcagggtgtgagcccaggtgtccgcgcaccactcggcccctgggtgacaacaatggaggcarcagtgtctcggcggcacwtgtgcascaaacgccatgctgtyctgakgctggtytcccgtggccagarcactcatgtc

SEQ ID NO: 216214 - DNA, 580 bp, Homo Sapiens; identical to SEQ ID NO: 55385

SEQ ID NO: 216215 - DNA, 940 bp, Homo Sapiens
  misc_feature (12)..(12): n is a, c, g, or t
ttgttgccaggnctggagtgcagtggcgcgatctcagctaatggcacccttcacctccagggtctaagcaatcttccggcctaaccctccagaatgacgggatcatccgggcggccctaccctggccgagttattctataatattagtagagataggggggcaccatgatggtgacgatgatgtcataccctgacctaacttaagtgactccacctgtctcattcttccttagtggagacattacaggcgtgagccacggtgcccagccatcatgtgcttatttttaaagcgaggtggatgacaccattcccccagagctgtgttcctcgttggcaacaaaacaaaaccaaaaaaccctaggacttgactcattagaagtgttaatcggtttttaccacgctgaaatgaaggtataaagtcagtctgtgctgtcgtgaaattccaaggagatttggaagtaagatcattatttactggtcctttagaatagaccaaaaaaaaaaaaaaaaaagacttaaaaaacgagggctgtcccctgcagactctggcaggaccctgggctgctctgggggacacaggccaggggcagttcaccgacttgattcacagtgattctggtttgcctgtttctccatgtggccacgagtcggggacgtgtccagcagtgggcatgcctacaccttgtagttaagctcagcgttcatctgggtgtacatctcgtagatgacatcgatggtcgccgtgtagttgactaggaagaaggcggatcttctccaggcactccttctccgtaacattctgccccttggagagcgctttcaggaagtcagacttatagggtgctgcgtacagtgctgcctggaagatcttctgcacgatccagccatggtactttcttgaggccatctcgtaggccttggtggcgttgacacggatgag

SEQ ID NO: 216216 - DNA, 956 bp, Homo Sapiens
  misc_feature (767)..(767): n is a, c, g, or t
  misc_feature (828)..(828): n is a, c, g, or t
ttttttttttttagaaaaaaataaaccatttttgggttggcacctgaggtaataagttaagaataagcaccaaaatggcccttcctggcacgcgccggctcacaggttcttcatgcacacctggcagcggctgatgtgtgtgcggatgaggccggccttgagcgtgtcggcggagggcgagccctggaagctctgctcgggaatggtggtcagccagaagctgtacttgttggcgtagtagtggcaggtgccgcggcctccattgcattcgatgaatggtgtggcgcggaagtcctctagacagctgcccggtgacaccagtgattggccaccgccttcgtctcccgccgccgtgtgcatgaggaaggaatatccgatccacaaactccgccacccagctgggcagtgtgggatggagacatcctgactgtggaccgcgatggcgatggccggggcctcacacacagaacagcggctgatgtagggcttgatctcgtcctcggccacgggcatcatgggcagcggcgcagtggtagagagccagtaggacttgtcgttccggctggcatagtagcagacatcaccagggttgcagtacaggaagggcatggtgctgaaccgcgccaggcaggagcccgccagccccaggtccctggttgtgcgccttctcctggccctcgaagtacagcagggctgtatccactcccagagtttgttcatgcccactgggcacatgggcttctggtccgtctggctgtgcttaccangaggtagccgatgctgacgctgcggcctggcatacccggcagcccgggctccctgtacggnctggtgcaccttctttggcaatcggaccctggtggcctatggggccctttatctccccggaagccgggaacagagaaacaccaccttctcctttggggccccagctttcccttgggccccacaaaaac

SEQ ID NO: 216217 - DNA, 893 bp, Homo Sapiens
tttaatagacttcattaagcgtctacaatgtgccaggccctggggacacagagctggagaatgtacagtccctgccctcaaggagctcacagtctggggggacagacatgtaaacacatgagttacaacgcgctgcgtgaagtgtgtggcagaggtataacaaagtgctgtggggcacaacagagcgaccagtgaactcttcctgggcaggggtcagggaagccttcacagatcagtcaataaatacggtgccatgggagtgccttgcacaccacgggcactcacatcttgaatgctggtccactggaggcccttgggttgggcgggagcaaggcctacttctgcttcctcaggacaacttccccacctctgtcctgggaccacctgcccgcctgggcctgcagtgactaaggacgctgctcccactccaggggccagtgacagagagcagctatacagagggcccaccccgcaggatccttgacaggagctgagacagaacaaactgctgcttgtctccctaccctgggggctgtgatattcttcggtacatctttgagctggcctgtgaggccacttcttcttttaacactggtgaggagactccaaaccctctgcctttcgctcgtcttctcatgccgattgggcaccagcccttctcaggctccagagacaagccccacaggggggctcacaaaacaggttgtcgcaagaatcccctcccccctgaccggggttttttgtgcattcaaagtggcttaccagcccaaatgacctgttggatgtttttgttttgtttcaaaaagccggttcgtgaggttcttggagtgggcgttctttccaattgaataaatggctttacttgtagcccaagttcatttgtgggcctgaga

SEQ ID NO: 216218 - DNA, 520 bp, Homo Sapiens
tattaaaactttacttagcagtatgctatcaaaggcatcacgtatacatataaatattaaggaaatgccaaaagcacaaatattaacataggcatgaaatgctatccaatcctagaaagaacatggatgcatgaatgcagaaggcgttcagaaagacttggtaaatatgagccgcattcttccaaccatcatttgttccttcttttgtaacaaaaaggctgggaaccttggttgattgcggagtcagggagttattcacagcattgagctgggttccataattatccacctggaaaccattcggaccatcttaacaaatgttcttgcattcttccagtgcctcaaaatcgctcatattgcccaggcattcaccatacttgaaacgttcacactgttttgtctgatcgttataaaaatacctggtactataacctcgacatattccaggatcttctttcaaatagcataaatctcgcttttcttgttgcaacgctggctttataatcctgcttgccttatc

SEQ ID NO: 216219 - DNA, 1000 bp, Homo Sapiens
ttgtagatctcagtgcctatgagtatctgacacctgtgcctctcttcagtctcttagggaggcttaaatctgtctcaggtgtgctaagagtgccagcccaaggtggtcaaaagtccacaaaactgcagtctttgctgggatagtaagccaagcagtgcctggacagcagagttcttttcttgggcaacagataaccagacaggactctaatcgtgctcttattcaacattcttctgtctctgcctagactggaataaaaagccaatctctctcgtggcacagggaaggagatacaagctcgtttacatgtgatagatctaacaaaggcatctaccgaagtctggtctggatagacggcacagggagctcttaggtcagcgctgctggttggaggacattcctgagtccagctttgcagcctttgtgcaacagtactttcccaggatccacaggaaatactcagagtccacctggacattttacttatattcagtttcaagtgtcagaggggttcaggactgtctggcctggggggcctcctcatgacctcaattcaggattatctactcaaagcattaaacaaaaggaaatacattttcaggatgaaggctgctcttttaagccctgctgaagaaaccatttcaaacaggattggaatagggaaacccggcactcagctcggcgcargggcgkgtgccttcagactagagagcctctcctccggtgcgctgcaagtagggcctcggctcgaggtcaacattctagttgtccagcgctccctctccggcacctcggtgaggctagttgacccgacaggcgcggatcatgagcagctgcaggagaatgaagagcggggacgtaatgaggcsgamcagagctcccgagtctgcycgccagcttctggagcacagatctcgaracgamttkagatcaggacgtagtaccagaaaggsgggaccgcagcgctytctcatctggaragggaggraagatggtgtga

SEQ ID NO: 216220 - DNA, 1000 bp, Homo Sapiens
catccatgatctgttaacacacacaggagcatattccagttgtaaaaaacaaattccttgaaggctcagaacgaacaaaaatcagtctttatggcagaaagcacatccaaagctaggcaatgaagttcagcctgggccacgtgaacctttcaccagccagcctataacctatggagccaggacaggaaagcatgatccttcagctcatgacgccacccaggcttccagacaactgcagaatgaaagagtccctcagaggctccccagcccctgctgccatcataaagcacgggagggattgttttgtccttagcggctctgtcctaaatttgagagcaggagactgagaaggttatgctcattaaatattgtcattgtaacacggaatggaaatcatgatccttgcccatgggcactgagctgaaagaaagaggaacctcacatgaggctttcctagagaccaggatgttgggtgagtgggcgtgcacttctcaagtgggcaaggaagaactgcttttctccagctgacatgctctcaggggtgaagaagtttagcttaaaatacctgatggcgctgcataaactggggatttgggaactgagtttttagctctgtgacacacaacataaaaaacaaaaatccagtctcattagctaaattcggattaaaatctgaaatgtttttatggagttgccaacaggctggaatgtacctgatacagtttaatctgcttttatttctttggctgtcttccaaaccactttcttcctgtaattcttaaagttggctagttctccttcctcagaaaaattacccctaagatccttcctaatagtgagggtgtacttccgaatagaagaktcytcggctgaaatggcmwcycmaggctacagttckgatggtgkyttammcaccatactkgtgtgagtkgaaggwatcccccctgtgcattctaywctggcttkttggkttawaaawcykgagctgcccmgatggaag

SEQ ID NO: 216221 - DNA, 1000 bp, Homo Sapiens
  misc_feature (496)..(496): n is a, c, g, or t
gcaggtgtggcatctgcmgctgggaagagagaggccggggaggtgccgagctcggtgctggtctctttccaaatataaatacgtgtgttagarctggaaaatcctccagcacccaccacccaagcactctccgttttctgccggtgtttggagaggggcggggggcaggggcgccaggcaccggctggctgcggtctactgcatccgctgggtgtgcaccccgcgagcctcctgctgctcattgtagaagagatgacactcggggtccccccggatggtgggggctccctggatcagcttcccggtgttggggttcacacaccagcactccccacgctgcccgttcagagacatcttgcactgtttgaggttgtacaggccatgcttgtcacagttggggatgtgcagggagtagaggtgctccagagggccccgctcatccggaaggcgcatggtggagatccgctccaggacctggtccagttcctgttggcanggagtcctggcagggggtggtcgcagcttcttgggctcctccaggccaaggtgatgcttgccacccttgcccatctgccggtgctgctcagtgaccttctcccggaacacggccagctccttcatacccgacttgaggggcttccggccagcactgcctcccccgcccaacatgttcatggtgctgtccacgtggttctccaccaggcctccttctgagtggkcatcgccattgtctgcaacctgctccgggctggcgccatactcggcgtcccggcgcttctcacaagtgccctcgcccatgamcarcgcctgcmggggcarcycggagcccgggtggggatagcasccacccctggccgcagcgcggggtgtaravccgcaagcttgcctccarccgggggamacagagcacaacgcaaccggstycgsgacractccscatggawtsggscctccgsaattggsaacgggggggggsaaacgggggggcscagcggcaagg

SEQ ID NO: 216222 - DNA, 797 bp, Homo Sapiens
  misc_feature (767)..(767): n is a, c, g, or t
  misc_feature (769)..(769): n is a, c, g, or t
  misc_feature (775)..(777): n is a, c, g, or t
  misc_feature (780)..(792): n is a, c, g, or t
atttgcacaataattcaatccctaataccacatttggggaaattattattggtctttggaagtctccaatggaagatgacaatgaaagaccaactggttgctcgattgaacaagcctggtgcctctacaccccggtgattcatctggcccagttccttacatcagctgtgctaataggattaggctatccagtctgcaatcttatgtcctatactctatattcaaaaattctaggaccaaaacctcagggtgtatacatgggctggttaacagcatctggaagtggagcccggattcttgggcctatgttcatcagccaagtgtatgctcactggggaccacgatgggcattcagcctggtgtgtggaataatagtgctcaccatcaccctcctgggagtggtttacaaaagactcattgctctttctgtaagatatgggaggattcaggaataaactagctaagactgtgatggaaactacttgctgtgtggcacttcctggtctaaagctctgctagacaattgcggtgagccagtctccaagaatcagactacagatattgcagattttgaagaacaagaacatatgttgaataacagagagaattctacatgtcattgtgaatagtaggttatataaaaacatactagatgataatttccttacctcagaaatgaaatattattcttataatacctttttgtggttgcatgaactaatgagtgaatggacaatgatgaataaatgtgaagctgtattccttananaaacannnaannnnnnnnnnnnntaata

SEQ ID NO: 216223 - DNA, 846 bp, Homo Sapiens
tcccaagtatttacttgggttctgacatctcagacagcgtactgctcaggcactgggaggagagacagagaaacagatggtccctgccctcatgaagcttacaatttaaagacaaagacattctctcattgcagcataaccagcaattccaagtggtatgtggaaactgtgtagatgtggttgtgtctgttacaggattcagatgggggctggatgaggaggatctgaatgggccaagagagaggaaagagctgttccatgtaaaagcacagcacagaatgtcacaagatcaggaacactcacagcctgagcagtgagactagttaccagcctctgtgatggataaatggggctgaggtccaaaggctggttgaagcccactgttgaggctaatgactttgacctttatcctttggcagcagagagccaatgaaaggtatttgagatgctgagtggcatcatgaaagtgaattttggaagactaagctggagttatgtagaattgagtgaggaggtattgttaagtattgaacagagcaaataattgagatactgcgactctctaagctgagagtctgtgattctaaaatacaatacttagcagccatgaaaaaaaaagagaagaaacttagggaatgactgcaatgattcatgggaagggaaaggaatgagtttttttatatttttttgatattttaatgctactttttactgaatacttaatctcttcagaaacatttatgattgtgaaccatggatgcctttgtcctgccagcttaccccattttcccctttgcatttgcaacgtaaattttccagtgtatgggggacagttgtatttatatc

SEQ ID NO: 216224 - DNA, 627 bp, Homo Sapiens; identical to SEQ ID NO: 51466

SEQ ID NO: 216225 - DNA, 641 bp, Homo Sapiens; identical to SEQ ID NO: 49994

SEQ ID NO: 216226 - DNA, 856 bp, Homo Sapiens
gaaagtgcttccttggcagatagattgatacagggacaagtgacaagagcccaggaggctgaggaaaamtacctcataaaacgggagthggccaccatcaaacagcagagtgatgaggccagtgctaagctggagcaagctgaaaataccatcaggaagctccagcaccaacaacaatggcataaatgcagttccaactacaacgaagattttgtgctacagctagagaaggaattggtccaagcccgactgagtgaagctgagtctcagtgtgcattaaaaragatgcaggataaagtcttggatatagagaagaggaataactcccttcctgatgagaataatattgcaaggcttcaggaagaactcattgctgtgaaacttagagaagcagaagccattatgggtttgaaagaacttagacagcaagtcaaggatttagaggaacactggcagcgccacttagctcgtactactgggagatggaaagacccacccaagaaaaatgctatgaatgagttacaggatgaactgatgaccattcgacttagagaagctgaaacacaagcagaaataagagaaataaaacaaaggatgatggaaatggaaacacagaaccagatcaatagtaaccatcttcgaagagcagaacaagaggtgattagcctacaggagaaagtgcagtatctttctgcacagaacaaaggactccttactcaattaagtgaagcaaagcgtaaacaagcagagattgaatgcaagaataaggragaagtgatggctgtkagggttcgggaarcagatagcatagctgctgtgggtgaactacgacammmattgctgagcttgaaaccag

SEQ ID NO: 216227 - DNA, 1000 bp, Homo Sapiens
gagtgtagctgccagcgtagaaacccatgaaaaggaggccacaggagattcctgggagcactgggtgtagcaaaacaaagccactctctgcttcagtcgcaccatttgctaattgaaaatcatatcctgaatcatactgagactgatcaactttggtagcttttttgttcagatcttatgacacactactcttctcaccgtgagattttctcagccagtgatagtacattctgaaatgctggcaccaggagacggccacagacacacactgctaaatgtgaagatggaactaaactggaaattaaattatactgacaatattatggcatttttaagatcatggcattttaatttacattagagtggagttgcatcatactcaggggttagcttccaaggtcagtacataggtaaaatgggctattaggatgatccttgaaagccctttagaagggtgccatgttggaaacctgtacatccacaacaagtagcttttcctcctatgttggaaaaaaagactgtttctttgtttgaagaccaagtgaagttgttggtgtttgtttaggggccattttgttaaaaaaaaaaaaaaaaaaarcacmhmhyytttttaaaaaaaaaaarmcmgaaarawgcttgccccgcyagkggcagaggggaacygacaaggggggagggcccacccagcggrkggacagcacccaccgggggtwacmcaagggggkgcatacaattwaggtgggamcscamaggaattcawgttawtttccttacggcbtccktttcactgaccycawtwtattgagtwaatgtaartaaaagtgtttatgatawaacyccactgtammtcatccttkargwggtaaggataaamgcwwtwwacamctatatgtatgggtggtatgggggcmttcattggatcaataasagcagctatttwgggtattcgtttakaagtcgtgggggcaggmwtaaaawcraamtaaaacamacrtgkttt

SEQ ID NO: 216228 - DNA, 792 bp, Homo Sapiens
  misc_feature (7)..(7): n is a, c, g, or t
ttadttnhctctgattatttacagataaagttcacggccatgttgtctataagagtataaacttaagacagttaaacaaagtgacctataaatattaaccagttttcacacatcataatgtttaaaataataacatttgcacagcatctgacaatttacaaaggcttcaacatacatcattttgaataatccaggaagacatttgctttgaaggaacggcctaattttttttcctgtaaactttcaatccataactgtacatcctaaagcattctggcacaaatgaaatggaactgcctcttgtgggtctatttcagaagtctgttgtcagagttcagttcacaggcatcaaccagaagcctagtgaggccgtttgaaattctggcccagattaattttttaaagctgcatttggagctttttaaagtcgagctgtttccaaaggcttaactgaagagtaactgatttcactggaaataaaagtccacatgtgatcccagctggagtgtggtcatatttttcttgcaaacctagaatgtcttggggaacaaacggctgtcacgtgtccccttmcaaaaatgtcttaaacaccggaaaggagggcaggctaaggtgtagcccttcccaccctgggtgccagggttgggggtgctgttagtgaaatatcaaagctgaggkmamkaakatkcksaatkkcascctcagaggaaggagmgtgtgmaggagtaaaggaggaggggaggaaaaagagaaggggaatggaatggatgsatgagtasagaaatgggsaaa

SEQ ID NO: 216229 - DNA, 995 bp, Homo Sapiens; identical to SEQ ID NO: 47212

SEQ ID NO: 216230 - DNA, 811 bp, Homo Sapiens
  misc_feature (746)..(746): n is a, c, g, or t
tgagtctagtttcccatttgcagaatggaaatactaccccggtctaccaacttagaagaattgctttgaggatctgataaggtggtgtggatgatgctgccttgggggctttacagtctggagctcaagggaccccttaagttgggcttacttagtaactccaggggtgggcagaacaggactccaatgagggtttttttctttttcccttttttttcttttcctatctcttaacttttatctttattattttacaatgcccttgtaagatgaaacaagtgatgctgaaatatctttttcttttttaacctttattttagaattggggtacatgtgcaggtttgttacataggtacagtgtgggctgctgaggtttgggagtacgaatgaattagtcaccccagtggtgagcatagtgcccgataagtggttttttcaacccttactcccatccctctccattcttgtgttccccagtgtctgctgttcccatttttatgaccatgtgtactcaatgtttagctcccacttagaagtaagaacatgcccagcactttgggaggccgaggtgggtggatcatgaggtcaagagatcgagaccatcttggctaacaaagtgaaaccctgtctctactaaaaacataaaaaattggccgggtgtgggtgggtgggcaccctgtagtcctagctactccgggaggctgagacaggagaatcgcctgaacggggaggtgggaggttccagngagccgtgattggatccctcactccaacctgggtgcaggacgtggacctcttcttcaagatcata

SEQ ID NO: 216231 - DNA, 902 bp, Homo Sapiens
agaatcctattttatggacactctgtgttaatacaataaatatacaaaacttccaacccactgaaacatgcaacattagagggacacatggagggcatttctgtagaaccatgacagtcaccatgatggcagcgcagtattagttactgacaaaatatacaaacatctctagataaataatccaagtcccaaattacaaatcactgagtaatgactttccggtgttcaaactttagtttgaaataaaattgccataatttaatattacaaaatgataaatgacacggatgactgctgtgtgaagaccattttatgactatgatttcatgactgtgattttagtactaaatatagaacacttaacaaatgccaatcttttgctgagtgaaaatttaacaatttactgagagaaaagtaaatataagaatttaaagttcctttcatacttgatcatactataagcattgccatcatttcaatgcacatatatttttaaaaaacaattttctctctcaaactcatattaaataactggattttaaaacattttccccatccacacaaaaaaagatatgtgggttctaattattctttgctatttaataatgctacctttgaagatttctacataatataaacattccaattctgaagcaaagtatttcagcatttttcaaaagtctctaatatattcttttgtttgcagtgtacagggaaaaaatggaccttgggatataagtttaatgggtgaatatagggtgcaccttgctgaatttttgggggttaaaggtttcgaaatgtatgccaaaattcacaactcaataaaagccccaccggttaaaatagatttctaaataaagactacaggcctctggaaaaaacaaactgggtctaagtttggt

SEQ ID NO: 216232 - DNA, 1000 bp, Homo Sapiens
gaaatttatgcgaagtttgtgtcccagaaaatcagcaaaacccgctggcgaccgctgcctccgggaagtttacagaccgcggagacgttcgctacaggatcttgggacaatgaggaaaattatatttcactgtggtctattggagattttggaaacttggactctgatggagggtttgaaggagaccatcagttattgtgtgatatcagacaccatggtgatgtaatggatttacagttttttgaccaggaaagaattgtcgctgcttcatcaacaggatgtgtaacagttttccttcaccatccaaataaccagactctgtcagtcaaccagcagtggactacagctcactaccacacaggccctggcagtccttcctatagcagtgcaccatgtacaggtgttgtgtgcaacaacccagaaatcgttacagttggagaggatggtcgaataaatctcttcagagctgatcacaaggaagctgtaagaaccatagacaatgcagatagtagtacactccatgctgtaacctttcttcgaactcctgagattcttactgtaaattcaattggacagttgaaaatatgggatttcagacaacaaggaaatgagccttctcagatattgtcactgactggtgaccgagtgccactccactgtgttgatagacatcccaaccaacagcatgttgtagctactggtggccaagatggaatgttgagtatttgggatgttagacaaggtactatgcctgtatctctgctgaaggctcatgaagctgaaatgtgggaagttcactttcacccatccaacccagaacatctttttacctgctctgaagatggatccctctggcactggggatgcttccacagatgctctgaaaagtcgtcactctttcaccaagggaggaagaagcagtacttttttgtctcatagcattagtaaccaagctaatgttcaccagtctgtcattagctcctgggtcagamctgatcct

SEQ ID NO: 216233 - DNA, 945 bp, Homo Sapiens
  misc_feature (7)..(7): n is a, c, g, or t
  misc_feature (21)..(21): n is a, c, g, or t
aggkadnaaggtttactattnattaacaagttatcactattatttacatgtttataaaatggaaataaaaatgacatacacgtttggygccaaaagtggcacatccaaactaatatcagtataaaaataaattttcaagctatgtgtttttaaaataaaggtcattgaaacagtaagggggaaaaaatctgcatctggcatgtgttgaaatgcaatcatcatcacagcaaagcagccctggggcaacaaaaccagtgcctgctggaagaactgtccccacgcgctcttgcaagaacccaagcaaacaaacaaaaaaacaaatacaccagtgatgttcctgagctacagaagtttagggcatccaaactgttgtgaattcctgctaaagaggaggccctgtgggatctgagctgatgaactctcctgagtgctcagctagcgtggcaccaggacctggcactacactctgagaggacgctaagcctacctgtgaaacacaaatcctctgctaacacaaaacagcgcacgagtcctctctgtcaatcgaccaatcccttgcaagtctcctggctgcagataaacagggacaagggctgaggacagacagaagccactgggtttgggagaccctgtgcccatcagacatgccctttggtggtttcggcagagatccccaatgtttcgttcattcgtagagacatgcttgttcacacctggcagcagacctcattggttaacacagctgtggccccagcagggaaagcaaagccagcccagcaaaccctctgtccaccccacatggtgttttggccttcagtggctaactttcctccttgtttcccatagagctgggccaggactgcatgcctgctggaagtggcatgctgggttagtgagcgtgctgagtgagccaactcccactctgcccgctgcagcacagaagga

SEQ ID NO: 216234 - DNA, 929 bp, Homo Sapiens
gaacagcatactacagaaagttttattctgtgatattagagacagaaggttttcatataaatgcaagtttgacaaagtcagcatctttctagctgtctaaggaagagtcacttgtaacacagccagccaggaggctgctttgttttttattataaagaacactaacacaaatgcagcatgattgctgtaaaataaatgtgaaatttgtacaaaagtcccagtccttccgcagttctaggtttacagtcaggctcaaccttacttgccccgctcctgcatgaaaacaagtgcgttttatacagcctctgccacccagtggcatagtttaaggctctatattatatttaaaattaaggtttttttcctatcatacacatcaatttggaacctgctggtgactcttctaccacagagggtaaataaaaagaccagtttttaaagtaagaggattcagctcatcttataaaagtataatagtttcggccagacgtccattaacatctgtttaaattagatacagacacaatgccaaatattagaatcataaatgtaattttggagataatgtttaccttgagtaggaagacacttggaccatattaaatttgaaagtcttttgttccagaccaaaatggggtaggctaattccctgtcatccaagcaactaaaaggttaaaaccttataactttaaataaaaaaaggtatttttttttcccctataaaagacaggcagttatgagtttaatacataaaaaattaagtttgaacatcccttgtttcaaaacaaccacaaaaagggaaccttttaaaatagccttgcccaatcctctacttgggaaaggggattttttccacaaattccgtgggggacctggattaatatcccacaggccccgaggcaaggaagtttatatctgggaacctgccc

SEQ ID NO: 216235 - DNA, 839 bp, Homo Sapiens
tatgaagacttctattaatttacagtgtattacagattatatcataataataagcctttcatctttaggctatatgatacaaaaacctacttggcccattacttcttgagtttcttttgggcagctttcttcttgaccatctgtaatcgcttcatagcattgagctgtgattcttgtgaagttgggcctttaagggatgctgagggagagctgctggattctgaagtagttttgctggtagtacttccactaggtcctgatgttccactatttccattcccacttagttggctgctgcttcctggaactaaactacttggactaggaagacctactttgctgacattgtcacaactaactgagcgactaaggccagttttacccaaggttagaggtggaggtggttttaaaggtacagtgggcgtagtgctgttattggaacctattttggaacctattccacctttggatgatgttgccagaccagtcaaacccacaggtttctggttagctgacgaagtagcaggtttcccagtattgttttgtgttgttgaactcaattttgctgtcgaaggaccagtagaggaagttttggctgcaaaagctgcccattcagttaagccactagttactgacgaggaaacgctggcactagaagaattccctgaaataaccgcgggatgccttgacttctgcccttttaaacgcttataacgttgtacccttgctcacattaaactcctggttcttgaacccatggtatctttgccggctggagttgccataccaacctgccggtgtctgatattttgtcctggtttttctggatcttttgaacc

SEQ ID NO: 216236 - DNA, 1000 bp, Homo Sapiens
  misc_feature (146)..(146): n is a, c, g, or t
gataggaaagaaaagatggccattatcccaactcctgttcaggaatctgaacaatgaaagttatttaaactcatccagctcttctcattccccttctctcaatcagctggtgttcaaatatggaatctgaggccgagcgcagtggncacacgcctgtaatcccagcactttgggaggccgaggcgggcagatcacgaggtcaagagatagagatcatcctcgccgatacggtgaaaccccatctctactaaaaatacaaaaattggccgggtgtggtggtaggaacctgtagtcccagctactcaggaggctgaggcaggagaattgctttttgacatcctgacacatgtataattgccgggaggcagagttgcagactacgtttcacacacacacacaaaaaaaatggaatctgagctggtggggccagctggatttgggaacacacagacacactgtttaaaataacatccagacatcattgcaaaaaatgggaggaatgggctgtgcttccgaatgatagtttactttttcctgttttatgaatgcttacaaatttagaggataccagaattgcacaaccgccatcatgacagagcatctgctcagtgtaaaaactttgtttaggaaaaaaaaaaaaaaaatccaatggatatatgggragagargtgccaggctggatggtgctgagacagaatgaccccttgggctcytttattttgttcttttyaacaggaccccacagatatttgcggtatgtcatgaggactggggatgtctctatttttaaatcaggtatttagtcaagctgcttttaatattaagactgtaacaaattgatttttgttccctgtatctttcctcagaggsagaaagtgaatgtgataaactggcagattttattytcatacgagaggycacacaggattctttctsmtgggggacamtggctcttggttcaacamaytgagcyctasmccatwagcwccacmgctccycg

SEQ ID NO: 216237 - DNA, 1000 bp, Homo Sapiens
tctgaaatattactgtgtttagaagtagttgttcttaaatgggtgctatgctaatgaaccaatgagacaaaatgagatagccgcaattgttagagtagccccagtcattaaacttaaatgtgtttggacctggagaatcattttctgtaacatgattccagatgagttcactagaactaaaaagatacatacaatgtaaagtgcatatacctaacgtcatagcctttttgcttcaaacccagatagctctgctatgtttattgcagcgtcacatttctctttgtatgtgacctgagctgaataagccatgcatgcattcagttttaggaattgttatctttcatatcacatgaacaacaaactaaaaatcttaacatgataattcaacatgcaactactaatactttacaaataatgatcaaaccaactacttacctaaatatttaggaaatgaatttaacaatgcaagattaatcaccaatgcaagctatcctgtcaggtggataaagtaagaaatcatgtctttttaatctcctgctctcatttaatagctcttccaatgtgcttaagttatttacgtttattaaacgacgagacaacctttcaaaaatgcagagatcaccgtgctgaataacctcaggcttaagtytttttaaaaggtatctttcaatttttctagaatttagctaaacaaaatcccacaatgtgccatttcataatttttaactggcatacaaatgcaaaaatggaatgtaaaaaaaaaaaatgagtgtaaccaattaaatgaattaaaaccaatgcyaaaacaaaaaaatgcattamacagtctagtacaagcatgchttttaascctgtywcycygawaaawggmmtctartcmrtagactttcttcaagtggrkacagttaamrktttwwaaattttctgttwcarratcccgkggaccctgktmcttgtgrgccccmwgatgstgtycctgggaggggggttagacccttgc

SEQ ID NO: 216238 - DNA, 653 bp, Homo Sapiens
  misc_feature (609)..(609): n is a, c, g, or t
gtggggcgacaatcgttctgagttaacggaagctaccgcggcccatagcgctcacagccgtaaagacttaagtcgttgaccgaaagcggctttttcacttacctgggctttttttttttttttttttttttaaagcctttatcggtatgaaaggttgaatgctctaggtttgagcactgctttctcggcttgctcttctggtgcagtataggcacacctagagggccacgtcagtctttgcgatcaccaaatctggttctgagaaataggcactggcaatttacacatgccttgctgtgtaatctcactatatttgctcaggcaaagtgggagaagcagccttaggttttcattctagagatgccggctttcccacctgatcggcttagagttcacgattgactgttttgggcttcatttcaccctctacataacaagcgggtggactagatgccttagcaagggtccgtgttgtgtggtgtctccagccacgcactcagctcaatcttagcacagttaaaaaatgcctttctagcaagttatctgcccagtgcctgaaaagtatcatttcttgtgttcaataaaaagcctcctaatttaatcaagaanaaaaaaaaaaaaaaaaaaaaaaaaaaaaaaaaaaaaaaaaaaag

SEQ ID NO: 216239 - DNA, 896 bp, Homo Sapiens
  misc_feature (10)..(10): n is a, c, g, or t
  misc_feature (17)..(17): n is a, c, g, or t
  misc_feature (21)..(21): n is a, c, g, or t
tttattggtnaatcctntatntaacttacttgcaatttaaattacaaaattcatatacaaagtaagcaaaaaggcacacataagaaatccaccttgaccacagaaatgtgaaaacaccagccctaatgaccaagacaatgtttcaaagacaacaaacaccaagaaaagttgagattctacaataaatcatattaaacgcaagcactatgatgcacagacgtgagcactgaatatttactaaagcataaaacttaggaaaaatcattttacggggaatctattcatattccaaacagcattttaaaaaacattaaacttagcttagttttaaaaacaaaattcagacccaaacaatcaagaaccagaaaatgggtttcttaccttttgtttccagtaggatgtgggctgaacagcaaggtgggttattcaatctgatgttatgaaaagtaattgcttcttaaagagacttaagtttttccttggttagaaaataattataggctccctaaaatattctaaggggacataaatagggagaagagggggaaattccaagacagcttttgtagtttcaaaagggtgtaactttcttttaataattgccaatacggatagagacctaaaggtccattttctgagacttataataggagcagtccatacttcccatcacagccttttaactgtctggtcatcttaactacaaaaacctaagccccctttacctaagttaaacatttaaatccttttttaaactttaaaatttcagccttgtataaacaaggaactaactgtcctaattttcaattgggaaggttaagaattacctataacctttgtaagaagaagacaattttttcaacttttaaacaattcaaactttggagtgaaaggcc

SEQ ID NO: 216240 - DNA, 914 bp, Homo Sapiens
ttgtaacccaaggccgtttatttatcaatgatgtcagtactcaaagttgtccagttaaaatctacttcctcttgaaaaacaaaaatacactgaaggaagatgcaaagagctaaaagtggtatcatgattccacagcagtgattgtaagacagtgagccacagggaaatgggaaaacgtgaaaagaaacaagtatcaggaccaaattagagaagatatgagtagggccatcactagaggtgaaaatggagaaacctaagaaaaccagtgttggcatgaattatgcaagtggaaaatacatctgtagagggacgagatagaaggacctagatctaactccaagtgcttgattggagaagagagggagaaagagaatttatagaattaactgtatagaagcctaaaaaataagattatcagcctagtcatgtaaagtctagaagttcctttatttgctcatcacctttcctttttctataagactattaagcagaaggtcagtaacagaaaatttaccctttcctctcctctcttggtttaaattttataaggaatctgaagaggctatggatcagttggcattacagtgggaagagcttattgaagcaaggttgacaataggtcttgtcattctgctccctgaaaatgcccttcgacaactgtgtcaggcagaaagcacacacaaagtgctcaggatggaacttgtaccccatggcactgatacaacggccagtgatgggctgcccacacccatgtcagagcgtttcccggcgttgatggtaatggagctcacagaatggacgttcatccagttcaaagaaaggagccagtagaaaaactgtggaagcagttccccacatacaaagcactctgtgtgccaaacagagttccatgttttgaaaggtagtcttcccac

SEQ ID NO: 216241 - DNA, 916 bp, Homo Sapiens
  misc_feature (6)..(6): n is a, c, g, or t
ctaagnactctagcttatttcctgaatggtgtattacattaacaagtatcacatatttaagcatactggtggtctactctcctcaaattcagttggaggcatataaacatgcagaaaagcccccagccctactttcctagcatgcagcacccacatagagcaggtatatttacaaggttaccatgcaagagtgtttggcttgtcttccatcaccctgcttttcctctatcatctccttccttctatcttttatccagtgaaaatgaaaacatctccactaagaggacttcctagtatagaaatggcaagtatgtactatctaccaatttgctactagcaccaccattacctatttacatgccctttgcatttgtggccaactgatctacagcattgtgccttagtgtattcaagacacttggaattggcagttgagatgattatttgccatccccaacctagagatgatcatttactgagtaccttctatatgggaggagagttaaagtcagagggccacagccggcagtgtgactatctcagaggagatgctgagatcagcaaagtcattctgagtcctaaatcgggttctgaggtccttctcccaggtgtttagaatgtccctcaggcctgggaacaaactctttgtgacactaaaagaatagagcaggattgggggttgacctagcaaccatgagatccgggcagcgaatactcgtagcggagtcagagctaagcagttgtcatctccctggttcaggtgaaaggtatagggaacaggatagcccaggaggatctcaaatacagttcacagtattccagtctgaggaatggcgcctgctgtaagaaactgctagaagtaagcccctctgtagcccctgcaaagtggtatgatctcaaccaacgaggccctcaa

SEQ ID NO: 216242 - DNA, 1000 bp, Homo Sapiens
  misc_feature (991)..(991): n is a, c, g, or t
tggatggtgcatgatctggtccttaaagtatgcagatcgcctgggaggcccagcctgatcgctggtgccagactgggattggggctgggtggaaactgctcttgggtccccctggagcacataggtctggaccagagtggggaggccacaggtctctgagctgttatgggactcccagggcaccggcttcttttcatcctcctccagcactgtgagcttggtgatgggtggcgtgccaaggccgggcagctggaaggcatcctcctccatgattgtgggcacccaggagcccaggctgctgtgagctgggtctgggacacttggccagaggggattcttcctgttggkgctgcaacagagccaggcagttccacagaggcaggtgagcaacagcaggtggccgaacaggcccaggatgatgtgtagctccgacccctctggggtcaaggtcatcagggtgaggactgtactgttggtggccccagcctggctggcagccatgaggtggatgtgatacagactggcgggctccaggccatggaggacaaagccacgggaggaggcattcaggatggcggagaaggactggttctgagcgttggtccagaagatggtgtagtgggtaagggggctcttccccagctcagggggctcaggcacccactccagctgtgcccaggtcttgccaatgtgctttagatgcagctctggggcatgggagggagccatttcttgagagtaggcatagacatgctgggagggtcccatggtgtcctggtacaagggagtcacgatgatctcatagagctgaaagggcctgatgttctccttcagcagaaaccccgtggctctcccattctgttccatcctccaggtcttgttgctattgctcgcgctggggggggccargccccactcmatcacatagccctgargccatggattkggggggctccarccywaccagaggstgtgagggtctcgggcatgngatggatct

SEQ ID NO: 216243 - DNA, 871 bp, Homo Sapiens
gacgaagattctggctgaactttccaagggamgggamgcwtggaatmctggcwggtacgaggcctcccacactgtcaaatgtcaactccaccagcactgagacaatgagtagatgagaatgttgtttktkggtaggtggtaggtaaaggagckgttkgkagaggtggggaaagagggaaggagagaagggaaggagggaagagaaagaaggaagaaaaggaaagcatggcccggctagagacaaagccagaggtgatcaggtcagcagcaggagaggctcagaagggagcctctcgggaagtgcaggcagccatgagggctcgtttcagctgctcataggtgacgaacatcaccacgttccaggaacccaagcggagaaaggagggcatgaaccctttgtagaaggctcggggcccctccttctggagcatggtaagggcacagtggccagcgctactgtactggcccagggcagagttcatgtatctcgtcttgaccacgtctacaggggaggcgatgacagtggtgcagaagcctgccccaaaggcagaagtgaagtggcaagggaggtcatctgtcatgaggttggctttcaggagggcatccttgatgaggtcataggtcaccagctcagcacagttgacaatggcattacgagcaacattgggagaggtccctttccagaggccccggaacccttcctctcgggcaatggtcttgtaggcattgacggtgctttggtatctccgaccacctccagcccgggcctgagcttggaatcggacctttaccacatccgtgggctgggccacagccacagccagggcacctgtggtcttgcctgctaggaggcggctcccaatgctggcat

SEQ ID NO: 216244 - DNA, 833 bp, Homo Sapiens; identical to SEQ ID NO: 46330

SEQ ID NO: 216245 - DNA, 728 bp, Homo Sapiens; identical to SEQ ID NO: 43903
  misc_feature (18)..(18): n is a, c, g, or t

SEQ ID NO: 216246 - DNA, 1000 bp, Homo Sapiens
aatccattatactcttttagtcatattaaaatatacaattaaattgctgttgactatagtctccctgttgtgctatcaaataccaggtcttattcattctttttaaaaatttccaacttttattaagttccagggtacatgtgcaggatgtgcaggtttgttacataggtaaacatgtaccatggtgctttgctgcacagatcatctcatcacccaggtatgaagcccagcatccattagctattcttcctgatgctctctctctgccgactccctgccctcaacaggccctagtgtgttttgttccccatcatgtgtccatgtgttctcatcatttagctcccagaaaattttcaacatagacaaaagtggagagaaaagtataatgaaactccatgtattcattacccaatctaaaaddattataaacatatggccaatctagttttatttattatctcttcattccccactttcaacttcccagaactaattttaaacaatttctaaagatgatatgattctattcataaacactagttattattattatttaacataggggatattcatatatatgacaggtacaaagtctatratatttraagctcttttatgttcccatattaartgtgaatgtttgtttaaacgcatggctttccttggttcatcaaatcaggtaataaattaaccaggcaggttcacattcaatcagatagtattccgaattgctcctggcatcttcaaaagatgaggattgttcggatgctttttccttggttcattaggtcaaatgcctcactgattttgtcaaaaggcagggtatgggtcacagtgcatccagattgaatttcttattcttatagtcagtgacagctttgggatagaatctacacttttccamcaccaaagaatgttccatttatagtacggccgattattagctctctgggaaaacaagtsaatcctttgctacmgcagctactcaatgaaakacatg

SEQ ID NO: 216247 - DNA, 628 bp, Homo Sapiens; identical to SEQ ID NO: 51714

SEQ ID NO: 216248 - DNA, 656 bp, Homo Sapiens; identical to SEQ ID NO: 41384

SEQ ID NO: 216249 - DNA, 956 bp, Homo Sapiens
gaattcccgggatggcgaggaaagccgaagagatgaggcggcagcagaagctaaagcaggccaaactggtggagcagtacagagaacagagctggatgactatggccaatttggagaaagagctccaggagatggaggcacggtacgagaaggagtttggagatggatcggatgaaaatgaaatggaagaacatgaactcaaagatgaggaggatggtaaagacagtgatgaggccgaggacgctgagctctatgatgacctttactgcccagcatgtgacaaatcgttcaagacagaaaaggccatgaagaatcacgagaagtcaaagaagcatcgggaaatggtggccttgctaaaacaacagckgggggrggaagaagaaaatttttcaagacctcaaattgatgaaaatccattagatgacaattctgaggaagaaatggaagatgcaccaaaacaaaagctttctaaaaaacagaagaaaaagaaacagaaaccagcacagaattatgatgacaatttcaatgtaaatggacctggagaaggagtaaaggttgatccagaagatactaacttaaatcaagacagtgccaaagaattggaagatagtccccaggaaaatgtcagtgtcacagagatcattaaaccatgtgatgatccaaaaagtgaagctaaaagtgttcctaaacccaaaggaaagaaaaccaaagatatgaaaaaacctgtcagagtacctgctgaaccacaaacaatgagtgttcttatcagctgtacaacctgccatagtgaatttccatctcggaataaactttttgaccatctwaaaggccacaggtcatgcaagagcaccttcatcatcgtctttaaacagcgcaacaagtagtcmaagcmagamagagaaacgtaaaaacaratagaratctgcctgtgcttttgtttgtctgtctctagattt

SEQ ID NO: 216250 - DNA, 696 bp, Homo Sapiens
  misc_feature (50)..(50): n is a, c, g, or t
  misc_feature (593)..(598): n is a, c, g, or t
  misc_feature (601)..(602): n is a, c, g, or t
  misc_feature (606)..(607): n is a, c, g, or t
  misc_feature (609)..(682): n is a, c, g, or t
ccatgaccaacccccccagcaagcacctcctccccaaagaaagcacgggngctcgacggggcacgcccctgaatgggaggtcacacatggtgcatacaatggaataggattaatccgtgaaaaggaagaaattctgacacatgctccggcgtggaggaaccttgaggacgacgctgagtgaaagaagccagacacgaaaggacagatacggcaagactcgacttatgtgaggtccctagaggagtcggattcatagagactgaaaggatggcgggcaccaggggcggtggagaggggaaatggggagttactgtttaatggggacagagtttcagttttacaagatgaaaagggtcctggagctggatgggggtgacggccgcacaacagcatgaatggactgaacgccactgaaaactgaactcttgaaaatggttaaactggcaaattttgttatgcatattttgccacaaaaagcaaacaactcttctccccaaaaatatctggggtgtacttacactaaatatgtagggcatatttactctcaacatttatttccttatttgaaattaaagtatttgggacacactgcnnnnnnaannaaannannnnnnnnnnnnnnnnnnnnnnnnnnnnnnnnnnnnnnnnnnnnnnnnnnnnnnnnnnnnnnnnnnnnnnnnnnaaaaaagggggggg

SEQ ID NO: 216251 - DNA, 903 bp, Homo Sapiens
ggagtggctgagaatttaatactggtaaacactataaattgtaaatgtaagttgtaaatgaccttgtcactggagaggggagaaggaactggagtcagacgtcccagcagaaacagcagcggcaacatgcggtaggcacacctggagagcaacaggcactttggtaagtggttcatgcacatggtcttattttagtctcggggcagccctaagaggtaggtatctggtgtcaccttacacatgacgagacaaaccagagaggtcagcacagcagaagctcatgcagcgaccaagcagcagagcctggattcaaacccgagccctgctgtgtgcaagaacccctgggactcagctgttcctgctcacagcaggctgagcaccagagccacctggagggcccataataggcaccactgtgcccaggcacgaggcagccaagtggcacatgccacccggggaagacaacttggtggcagggagagcaggtgggcggagccaagaagccaggccaaggcgctcagcacaatccctgaggggaactcaccatacccgggtgcagccctcagactcccaccagccttaattagtgggttttgatggtgacatgggagagggcctgcccactcccaggtacagaataactgaggcacagtcactaagcctggcccattgtaagcctgcctgtcggcttgtgaaagaggacatccctgcaaaccctggttaattgttcaccccactttcaggagctccccatcagggtgggtaagaacctcgtatcctgtgcaagatgccccttaacgaactggtctgtcattctgactccatagtcacgggttcgcaacaagcgcttgtgaaacacagttcactctcctttgggggcccttagtgtttaggaacccacac

SEQ ID NO: 216252 - DNA, 994 bp, Homo Sapiens
  misc_feature (10)..(10): n is a, c, g, or t
  misc_feature (15)..(16): n is a, c, g, or t
  misc_feature (43)..(43): n is a, c, g, or t
atttatcwdnaattnnagcaaaaaaattgacagcagtccctcntggsaagggagcagggtggggagtgcacatgtacacacgcactcacgcagaggagtagagatgcgtgatttgaatctcactgggggcgtccccccctttccctccaggtggaaagaaacgcttgggaaatttatttacaaaaatccaggccccagcacgggggaggtgcccaatcccatctccctactgcctccaccactccaatcttcaattttcttaaaaaaaaaaaaaaaaagaggtaacgactgcatagactatagctataaatccatgaagtggggcactgcttggaaaaagatgtggaaacctcaatgcaccgattaagaaatttcaaaggtaaggttctacacattcaggtgggagaacaactaggctcgggsggggcyttgtgtcgaagwcggwggtagtgacacggwytttgtcatcatcctaayaccaggttgaaggtayagaaatttcacagcaaggcaggatyacatttagctgccccctaaagtagtggggcaaggtggggcggggtagaggggggagctcgagaagtttccgctggcagacatgctgtcttagcggatcttttcacatgggcaagggaaggcttttagttcgaggattgttcggctcaggcgctcactactgtcgcccctcccccacctaatccgagcagcaagacattgtcgccgaggtgtgttttcttttaaatcaaagtcttggcctcggcgccaacggtgttcactcgccgtgcatcagacacttcccttcaccccctttccaggcccggtccctgttccacagcgagagtyagataragggtcaggaggtycggaatggagtscgggcamagcggtggggscagcctggcamagtcarttttcacsgsggaaraaacgagtagaaawaaaawaaaataaataaatatttcccyccccgcccaaagggccggytgaggtacag

SEQ ID NO: 216253 - DNA, 1000 bp, Homo Sapiens
tgcaaggtcaccaggcctcaggtccagggggtccgaagcgccgcagagctgctcctggtcttccaggtccttccgcaccttcttgcgcatgtagaagatggggcagtcccggctggtgcagatgacgtcctcgtgcaggctgccctggcagcgctggcactgcgtccagaggcgcgagaagcgctcctccagggcattcagatgggatacctccttctgatacagctcagactcccggggctggcagaactcacacacggctccctggtggctgagcactgtgcggcagccaatgcagcagttgcggcgtttggcgaaggccaggaggccgcccaccttgcccgtgagcaccgtcttgcagcgcgtgtggtccccccgcagtagcacagcctcggcacggccctcgcccaggatgggctcgaagatgcgcaggaggggcttggccagctgctgctccaggtagtactgcgtgtcaatgggcaggctgtgctccagcacgaacagcgggtcctccgacttcatgtaggcggccacacccttggcggcactgatgatcacgtaggggacgcggtcgcccaggctgggcgcactcccggggtcccgcttcctcatcctctcggccagctccacgtgggcctgcttgccggcatagtcggaggccgcgcgggtcagctccttggtgatgaccagctgggagatatcgatgcggttgcacagcaggtccgagatgacgtcctgtgcgtgaccaccgcgccctcagggtctcggtcgatgagcaggcggcgagtgaggcagtkaccaggttggccacgagggggcagttgtccctgcgcacgggctccaggcacttgcagttcatgcggtcgtgggsgtcgggccgggaagaraagagcaggcgcgsgtrsctttytttgctgataacaggtatggggartagacctctcaaatyccaccggrtgggggrcgggaaatgactkaaaccaattcgcggctyccgscc

SEQ ID NO: 216254 - DNA, 792 bp, Homo Sapiens
atgtttagtcttatgtttattttcacagggaaggggaaatatggttttcttttattatcagtattactaaactcgaaagaaccgaagtggaaaatccggacggttgtctccaaatgtatcttgaaatagacactgagaaccgatattgttgctccgttgtacgcctcagtttttttttaagttatttagcttttttttttaaaattttgattgtatgtgtattctacctaatataattcttccaaagccaatccaatattttaaagctaaaattaaatttttgtctgtttttccttttgtatttaaaacatttttccttctttttttaaaaatttttcatttcctgtgtttctcctccttgtcgccagttttactacctgggccttccccagacgtgtgcctgttagtggtggtgttgttcaagaacatcttgtccatgcctttgagcgcctcggtgagatagttctgcagggccgtgagcgcggtgcaaatggccggggcgccgaagccgtgcgtgatgaggctgaagtgcgtgaggcagctctggatccccggcttcaggatggggctgggtcggctgttccctatcggtgtccggtcctgcgccagaagatccggaaatttctctacaaagtttgcttgctggccaacagtaatatttttttagggagtgcaggtcacttgggctctcggttgctgcctggttcaaattacttagaaacggcttttggcgggaaaacttctgttttgcatatgttccccacaaattccctagttaaagcgaaacaggtt

SEQ ID NO: 216255 - DNA, 1000 bp, Homo Sapiens
ttgcaaggaaaacaagaatccaaaaccagtgactgttctgtgagtgattggtgtctgtgccgtttgttgtcaagtccagggtccaggaagggtcttttcagtcaaggtcagtggaggcccaacagccacagccacagatggatccatcactgcagtgaaggaggagcagggcctagatggtggaggagcggggcaagctggtgggcactcctggccttgcctcactgtccagctcgagacactatctccttagcatcggcctcagctgctgttgtcttcacagccggccataccaccttcccgcaggctggtagggtccactgtccagccccagggctagttgctggtccaccaggagagaaggcccaggcctggctcactgatggatcccacaagcgtgtacggagcctccttctttggcagctcctcactggaagtggtggcatctgctgagctgggccctgtgggggacgtgtcaacaaagctctcgtccaccacccggaagcggatctcctcgccggtgtccatgtagaggtcgtgtgctccttcctccgtctcgtactcccacacccacacctgctccgcttcgtcgaacttggctggctgctgcagtgactctggggggatgagaatgtcatcgaagaagcctagagagacgtgcactccttctgggctgcagcctttgatcttcccaatgagaatctcatctaggaatggatgaaacaccacgcagcgaaaatggacttttggtgtgtgatgcgcatccccagggaatacataggcatcctccagtttggtgatatmaacagacaaatgcagagtcccacgttgtacacgaccttgttggcmacttcttgtcmactcccggcaawggagtbgttgasttyctctcaactgcbaagggggrtcgggcggtgtcacatttcamcaggtsgacatccggtctgtgtgggggtctggacavgaggktmkwtmgmcmarggcgggggagggaramtcc

SEQ ID NO: 216256 - DNA, 1000 bp, Homo Sapiens
taggtccacaaagaaccatttactcagatagtctaactgtaaacaaataaataagctgcctaaggaaacctcagcaatttaaaatcatttatataatttatagctaaaattttttaaagttgtatttcataatagagcttactcttatgttaaagaatggcacaaaattaagctaaccagcttgaattacattttctttacttccagaattgtcctggaaaaagcagtaaatycgacctctcctcagctacttgctcttcatagaaactggcctcagtcaaatgcacaaaggctcttcctccyggmaaccagtactgtgagcctcaccacccagggcttttagccagcactcacagtcagtctcctacttcagttggcacagactggataatgagctcctgggatgggaaaagcaggccactttggggttttcttgtcccaaagcctgcttttgaggtattgattttttttaaaaaaagggaatcctttttcctaaagtttaactcacatctattgtcaccagttattatcttcccagttcagctccccttcttcttcccagccttcagcctctccctcagtaatttctgctgcagcgaattttgaggaaaactgcatcactggggagacatcatccttttttgggaccatttctgtcctcagttcaggtaatataagaaaagcagcagaaggcttaatttctgggatcatatcagcaaaccaatccatctcaggatcttttactggcttcttttttacttgaatggtgaatcctctcctaaackaagtctgatggaaccttaaggggctttcttgtgatgacactttggggctcgattggtctgcgtcatccccctttgtacaagctaatcttysgggtarchtgattccaaggcatagatcytcagtgagtgaaacaaagcaggataggbytctgctcccygaggtamaggtttgtagmgtgatccmctccggggttactwtagaaywagcgctgggc

SEQ ID NO: 216257 - DNA, 526 bp, Homo Sapiens
tttttagctttcaaatgaatcagagacttttaatttgattttgtgaaaaaagcttataagcaatcagacaggctgcttttctcctttgtgtttgttacctatgagtttcatatggtgcaaacattaattaggaagaatctgtaaccatgaaatgctatgtaattcaggaagacatcttttccatatggttaatgaaagacaaatccttcccatatcatttaacactcacaaaaagtatataacaaacaaaactgaaatttgaatcggagtttatttgaacagaaaagcactggaagtctgttcattttttttcttgaaaccaattataaaaagtggtcccaatttcaacaattaaaaaaaattttcaataaatacgtaatgaagtacttcaatgggtcaatgtatcaacctatggatttttttttctttttcaaaggtatgctaagaatgaatgaatgcaggatgtttttgaaaaaaagtaaatattatatcctatattatgattgtcatgacacaaccaaatggc

SEQ ID NO: 216258 - DNA, 566 bp, Homo Sapiens
caagtttaacatttttttatttctccagtaaaagtaacttcacaacctactaaaaataaaaatttaactgcattcagtttctgttcatttttctattaaagaaagcacaagataaaggatagctgtgttcaagtaaatgtgtaattatgacacagacagaatcaagtacgtacataaaatgttaaaacatgaaaatgtatagttcttttaccatttcctttctgaactcataaaatataatcagaaaaattaaaagaaacatgttttattattgtaaacttatattttatttaattaataatgttttggtgtgttagtaatttctgtaaagtagcactccttaaataagttcctaaaaataatattggagccttgaacatttaatctcagctaaaaaaattattctaaaactgtcatgataaaaaaggttacaaaatttctctttattctagtcctgaattccttctccagaattttaatacaaaacgaattttcaggcacaaatagtcaccagataatgcataccgtaatttagcagacttaaccaaacaataaacacccctaca

SEQ ID NO: 216259 - DNA, 472 bp, Homo Sapiens
  misc_feature (454)..(454): n is a, c, g, or t
tctcagaaaactaccattttattacttttagcattagatacgtttacaataaagaattatgttaatagagcctaggagttccaattgctagttgagaatcacctcaagaaaaatagaaaatttgtagaaataattattaaattttaaaaatctaagccttttagacttttcaaaataaaaatttaagtatgctgccttcacagtgaatttaatgtgataagattttcattcaaatgacattatttctatttaatgttttaatacagttatgcatgaaatcaaattccaacttcttaaaaaatgtggagtttttttggatcatttgatcatttcctataaaccatgtattccggtctctatattactgagagtgatgttagattcttggtctactgttgaagataccaaacacatgcaccatttgaatgtgttcttgaactaagtcctaaaacanagtgaagcagtgtgtttt

SEQ ID NO: 216260 - DNA, 541 bp, Homo Sapiens
gaaaaaggagtttaaaaggtcctgctctatcgttctgtgtctggctctgcaaactgctggtatgtaaaagaccctctttccagacaggccacgaactccctgaaggccgggctggcctcttctctgcctctgtcccaacctccctgacacaccctccatccacgttaataaaacagggaacacaccagagggctcagtagagaaaaacacatcataatgactgatttataatttttatagctttaaaataataaatttatttttttccattaaagtattataacacgattacaaaaagcctatgagaaacagaggagggaaaatatctgagctgctgccaccccacccaaacaatcctagtgaagcctgttgagctttctcttcatctcttccaggcatatagttgcaatgaaagtaaacaaaccagcagtttcaagagggatgagtgctggagctagatgcccaactcctgccttctaaggcagaaacacggacccaagagctgcttctctcctggcacagctgatggagcactttccct

SEQ ID NO: 216261 - DNA, 475 bp, Homo Sapiens
ttaagagaaaacccattcgtttaatatataaaatgttgcagaaattgcaaatctgagaaacaacaaccctggcaaagtcagaacaaaaccaactaaaagtacccaaacagtctcaataatttggtgaattagtcattcagtacagcggcctggttttagtcctgtcagagggagggaggactgactaaaaatagcacaaagaaatctggtcttaaaatctattgctcttttttcttcaaatggtgttgtactggttcagtctttcagcagtgttagtacagtcagccctctgcatccatggattcaaccaaccacaggttgaaaatattcagggtgcaaaaattccacaaagttccaaaaagctaaacttgaattggccccccaccaagtatttcattgaatccacacaaatgaggtgatgtgtggtattataatagctattctgagtaacctagagatgatttaaagtttacag

SEQ ID NO: 216262 - DNA, 537 bp, Homo Sapiens
ttttttgtggtggtcactgctcagtgtaatgtgcagaatgatttgttttttgtttttttttttttggtccttcattgcatcctgccatacccatgagcaaacagtttggcattaattatatatcactgccaccctctgaactttgaaaactgccatcttcagacttggtataatggaagaggctttctctctccaataaaccttttgcttcagggtatactcttcggtttttttccagatgtattatgtatgaactttgtactatgtatagccagagttttatttattttttaaaaaagaaactttttcttgataaaggaataatggtggtctagctagttcttgtaaaagtgatgcctcttgaaaaaaaacagtcctattcactagcttttagtaaaagaatcagatcttttctttcttgttaccttggagtcttaaaaactgattgctaaggtgaaacaattcaatgcataagtatggagctaagtgccttttggaggatttcttggaagagcatctatggagatacttaaggag

SEQ ID NO: 216263 - DNA, 814 bp, Homo Sapiens; identical to SEQ ID NO: 43989
  misc_feature (643)..(643): n is a, c, g, or t
  misc_feature (660)..(660): n is a, c, g, or t
  misc_feature (726)..(726): n is a, c, g, or t

SEQ ID NO: 216264 - DNA, 882 bp, Homo Sapiens; identical to SEQ ID NO: 40183
  misc_feature (23)..(23): n is a, c, g, or t
  misc_feature (807)..(807): n is a, c, g, or t
  misc_feature (841)..(841): n is a, c, g, or t
  misc_feature (853)..(853): n is a, c, g, or t

SEQ ID NO: 216265 - DNA, 829 bp, Homo Sapiens
aaacctgaatacttattctttggttgtctacacagacacttaagtactgtatcgctgttatgcagcggcctgtggaggcccctgggggtggctgggcctgtgtcctgagccctcagccagatccagggggtgcggtgtctggtcatgtccactccaagagcagtagcaccatgtagaaggctgtgagcagggtcccctcggctgagtggcagatgtaggctcactgctctgcagccccgaggggctggccagctcagagtgcagaagagttcctctccatgggtctagtcacccatccgtctgacctggacgctgtcatagctcatccttgggcttcgattcactgcctgagagagactcttgtgcaggttcgggggggccctgctgggcatccaggggctgctcctgggagaggtccatctcttctgggctgaagagcatcttcaccaggtcatctgcctgcaccctgtcccgctcgctgtgtcgagggtccagggtgaaccacagggcgatggcacagcgctgccccctggtgacagccttcactccatgtgggttttcagtgcctgaagagaatcccacggctcttccacactgaggctgcacctctgccgtcacggtcttggcatccagttcagtgaaataaaagtttccgccatcgaagtccccattttagtaaaaggatggcgctgtagtccgcggaaagtgtaggcctgggggccttttttgacacacaccgagggtcctcggctattcaaggaatgcaatttgtccacctgggacctggaatgaccaatcaatctctttccttctttggccttggaaccct

SEQ ID NO: 216266 - DNA, 900 bp, Homo Sapiens
  misc_feature (722)..(722): n is a, c, g, or t
ggatacgatacttctataagataccaggtgtaaaataccatttccttataaaggttaagctcccatacagttataatgttgtcagtaggaattcgacaatataataacgttcatgaaatcgttacgttgacaggtagggttaatatgaagcttggaatatttttcagtgttttagtaaaactgcaagggtaaaatgcccttaatgccagggcaacacacacaggaaatcaaataccagcatttacacgtcagtaacccttcaagttctgccaccctgtgtggggtaatgccgtgcagctaaaatatgatttacgcaacaccatgactaaggaatttctcatagaacttaaatttcttttgaaagctattttttgtttttggcaataagtctatccgggcttactaaatagttggcccaatgtgctttgtgtgtgtttttagaaacttcttcattgtacccattacagaaaagttccatgtaattggtattgaaaaaccagaggtgtcgtccctcttacccagggagttgcaaagtgctctgggaacactattttcagtgcttcctacctacatgtcactgaccgacccagagacctcagccagggcctgtggctagtggccatacctggtaggcctgtcgggtcatctggctgcctgctgattggaggctgcagggctggtctggaccagttagttttcccgtgtacaggctcctcctaagnccagctcacgggggctcaaggtcgtgagcttgtaggaccggtccctggtttatttttccatttatatgaccccctcatttggcatggaattcccgtataaaaccatataatggcggagccctcgaactgctccatatcgtcctcgggtgacagaccaccttccgggttcccttagttc

SEQ ID NO: 216267 - DNA, 988 bp, Homo Sapiens
  misc_feature (17)..(20): n is a, c, g, or t
  misc_feature (22)..(23): n is a, c, g, or t
  misc_feature (25)..(25): n is a, c, g, or t
atmttccgatggaaagnnnnannanacatttagaatgtcctttggcggmatcttattacacttgtcatatatgtmaacygatattctttgakgccagcscgttcgtkgcccttacagagaaatctctgcacagtgaaacadaacagaacgtaagakgacaaaatawaatgtcagtytttgctgattcgwattagatacattaacagattgtbtggtaacacaaattggcaataatacaaaavatctacatattacagtagttcaagaaaaataacttcatttgaatacaaaaggatagatacactttcttttttcctatagccactcttgtatagtgggtgtgtgctcgcactggactcagtgctgctaagatatacaggggtatgactggcttgcgcttttrgagggggctgttacacatgtgcatcactaacatcagacaaagaaatctttcaaccaacaagggttacagagcaacgttcactaaagcacaggttggaagggattcagggacggaagcaggccaatatggcagcttgtaacagatttccttatgcccacaatgcacctgacagcaaagaatgctatttggttggtccacacactgggcggagtcgtactagggcgcaccacgctagagtagccaatgtttttaggtcggttgatttgtttgttttttgtctttcctgtttggggggctgtcgcagcctttccaatccacaatatgctctgcagctggcaatgtgatttgcagtgataatatcaacagctgccaactcctctggagtcagaaattaacagtcttgactcggatgtgctgtccacgggtgataaatatggcttagttcagttaggccttcttagtttgtacactgtctgagtgggggtgtctgtatgtgtgtgtwtcctatgttagtagcaaatgtttgggttgtgtctgcttcccacggcamaggcccgtccggtgtggctggaggtgamactagaa

SEQ ID NO: 216268 - DNA, 1000 bp, Homo Sapiens
cagctccccctggtgacccctctttggcactgagctgggaacatggtgtccgcactcctggctggcaagcagaggcccgtgtgccccggtggcggctggcagtgtaggctggcggggtgacggccgcaggggctgggtttggcaccggtgggagccggggccccacgggactcagaggctgggccgcccccgctgctggcacggtagtcacattggccacggagatggctacgaatagggaatccaataaattaggctgtagaaagaggtggtgaggggccgagggggcggggcctgcattctcgcttggcaggcagtgctgtgcgtccctctcccctctcccgtgggatctttggggctcttgtgggggagaggatgcaggtgaggcgctctgtgtgactgtgggtcccactgggcggcttttatggcatcccacggaacgggagccttggctgaccaccctcaggggatggaccatggggtctttgagagactgacgaggagggaatcatggggactcgagtctctggagggaggccacctgcagtgccaggggctgtggcctgacgggctcctggggctcggctgcgctgctgtgtggccagcactgggccccttgtaccccagcttcctccacggagcaaagtagaggactcactgccctggacagggcccagtcactgtggaacagcgcccccagggagtgggaagggacagggcgagggttacgcagggcgccaccctyccacatctactttcccgagggcgggaagggttttctaggaggaggggccaggcatgcaggggcggggtgcgtgcatgggtgggtgctgctgtctccttcatgtgatccgagcttgggggcggggcargggccggggacggttktttcaagtggargcacctggargccamcarggctttcgggctaagtgcggcaaawssctggggcmacggctycgccaggatttgcaaactcytggagsscgctkcatcttgg

SEQ ID NO: 216269 - DNA, 491 bp, Homo Sapiens
  misc_feature (487)..(487): n is a, c, g, or t
ttttttttcgcttcacaccgtttttattgaccgatcgcagcccagcaagattgatcgagctggaatgggaagggacttctcctcccccaggcccagctcgccagggcctcgggccgtgctgcagtttctggcctttggtgtcgctccccgccccccagccccgcaaaatcccggcttcttttctgtctgcgcggccgggaccgcccaggcaggcgccggggctccggggctccggggggagggactcggcggctcggctcggctccgcttctttctcctgcctgcaaatatttgctgcctcgctggaaatccgacgatttcgcgcgcgctctgcttgcaaagtctttaagtaaacacgctcaaatgaccgccccgggcggcccgaggcacgctctctccccctccgcgggattagtaactttaggacttcgaccccggggctccgctttgcctgttacccaggtcgggcagcgcgcgggcgcccggngccg

SEQ ID NO: 216270 - DNA, 1000 bp, Homo Sapiens
  misc_feature (545)..(545): n is a, c, g, or t
  misc_feature (564)..(564): n is a, c, g, or t
  misc_feature (597)..(597): n is a, c, g, or t
  misc_feature (611)..(611): n is a, c, g, or t
acaaaataataaacaaaacaaagaatagaaccaaagagctatatgaattaaaaagcaggcagtctctaaataaggactgatacatacagtcattgaatatgaggaagaatgttactaaacaaattagtctagattcaaatgtaaatgcctttttctaagtttatagacataattaaagactgaaacaattaagacctttttttttttggtttttattccacagtaaatcaagctacagcctattctacctatctttaggcagtgtcttttatgaaatttttttcagaataactctatgaacaaaagakcccaggttgttagcaccattaaaatgtgtgtactacataaaaacaactagacattttccatggctctacatgacacattttcaagtttgtggtataagcatttacaattcacaccatatgtggkgttcaccttttatcttgtgtcctgctcaccaatgacattttacttacacgtacttgttcagtaataaatctgtacccaggaaagacaacataagtatgaaatctatacactgnagttagccaaaagtgagcnatgtgtttttctgctttaatttactttaatgcnaaaaccagaaatgncctatttctttaaagtgtatattttaggmgaagatgtttcmaatgamaaagagcaccacaattgcatcaatatgagaaatagtgaatattctatctatcytccttggtgttttcaatcttttagaagtgctgctgcaaaaaaagaatcttgtttaaagtttgtcatcttgtattgcttaacaactgamacagctgtwcatacgatcttttacawcmctcmcataaaccccgshtcaaatgatyctcctcmatttwaacagactacaaaaamtcttgtyaarcmrtywtcttaggggdwtttwccmagaaaaatytcawawtgtkkttaaggsagkwaamcaywmcttaagagacaggrttagtwaaaarttaamataatcytgttaaaa

SEQ ID NO: 216271 - DNA, 920 bp, Homo Sapiens; identical to SEQ ID NO: 45330
  misc_feature (10)..(10): n is a, c, g, or t
  misc_feature (20)..(20): n is a, c, g, or t
  misc_feature (62)..(62): n is a, c, g, or t
  misc_feature (826)..(826): n is a, c, g, or t
  misc_feature (856)..(856): n is a, c, g, or t
  misc_feature (862)..(862): n is a, c, g, or t
  misc_feature (887)..(887): n is a, c, g, or t
  misc_feature (906)..(906): n is a, c, g, or t

SEQ ID NO: 216272 - DNA, 542 bp, Homo Sapiens
gtttttgattaagtacttgctcacttttccaaaggttaatttttgctttgaacaccaaatctttgtcagttcacattagttaattttgacatggtccttccaaatttctattaactatattcagggatccaaagagtcagctaatctttccatagatctgccaggtgagaatcattcaaggaaaaaatcttcaccttttaaattttttttgctacaaacttttgaaactattcttcctttggatcagctcccacacttaagtatgaaatagcagaaagggatgttttgatcccttgtctttacacaaagctgaaaacaggtgagaggttagtgccttgtatgtaattaagattctgagtatgatactgatagtatcatttccggtggaaatcagaaaggcaaactcttaaaaatgagggcttctctgtgtaaaatagtaaatgaaataatgtactacttgaatctcagggttttcagaacaaattctagatgcaaagcctttatatattcctatcactgtggcttcactcactacacagact

SEQ ID NO: 216273 - DNA, 807 bp, Homo Sapiens
ttgaaaacatgattcatcccataatatatacatttactttgcttgtcacttgaaatgcctaagaaaacacaaaatcaatcttaaactagaaacttctattgaatatgacatgaagagagcacatattccgacaatttcaagttcttttcatagccttccagtcctaataactcagcgttaacatcttattctgttcagcactatttgataatttctttcatcctcatgggctctagtattgatgtttcatcagtctcaattttataaaaccatcctttactttgtaataaagcaatgctgagagacattttccataatgcagggggaaaaatgtggatcaatcacaaactcaaagaacgttacagttataatgctttcgacatttttttctacttctgtgatgctttttcaagataagcttccccctccccctttttttcccctccacctgtgcactgtcttatcgcgatatactcttgacttctgaaaatcaagttgcaggattggtatgactggaatgcagaggttctcttgaagtagtgtcaccacataactattctctattgataaacttatcgcaaccaagttcttctatcagagggttgataacttcagaggcagtcagagctatcgtaaaggttaaaatatcgaggtccaccctgtgaggatttcgctgatattcggcatcaaacgctgcttcccttgctctgcaggcttccacgaatcgcctgcggcgttcttcaagctcttgtattctgccgggagcaatcgggtaattttccagataagtggcggagaacctgctgg

SEQ ID NO: 216274 - DNA, 554 bp, Homo Sapiens
  misc_feature (522)..(522): n is a, c, g, or t
cacaattaaaaacagaactttattcctccaagtgttcaggtgtgcacttggggaacagccatgctccatgccacacagtcagtcggcaggcccgcctctgttcactgcggacctggtcggtcagcggccagcagatacctggcctctggctgcctctcttgcaggctgggggtgggctgtctctcgtcagcagggccacgggcttctgagaaagtgcttgtcctggaacacaggaacaccaggtggggggtgcccttgaccccagccagaccccaagcagggctgggacagacaaacaggaaccaagaccaccccagcgccggccacgcccagtctgcttggtaaacctgacccacatgcgccaagggccaggccagggcaccagggctccagcagtgaagagccagcctggtggctgcggttggggatggtgatcgttttacaagctgggagacgacgcagcaatgcacgggaacagggcaccaccagagcacagcggccaggaaggagcccagaccccanaggcagggaatgagcctatggcaggggcacag

SEQ ID NO: 216275 - DNA, 944 bp, Homo Sapiens
  misc_feature (4)..(4): n is a, c, g, or t
  misc_feature (7)..(7): n is a, c, g, or t
  misc_feature (666)..(666): n is a, c, g, or t
  misc_feature (748)..(748): n is a, c, g, or t
  misc_feature (782)..(782): n is a, c, g, or t
  misc_feature (801)..(801): n is a, c, g, or t
atanagnctatccaagtaatatcctattagtagggatggcatgttataaaaggcgtaaagatctcacctgccccagctggaagcagtgattccattgccccagattcggaattgtgatttaaactaggcctctcttcaggcatcagaaccaaattagagtgctttatacgtgcaaggaactaatgcagaaagacattatgggtaagtcaagggagatgccccagccattgggcaaattcctctgactcctccctgatggaactaattctttttcttctgtgcccggatcctagaatcaagattcttaaggtctgagtacaagttccgcttcaggatggcgctgctgcacagcagggcaccttgcagggccccgaccagtccacaggtgaagatatcctggcctgtcagatagaggttggggatggggctctgggccctcaaggaggccatcacacaagggtgcaggcggcccaggtcatggtcagccccgtagcaggcacctcggggagcagccagatagaactggttggtgagtggggatcctgcagtcacactctccaccttcccctccagctgtgggaacagtttcaggaccactgacatagaggcttccacaaaggagttttttgaggtctcatagtcactgccccgctttcccttcagctncgcctgccacttctcaaaccactcgtaggcagtgggtatgagcatgatcatgggtggaccggcctgggaatcggtcctcccnagtcggatctttggctgatgggaaaagcgagaanagaagagggatgtgtttcngcagcccttttccctgggcatggagaacgtacgcttcatccgcctggccatgttcgggtcataaaaaaactataatttggtggaacggaaaatccaggtttttcctggtggccttgcaggcagatgaaaacaaaggtcatgcc

SEQ ID NO: 216276 - DNA, 904 bp, Homo Sapiens
  misc_feature (752)..(752): n is a, c, g, or t
  misc_feature (860)..(860): n is a, c, g, or t
cttaaataacaaaatatattttcgatatgcacagttttaactgaggacacacaagccttcctcgggctgcaggcccgccgccctcccagtgggattcacagcccctgcggagtttgtcctcacgcacaccacacacgatcgggtataaaacacattctataaacacgttctgatgcaaactgtgtgtccataaatatatatttatgcaagttcctcccacccactgcagggccgtacagctctggggacaggaggtcacagccgactttaaaccacaggttaagtagaaggttgcaggtcaaatagaagttcccgtgtgattgcatcacccaacggcactgttctgtcatcaggaaatgctgagtgcccgccgtggccgggtgggcgcgggcggtggtcagacgctgctctggagctggctatctgtggcactgtcaggggctgaggactggctgggcagacaagtttccaggccatctgaagactccgacaggggcttgtataagaagcaggctatggcaaagaagaggacgcccagcaccttgtacaggagccccatgatgagtatgtagcggctcatggccgaattctggtacaccaagcaggagccctgctggccacactggtcctgccacagcagacaggccttgtcgatcaccccagccgaaggcgatgggccccggggatgccccctagtattctaactacaatccactgggattcccagggcaaaggatctctgagggtacggnacacatctggaatagaaaacccaagggtcagcacccacagaaatgggggttgatgcccaagtaaccccttaggcagtggccttctggcacaagccccaaccaaaattnaccccccccccaaggggaaacccctctttagaaatcaaaaacag

SEQ ID NO: 216277 - DNA, 1000 bp, Homo Sapiens
gcacaaaataaggcaagtgggttaaatagttgaaaattggttagaaaamaaaaaaaaawaatactgagtwttcttttaaaaagttttaaaccgtcattaaatgtttctttttgtagaaatctgaagagttctgcgtctgaatttgaaattggactttataaagcctagaaaacagaggaggcggtgccctgcccttgtcagttgttgttctctttggtggtgatggtaaccagctgcttggcagccttggcgatgtcgtacgcacactggatgacctgctgcgtgaccagctgaacgtctgtgggtgagccggggtcccctgggagggtcttcttgcactctgactgcagtcggtaggcactggacgtcagttaacgaagggaagtcctcaccatatcagacttgggttttttggggaataatgctgccatttctgtaacagctacgtgtatcctctctgagcagggaatataactgtcatgtttattttcttgggctgctcttaagagctcctgtatgtttttggtgatctgttcagtcttcctgatgacatcttcggtgctagggagagtggggcttggggccacatggggttctgctgtgtctggtaccaagccatcccctggccacaccatacttctttgccgtccctttcggcttgaccccatgccatctggctccatgttgttkgggagtgttgtcgtagtcactctcaggtgtgctgttctgcttctccagcctggatgcccttcgggcgcytttcgtccctcgaccarggaagtgtggaggggaaggaaggcagaratggaagagrrgtcacaagtgcactcctcccgatgtkcgcgggggagggctggagtttcawcctgctctcttcggggsggctcgcytytccawtgggrgaaatgrgttctgacctgatccggctcgtacattggmatgggctactgcccsggcaaaggacgttctttaagraaatgktggaattytgtttctcaga

SEQ ID NO: 216278 - DNA, 496 bp, Homo Sapiens
  misc_feature (301)..(301): n is a, c, g, or t
ttccacttttgctgtctcttggcaaatccttcacccatcctctacgctaccatctgttatggcctttctcattcttcttttctctgtctcaggttttctactgctctctctctcagtctcccgatccctttggccaacacaatcacaggagggctttgaagtaagacgcctgcatcccggaggagcgcattttccaggggctggtgcagggcaggcaagaacacacggtgtcataggacagccccgggcacctccccaacgcgggctcaggagaaacggtgattacggagggaagacctgnggagcataagggcccggcacgaggagggaggtggggggcgacggcgccttaagacaagactgggaggcgcccagggcgggaatccgcctcgcggtaaggactttaaaaagtgcgggttgggaggagtcagaaaaaagttttgagcaggaaaactacgcgatgggaagtgtatacgttaccctatagcagaaagat

SEQ ID NO: 216279 - DNA, 472 bp, Homo Sapiens
cattagaagttatgattaaattttattaaagcataaaacttgtgatacattgtaaataaaacagtagcaaaacataatgccagttgtgaaacgtctgtgtatatgtgcacatgctattctggttctttggtttggtttggtttttttttgaggcagagtctcaaaaaaaaaaaaaaaaacgaaacaaaactccagtgtcttaatgtcctggcgtgccatctcctggtcaactggtagagcagcaatcctttcctataagccagtggccctctggagaagggcacactgaacacaataagcatgacttttagttttgtatttttctccacctctccctgatgctaattcatacaatattaaatttcaaaattcagcattcttgttcttccagggagcatgaataggaatgaaccacacctaatgaagtaggccctatcattttattgattccttcccaaagatcataatgaaa

SEQ ID NO: 216280 - DNA, 542 bp, Homo Sapiens; identical to SEQ ID NO: 45252

SEQ ID NO: 216281 - DNA, 801 bp, Homo Sapiens
  misc_feature (762)..(762): n is a, c, g, or t
  misc_feature (768)..(768): n is a, c, g, or t
ctgacttgcttccggagtttattgtgcaggatgaagcccgagtgggcaggggtgctttggcggggagccggggcaggggctcggggaaggaacagagcagagacatccagagcgtgggggtcacctggctggccgggatcccagcttcagccctggggagtcctattgttccgtcatgcacttatcggtttggggcaggaagacaatggtatcctctgtgaagccctgggccttgcagaaggcggtgaatttctcctttaactcagccctgggggtctgggttcggctgtagagggtggccatgcggaagtcctcgccagggcccttgctgccctggctgtacagcagcgcgtactggtcgtagtcggtctccaccactgacacggagtaggtgctgccccagtggggactccggtagctgtaggagccgagggaccccgcgggctgcagcagcatggttcgggtctcacactggtttttcctgaggaaggtggaggtcaggttgaggccaccatccgtggcaggggccaccacagacttgcacatggacaacgccgccttcttctcccggagccagctcgagttggaggcgaggcccgcgctgaaccagcgccccaggaacttgtcctgctggaagttgggctgcacggagacctgggcctccggtgctgcctgcaggtcgcccagcacccccagcagggccagtcccatccacagcgtgtgatgagtagccattctcctgcagcagagcgggtgttcggngcctgntgccattggtgtgggatacgaaggaggtgtgca

SEQ ID NO: 216282 - DNA, 552 bp, Homo Sapiens
  misc_feature (516)..(516): n is a, c, g, or t
ttttttttttaaaattaaaacgtttgatttattaataaacaaagtatctctcttaaatgggccaagaaacaattctatgacaaaagtgaaccctggaatatagatattcccagaagacaattttccaggatacccagccaaacaattttcacctagtcacaaaagtcattttcatcgaagcctacaggcattcctttttctaattctattctctcatttttttctaaacatgattttaataaagcatatacctgtcaaagacttctctttgcaaaagacataggaacagcagtcaggaagaggactctgaagcccagtcactccacagatccaaagtttatggctgtgtgcccttgtaacttagcctctctgcatctgtttccttgtctgtagtggtactaggttggcgcaaaagtaattgcgggatatttacctcataagagtgttgatggttaaatacaagagtgaataacttaagacatatagaacagtgccaagcatgtactaaatgctcanaagagtttgagctattatcattccagctttttcatc

SEQ ID NO: 216283 - DNA, 809 bp, Homo Sapiens; identical to SEQ ID NO: 50053
  misc_feature (9)..(9): n is a, c, g, or t
  misc_feature (29)..(29): n is a, c, g, or t
  misc_feature (805)..(806): n is a, c, g, or t

SEQ ID NO: 216284 - DNA, 759 bp, Homo Sapiens; identical to SEQ ID NO: 40080
  misc_feature (657)..(657): n is a, c, g, or t
  misc_feature (709)..(709): n is a, c, g, or t
  misc_feature (753)..(753): n is a, c, g, or t

SEQ ID NO: 216285 - DNA, 860 bp, Homo Sapiens
gatgctggggtacatgggaggtttcactctaccattttatctttgtatttgaaagttttcatgataaaaagcttttaaaaagagaaagggtaccttgcgtccaaacaagtctgtatttaactgaaaaaaaaaataattgcattcctaactggccttgaatagaagggaataaatgtcctgggagatagatggcatgtttgttgaaagaatgaagggtgaagagataggatcaatcaggcacccccaggacaaaaggaaaacttatacagcaagtaaagacatgtagctatcttgggctgaaaggtaagggaattaattggtcaagtccaggctcaactctggcccccaactcccaagtccatggtctcaactcatttcccacaaagccttcctggagctagcaagagaaggtgttcccacctgagactattccattttgcctgaacagcactatgaacaagacccaaaggcagagctatgcacggaggggcaggcctgggatgaggtaggcttctgtcctaagtttctcaacagcctcaagacatcaactggggaaaggaactttctctgctgaccctgtacttaaccagcaaagcttcaatcatcttaaatgattgtacacaatgggcatatgaaagttttcccccataccctaaatacaatgcacctcagaacccctgaggagcctaggaaaccccacccaaaatatacttttttggccagcccatagccaaggcctgggccccttgccggctcccgcatttcaaaatccccaaggggtaccccacccgcgcccgcttttgtccattagcttttttccccagggggcagaaccccaccacgtgaaagcacaagggccc

SEQ ID NO: 216286 - DNA, 912 bp, Homo Sapiens
  misc_feature (855)..(855): n is a, c, g, or t
  misc_feature (884)..(884): n is a, c, g, or t
gcaaataaaagtgaatgttttaataaagattccactatatttacacatttatttttctgataaaaaattacaaatttaaaaattggaaactatggacaagtataaagaaaagcttaaattccccatatgcctgtcttagcattgtgatatacttatttttatcccccagacatatttatataaatttatttatgcaagcaaacatccattctgtatacacggtttattctgccaagctttactgtctcttaaaccctttctaaatatcattacatatccctaaaaacctatggtttcttttttaacagacacacagcagtgctccaccagatggatatacagcaattcaatcacgttcctctggacggccactggcttccagtgccgggaggaacactcaggtgggaggctctggcagtgactggggtgggcagcctgatgccaacctctaaggccctggcagccacacctccctgccactgccaggcaagcctgggctactattttaatttactctttgcttgtctggtagggaaaacagcatgtattttaattcgcattttaactactaacaacattataatttttcatgtatttattggtaattttatttattttttgcggtttgcctgttcacatgattgggctgcaattccatctggctagtcatctctttctaattgattccaagacctgacagcacgtgatttctctaattacttgtttgcttttacaatcgtgtttttgctgatttctgccacatagactgccagattctatctagcccaaggtcccattccatccattgttgctgctcatttcttccactaagatggtgcacacaggcccccatgnattgttgtccctgaccctgattcatgcanaattaagttttcacgttggcgggagaga

SEQ ID NO: 216287 - DNA, 1000 bp, Homo Sapiens
gcagcaggagggatccgagcgctgagatgaggcccgagctgctacaaacacgcacttccacgcagagcgtccaggctggggcggcagggcgaggatacagaagtgttgggaggggggacgggccaaagtgaggtattaaataataaaaatcaaatccaattcccaaagagacacaactttaggagagaaatacacaaatagagactttcacatacattttccccttctataaaaataattccatggttaaaataacctcaaaatccaattcaagcgccgacttgttcgctgatgtagcacaattcagaggacgctgaacgtcactatggtgtcgaactccgagattcccattattattctgtctccttgacccaaatttacacttggagctaatgacaatgggtttctacagaatttaatgacaatgaaaaagcaggaacgatgattgcatcttgcaaggacaggctcctggaagtgaggacctcggaagaggcgatgcggcttcctgagatggttccatgttgatgcttcacctctaagcctagccctgacccaacgccgcttttgtgattggtttcttcaaggtcaagttttcacccaagacctctccagggcacgccttccaaggccagcctcacctccctccaggaccgtgaagggccaagccaacatgcttcgcacccaggcctccctgctgccttaaaaggacagacatttcaaagtccataagttatatggtaaatctctctacttctggtttctggtagggtttttgtttttgtttttgttttgcttttttttttttttttccttttttcttttcttttttcctcctaagcagattacctgatgagcamargggcgatgcaaggaaaatcaaaaatdcccaaamtttgtcatttggrgagagagaaagagmsggtgakmcccccacccaaatttctyckagatcktgggmaaaaaggtrrcacytcaawayttaawaggktttttttttttt

SEQ ID NO: 216288 - DNA, 833 bp, Homo Sapiens
caagcagcggcaacaggagcgccaggaggacatgaggctctgcctgcagtcagcaacttggaatattcagacttcagaccagcatcacagattataaccctccgtaaatcatctgcatcccagctcccatcaaaagccagcctgaaggacccatggacacgtgactccagtgttctcaacaacatcttaagatcaagttggtttgcacaacatttgcatctacttgggacaaagcaagaacaataagggcaaaaaagtgaaaaaaaaaaagatcsskgggtaattgcaaatgctgggacagtttaccactccagggtgaagagtccataccaacatgtctgcctactacaggaataactggtctgaggaagacccagattaccctgactattcagggtctcagaaccgtacgcaggggtatttgaaaactcaaggttatccagatgttccaggtcctctgaacaatccagactaccccggcaccaggagcaatccatactctgtagcctccagaacacgtccagactatcctgggtctctggcagaaccaaattatcctagatctctgagtaatccagactattctggcaccagaagcaatgcatactctgcagcctctagaacaarcacaaaccawcctacctctctacmagagccarattmtmgtrcmmtttcmgartmatammaaacacmraacaaaaacagacaaaaaamctcccatrgctctmaacgcaatmmtgatttwgcmrgcwcccgmcgcagaggcaamtctgamgrgctcagacaaactmmaactcctwtwggcwmaatagccccggcatcacmtggcgctc

SEQ ID NO: 216289 - DNA, 895 bp, Homo Sapiens; identical to SEQ ID NO: 41299
  misc_feature (732)..(732): n is a, c, g, or t
  misc_feature (764)..(764): n is a, c, g, or t

SEQ ID NO: 216290 - DNA, 895 bp, Homo Sapiens
  misc_feature (658)..(658): n is a, c, g, or t
ttttaaaagcagcatttattgattgaaaataaatgtgtagataggctctcagtatggaatccatgttattttttaatgaagtacatgaagactccttagatcttccaccatgtatcttgtgtgtgcttataacaaccaccatattcaaatggaggggaattttcaacattttactgaaaaaaaaatgagaaattcttccttcagcagctctgcatagtttgacaaacttttggaaagagataaaaacacactccagtgtttgtacgttgaacgtttattacaactaattggcgatgtgataagacagtgctcacgtggcctgaatgttggtcacaatcacaacaaagcttaatccagcccagcatatataagtgagaatataaaccatgaagacatgtttagatatgtataagtacttagaaaagtgacgctgaacaattacatagctttaaaaaatatagagccatctaatgccattttacctcattcaactcttttttgtaagaaatgtgtctttttaaatttttataagacttctgttaactaggcagtgccatggaaagaaaggaagctgctgtaaagtgtgcagcacttctaagtggagggaagcaaaataaatttagctttaacaagtaccccagagggaacattcgtgctntaaacaatgactttacacataatactgtgaagagagcaacacgttttttgtaagatactgctatgaagaattcctggcaaattaccattctcactttattttggggcattaaaaacaactaaggttttgattatgaccccataaaatttatctcagtagtcaaatgtgcctttggccttaacaatatgggcttcttattgcgaaacaccccggtttctattccagatcacgaagcct

SEQ ID NO: 216291 - DNA, 925 bp, Homo Sapiens
  misc_feature (10)..(10): n is a, c, g, or t
  misc_feature (32)..(32): n is a, c, g, or t
  misc_feature (35)..(35): n is a, c, g, or t
  misc_feature (576)..(576): n is a, c, g, or t
ttcctgggtncctcttattggcgtgctcaggnagncccgtgactcttcctcccgacacagcaccagcctctaaagtcagggaggaggggagagggtcgcatgtagcccccacacggagaaatcctggccaaacccagctggcaggaagacaacgggcagaagcaaattgtgttggaggaacccacacctccaatttggtgcagccactgtatatcccccgagtcccctgctgggaaccagcagccaaaactgggtcctgagccggacgcggtggctcacgcctgtaatcccaacccagcactctgggaggccggggcggacagatcacttgagatcaagaatttgagaccagcctggccaacatggtgaaaccccgtctctactaaaaatacaaaaattaacggggtgtggtggcacatgcctgtaatcccagctacctgggagactgagctgagagaatcactttaacccaggaggcggaggttgcagtgagccaagatcgtgctactgcactccagcctgggcgacagaccaagactccgtctcaaacaaacaaacaaaaaactgggttctggngacacaggtcaaatgggtcacagctgacaggaaggaatccgacacacaggccacaccaggccacacaaggtctctgggtgggagtggtcttaccagagccctggttaaaccgagttctttgttgagaggggtcactggatcagagccaggccttttaaagaacaatccgtcaaacagaattcattacgggaggccacaggcgggccagtctcaggcaacagaccctgaatgaacccccttccgaggggagcccaatttcgacttcaagttttccaggcagggaggccaggatccagagcccggtgggaacccccttaaacccttgatggtcgcgaaaaatgtggaaacc

SEQ ID NO: 216292 - DNA, 862 bp, Homo Sapiens; identical to SEQ ID NO: 43735

SEQ ID NO: 216293 - DNA, 896 bp, Homo Sapiens; identical to SEQ ID NO: 47568

SEQ ID NO: 216294 - DNA, 1000 bp, Homo Sapiens
  misc_feature (12)..(12): n is a, c, g, or t
  misc_feature (432)..(432): n is a, c, g, or t
tccaggggctgntcgctggtccctgggcacagtgagcagggctgaggtcagacgggttcggcccttggccatggcagcttggttgggacagccgggccaagggaaaaaaaggtgcaaaagtccaaatgctggcacttcaggtgtggccggcacccagccaggcgcagtgggtgggcagggcgccatgcttctctcctggcgacaggtcggccgtgtagcagcgccccctcccagcagccactaggaacagctggtgattctcgccaggaactgctgcgcccaccactcgtctaggtcaatgggcacaaagttctgcagccggggattgggggtcctctccacgtactgcacaggccttggcccgccctcaccggctgggccaccatccagctgctgttgcacctgctgccaggctgtgggaggagggcagtngggctgagccaggtcccaggcaccccatcgcccacccagggcctgatggtcaccctggactccagccccacacagggctggtcacaggacacaagggcagagtgccaaggaaaagcacagccatgcagcggctgtgggtcagcttgaagtggggccatcccgggtccatggttttgcgacccagcagcctatgccgcaccctctggccccgctcgctaccttcggacacaaagcggacattctcctcgtgggccactgtgtaggtctcctgggtcccctcgaaggatggggacgtggagggggcccgccggccattcacacgattgaacacaagccttggccctggactacagccggaggtgggagcsgggagtcytgggctgcgcctgctccgccaggcactcgcgggtcccggccggcctgttgccttcctgggctcaggtgcccagcgccgctctcggttctcctcagctgagaggggatyactaggatggagcccagaragccccgcccgctggaacctcamacyttttgagagkaggagggggaggtgagggggckcgsaccc

SEQ ID NO: 216295 - DNA, 994 bp, Homo Sapiens
tacaaaargmacctctcccagtacaagaggatcaaccaagaggtgagccccagtgctgtggtgcccggccagaaggaacagaggaaggatggagggcaaggcagcggaggggcagtggggccccagcatcccctgaagcctcacctgcagcctggggctgatgagatctcgcccactgcgcgcagagttgcagcttcgtacctgggccgccgcagctcctcagggggcctccacacctccacaccctaccctcagtggccagccaaagccatggggccccatgcagcagagcagggaagggacaagaggctcggcagaatttccactgtggccagcctccagccaggcctcgactggcagtgtgggctctgaagggctccttggggcatgggcccggagcagggtatcactcagtgaaggagagtcacactgggtcaagcagccagccagccagccagcctgtcctggggcctccacttctcagcaaagtctcatggtcagctggggtgggaaaggaggcagagcagccagatcccactgcagcgcagacctgtcccccagttcatcccactgcctccacacccccagccacagctggggcagctccgtcttcaaagaggaggaaaagggggtaacaagccacccccaaagcagccttaacaccagaggagggagggaggtcccagcctaagggtgtgagagcagtggggacctgggctgcagggtgccagaccccacactcataaggcaaacagcatgtcatcatctttctcctgggtcttcttccggggcgctgggccagatgggggaccggggggccctcagctgaggggctggagaggttgggcaatcggtccgcggctttggcccgttcttccaggaatttgtcaaattcttcgctggtgacccccttaggctcttccgcatcattccccacgtcagkgaacagccactgctcgatgtcctccatgaggcaggctgggtgactgggatc

SEQ ID NO: 216296 - DNA, 844 bp, Homo Sapiens
gctttggtgggggacgtggggcagcggagggtcctcctcatcttgacctagtccagaaatcagggagttacttgccctgtccaattccttgtccacttgctccctggacacatctgctgtctgaggctgtcctgaagggatcttcatggagtcaaaatatgctgacagggcttcctggagcaggggcagaagtttctttcgagagacctgggtgttgccttgaagataggcatggaggttagggtgggtacttgaggcaggggtcagcttcaggggtggagagtgggagcgttccaggacttcacagatcgttgtttggagtgccacatggggacagaaaatagccaactgccgcactggctcattgtgagtgttgaaaaagatagtcatggcaaccaggacatcatagctgtgagcctggcagaaagcatggagatctgcaaggaggttagacctctgcagaaaggcctccaaatccatatatattgcactaatggccaccttgacgccttgtctatagatagtcttctggtctttttctcagcatctgctcagtggtcagtcctgatacatcaaactttgccttttgtagggaatcaaatatattatttctctttggttagggcttgcgaaaaaggccctttagtttctccacatattttgtgcccctttggggttgccctttccaattttaagggccatgttggcaacaggtccagaatggattgttccattgcaaaaggcctgccagtttgccttgtccaaaatctttggtgcccccttgcaggattctcttcggccccaagggtaggcacagtaccccacccatttaactttaaaatgg

SEQ ID NO: 216297 - DNA, 1000 bp, Homo Sapiens
accggtccggaattcccgggatgccatgcctggccgtctgctgcggggcctgtggcagcgatggcgccgttacaagtaccgcttcgttccctggatcgcactgaacctaagccacaacccgaggtacagtatatcagaagtatgagccgatccttttccagtccattggaaatccgtttatttttagatgcctggatggggtactcattgatgggaatgacaaagggatatcaaaagttgtgtacagatcttgcaatgggagggatcgactcggccctttagaaatgagtgatagtacatggctaacgtcagaaattcataaccctctggctgtgggacagtatgtcaacaattgttccaatgacagagcagctaatgtctgttatcaggaatttgatgtgcctgcagttttccctatagaactgaagcagtatcttccaaacattgcctacagctatgacaaacaaagcccacttcgatgtgttgttcttgtcgcacttagggacatcaatcaaggagaagagcttttttcaaactactacacaattgtcagctaactctgtgaatcagaaattattaggttttctactcagctattaattctaagtgttttttgttaatcacttctctgagttctacctgtaaaacaaatattttgagacttaattggaataggaatttcttatgtttttgttgatattatatttatgttccaatttcatgataaaagctacttgcttcattacaatttcaaatttgtaatgcaattccaagtttaattggttttcacctaaatacacaatagcttattaaattaaaacctactctttgaacttataatttcaatttttcttttgtttattttgtaagctctgtggtggtttataaaattgtagccaggcatcagcagttcttgtagtactgctgakgtgtacaaacttctgkaaaactttatttttacagaattgagtaaaaatacctmttgtgttgcmtgaaaaaa

SEQ ID NO: 216298 - DNA, 772 bp, Homo Sapiens
  misc_feature (121)..(121): n is a, c, g, or t
  misc_feature (123)..(123): n is a, c, g, or t
ggggggggggggtaggggggtgcacggcgggccggtagsgccaggatctcggcgctgtgcggacacgtgtatttgaactctttctcctgcatcgcgctgtccaggtagcggcgtacgsgcnangctccgcggggatgggcgcctggcggaagtgcgcgcacaccgtctgcgggcaggatcgcggggcgcggtcaggacctgccgtcccccaggcgcgccgcggtcaccctcccgcccgcccaccttccgtgctcacgtcgacgatgtgcagcttgggcaggaggctgcagtcggccagcgtgagcctgtcgccgtccaggaagcggcggcgggactcgcgcastgcggctcccccgccagctcgtgctccaggggcgcgcgcaggtagctgtccagcctggcgagggcgcgcagagctgctggtacagggcttcgtcctgcgcgggcaccgggttcttgatgaacgcggagaacttgtggaaaacgtcgttgccggcggtgttggactccctgtaacgaggcgccaggctggggaagtcgggcggccccagcgtctcctccagaaagtcctcgatctgcagcgtgtctgtcttggcgtcgctgtcatagagcaggatgggcagctgcgagccgggggcgaagtccttcagcacgtccggggacctgcgcgtgtccaccgtggtgagggtgaaaggtacgcccttgaggagcaggaccatgaagagccgctggcaggaggggcagtgacccacgctctccccgtcctcactcg

SEQ ID NO: 216299 - DNA, 1000 bp, Homo Sapiens
  misc_feature (25)..(25): n is a, c, g, or t
aaagagtcaatataaagaaaaatangaggtcaccatacttggccacagttagaccgctcataggcccatggctgctgcaaccatgggcaggacacagagggagtccagcctctactgataaatctgggcaggttcaccttcgcaggccaagccaggggccatccctggtatgcgaaacctggaggttttccaggaagccggctgctccagagctagctgtcaagtctttagccccacaggctggtgcccagagccacttccacaggagcagcctcgggcttcacccacacccaaggagcttccgaggcaggaggcaagcaaggtgaagggagggttcagggtcccacaacagcagtgagcagggtccagccatcaggcctcagagcctctgtcatgccacctgcgagacgggctcctcctgtccccactgtgtccccgcttcctcctcttacagcagggggagttggagtcggagtcatggtggtggtgcctgggcctctcaggagatgtgggagaggaggtggcctcagctggccgcctgtgctctttgtctttcttcttcttctctttcttgtgtttcctctttttctttttcttcttctccttcttgcttttcctgtggctctcacaactgctttccgtctgatcctccgcccgcggcttcctcctggccgaggctgccgaggtcccgggcccgccgctctctacgcggtgatgcgtgaacacagacagccccagtttggcggcctccttgtcctctcgggacatcgccacgcggcccacggagccacttgcgctccccagccccagcagccggtccacgcccttctcctcggggtcgctccttcccgcttgcagactccgcgaatcctccttgctcaggcccgtgggctgcttctcacgttcttgtagccaaggsggcacagcgctcgcgtccgctcccgcacggtgccagttctctcgcgstcggccgssatggsccggccttgsgtacagtgag

SEQ ID NO: 216300 - DNA, 943 bp, Homo Sapiens
  misc_feature (18)..(18): n is a, c, g, or t
  misc_feature (24)..(24): n is a, c, g, or t
  misc_feature (27)..(27): n is a, c, g, or t
tgcacattatgggtattntgtatntanctttacaacttcaactgaacaacttattctagacatctttatagacagtattcttttaatgtacaatgaattatttaatcctgttattattgggtatttaggttgtttccattttcacatttaagacattgttgcagtgaatatccttatccatccaccctttataattaaccagttatttctgaagaataaattgacatcaaaagtataagacttgcatcaaattgtatctccctccacaccatcttgaaaatacccactttataaatctttttttcttttaactttcaacctgatcagccagatatatttgtggtgatttccccctaaatgactaggaaagttcagcatcttcatgttactggacatttaaaaaaatcaactttatttgtccaattttctaagtcaggtctcctggaagcagcatttcaaattaggattcttgtgtaagtgacttactgagagtcctctataagggaatgagaaaaaacagaacagggcagaagaggcaaatatgtggtttcaggagaaatccacacacagcgtaatcccatggggtgctcaggagcataaattgtaccaccgaggccagtgggccaggctgtaatgtcctgcatcagtcactggccatgggcaacctcagaggagacaaaacttcccaggtatcttcaggtaaagtgactctcatcagcccaggacaatcctctggaaaagggtgaagataagtcattagtacccaacatctgaagcactggcaatataggtacaccaccctgggaatggggatctctatggatgctaacagcatgtcatgttgggtatttaaaaaaaaattcttaaaagctaagcatatgaaaccttcctggaatatgtattgtaaatgtaccttcctacttgttgttatgtagagacaaat

SEQ ID NO: 216301 - DNA, 903 bp, Homo Sapiens; identical to SEQ ID NO: 50243
  misc_feature (12)..(12): n is a, c, g, or t
  misc_feature (16)..(16): n is a, c, g, or t
  misc_feature (20)..(20): n is a, c, g, or t
  misc_feature (29)..(29): n is a, c, g, or t
  misc_feature (33)..(33): n is a, c, g, or t
  misc_feature (39)..(39): n is a, c, g, or t
  misc_feature (46)..(46): n is a, c, g, or t
  misc_feature (53)..(53): n is a, c, g, or t
  misc_feature (67)..(67): n is a, c, g, or t
  misc_feature (99)..(99): n is a, c, g, or t
  misc_feature (820)..(820): n is a, c, g, or t
  misc_feature (879)..(879): n is a, c, g, or t

SEQ ID NO: 216302 - DNA, 933 bp, Homo Sapiens
gtcttaaaaataacccttaaagggcagcgtgaactgagaagtagcatcccaacagcttgtgtccttgggagctgcagtcttctctgaaggaagctgcttctgttccacagacacagggcaaggggtgctatgtatgctttgtacatgtatcaagggtccctcctgggggtggcagagctcagttactctcgccatcactgctgatgatgccacgcatatgtgaccagtctgggggtgcgggacggggccgctcttcatctgagtccagggtccgtcggtacagctcccctgggggtgctgcttctcctaaagggttccaggctgtacgtctgcgtggccggcccgagccactgatgatgttcgcaacatccaaggaggccacctcagctgcctcctccctctgctccttcagggcccgacacttccctagggaaggggtacccttcatgcctagcgcttccagttctgcccggaggatactcaggcgctccttgtgtgagcaacaggagcccaacagcttcttgtagtttcgatgggcaccacaggcccgaatgtagcgcttcagcctcatcacagccgggtggtcctctccacggcgacctgagccagcccgactctgaattgaagcggaacctttttctctccgggtcgctacaaggggtgggaggcctcttgcccttcttggtaaggtccagtttgtcttccctggaagcggcttcatccacctgcatcttcagcagctcctcctccaccagccgcttcagtgcctgcttctcctcgggctccaggtggctgcggcccgagtgagctaagtacctccgccgcacgatggaatgcgtaasgtgctgaggtccgggcggcctcggaagaagctacgggtgaactcctgcatctccttctcccgcgccattttgctcatcccgggaattccgg

SEQ ID NO: 216303 - DNA, 785 bp, Homo Sapiens; identical to SEQ ID NO: 50678
  misc_feature (11)..(11): n is a, c, g, or t
  misc_feature (48)..(48): n is a, c, g, or t
  misc_feature (61)..(61): n is a, c, g, or t

SEQ ID NO: 216304 - DNA, 885 bp, Homo Sapiens
ggattcatattcaataacatatttactgaggcaccatataaagggttccgggagtctctaaagagctggagctacaagaagcctaggcagggttagagtaacaaatgtgtctatgaagagtggggatgagtggcatttgctgggatatgggtgtaaagttgataaggtcatgaaggttcaacagatatttatggagtgcctagtatgtggtgggaataagactattatcaagggctctaaagcagtcagtgtacattttagagtgaagaggggcattgcagggtgctagtcctcttaagctctgaccggcaacccaaccccgtggaaactggtatgcccactttgaggaggttgtctgaccgttccagggtcaagctgcatcactgcaaggtggaaacgatggagtgaggcaggcttagagccgatgtgccttccaggacaggtaggagttccagataacagcaacacattggacaacggccaacctgtaatgaagggggaccaggtagaagttggctaactgcacagcaggccatagatagtagttggtgataagggcatcaggataatcccgctgtagtttggcccagttgtcctgggctgacagtccattaagggcccctaccagtgggagaaagcagcctagaaaacacggggccaagcccccctgatccaacaacatctttttcagggcatccactttggtggtcccaggaatgaaccgtccaaaaccttggaccagccttctacccagggcccacaaaagcctcatccaaggaacccctggttcagagcccggccctttttggtgtttcctggaaacccctgcttttttccccaatttcttggggagaaaagagcacccaagtccccattaggggaccc

SEQ ID NO: 216305 - DNA, 634 bp, Homo Sapiens; identical to SEQ ID NO: 44197

SEQ ID NO: 216306 - DNA, 785 bp, Homo Sapiens; identical to SEQ ID NO: 54688

SEQ ID NO: 216307 - DNA, 910 bp, Homo Sapiens
atattcacctacagacattaagatgcagcaaccggcccggcgcggtggctcacacctataatcccagcactttgggaggccgaggtgggtggatcacgaggtcaggagatcgagaccatcctggctaacacggtcaaaccccatctctactaaaaatacaaagaattagccaggcgtggtagtgggtgcctgtagtcccagctactagggaggctgaggctggcctggaggttgcagtgagccaaggtcacgccacttcactccagcctgggcaacaagagtgaaactccgtctaaaacaaacaaaaaaaaaaagacttcacccaactaactgtgcttgtgtagaaagaggttgcatccctgttccagtcatggccatgaggaacagctatgagaagggccctaaggcacagcatggtttgcagtaagaagggcagagccagggagagagaagtaaacatcatcttctgggctttggtttcaaaaatcacaaggtgtgggcctgagcctgctgcctgcccaggtctgggcgcctccactcagccactgtcctcccagtgcctctaaatctggaaggctgcatctgaacctgcccttccagacaacacccctcccctgggaaaccaatggggatgagtagtggccctccactggggactgtgggtttcgaggtgggggcagaggatgagttggcagcagtggcatatcatagctctcttcatgtcagcagggagagggaggtgccactgcctcccctgagatgagaaagcaggcgagaatcaccaggggaagaaccctggggcagctggcttgtcccagccatgcctgagtgcaccaaatatggaggctgcgtcctcactcggagagccaggcagcctgagcaccaagatccgtcagaagcagcaggcagc

SEQ ID NO: 216308 - DNA, 438 bp, Homo Sapiens
cattcattatttatttatttattgactatctagtatatgcttagccccgtgctgggtgatgatggggacagtaaagtgaccgtgacagaactctcatggcaatagaggcttccagagctcaaatggcaatcacaaacggttcagcaagaatggcgatgcctgccatgaaggaggaggtcagagagctacaagagaggtatctgtgaatgggaggtgggatcatggagaggtcccttgaaagatgggctaaggatatgtgcacacaagccctggggtttcagggcacacctgagacacagtagggctcaggaacctggaaaaagatcttggaagtggaaggacgtaagggctagggacgttgggaggtgagaggtgaggcagccatccaggcccagcggaggaagcaggaggaggatgcggaggagtccggggtgtgta

SEQ ID NO: 216309 - DNA, 443 bp, Homo Sapiens
tttttttttttaagtcattatgacaggcatttatttatccttttacaatgtttctgttactttataaagaaaactatttagaaagacaaatttagttaattctttagcagttgtcaaatgtgtctcctcaccaaaagattttactcttatgtgacttgaccattagtattccacaaataatttatcctagaactccatttatttatgttgatggtgagtatctgtaaccatcctaaatttactgcattaatattttacttttctttctaatcaattttaggttttaatttgaaggtttcatctttccagtattgatattttaaaaaatcttgatgtctcaaaaattatcgagagataacataaaggggaacacaccaaataatccacagcttttgatgttgggaacagaaaaacctgcatcacagacctccaacagttcttgg

SEQ ID NO: 216310 - DNA, 536 bp, Homo Sapiens
aaagacagacttgtagtttattttgtattttttttaaataaatacactttacattaaagaaaaaggcctttgatttgtaatttccacaatggggagaaagggaagaaaaaaagatttttgaaaaactgaatcacaaagaaaaatagagggagtgaacttatatcctaagttccctcaactccacaaaaccaatatccacaatgaccatgctgcccccaaaccatgaaggtgagtgaatttaggcatttacccagcagacagagtgccttcctccccacctctggcacgaaggaaaacaaattaacctgacagcatatgaggcaacaaaacaggttaaaaaatcatatattatatttataataaaatattcttaatccttatcaatttaagaaaccacgattttccttttcatttaaatacgtatgtaaaaatgcctctatattgttctttagacatcattttcttccaaagaaaatgaagtgcagggacaagagacctggtggatataagttcataccctcagttataaatgcctg

SEQ ID NO: 216311 - DNA, 462 bp, Homo Sapiens
tttggtttttgtgatgctggaagaatgaccagaatgagtcataggaagagtatacattcctgtagtattttccaggacagaggtgtgacctcctagagtactgggaccaaaattcccaagtgtctgcaaccttgctttaacagtatgggagatcacctctatcacctggaattcccctggaactctggaatatacaagagaagtatgagacttgggtcttcccttggctgtgtttaattcactcttctatggaataccaatgattctcactaagactggccttttcataagcacaatgtgcattttatggagaagattttacactttgctctatttagaaagaataaatatgagcagtggtttaggttttatgccctggacttaatatgtttctgattcctgttttgagattaaattctcatgtaaatagaaaaatacttattatttctcataaggccaagt

SEQ ID NO: 216312 - DNA, 485 bp, Homo Sapiens
  misc_feature (468)..(468): n is a, c, g, or t
ggtatctcaaagtgtttttatttttaaaatagccttattgtgatataactgacatactataaagttcatttgttttaaaggtacacttcaataagttttagtaaatttatagggttataaccatcaccacaatcgaattttaaaacacttccttcaccccaagtatcttgacatgggttaaattttcatttctctgagtgagagtatgttttcattcatttaagagccatttctatttccttttcattgaattttctgttcatatactttgctctttttttttctattttttttattgatttgtaggtactctttatatattatgcttccagattagtgtaagtgcctgtcctccaaaattcaccctgtggttccaattctcacaggctggaattaatagaacctgtggatggggctgctcctttaccacaccgtgaggtgcctgcacacagtgaccttatttgattntattccatgtcctctgc

SEQ ID NO: 216313 - DNA, 456 bp, Homo Sapiens
  misc_feature (449)..(449): n is a, c, g, or t
gaagcaaacaatatcttataattatacatgtaatacagaatgatagagaaatgttttaagtacttaaaaataccttcgttcaattttcaaaactttgaacgtaataatttaggtagtaggaacattagatgcaatctatagaagaaatattagactcaatctatgaagaacatgaatttttttacaacctataatggatcctgatacctcatctataattttagttttctatagaatcaataatataattagtgtaactgcttaaaactgtattacattgatcttcaatgctacttaatttctgagaaaacctaagttataagagtacatcagaatctctattatcaaccaaagcaaaacttctaccaacatcagaatggatactttttaaacaaatttacatataccaacaagcaaaaaactagagctttcattcctgcttgacattnttttcac

SEQ ID NO: 216314 - DNA, 946 bp, Homo Sapiens; identical to SEQ ID NO: 49017
  misc_feature (20)..(20): n is a, c, g, or t

SEQ ID NO: 216315 - DNA, 901 bp, Homo Sapiens; identical to SEQ ID NO: 45689
  misc_feature (493)..(493): n is a, c, g, or t
  misc_feature (622)..(622): n is a, c, g, or t
  misc_feature (634)..(634): n is a, c, g, or t
  misc_feature (789)..(789): n is a, c, g, or t
  misc_feature (853)..(853): n is a, c, g, or t

SEQ ID NO: 216316 - DNA, 869 bp, Homo Sapiens; identical to SEQ ID NO: 40048
  misc_feature (761)..(761): n is a, c, g, or t

SEQ ID NO: 216317 - DNA, 890 bp, Homo Sapiens
  misc_feature (654)..(654): n is a, c, g, or t
aaaacttttaatagtaatttcagatacatgtttttttttaggacattacctttatttatgacttaggtgaaacatgaaacacaggagaccagactgttccaaacctaagaacaaggcttatttaaaacaaaacaaaacaaacaaacaaaaaaaaagaaaaacaaacaaatatacggaaatcaccaactataaatcatatgctaaaaccaaataaaatgccagtatatccatacattaaaaataaccaaattccttgaaacttacctttccttaaccctttaataataatctaccctaacttttcctccctgctctgaatctctataacacactttctataattcatactgcacttctttatattatctatattgtttttatgcagacaagcattaattatatctcaaactagacagtaggttcctttgaggagaagagactttacagtatctagcactatataggttggcatgtacttttggcagacatcaccctatgattcaactggagtgagaaggatgatgtgtactgatgccagggagagtaagacataaattacacatatagagtcagcatctaagaggttgctgtctggacaaaggggctagtataattttgattttctaatactaaaaacaaaactaaggtataatntctcaacagcacaatacttaaatgaaaaaaaggatgcacaattcattatgatcaagatgaaatattaagtataaatactactctatttaacatcagaacttgtaggtaacaaatccagaaacgacatgccggaaaatatggtcatttaataaaaagcaggggtggacattgtgcgcatgcttcttcgggaagaattattctcggaaaccccgtgttaccaattttcactcttcttt

SEQ ID NO: 216318 - DNA, 1000 bp, Homo Sapiens
acaaagtatttttgtgaaatactctccattggctttgcttgctcagtacattcttttatcttcaattgagactcaagggagggtatgcttgcattattataaataccacaaccaccaccacacacaataaagaccatctctgcctcaggacattcgccccaaacctccatcctctctgtttactttccaccaagcagaagtttctgaatggtccactcacatgctgccattgcgatttgccgatgggcactaccaaggtgtctctggcaattcgcactccaggtggrgctgacctatttgtagaaagcctcacaaaccctagctcattatttattcattgattcattactattaatacttatatcaagtctttgcaaacattcagcatgaagtaaacatagtatttacagcagtactcggkttgcaattsaacacactgacaacagaggcaaagggaccaacagactgtaagagggccagaggggaaagaatattaatataaatcccttctgccactgtgtgcgtgcgtgtgtgtgtttgtgcgtgtgtgcccacacatgagcatattttaattcacagaaaactgaacatgccctcctttaaaagcagactatttacaagtgattctgaatagcatgaacacatgccagtcatactggatacttgctttctgtaaacacatctagatgtactttttacaattctgaaacagatctttaatgtgatatgttagagaaaataactttggaacatttgtcaacttttggttcatagtaattttgcaaaaagccacaaaccatgctttgtcgtttaaaaggtgaacctggtcaggcacttytagaagcmctgatgtgttatttattwctggtcwcyggggattggaagamatggcagtwmmmagagrcttagtgctgctctctgctttcmcagtaamacataawgtaagaragtttagaacmcaatccctacaatcwcaaacmttcmgttammgtgttaaaaa

SEQ ID NO: 216319 - DNA, 939 bp, Homo Sapiens
  misc_feature (707)..(707): n is a, c, g, or t
  misc_feature (812)..(813): n is a, c, g, or t
  misc_feature (822)..(822): n is a, c, g, or t
  misc_feature (825)..(825): n is a, c, g, or t
  misc_feature (863)..(863): n is a, c, g, or t
  misc_feature (936)..(936): n is a, c, g, or t
attaaaattctcgttatatcttgactatttctagcgagagtggtcagctgagtgcatactgtccactgagagggattctgcaatgcccttggcgtcttaaacacacaaaccttctttccatcaaattccagttgggtgaaaacttcactggccttacaatcaatgttccagttgccatccactgaatttggtcctcctaaaattagattataagcttcccacctctatttgtcactaaatctcaaaccagaacatgacgggttaagtccatgattctgtgtcatactgaaccccgtgtattgacaagaaactgctttggtcataaaaacataaagaaaacgtacagcttctttctcagaaccatgacttaaccattccagtaatcttaatatgcaactcacaagatgctaggagactgagaattcaaactggcatactggcccatggaattattcatctctttgttcaggtagaggaagcaaaagttaccaacattaaaaaaaatgtttttaaagaacaaatacaaaggttctatccaacaagaaagaacatccagttttgtcttcccttcaaggccacatatgtcctgttgagtccaaagcatccagtaagtgtgcaggatgggcttcagctagaaggccactgatgagtaagcttctagtagtagctgcctaagtgtgaaggcacgtgggtgttaggatggcggnggacgttggggtttggggttagattccccccgtggggggaggtccagtattgtgatgcggctccaaagaagctgggagaagtgacaggcatggaggatggatggnngagggacanagntcaccttctgctggtgggcatgggtagaaggcatgtangagatgtcagaaagggtacttgtacatggaccgactcgtccggatgtggctgcagagcctgggcaatgccgtngaa

SEQ ID NO: 216320 - DNA, 1000 bp, Homo Sapiens
aagtgacagataatctattatacatttatttatcctataaagtttgaactttagacatgtctactagacaatggagaaaggcaatgaccacctgatatgttgatcttgattccggaagactgatgtgaaagttgaagagaagatggaaatgagtaactaagagactgtttgtatatttcagtcgtttaacactttgcagtcattagttccagtagtacaccaccaagttgctgcttttaaaacatcaataaagagctatttcttatgctgtacctcttttcaggaaaacagaatttaagtggatttggactccgtagtcaaagaagaaaacacctttttttcgccctcaataattcattaacactatgatttttcttcctgcgaattcttctgttgcttctatcagtttttcatgaacaacacattcctttaagaaaaaaaaaaagccaaagcaacatatgaaacacagagcataattgcatagcaccagcatagaattgckttccagtggatgaattgggtctgtttatttcttataattcatcaccatcatctgagcyaaagcbacttctcctactgcgtttctttggaaactgcaggggaagtggcagatagcagaggatctgttccaaatggagagattgtgtcatccaatagcatgccatccaatctttgttcctctttcaatgcagcactaaatgwtaaatctgtgaagtatgacaaaggwtytgaawaggctatwkcttgawcacagagctcagggcttggccccygagacaaagtaagttgttgggmaatagtmtactgtattctgytwgkttttctccgccgtcttgtgayttgagtyccawatmaccgtgccaagtgaagcmgggttggmgacctgagtygagcttatttytagttctgttatttaaygwaatcatwaawattgtyttkaawtggattaymywgagwawakcagaatagawcaaatwataamagctttaaaagagggtaa

SEQ ID NO: 216321 - DNA, 479 bp, Homo Sapiens
cagatctatggggatgtgctctacttcctgacagagcaccgcggcggattccagcacggagagctgggccaccctctctacttctggttttactttgtcttcatgaatgccctgtggctggtgctgcctggagtccttgtgcttgatgctgtgaagcacctcactcatgcccagagcacgctggatgccaaggccacaaaagccaagagcaagaagaactgaggagtggtggaccaggctcgaacactggccgaggaggagctctctgcctgccagaagagtctagtcctgctcccacagtttggagggacaaagctaattgatctgtcacactcaggctcatgggcaggcacaagaaggggaataaaggggctgtgtgaaggcactgctgggagccattagaacacagatacaagagaagccaggaggtctatgatggtgacgatttttaaaatcaggaaataaaagatcttgactct

SEQ ID NO: 216322 - DNA, 701 bp, Homo Sapiens
  misc_feature (28)..(29): n is a, c, g, or t
  misc_feature (507)..(507): n is a, c, g, or t
  misc_feature (515)..(515): n is a, c, g, or t
  misc_feature (523)..(523): n is a, c, g, or t
  misc_feature (527)..(527): n is a, c, g, or t
  misc_feature (549)..(549): n is a, c, g, or t
actcasgtcagavaactagaacgccatnnabacamatctctacagggtcgtagttcaaggcaattgcacataagatgggctgggctcttcactcagctggggaaagttctggagctcccacggaaacccccagccagctccctatggatggctctcttgatatctggtccatcccgcggtcccggtagcaggagaagtggcaggtcctggggtggctgggtcacctgctagagctcttcaaagaaggccactcgggacttggcgctctgcaaggtgagtttgagggctcaaatgcagataggtcttctgccttgggcttgaggctttttaatggtattgtgcttgctgctgccacccctgtcggagttctcattgtgcagaatatccagagctgtctccctctctttcagtttcaaggcctcgatttctgtcttgagttcattgagctgctcctgcagatgcttgctcttttccatgtattccactttttctttctctatctccatnggaaaccngcttcatntcantatctttgaagtcgaaagacanggctgtcaccaaatgaggttgaagcrttggtaatgyaggaggcaacggtgctggaattgggttcatgggcgggtacgtgggctggtgggcawatcccaggattttcgtytgggtctywgctccccctcgcgtcgttcctscsggwgktgctt

SEQ ID NO: 216323 - DNA, 898 bp, Homo Sapiens
  misc_feature (608)..(608): n is a, c, g, or t
ctcgctatttttgattttagtagagatgaggtttcaccataggtgatccacccgcctcggcctccagtgttaggatacaggcgtgagccactgcacccggcccaccttaactttacataggacaagagtcccaaacatacaaactgatcacgaagttaacatatacacctcagacaggaaactggtagccaacagcctgcaagtcatctactagatgtttagatgtttccaaacaagcaaggtgtcatcgtgtatcaagtgtggctgtgagtgcagcagcagaggtagcagcatcacctatttccacgccagtaacagctccctgggtgcctcaataccggcacccggcagaggcatgtagacaaaacagaatctgactcggtccctgaagctgcttctctggggttgtcatggccatagctgccaaggagagcaggtgctgctgtgagctggtaggactagggcaggctgtgtctgagcactgcacgagaaaccatgctgccctcggacacagaagacatggggatgccagctcagaccagggcaccctggcactctctctggctgcctcttgtccatgaagcaagaacaatggctttagaatgttnttgttttacaggagaggccgacacttggcagggccatctcataccttggtgtctgggtgaagaagcccattgaaggaaggggtaatcagagcatgaggaccatggttaccgggcacaacaagctttaagaatggcgccccaaagtcccagaagctacatttacctagaaactggtttggctaaaaaaaggcaatctttatggttggttgcacgggtcctggggcccttaaaaccccttctactttgggaaggcttgagggaagacctgtttgtggggcccatgaatttaa

SEQ ID NO: 216324 - DNA, 662 bp, Homo Sapiens
acaaagcagaggggtttattataggaacattctcaaaccgcaacggaaaagatgtccgtacaggtggatggggatggagatccacctcggagtacacagacttcagggggcctcctgcctggcacgttctttctctcccgtatcacctaagaccctgagacccccaccctctgcaggagagacccacaaagaagcctcctccctgtggcctggctcccatcagggacagtcctgtttttagagcaagaacagtctgtacttcagacaggatcccaacccccacccaaattcaatgtcgaccgtctgagcagccagcttcattggctgcaaacgcctctctcaggtgagtcaaaggagacacgacggggaaccagggggccctaggtgaggatgtcatgggcctggtgctccaccagcatctccatgctcttcacatccgtgcaccagaactccaggcggtccttcattcccttgatctgttgcaaatccaacactcggggctgcacccaggtcatgtggactcgtttgtccacctcgtctatactgcctttcaccagccccaccgaaagggccttcatcaccagaagctccacctcattcactgtgattttagcacttttggcaatttcttcaaaagtgagttgtctgtgattggcaggtcg

SEQ ID NO: 216325 - DNA, 971 bp, Homo Sapiens
  misc_feature (21)..(21): n is a, c, g, or t
  misc_feature (23)..(24): n is a, c, g, or t
  misc_feature (26)..(26): n is a, c, g, or t
  misc_feature (28)..(28): n is a, c, g, or t
  misc_feature (539)..(539): n is a, c, g, or t
  misc_feature (580)..(580): n is a, c, g, or t
  misc_feature (594)..(594): n is a, c, g, or t
  misc_feature (606)..(606): n is a, c, g, or t
  misc_feature (609)..(609): n is a, c, g, or t
  misc_feature (614)..(614): n is a, c, g, or t
  misc_feature (618)..(618): n is a, c, g, or t
  misc_feature (624)..(624): n is a, c, g, or t
tcttacatcttcctttcctgntnncncngcagcacatggattagaaggttctagtagattccagcaataaaattctatatgctactcagaaaatatatggctagcgagatagcatccctgttctctcctacgcagtttacgtattcatgaacagtgaaacctttagaagcaaacagatatcagataccaatgatcataccaagaaatgrgacaggagactttcacagacttgattctaaacctaatcctaactgatgatagggtggttttcatcacctccatccacatcctcacacgtccaaaataggccagckcagctgtgtcacagtctaccatgggaatatgtccaggggaatccatggaaataagtggctggaggccttgagtctgggcaccagactgtgtccctgtggagaaggcccttccatcatcaggsttagckggaaactcattcacttggrggggagaaggcaggcgtgcctcatcagaactggaggaggaggttgtggagaagcctttttcctctcggtgagtgtgtnacacagcattcaagcggatgtccccacaaggaatttctgtnggggtttctggggnaaaacttttaanaanacgcncttnaaatgnccctggagtgatgagtcaaccgataagcgatagtatgtggggatgcaaatgaaagatgaggttcctatgcagtaacccaagatgatactccagtaaggataattatattggaaaagtcgtagttgtggcgggctcatcagaaaactgcaattgatgaacaggagaaacagagggctgatggccacccagcagatcctccagaaccaccccgggctgaagccgagcatttccttcacgtccctgcagaactgagtgatgcatagaacaagamamgcgactgcttcgwtagcgcgaagtaagmctgcgggcccgtggawactcctcmgsmgcttcacmcgtggcccctc

SEQ ID NO: 216326 - DNA, 1000 bp, Homo Sapiens
  misc_feature (49)..(49): n is a, c, g, or t
ttactaaaattatttcatcccacctcttttaatatacattatgtgtatntatttttttaaaaaagcaacaggaaaatattaatagatttaaatacaccatgtaggcaaaacacactaatatttatgtcttctaaacctgtcagtgatatacaaggaaacttgtgacaagtcataatgctttcataatctgtcaggaaaagatcacattaacatccctatatgcttcagtacaaatgtatgcbataaaccacactgggtaaaagtaatattcctgtttttatttttggaagtaattattagtaagtttatgcttattaaatatatccttaaaaatttccatcacttcagaaacccataaagttagtgagcsaaaggtttgttttttgtttttttttttttaattttagtaaatactttcatctcagaagtsaaaatggggcagaagagcyatacaaaggtacatagtttaaatctttgggacaagagacaagaaggtaaccmagtcagtagcccccccaagcytcacttaaccbaaaattgtagatcatagtagggagatgtatacatcbatctattgccaaagaggtataacttattttgacaacctttctaaataattttatggtaaggccataatataaaaatattatacacagtacagaaagaattaaagttaatgataaagaccacaaaataaaataatccaagcttcttatttggaaaaagaaaatagaaattatactataatatttagtacctaatatgaaatctccactcattataagtagtaatgtagattgagattttgcagwwcaacgttgcatgtkactaatgagagaatcaccagatagctcatgtcgagtctatgaacttaaacttttttataggtaagatatyttaaaatacmaccaggaataagattgtaaragtmatatagtamawaawgmaaagkatatgtatttgtgcattaaatwcaaaatgtttacaatgacatawataa

SEQ ID NO: 216327 - DNA, 594 bp, Homo Sapiens
ccaaccacccagcacccttgcagcagaactatccacctcaccagccgtccaatccactttgccacctcctctgcctgtggcgacccagcacatatgtgagaagattccagggaccaggtcaaatcagcaaaggttgggcgaaacccagaaagctatgctagatccccccaagcccagtcgaggtccctggcgacagcccgaacggaggcacccaaagggaggggagtgccacgcccctaaaggtacccgtgacacccaggaactgccacctcctgaggggcccctcaaggagcccatggacctaaagccagaaccccatagccaaggagttgaaggtcctccacaagagaaggggcctggcagctggcaggggcccccaccccgcaggactcgggactgtgttcgctgggagcgctctaaaggccggacacccggttcttcctaccctcgcctgcctcggggccagggagcataccggcctggtactcggagggagtccctgggcctggaatctaaggatggttcctagcaggacttggtggggggaacagggattggggatgggaggggaggcaattaaagtattttggcctt

SEQ ID NO: 216328 - DNA, 1000 bp, Homo Sapiens
  misc_feature (501)..(501): n is a, c, g, or t
acagggtctgggccagagaaggggctgaagaaatagtttttggtgagcttctgggtcctgtgagggatcttaactccatgcccagctgagctgaactctaattctccgcatggtttggggttggtggggctcctggtgccccggacacaatggcaaatatgaaggctgcccaggacctggaggactcagcgaccctgcctctgccatttggctgtgagtttctgtaggagctcatgtggtcgccggcggaacttcttctgggtgaagtagaagaggatggggtccagcacgctgttggcactggcaaacggccgcgtgcctttgtaggccgctgcaaaggcctccaatacagtgcaggggacgcccggcgtcgagcgcactgccaggtaggctgtcttggtgatgtgaaaaggcaggaagctgatggcaaaggcagcagccaccaccacggccatgcgggccgccttgccacgccgctcctgggccacaggctctgccggngccatcctggcggcacaggcggcaggccaggagacagttgcaggccagcagggcagcmaagggcagcaggaagccgatgacagtgagagccatgccatagggcatatagtgggtggccagggcaggcgggctgaggtcatagcagacagtgcggttacctgggatgcctgtbgcagcgaagatggctgtgggcaggcactgggttgtcacggccagccacacggctacacacactagccaggcagcccgggcggcccccacgtttgtgccagggggccagcgggtggcagatgcccaggtagcgctggaagytgatgcasgtgaggaagaggatgctgccgtgcaggttggcatagaagaggaagcggacaagcggcaggsgaatcgcmaaaggscagtkatymcyttggcmtatttttgatgarcagggcraggagcrgcatatarmmgkycamcmaaacaaagtttargtttmmmgscgtkcgggtaaggccgscgg

SEQ ID NO: 216329 - DNA, 1000 bp, Homo Sapiens
  misc_feature (714)..(714): n is a, c, g, or t
gagcatgcatgaacagatgattcattcgtttaacaaaaacaccaattgatactgagaacactaaattattaaatttccaagacatataaaattctctttaagttaaagtgagaaagaaaaaaaaatcacaagttgaataaatacagtgatttcagctggtccaatgaaagcataaggcacaaattaaaccaagggactagcgcatcagaatgaagcttgtctggcccacacaagtctctcagtgtggctcccacgaccctgcacagatgcttgggaccaagaggaaagagcacctgcaggccgggaaccctcccttccaggttcaagtttggctgggtgcccatgcttcttgtggacaggcctctctgtatcagagaaacgctgcctctaatacttttatgggtaaacaaaaccttcatgctctatcaaacaatcctggcatgaataacatgaaacttcaaattaatgtccttttccctcccaaccaaagtctagcaaataaaatacattgtgaaggaatcctcctgataggatttcagtgtctacaaagaaaacaaatgatgatgcagtacggcagggtatgccgagtgggtgtctgaaatgtgaccttgtatatccctctcttacctgctcactctgccttcactttccttcctgtcttagaagtggatcagagcctcagcgattcccattccggcttacactgtgtgtagngggaaacaacagtcacccttcccaaaggatttgaagccacagggttccagagcttttgtccatctgtaaaaagtgtatgcctctgagtgcctaagtcagagttttcttcatggttaactccaggactcttgtgtatggggtgtagttcctagaaggcatcacaatttcacgagtcctgcctgtttggctgggtagaagatcacagcccactcctatctctctggtttcacttcggtcttggcctgggtttckgttaatagtcmacctgyttgtaktcattatytct

SEQ ID NO: 216330 - DNA, 974 bp, Homo Sapiens
  misc_feature (20)..(20): n is a, c, g, or t
  misc_feature (25)..(25): n is a, c, g, or t
ttagatgaaatgagaatatngagtncactgaaaagtaacatcaccatctggaaaattatacataaggaaaatgcaataagggaatatagatccttcagcccctattccagtactctttaacaactctgcttccttggacgggaattcatgaggtataatacttaaggagattttcatctgtaggttttaggattttcttatcggccatattcaccacccatcctggagcaagaccaaagaaaatctgccttggatccttcctagtacagagcattttgaagagttcatctttagtgatatcaggtaagatataaccatacttcctggcgagttcaagtcgtgcttcaggaaatttggcaggatccgccaggtacccacggttctttgcatcagtgtaatatggtaccagttcttctggtggaagcattctttttggaatgggttgtccacgaagaaagaatggaacaggtttgcatacaatgtccagacttcttggatcatagaaggctgtagtaacaacaccaccatttttttcaatggcagcaatagctagttctgaagccaactgtacttcaatattaacttttgccgtaaaggtgtcagcaccctcctcaaccagctggacaccataatcccttttaagtggctggatggtcacacctctcccattgacaagctgggttaagtcaataggttgactaggatcaacacgacccaaatcaataagatactgcagtctattgagactcaaaggcttatactggcgtctgaaactatgtccttcgttaaacccgtattttgggattcggatgtaaaatggagtctggcctccctcaaagcccaagcggggccgggttcctctttgcctttctcctttatggcctctgccacattttctacctcttctccgacctcttggtcttctctccggtttcttggagccgggattcggctttaagttggccaggctcaca

SEQ ID NO: 216331 - DNA, 924 bp, Homo Sapiens
  misc_feature (28)..(28): n is a, c, g, or t
caaaagtgagccaaatcaaataactgcntgatccctctgctaccacccactgagaggagaaaagtcatttagttccaagataaccttggttccaggctagatacagaggggcccttgggacagctgtgtcaccaactctggagcagtctctggaggcaagtccagagcattaacataaaagtgtcccagtcccacagtgccccaggtcccagcacccctgctccaaccctaaccttggatacttttggccctttaacaaatcaccacctctgcttgcaggacttgatcccatgtgtgggctccaaggccttgtctggcccacaccttctttagtgtctctcacttccgtgtcctggcttcctcctggctccagatgagaatgtggtaacccattgcagaggccagcgtgtcccccatgggattgaattcattaagcgaactgatgccagaagattctgggtcatagagctgacacatcatcttccctgagtttccatcgaacacgtcgatcgtcctcaattcataaggggtacaacttttgaaattaggatctgggtatcggcccacaacaatgaggttgtagcgaggatgccaggctgccttgatgggtgtgaggtgctggaagtgacggtgagggtgcgggatcaggcccagggggcagtcccactgggaagcagagtaaactcggatctcgctcttctggtccgtggtcaggagccgggctccatcgggactgaaacaagctgcgttgacaggatgcctgttcggcacsaagtagaggaagctggctttccctctaacctggcgcaggtcccaaattttcactgtttgatctacggaggctgtggccaggaaccaaatcacagcatgggttcagggccacatgcgtcactttctttttgtgcattctgagattccaaagct

SEQ ID NO: 216332 - DNA, 976 bp, Homo Sapiens
ttttttktttttttttttttactaaaataaacctgttcgggggaacagctactagatgaatttaagggttttatgcaccttatagaacttatagcaaaaatagttttagttgatttcattataaataacgttttcaagaacctgtgcaaaactgtcaataatttcctaaagcacaattgatcagaaaaatccatgattgttcagccttcacacccttcttcatgtaagaacacctttctgtacatctcacagttacttattaggbtgaaaggtatatggagaatggtcattagacgtctcgacagccacctgctgttgaccacttgcctcctcaacaggaaccgctgtcgtctgcatatgtgcatactgtggcaagtaggctccttgcatagctgacgttgcaggcatgtatgttccggtgctgcctagtgacagatgactcatctgctgggccagagggctgatcattgatgcgggctgtagtgacatggtgtgctccattgagggagttaacacggcaccagggtgctgtagaatatatggttgaggttgcatccacgaaggactttgcacctggtaggcagatacaggagatgcaatatagggtgtaatagaagtttgagtgatcattcggtttgtagcaatactgtatggtgaaggataaaatccgttctgtatagcagctgtagttgggtcgtaagtaagtgtcattccagcctctccttctctatgccatggtcttccattagggatgtatttgtttgggttctgtctctttttctgtcctccatcagcaaacttacacaataaaggttctgtgggggcagaaactcctggtggtgtcttaataaattttccattaaaatgaccaataacagcttcacatttttctgttgattccwcctagcaaagccaacacacgacttgtaccactgggatcacgtrtatccttgtagaataacttgtccaatggktt

SEQ ID NO: 216333 - DNA, 1000 bp, Homo Sapiens
aaggaggccctggccctgaacccggggttcccacaggaatcagggaggcacctgagtcccccaggaccagggcatcccaaggcatcatggcagctgcgttgttcaaaaggaagtttcattgagcttcatcttgggaggtgtgaggggagtgccgagaccgctggagggccacggggctggtgtgggtggccgtcggaggtctggcccactccgcaccagttcctggcagcgttccacaaagctgcccccaccacggcgccgggcctcagcctgcggggggcttgggctcccacggtggccagacaaggaggtgttgctggaggctgagtggaggctggtgagggagatgcggggtgaggggctggggagacagccccatgagggagctgaaggagccggcggggccagctcacagtgttccagctgttccatcagctcttgctccgtcaggccacctgcaggggcctggccgaggccgtccatggcggtggttaggtcccacatggccaagctgccgttggcctggccagtgagcaggtagcgccggggccgagagccgagccgccgggagccctcgcactccagcactgtgaaggctgtcgtgggtgagccgtccacggagcgcacggagcacacccgctgcccagtagatgagagacgcacgaagagctggctggcactgggcacaccttctggatgaacacttgctggtcgtcccgctcaccgtaggggccaatgtcattgccagcactgcagccgccatgcccatctgccgactccagagccaggatcttaaaggaagcgagtggggtggagccgggctgggtggaaatcatgccgcggaagaagtyacagaccatgtccgcacgtggttkttgtcggcacagactgagatgaggtgctctccgacagcatgatcttkgtgacarggstgcggtgcacagtgaaggtctkggagagctgaggcccgagccmcagtctccgggkgctgacgatgacc

SEQ ID NO: 216334 - DNA, 808 bp, Homo Sapiens
  misc_feature (766)..(766): n is a, c, g, or t
  misc_feature (788)..(805): n is a, c, g, or t
atgttagatttgtgaatcctacatactgctcaagctggaggacgtagaatttcactggatcagcaatgacgagcctacacagtactggagaacttggcattttctgatatagaaaaaggctttccttggtatcgtgttatcatgtgtcgtcatctatgcattagagttgatgtgttttgtactagtgtcacattttattttcatattacaagtacgtaaggattcagggtctcttgatagacttatcatagctctatattgaatgaaagccactgtgcttgtgttttgattggaaattcctttagtgtcagttttttggaagccaatgatgtttgccactgatacattcatagaagtgtattatattttcatgaagctttgctttaagtgacactacgcgtgcagttcatttctagttcttgatagaactgcacttaattttcagtagtagtcttgactttttaagggctgtgttatattaagttctcccttactgttaaaacctaattaaatatgctttagaattttctaagacagtcctctggatcctctaaatgtgaattttgatgtaataactgctaataaaattatattgaaacagtgttttatagaaagttttttccaaagttttctatgtttggctcaattagggcagtatcatcagttctataatgtaaaagaaattttctttcttttgaggtattccataaaagtagttgggaaaattattatgtaaaataataagactcttccaaagccttaatanaaacatcaacattgaaaacagnnnnnnnnnnnnnnnnnnaaa

SEQ ID NO: 216335 - DNA, 879 bp, Homo Sapiens; identical to SEQ ID NO: 41468
  misc_feature (782)..(782): n is a, c, g, or t
  misc_feature (803)..(803): n is a, c, g, or t

SEQ ID NO: 216336 - DNA, 745 bp, Homo Sapiens; identical to SEQ ID NO: 55311
  misc_feature (13)..(13): n is a, c, g, or t
  misc_feature (23)..(23): n is a, c, g, or t
  misc_feature (42)..(42): n is a, c, g, or t
  misc_feature (655)..(655): n is a, c, g, or t
  misc_feature (709)..(709): n is a, c, g, or t
  misc_feature (734)..(734): n is a, c, g, or t

SEQ ID NO: 216337 - DNA, 554 bp, Homo Sapiens
aactgcaaactgtttattttctagctgttattttgctatttggcatttacgtaaaagcacacgatgaagcaggtatcgccttacctgttgaaactgaaaataaagcttgtttatttccaagttgtgtgcctggctcctcactggctatcaggcgtcgcgtcccttcccagtcccagcccttggcctctagcccaggccctgctgtctgcagggacctgcctgggcagcccagtcttgcgcatcctgggacctgccagcggccctgggagacaggcattggcagagccatgcacatcctccctggaagcgggagggcttttctggtcccctggctgggctggagctgcgttccaaacacatgatcactctgtctcttgcccacactgcacactcctgggggcaagaggctgtcctctcctgccctgacacagcaccgcagacagggggtccagccaggctcgccctcctcctcggagggctgtctcgagtgctgtggccatgcccacaccaccccttccgccatagcacagccatgtccatgtcggggggtgggg

SEQ ID NO: 216338 - DNA, 1000 bp, Homo Sapiens
gcctgtcagagctcaagctcaagtcaccagaagatagaaaatatacttgtacgttactccttttttcattgtaaaattcacacatgtggccccacgccctaactttttccataagctgtcctccatgctcccagcctgcctcactgctctacgatttctcagccctggattgttcttccacagatctgctcatcaactctggctcctgaccctctctccttagtgaccccaccccattcccaccccctgcgaaagtgaccacagcttccactatggcaagggtttaggaaggtccaaagggctcttcagtgggtactggcaggcattcagtttaggtggaaggcccgagacacctcccgataggcatttcgaagcaggacataagggaaacaggactccagcatgtccagggtcaggaaggatgactcctccaccaccaagcgcatgagcagagaaatggattctcgatttctggttttaagcttgtcagtctcctggcccagctgcaagaggctgacagaggccaccaccagaaattccttgaggtgagtttcaatgttcttgttgtagagcgtgaagagggcagcagacacctggatgatggctttggtcaagcaatgaatattgttgttgtaaccatccttctcaatgctataaaaggaagaagggtcagtggcaaggagtgggagggaaactgccagaaagatcaagagcaggcaggccaccttatattcctcctcaggagatgaagtatcagctttcagattagcaatggcagccaccaaggctgggtcaatgtcacagcccacacctgcagcagatgccagctcaaagatactcaaggtcaccttgatgtctgtgtctggagtgacaactccttycaagcactcaatgggrcccataagaaatggggagtgggrggagaaacctcccgagtccyyytkggscatggcctgaaactgrgataacccmatgrtggcatgcgcttagamattttagc

SEQ ID NO: 216339 - DNA, 963 bp, Homo Sapiens
caaatagcaaaattgaggccaagggccaagagaatatccgaactttaatttcaggaattgaatgggtttgctagaatgtgatatttgaagcatcacataaaaatgatgggacaataaattttgccataaagtcaaatttagctggaaatcctggatttttttctgttaaatctggcaaccctagtctgctagccaggatccacaagtccttgttccactgtgccttggtttctcctttatttctaagtggaaaaagtattagccaccatcttacctcacagtgatgttgtgaggacatgtggaagcactttaagttttttcatcataacataaattattttcaagtgtaacttattaacctatttattatttatgtatttatttaagcatcaaatatttgtgcaagaatttggaaaaatagaagatgaatcattgattgaatagttataaagatgttatagtaaatttattttattttagatattaaatgatgttttattagataaatttcaatcagggtttttagattaaacaaacaaacaattgggtacccagttaaattttcatttcagataaacaacaaataattttttagtataagtacattattgtttatctgaaattttaattgaactaacaatcctagtttgatactcccagtcttgtcattgccagctgtgttggtagtgctgtgttgaattacggaataatgagttagaactattaaaacagccaaaactccacagtcaatattagtaatttcttgctggttgaaacttgtttattatgtacaaatagattcttataatattatttaaatgactgcatttttaaatacaaggctttatatttttaactttaagatgtttttatgtgctctccaaattttttttactgtttctgattgtatggawatataaaagtaatatgtaaacatttaaaatataatttgtkktaaagtaa

SEQ ID NO: 216340 - DNA, 770 bp, Homo Sapiens
  misc_feature (59)..(59): n is a, c, g, or t
  misc_feature (317)..(317): n is a, c, g, or t
  misc_feature (462)..(462): n is a, c, g, or t
  misc_feature (599)..(599): n is a, c, g, or t
  misc_feature (617)..(617): n is a, c, g, or t
  misc_feature (653)..(653): n is a, c, g, or t
  misc_feature (655)..(655): n is a, c, g, or t
  misc_feature (657)..(657): n is a, c, g, or t
  misc_feature (697)..(697): n is a, c, g, or t
  misc_feature (706)..(706): n is a, c, g, or t
  misc_feature (711)..(711): n is a, c, g, or t
  misc_feature (724)..(724): n is a, c, g, or t
  misc_feature (726)..(726): n is a, c, g, or t
  misc_feature (751)..(752): n is a, c, g, or t
  misc_feature (754)..(754): n is a, c, g, or t
gagaggattctggctggtcagtcaggagcacttttccttgcagactaagaatgtacgtnggttttagggwgagggagcttataacaagchtggaatgtttctgtgtgggggagaagtttgtggcagggttggaatgttctgggcggaggggtggttatstggggggkgrcgagctttccggcaggagaggggttatcccgaggctagcatttctctgtgggaggtgtctggaatgtttttggttggagatgttatttgtggtttgtgatcatgctgaccttagccattaggctgatgccctttggatttaggcagtntttgattaaggtgaattttaaaatgaggcgcttatccacaatggtgatgcttctgctctgtcaatccagacctcatagttataaaaaggacgaggggcggcatgttctttctggctacttcctgctgacgaggggacagagagtnctctggtatcgggttggtaggagcagtgccgtctgtagatatatttgggtagttgtctgtgaaatggccatgatcctgtcagtataaaaaatctcacagatcggaaaccctgtacaggactgtacatgaaatctgangccagcattccaagggcnttattggctccataagtcaaatttgattccttaaangnangcacaccactacagtcaaagccttggtaaaataaccagtntgcccaatngtgtncagtcagctggantnagtgtctgatgtgaatgtaccagtnngnctctcgggctgcagct

SEQ ID NO: 216341 - DNA, 852 bp, Homo Sapiens; identical to SEQ ID NO: 45574
  misc_feature (645)..(645): n is a, c, g, or t
  misc_feature (647)..(648): n is a, c, g, or t
  misc_feature (650)..(662): n is a, c, g, or t
  misc_feature (665)..(668): n is a, c, g, or t
  misc_feature (674)..(674): n is a, c, g, or t

SEQ ID NO: 216342 - DNA, 892 bp, Homo Sapiens
ttccagtgggcagcagaggcggccccagtgtgaccaccctgcgacccctgagcccacagggcagagcagcattctgagagacgcacaggagaccaagccagaccaataaacagaacacttttccttccatgtggtctgaatgttggcaccagcccgggcaggggcatctcatttgggcagtactgctgtgcaacccagctgcaaggatggaaggcagagggtgggtgtggggcctgaggcttcacagtacctggaccagcaggaagattctgggaggtcactgctctcagaggacagcaagggaccctgagctctgcaagctgtgatctgtctgggttcatggtttttctcaaatcccaggctatctgcatgcgctctcaggtgctaccgagccatcctgggagagatggatggtccactgctttgaggcagggagccatcgggctggggccccttggtgaacctgatgcaggtaagatgctgaggactaaaaccattttttttgcacccaaaaaaaaaggcaggaaaatgatcatcagaaactaaatggcagccaggcatgggggctcacaactgtaatcctcgcactttgggaggctcaggctaagggtcgcttgaagctgagagttcgagaccaacctgggcaacatagtgagacccccatctctacaatttttttttaatgaccaaatgtggcggtacatacctgtacatacctgcggttccagctactcaggaggctgaggcaggaggactgcttgagcccaggagttcagggctgcagtgaggtacgatcaagccactgcactccagcctgggcgacagagcaagatcggttctcttaaattaaaaaaaaaaaaaaaagaccattaaaattgctgtatttgagggt

SEQ ID NO: 216343 - DNA, 738 bp, Homo Sapiens
  misc_feature (684)..(684): n is a, c, g, or t
  misc_feature (718)..(718): n is a, c, g, or t
ttgaccctgaagtaaccatctctttacctttttcttaagtgcttgctggcacataaccacttgctgaaattgtgtcattgatgctaaattaggaacacattatatggaaggaagggaaccacttctcagcacacatgcccaggcagactgtgtgggatagatttctgcttctcagataagccctgggctagagacacttgagatgtggtggtgatctctggagggaaagcaggaaggcttcaggtctcttttagactgaaagagaagggcctcatctgcagtttagtatactctgagggtctggaaatcctttaggcgaggtgctcttccatcaaaaagccagatgctaaggcagcaggtggagttacagccctatcaccccaggcagcagccagaaaaaatgggtcaggtaaactcacctactccaactaaaagagcacgggcagaatgcttcctcttagccagtggtttccaaacttgaatgtaaatcaaaatcacctgagggcttattaagccacattgctgatgcatttctgactcagtgggtctgggcccgccttcctagcaagcaaccaggtgatgctgataaactgctggtcagggactcatgttgaaaaccacagctccagatcacatagacatctgtaccaaagaagcgacgagggcacagacaaattccattantatagccatctttatttgtaaaatccagatatanaatgtattctttcagtcttt

SEQ ID NO: 216344 - DNA, 1000 bp, Homo Sapiens
acactacagaagtaaaagcaacgtaaaatgtttctgggtttcctttcccttcactcaaaaccactatttccttagttctatcaaagtacgtaaggggcataaaatagactcaggaactcggggctaaatcatccaaaaatggagccaaggctctaactagaaactgtctctgtcgtccctgttggcctcaaaaccccgaggtaaaaggctggtctcggctcctcccaggccccctggctcccagcacagtgccccgtcctctgtgttcatcatcatcgttttttaagagacagggtctcgctctattgcccaggttggccttgaatccctggactcaagcggtcctcctgccttggccttccgagtagctgggattctaggcgcatgcccctgcgccgggctgccctgctctctgcaggtgccttctctgcacgggcccagtgcctggatgccagtttgaggctgcgccacatgaggacacagcagttccgcctctcttctccccgctggccccaactgctgtgagccggcggaaagccccgacagttgcagtcatgcaaggaggagctccacccacttgacccagtcccgcctctctcagcctgttctgtttagacccccttccacttcgggatgaaatcacagctgttggtgagagaaccccgtccggctgggaatcctcgccttctgctctggctcagccagcttggagamtccgcctgctcactctccggtgaccggctcttcccccacagcgctttccacacaccctgtgcccttgtgacccagcccctggtgaagtccctgggccgggcctccttgtgcacacacccaggccttcccagaacacgagagcaccgggagctgcagtgggaggmgacctctatggsgtggtcccmacttccmmttgrgtkagtkggsaaawwgracagcccaaagygaggcawttcytmatkarcytggacaagtymastaattttttttagtyccstgggatatg

SEQ ID NO: 216345 - DNA, 1000 bp, Homo Sapiens
aacagagggaaagagttaaccaccctggagagagttccagcctcaaggaggagccaggcaggctacagaagtctcacagtgagggcgtggtcctgcaggttgacagaagttagaggacagatcagggaaggctgcctggaagaggtggctttgggttcatccaggccccctgcccacgtgtgcctgggtctgcccacaggacagaggctgatgggaaatcctacgtaaagtaccaggtcatcggcaagaaccacgtggcagtgcccacacacttcttcaaggtgctgatcctggaggcagcaggtgggcaaattgagctccgcacctacgtgatgcccaacgcacctgtggatgaggccatcccactggagcgcttcctggtgcccatcgagagcattgagcgggcttcggggctgctctttgtgccaaacatcctggcgcgggcaggcagcctcaaggccatcacggcgggcagtaagtgagggtggagcccagtgagactgtgggtgtgtgcaggccggggagtattaaaggtggtgatttttggagacaagtctggtggcgtccgtcccaagtgacctgcagagcccctggtttcactgctgcttcactgatgtcctcggccccttagaactttcaggtgtgccgggcaccgcctggatgaggccaggctgcagggcggccagggagatgaggatggcttcctccgtgcggatggtacggctaccctggccaggacaggtattgacgtacaggtcaaagaggacactgggttcagccacctccaggttggggtcagcatccgctccagcttccagaccctggaggccccgmacamcacaagagmatgcctgaagttgggaagctggggagaagcacawctgagccgcgctctgacgtcccgatggtcaggtcataccmwyttggggargggggctcagcaaacacagcactgaggcaggsagcaatyggacgtgtagcccagataagacaasytttg

SEQ ID NO: 216346 - DNA, 877 bp, Homo Sapiens
ctcaggaggatctcttcagggacatgatgcagttttgagactggtagagattcgaacggttttggaaaagcttcgtcccttggaccaaaagctgaagtatcaaattgacaagctgatcaagactgcagtgacaggcagccttagtgagaatgacccacttcgttttaagcctcatcccagcaatatgatgagcaagttgagctctgaggatgaggaggaagatgaagcagaagatgaccagtctgaggcttcagggaagaaatctgtgaagggagtgtctaagaaatatgttcctccacgcttggttccagtacattatgatgaaacagaagctgagcgggagaagaagcgtctagaacgagccaagagacgggcattgagcagctctgtcattcgtgaacttaaggagcagtactcagatgctccagaggaaatccgtgatgctcggcatccccatgttacccgccagagtcaggaggaccaacacaggattaactatgaggagagcatgatggtgcgtttgagcgtcagtaagcgagagaaaggacggcgaaaacgagcaaatgtcatgagctcacaacttcattcccttacacacttcagtgacatcagtgctttgacagggggaactgttcatcttgatgaggatcagaatcctattaagaagcggaagaagatacctcagaaaggtcggaagaaaaaaggttttcggaggcggcggtgattatgggtgtacatatttgtatattttttgtcatcctgagatacttctaatttcattgtatataggtggttttccctggaattcattaattktttgctttggacatgtggaaagagccttacttaataaaawtkattttacttatgaatwaaa

SEQ ID NO: 216347 - DNA, 478 bp, Homo Sapiens
ttttatgctttatcaagctttgatttcatgtttatctacaaaccgagaagcaacaaggaacagaatgcgtgaggcgcttttgcctcccccgacggctgcctggtggcatctcccaaactcctttcttagtggctttctcagcagcgacttcggccttcatttctcaagcccagagtttggaggacgttccaagtccttggtctctgcttgtaacagagtgacggttgtctttccataatgcttctgccattttctctctcacagccaagaaagccaggcccccaccccacagtgcctacccctccagacgggggctgctcctttgcagcaaacgcggtcaggtgcccagctgcacaggcccccacattcttcgcttgctgactgaccacaaagtctaggagggattgttttgctagactcctctacaacagtatcccccacgatcattatctaagtggcaagaatatatgaacttctc

SEQ ID NO: 216348 - DNA, 463 bp, Homo Sapiens; identical to SEQ ID NO: 60412

SEQ ID NO: 216349 - DNA, 534 bp, Homo Sapiens
ttgaaaaaacttttgtgtttttttttttactgctttttgaacaagggaacttgcatcttcattttgcactgggccccacaaattttgtagctggccctgtgttttatttccatggacttctgacccttcccctcccactctggggacctggggacatccctaggcctctgcagaatgggaagacaccactaggtctaagaccatcccttcccaagaggcttctcggacactcagcccccgccctgcaggtcttgtggggtgaacttctagggttggccgttcattgccgtcttgtgtgccaggccccgctccaggtgctgaggatgtctgatcaacctttcgaggcctctgtgcttgaggggctccagggcacagagaagtaacgcaacaggcaggaccaatggcagcagatgccgggggatggagcacatggggagatggagcactcagtggcaagccccacagacagcatgggggggggcgtggaaggaacggctactgcagctggcacattccaggtggctcccaaaggca

SEQ ID NO: 216350 - DNA, 458 bp, Homo Sapiens
tatattacagctttattattatttaaaaattttatattaacaaaatgagatgggatctgcctatgttgcccaggctggtcttcaactcctgggctcaatctcctcggcctccgaaagtgtgattacaggcgtgagccaccgcacccggcccatattacagtttcatagtgtttttgattactcgtggtaggagaaatgtgtcttctttgcacttggggtctcaacgtctcagtcctgccctatgccccgagaccccaagaggctttcccaaggtcaagcagggaatccgcagagaggcagggctggactccagcatcctgactccccagttcgtgctctgtgctgcagagacctgttgcgtaacactgagtaactgtggattgtctaaccttttatgaaatttccagctggtcttttgctaccggccagcagtccagttggtgggagtgatgatgccg

SEQ ID NO: 216351 - DNA, 618 bp, Homo Sapiens; identical to SEQ ID NO: 47110

SEQ ID NO: 216352 - DNA, 925 bp, Homo Sapiens; identical to SEQ ID NO: 42784
  misc_feature (741)..(742): n is a, c, g, or t
  misc_feature (840)..(840): n is a, c, g, or t
  misc_feature (886)..(886): n is a, c, g, or t

SEQ ID NO: 216353 - DNA, 835 bp, Homo Sapiens
ttttcaatcaatttctttttaatgaaaactaatttttaagggcaagataccacagcagaagaaaaacgtcttgcaagaaaagacttcatggtttacaacgatcaaatgtatgggctatttgcctgattggtggcctggactcagcaagagattcctttgcagcagaggttggccacacatctgggggctgcaacaccactgaaaagacagctttctaagcattagtgtaaggcaaaaagcagagtgcctaaacttggccatttccaccaagaaaaaaagtttcatagcaaccttccttcaccagaaaggcttactttatgatatgctaacagaacagaaaagcaggttgggacaagatacagactttgttgcatttagctatgacccttctctcccctctgtggatgtgggcagggtggggagaggcaggaagaggcagtagagggaaatgacatttgcactcaggcttcccgcccctacccacccctacccttcgcccagacagacgtcggatctatgctgcaccaggggtgggtcatggagtccagctaattgccaggagctgaggcgtgtacaagccatgaaaagagctgccccacggcctccccacatcactgtccttcatgcacttgcatctttaaggctgccagcttcagagctccctggacattccctggccaagtgtcatccctgtgtcaaatggatgggatgccaggtaatccttgtactccccgtcaatcagtttggcggcattgttcctggcaaaccagcagtctatctgctcttccccggtgaaaatcttccttttgctccagaccactgggacttggtggcc

SEQ ID NO: 216354 - DNA, 923 bp, Homo Sapiens
  misc_feature (680)..(680): n is a, c, g, or t
  misc_feature (691)..(691): n is a, c, g, or t
tttgaaaaactttactttccttggttttttataagtttagtggtctcaaccccaatgtcttaggaaataatttaacaataggaaaacccttaaaaccatctatctctatgtaaacacaaacatatacatgtgagtggggattggtagataaatagatagaaattgctttcccagaggagaacatttctggctttaataaattgattagctttttaaatcagtcaagaaagttaagatcttttaaataaatccccttattcattcattgtactgcaatctaacacaataaaatgggagtaatatttttaaagtgttgttaatctgcgactttgtcttcttgggactaaaatataatccaacttttaaatgcaaaatgagttttatttgctagtcctttttattctcaaatatgttaaaagcacatgattatattgtcttatgttgtttcagttatgatcctcttctgaaatcaggaatacgaccccaagaaatgagtgagtcatatttgcttttatatcttatgcattgcaagaattcagtctcacaaacagttgaaccataaattaaaaatggtagactcacatttgaatagcagctagttatatataaaaaaatccaaattttttaaaaagtgacttgtattaataaaaactggtgaataaatcaccaatggattgttncctcatgctgncatattattcctcagatacaaccataaaggcaaataagccataaagacaacaggatgacctattaagaatgtttaaaattgcttcttccgatttttccggattctacttggcaaagcgaagactttggcaatcttctttttttttttcaaaggcttttgcacaatgccacgtttgacaatacttcccttgctaacaagagttattgcgcattcccttcccacagcccggata

SEQ ID NO: 216355 - DNA, 687 bp, Homo Sapiens
tttgcccttttatttagactctcggaaaggctatcaggtttgggaaaatttatataccttaaatacaaatttggtttttggctttttttttttttttaaagtagtaaaatgctgataggcagtaacacggggatctcaacaagttcagctgtgatggcgatagcaattacaatggaaaagtaaaatacaagcatcttcaacaggccccagccaggagcaaggctggcttgaggtttgtaaacatgtcactcttctgtgttcacttacacttcagacacagaaatcaactcagtcttgatatatccagttcctttagggccatcaagttccattggctctggtgcttcctttggcctggagtaatactttccaaaggcatggtctttgtcaatatttggatacagatacttcaggggattctcaggaatattctcagtagccatgactttgtaattgcgaatgatgttcagggaaatgtaccagcataaagctctttcttcgcgtccgtcccaaccgcatgtacgtcatgctcgccccccctttggtaccgttcccacccatttgaaatgggaaggatttttcccggatgctttcacttgacccacatctaattagtgtcccgatttgttgaccccttcatcagtgttcgcttctcgatctattgctgtatataacccatgatgcacc

SEQ ID NO: 216356 - DNA, 1000 bp, Homo Sapiens
ttatagtttttatttgttttcattatatataacgttttcaagaacctktgcaaaactgtcaataatttcctaaagctcaattgatcagaaaaatccatgattgttcagccttcacacccttcttcatgtaagaacacctttctgtacatctcacagttacttattaggttgaaaggtatatggagaatggtcattagacgtctcgacagccacctgctgttgaccacttgcctcctcaacaggaaccgctgtcgtctgcatatgtgcatactgtggcaagtaggctccttgcatagctgacgttgcaggcatgtatgttccggtgctgcctagtgacagatgactcatctgctgggccagagggctgatcattgatgcgggctgtagtgacatggtgtgctccattgagggagttaacacggcaccagggtgctgtagaatatatggttgaggttgcatccacgaaggactttgcaccttgatagcagagccccgatacttgttttctctggtttcctttgccacctggtaggcagatacaggagatgcaatatagggtgtaatagaagtttgagtgatcattcggtttgtagcaatactgtatggtgaaggataaaatccgttctgtatagcagctgtagttgggtcgtaagtaagtgtcattccagcctctccttctctatgccatggtcttccattagggatgtatttgtttgggttctgtctctttttctgtcctccatcagcaaacttacacaataaaggttctgtgggggcagaaactccttggtggtgtcttaataaattttccattaaaatgaccaataacagcttcacatttttctgttgattcatcctagcaaagcmacaccacgacttgtacactggaatcacgtatatccttgtagaataacttgtccaatgggttgagmtatttctagttctgcycwccatggggrkggcaattagaawgtagaggtggtrggtytgttcygttgct

SEQ ID NO: 216357 - DNA, 1000 bp, Homo Sapiens
  misc_feature (1)..(1): n is a, c, g, or t
  misc_feature (3)..(3): n is a, c, g, or t
ngnagcgttgggcagccaggcggtggcgcggaggatggatggggacagccgagatggcggcggcggcaaggacgccaccgggtcggaggactacgagaacctgccgactagcgcctccgtgtccacccacatgacagcaggagcgatggccgggatcctggagcactcggtcatgtacccggtggactcggtgaagacacgaatgcagagtttgagtccagatcccaaagcccagtacacaagtatctacggagccctcaagaaaatcatgcggaccgaagcttctggaggcccttgcgaggcgtcaacgtcatgatcatgggtgcagggccggcccatgccatgtattttgcctgctatgaaaacatgaaaaggactttaaatgacgttttccaccaccaaggaaacagccacctagccaacggtattttgaaagcgtttgtctggagttagaaagttctcttcttcaacacgtccctccccagggtgttcctccctgtgacccagccgcctcgacttcggcccgcttgctcacgaataaagaactcagagttgtgtgtgcaatgcacacccagacacacgcacgcacacacacgcgcgcgcacacacatgcttttttctgttcccctccgctttctgaagcctggggagaaatcagtgacagaggtgttttggttttattgttatgtgggttttcttttgtatttttttttgtttgttttgtttttaaacattcaaaagcaattaatgatcagacataggagaaaccctgaatagaaacaaaacttttgaatgctggattcaaaaaaaaaaaaagttatctggacagcttctttgagactatttaaaaactggtacaacaggtctctacaacgccaagatctaactaagctttaaaaggtcaagaaktttatggctgachaargactcscgcacgccgaaggcctttcccaccttaaccttccgggrtytgggattttaccccmttctctytkttttt

SEQ ID NO: 216358 - DNA, 706 bp, Homo Sapiens; identical to SEQ ID NO: 42927

SEQ ID NO: 216359 - DNA, 947 bp, Homo Sapiens
  misc_feature (33)..(33): n is a, c, g, or t
tgtgtcaaactgcctcattctcagtgcaggtgntccctcctccccagaaacaagaactgacaggtagggtctttgtgaagtcatggcttccacaaggccccagggaaaccccacacagttctgagagttgatgggaatcccagcaaagatggggtgggtgggagacagtgacaagaaggggtggtggtcaccagtcaagaggctgggggttggaaaaccctgtctttggccttgctcagctttggggctgccatgttcatgatggagatgggggactgaaatttcccctgacctggaagtaccccttcggccaggcatggctttgattctctgctaagggctcagctgagagaggagcaggaaaatgtcatgggctggcttcttcacaaggcattgctgctgatgctccggagtccaacaccacgggcaaattgctccagcaggcccccgatggcaccggaaggactgggggctactgcccgaagccccactgtgctgctgtacgcagccaagaaggctgagcgcacctcctgcagccgagtctctcgatcactcagggctgcaagcaagctgcctgagttggcgctcctgctgggaccagctccacggcctcataggtgaagctcccagtggctcctggggaactctccatgaccagggwgaagtcgctgycaaggctggtggtgctgycacggtcctttcgtctcagcatgcagatgtcttccagggtgaagcctccatcccgggctggcaaactcttcctcctctgggtcttcagagcagagaactcctcggaggtaatatgcttcaaaaaattkaagcagaagaagaaaatctcctcccctttkytgagccgatctaccaacawgtgyccgkagaggwaccagtyawtaggccacagtgaggtagaggrtctcagtgggcttcagggacgtgtggwtgagccc

SEQ ID NO: 216360 - DNA, 889 bp, Homo Sapiens
  misc_feature (787)..(787): n is a, c, g, or t
accccactgctcttttatttatggaacatccccgctttagcgcagggttgaatctaacaccgaaaaaagcccagagaaatttctgcagataaaccagtgaagagaacgcgcagtatacattattgtcaacagaatcacttcatggagagggaagcgggaggaaaaaggaaggagaatgaacaaggggctcaaacccctacacactgcaaaacattcagacatttgggattaaaacaaaacataaaaggaagccttccaggaaggagaggaccaaatggaatctgaggcagctcaggtgatcaaggagcacaggaagaactccaggctggcaggcgagcccgagggagctcaggctgcccacccactgctggcaggatcgccaggacggatgggaatcccgaaacctggagatgaacctaccctcggcaactttacaagactcccttgacaagggtggcagagattaaaaaaccccacgctttaaacaaacatatttgggggtggctatggcaccttgaaaaacccacaaccagcttgacatgaatggccaaagcccttgcccaaaaccatttgctcccctctccttggtaagggaaggagaactggagagaagggaaaggaatctaaattgcagcagaagaccggggagagcatctccttggacggagtctgaagaaaggaaaagataaagaagtaacaaaggaaaaagaaaaaaattaataaaaatttcacgatatggagccagcgtgttccgattccgtccacaaaaatactcaggctgctttgncgaccatcctgtccaccaggggcgttgctgaggctgcctgccctgaagggtcaccaatgggcggcggaaagcctcactctcatgcctcggcccattcgccgc

SEQ ID NO: 216361 - DNA, 868 bp, Homo Sapiens
ttttattaggtcggtttaaatttagagcttcccacttacaaatgtgattggatatttaggatacataatttattcttaaaatacacaacttatatacagatattaaaaactcagtctccaaaatgctcaataaagatgtctgggtgacacttatagaattgacctagcaattttttcttctctttggcagaaagttttgaatcctcatcaagagtttttagtaaattcaacagctcatctttggttgtcttctctgtattgttggaatagtcacgttgatcaattctctggcaataaatatatcctgcatctctatttggatctcttccgttctgtatggccataagcttaacacttacaattttatgtagagttccaggaatcttaaaaacatctttctgatgatccattaaaaagagtaccagaagatctgttttgcctttggataaatttttattgtcaacaatagcttttgagaatatccttttcacaaccattcggttgtcactttctttctgtaatttaaactcagaaggatttgctgcaacagccatgaaatacagtagccttctaaattcttctctattttggaaatctaaaagctttagaaggagctgggtagcttctaaagctatttccggcttcccattcactaagagttctgcaattcccttatgaacatcacataagtgatttaacagagggttccctactaacggaatatcttgccatggcatcaaacagaagttcttttacttaatctgttcggccgggttgctcaagaaagcctcttgctttatttcccccaccatgtgggtctggaagggattcttaaacagtcaattgctggccagaagcccctcatttt

SEQ ID NO: 216362 - DNA, 708 bp, Homo Sapiens
ctgctttaatgagaccataattggtgtaattcccataccatacaattcatccatttaaagtgtgcaattctgtgggtcttagcatattcagaggtatgcaaacatcaccaacggccaatatcaaaacacttcctcaccccagaaagaaaccccaaaccagcaaccgtcgctcccaacccccgtcccgggcaccggcagcgccatctcccttcttccctctggacgtgcccattcgggacacatcacgtgagcaggatcacgccgtccgctccgtgtgcctggcttttcacttagcatgatgtctccaagtctgtgtcgcccgtctgtgtcgcccagtgcatcagggtctcattccttttgaccgtgggcgccgttctacggcctggattccagtgcctggactggccatgtttagtctatgcacgcctcagtggatggacagggtttccaccttgccgctatggcaaaggatgctgccgctatgacgaaggatgctgccgctttggcgaaggatgctgccgctatggcaaaggatgatgcccgctgtgacgacagatgctgccgctgtggcaaaagatgctggccgttgtgactacggatgctgcccgtttcatgaaggatgcttgctgctgttgccaaccgatgcttcccggtttgaataaaggatagatacccctaggaaaacgtgtgctttccactataggcaca

SEQ ID NO: 216363 - DNA, 907 bp, Homo Sapiens
  misc_feature (523)..(523): n is a, c, g, or t
tgaaaggaaccataatctggttcccttgaagaaaacatttagcacagcttaaataaaagttgagaaggagggtaagagtgcattgccccattctagctctgttgctaccttacctctgactctaaggccctgtgggatgaaaagcaggtatccaaaagaactctgcttggccctctgatacggccttgaggtcagccctggtgcctgctttctggcccacagaccgctgaaatcctaggagctgccatgggagttaccaaaaatatgtgaataaactgaatgcagaggctgaggcaggtggatcaactgaggtcaggagtctaagaccagcctggccaacatggtaaaaccccatctctactaaaaatacaaaaattagctgagcgtggtggcgggcacctgtaatcccagctactcaggagactgaggcaggagaatcatttgaacccgggaggcagatgttgccagtgagctgagatcacgccattgcactccagcctgggcgacaagagcaaaactctcntcaaaaaaataaaaaggaaaaacaaaacccagaatgcagaaactgcattggtattttgagctagttacaggcagtaacacttctactaggaaggaaaacatataatttatcgcaaaatagttctaagatataagaaaacatctcaatcctctaggggcaagacctgccccttatttacattcacaagcccattaagtgatggccggactgaccagcagaccgggaggcaggggcctgctttggggcaccatgcccatcccctactgcgttagttgacaaagcaaacagctcaagtcatggaggaaagtttccatttgctttatttagggtaaaaaccggaggaaaattccttctgagccacaataagcaggtacttgacttctg

SEQ ID NO: 216364 - DNA, 930 bp, Homo Sapiens
  misc_feature (15)..(15): n is a, c, g, or t
  misc_feature (17)..(18): n is a, c, g, or t
ggagccagacacganannaatttcagcaaaaaccaaagcagacccactgcctggataaattcagaggggacgtcttccctaattgttccgggaacttttgctgcttgaagaatgcgtgaattgctatattgttcaccagaaagacagaagttaatccccagatggaaatttcagatttttcttttggtttgctttttggtttttcattattgtagacatggggggtgttgctatgttgcccaggttggtcttgaactcctgacttcaagcaatcccccagcctcagccttctaaagccctgggtttacaggcatgagtggcctcacccagcccccagattttctactttaaacagccacactaagaactggaaatctgtgcgtggtgctctcagagcaggggtggaaagcctgtttgtgtgtgacagtttaacagtctataagatgaagtcccgtcaaggcacacatgggcacacccatccctgcctcggcggattccttctgatccttcccacagtctgtttttctccatccttccatcctcacctctttctcttgataactttctcttcccaaatcacaatatagcggactttttcattttccatggcccctgaacttagttttgtcatctctttttggttaaaaagagagagagagaaagagagagagagactccccacttgtcctgctccatctccaaaatcagctcaaatctcccaggaactcttcaggagctcaggctacgtttctagcttaaaaggagctaatgaccattatgaaaatggcacaagaaatcctcactgcttcaccagtgcccttccttccgtggtactgtgtggccaagaagtacacttctgatgactctttcctgctggcytcaggtttgatgatccttacattctggrattcctctgtcagtctcctctgt

SEQ ID NO: 216365 - DNA, 729 bp, Homo Sapiens
  misc_feature (2)..(4): n is a, c, g, or t
  misc_feature (32)..(32): n is a, c, g, or t
annntttaaaatmatctaaatcgagtaactantacacattcctcctctccagcaagtatacagaaatcttcccttactccaatttgacgctgcaaaatcatacatgcaccccaaactgatctgttattgaaatttctttttctggtctcacccattactttaacatatcagaggaattaacataacagcctagagaacagaaataagagataataggtgcttcagtaccacccaaattatctactaagaccacagtgtgggcaacagaatgcagattcatggtagtagttccttgaatgaaagagttcagacagaatcttccacaaacacaaatttttgcggtatccaaatcttggcagagatggaatggaatgatatgagagccatatggaatcctattatgtaatatggttcgtgcagaagattccaataaagttaatggtgcttgcagctttattactggaaggacttttggttgttcaaaagtatttccaaaaagatccaagtattcaagggataaatttctaaattcactaggcaaaaatggaagcttatttcgagctgctgacaaaaagcgaaggtttattagttgtcctatcttgcaaggaaattgaatcaattcattatcgtcaagttttaaattcttaagttcctggagctggcaaaactgcacagggagtgccttgattttgttcttgctgaggtccaaactccaaagtgacttctgga

SEQ ID NO: 216366 - DNA, 855 bp, Homo Sapiens
  misc_feature (29)..(29): n is a, c, g, or t
  misc_feature (74)..(74): n is a, c, g, or t
atkgacaagatactgattggttacatgtntgaagaaaacatacaatacaaaatacagaaaaagttggttccgtnccctcccactcccccccttacmcacccacccccaaatactcatcatcatgatttggtcagaacagggctcagagccagaggttggggtgaccgagggtggaggggttgtgggcaatgggttcgtggctgtcacaataatgctgtgataatgctgtggtttcccagcagggaggtgggagcggggagggggctgcagcctgatgagagccagctgaaggaagagctgcctctcccttcctaagccccttcccaaggtctgccccaccgcccaaaccaaagaccactccgaacaaagtgaggatgtggatgctcttgctgggtccgctgttccgcagagggaaagaaagggtagctgcactgaccccactgtccccatatacaagggttggggggcaagagcatgtggctactcccagcaagggaaaatgggagagcagtagaaaggggaggaagtgggaagagcagaagatcatatatattaawwdagtgacttaagacttaaaattgaattagtatttgtacagaaaggtgcaggtggaatgactcactccggcctatgatcaaaattatatggagaaatcatggtggacccctccccctgcccccccagtggtggcccgagtcgttaagtgcgattggttagagtggattccagtcgggtcattcaggcggaggaggcgggggcagcgggcaggcwaggggggctcagttgctgcagcactggctccggctggctgggttgttctcctggaggtccacacctcggtttcggcctggagca

SEQ ID NO: 216367 - DNA, 1000 bp, Homo Sapiens
  misc_feature (587)..(587): n is a, c, g, or t
tttgggggggaaaaaccaacacattccagagctttccaagtcctttgaacttcaggttcacattcagggatcacacagttctgcctgttctcagggcacggcaactgccaatcccgctgaagaggcctccctgggcacagcacaggctgcacggtgcacgcatttccctgaaggcagccccttcttcggaagcagctgttccaggcctcggaacagggcctgggtatccgcgtggtgggctggcagctgacggcctgctcagtggagccaggagctaactcagaccccaaagcaagcagggggccagtggcggggcccagcgcccagcaggacacccatgcaagaggctgagccccccaacatccaaggacaggagagacatggagtggcgctggacagtcacgacaaggacttgcctccagcactggacacacctgtgttaagaccagccctctgcttcccagtcccgccagcctggggcatcctccatgggctcagcactgagaggtcttgggtctgccacgttctctagctctccagtcacccactcatccagggtaggaggggttctccctgctcccyytybnkkttttgtgkcyttgggatytcaccctctccatgtcctggtsacaccctccccctcagccgsactgcatccctcctgggcctgagcctctggactcagtggacaccaaagtcaagaccagcacccaccacgggccckgccagcctctgccttccccagctgscctgggttctggcctgggtgagsatctscaacckgtkgscagsactcaaccaagcactsctctctasctccagsscactaasccacagsagscagcccctgcagccttccgtccaaactgccagcratgcccctggccmagkgagcccasacgctcatccacccctkcsagmacaagctcaacgcktcaarsamagcagcccaagscaagcctscccagatcttawagcasagagccttttgamatttccc

SEQ ID NO: 216368 - DNA, 943 bp, Homo Sapiens
taaggctccaggcccaactttgacctcagagacggatacccggatcgataccagccccgggacgaggaggtccaggaaaggctggaccacctgctgtgctggctcctggaacaccgaggccggttggaggggggtccaggctggctggcagaggccatagtgacgtggcgggggcacctgacaaaactgctgacgacaccgtatgagcggcaggagggctggcagctggcagcctcccggttccagggaacactatacctgagtgaagtggagacaccgaacgctcgggcccagaggcttgctcggccaccgctcctccgggagcttatgtacatgggatacaaatttgagcagtacatgtgtgcagacaaacctggaagctccccagacccctctggggaggttaacaccaacgtggccttctgctctgtgctacgcagccgcctgggaagccaccctctgctcttctcaggggaggtagactgcacagacccccaagccccatccacacagcccccaacctgctatgtggagctcaagacctccaaggagatgcacagccctggccaatggaggagtttctacaggttcaggatcggggtgggcagggcgagagcttaggcttgaaggctgggaaagggactttgggaggaaggtgaaggcagaatggagggtgcacgaggggtccccctgatcccttgcttttctggcaaacacagctcctgaaagggggggctcagtcattccttccaaggggtcccgaatgtttgtggtggctttccgtaaccaagacggttttgtttcttccttaagaacttttctaaccagaagatgtttgaaattttaagaaatgaccgtgacggctagaatcctctgtggggcataacttttgtggccgctttcttaacttttgccaaagacgggttgttcaagtagaccccag

SEQ ID NO: 216369 - DNA, 503 bp, Homo Sapiens
  misc_feature (474)..(480): n is a, c, g, or t
  misc_feature (490)..(491): n is a, c, g, or t
  misc_feature (493)..(493): n is a, c, g, or t
atggaatggagaaaaccaagattccagatggggatagtaactagaaggtgcttcagatgcactgcctgcgggtgccagtctgaaaaccagaccgcacagaggcctggggctgctgatgagctttttggtgctctccacacacaagctcgcaaacacacatgtcccagaatagctctgttgggttgtgttgggagaagcggctggagttcattctctcacccccttatgttggtgtttggcgtgtgacagcagttctacagagctctgtgttggggtcatggatgagcggctctcttggctcttaaaggcaggcctctctcttcttgcctttaaagaatcctccttcctcacacctggcctcctctggcttcagcttctcagcagcaagcaccagccttccacaacaacactatatttttatgctactttcctgtttgcactactacttttttattaaacgatgttaaataatcnnnnnnnaaaaaaaaanntnaaaaaaaaaa

SEQ ID NO: 216370 - DNA, 657 bp, Homo Sapiens; identical to SEQ ID NO: 49340

SEQ ID NO: 216371 - DNA, 575 bp, Homo Sapiens
  misc_feature (3)..(4): n is a, c, g, or t
  misc_feature (14)..(16): n is a, c, g, or t
  misc_feature (469)..(469): n is a, c, g, or t
tgnntttkgkgtgnnngactgtttctgagccttctgtcctcaataatcatcagctctcaggggataagaaatgctacagcaatgggaaacgaaacatacccagaagctcgtattcctgacaggtttctttagatgggacagcggtgcactgtctgagcacggggaagggtctgagcagaagaaaagagctgccaaagatgcatggaatgagcaacagcaaaacaccagtggagtctgtaagtccctcctcagcaaacgaggtcccggaaggcaaggcagcagctagttctcctccgaactggacaggcggcatggggcttctgttgtccagctgcagccaggagtgcagacatctatttcctcttcccactggcccttccagcgctgggatggaggagccatgtcaattgtggggtcacacggagaaaagtcagtgcagcagtatgtttccaggataggaatgtgagtngacggcaatgtcacacgtgctcagcttctcctcctcccctcggttcatatgcaggaggaactcgcacccagaggccccgccgtcacagcactaagaagaggatgag

SEQ ID NO: 216372 - DNA, 915 bp, Homo Sapiens
ggttatttaaaataatttttaaaatcggaaccgtgtatatggaaaaatgatctatgatgctttttaaaagatccgagtttttcacatattatgaagtattaacaaaacacaaaagcattaagtaaaagtaatgtgaaattcagaaaataaagcagaaagttgcacttctgtgtgttaaaataatgtaattctccctgtacatttctgtccacatgagccaataaacatcaagaatacacactttacagtatttacctgttttaagacattcaagtcaattcagatggcaaaagtagaattcaatcactagtgaaatgttttaaaaatatatattaaaccaaaaaagtgtttttacaagataaaaaataatcttccacaatgtaattaattgcagatcactgaaattttaactctttagatgatttcagttcagttttttggtttcaaaatctagagacagtcaaacaaaagcacaggcagaatctctatctgtttttacgtttctctttcttgctttgactacttgttgcgctgtttaaagacgatgatgaaggtgctcttgcatgacctgtggcctttagatggtcaaaaagtttattccgagatggaaattcactatggcaggttgtacagctgataagaacactcattgtttgtggttcagcaagtactctgacaggttttttcatatctttggtttgctttcctttgggtttaggaacacttttagcttcacttgttggatcatcacatgggttactgatctctgggacactgacattttacctggggactatccttccaattctttgggcactgtccttgatttaagttaagtatcctcctggaatcaacctttgactgcctttttccaggtccattttaccttcgaaaatggcaatcataaaatcttgg

SEQ ID NO: 216373 - DNA, 1000 bp, Homo Sapiens
gattatgaagcctcagcagtgtttttaacaaagtacactgtaaattgtaaccagaaggcagcggctttaaaggagtgcttatttgcctaaatggctgtkgacatacttaatagttttgtatctgattctagtatgctaaagcatttcagtattatgagaatacaatttacacactggatccccttgtactttttctttcagttgtcaaaatgttaccattattgctgggattctaagaaatctctacaaatgcctctgatgacatcagamacaattggttctaatcctgtgaactctcttgtgaagaaagcatgagactccttcggtttagaagccatatctttcaggtcatccagaggkgcccaagccacaccaacagagaagatagtgattcctgcatcatgtgcagcagctgcagggccttggacatcatcataggactgcccatctgtgacaattactaggaagttcttgttggggctctcccttatagggccaaacacatttctaacagtgaaggaaatggcatcaccagtagctgttccaccactcatatagcggatgtttctgatgacagctaggacattctctttggtgctatagtcagtgaaactgaactccgtgcgctgatcataagtaaactgtacagcagctatcttggcaccaatgtccgagatttcaaaagtcttggctatgttggaaacaaattcaagcatgaggcggaaattgctatctccaacactgctggagccatcaattagaaaggcaatgttcactgagttataacaggtcttgctgcacatcatttgttcatgactgcacagcttctgtaccagaggctttacgtattttgtggtgcmaaccagttgggcatgtggtaagagaagagcmattattccgacagacagcytgtcamaaatgtgamatctgaacatcccagtyttcagggtaggctggsmmagaamtataawmmttgaacaactctctggcaaatgctgct

SEQ ID NO: 216374 - DNA, 1000 bp, Homo Sapiens
tccttgaggttgcgcagggactgctccgcttgtagaagcttctcccgcagcgctgtgatggacttgtacagctcctccacctcactcaccagcttgggggtgttggggggtgtgagctggggctggggagggcagaagtatgcacctactggggtggaggggacccaaaactcccaatgggagctggcaggaggtcctgggaagacgccatgaaaggatcctaccaggaaagcggctctagggcagagcataaattacgagggtcctcccagggagcgcggacctgagtgggaatgagtgacccgcgtgcaatctcgaccctgacaggacaggactggcctcagccgaccaggctcagttctttccattcctgatatttgacggaaggaggcacccagttccttgaaggaactgaggggcagggaaggaagaaaggtacttaggctcagaaggggccaccaggcatccgttaacaagggaaacaaaaggacggcccatctatgcctgtagcccaggcgtaggtcatactttccaccagaggtggggacagcaccctcagggcagcagggaatggccctctctggcctctctggccccgtggcctccaggagctcaccttgtctgaaggagcttcctcccgggaagatgaggtagcacagggtggggtgagaccacgtgggcacaggtccctggcacggggaggcccccgacccatgacctgcccagtgtcatgtctatatctgtgtgtttaaggcgtgcttgcatgttgtgtgtggcgcagagtctccctcccctctcagcacctgttggggatgtgtgtgtagagattggagtgtttattggagagggtcsagcgaggrtgtggacgggggacmtgggactscttmagagccaagcagtwcttaagtgggstsatcgcgsacastgcttttcgggcggtgtraaamactaaaccgggytgggtatktgaaaggtctcctttctttatgctcctyattca

SEQ ID NO: 216375 - DNA, 712 bp, Homo Sapiens
gaaaattcttattaaaaaaagtcaaacaaaaaaattaaaataaaaacaaaaccagcgagaattaatacctggggttggtatggcagggtatgtacagggggaaccccccgcccctgtcccaccccctctgtcaccaaccgaggcaggggggaggttgaggttccccagctggggagcaatggcttgtgagttctgaggatgggggagccaagtcctggcgtttgctggtgatgaagatgtggtgagctgggcagaggggtgtcttgatgaacacgaggcccccaggacccatcctgagacccaggaccaggggcctcactcagttcctggcctcggcctctgacgtcagcccaggctgtgggagcaggcagtccactgagggcccaggcctctgtccaaggagtcgctgcctcctccctccccgtcccccagggaaggtccccagtactgcccgggagggcaggtgggggcaggtctggtgcggtgttccatggtcggtagaaaggcatataaaagccgttgcggagggcgagggttgtgtccatgtggcgtgtgccgtcactgttcagtgtgtgcccgggctgctttttgttgaagctgtgtctgcggcttgggttacagttgtctgtcggtgggttatggctaccccctttattccccccctccctccctccgtctcctttatactctccctcccccttgacttcctcca

SEQ ID NO: 216376 - DNA, 907 bp, Homo Sapiens
  misc_feature (810)..(810): n is a, c, g, or t
aaattcttttttttagtcaaataccaataccttgattaaaaggatgggacactccaccctcagcagaaaatgatacagtttatagaaaacctccccgcccctcccacaccccaattaaaaactacaaaaaaatctcccctccttccctacgatgtcatggtagtctgactcctccagtggcactgcagctctggagtggccagctcaccacagcaccctccacttcaccttggggagaggagggatgctggtggttaaggaggttaaaaccattagttccagtaatgccagttcccaaacatgcacttccttcctttcccccaaggtctgggaccaaggagaaagggaccgaaatgagcccagccatgaggagcaactcgaggagagaaaatatagcccaaggaggttagaagagttccaatatacctcctccctccccccacctcaaaaaagaaaaaaaggcagtttagggtatttatcacaccaaaaatggttccccctcaggcctgagaaaaagaccaagatgtccagtcttgagggagtactgagaaactcagagctcatctatccttgagcctccattaatttcatctccagggcaatggctaaactaggtcccttttcttggcaacctgcactgtccagaactggagatggagaaatacagggcgaggacatcaggagggcaccccaggcccaggggtcccccctaggttccctcagtcctcgggtgggatgcgcagggcagaatacaccatcacccgactgttctcctgccgtcggcacaagaagctgcgctgaatacttcgnagggaccctccagctgtgatgaaggcccagagcccatggaaacagggactgcatagatgggcagcaggctggcctcatccaggggttccagaatgtc

SEQ ID NO: 216377 - DNA, 817 bp, Homo Sapiens
gattaagccctctttatttaaggttttattgactaagttgaaatctctggtgttctggggcacagctttcttgaagaccaaagtagaagtccttagaataactcattctccacttagggttccatctcttgaatccacctttagaacaatgggtttttctggttgaagaagtccttgcgtgtctaatttcaaggggatctgtgtttctttacaaggtttgaaggagaagttctgaaggactctgattagagcaagtttcatgttcatgagagcaaacctcatgccaatgcagtttctgggtccagttccaaagggtgtgtatatgtaaggatctatgctgtccttcttcttactgaacctttcagggcggaactcctcaggctctgtccagtactttgggtcatggtgaagagcataagttggaatcaccaccattgaccctttgggaatgaataccccattgatttcaacatctttcttgcaagtcctctcaagtctaatagcaactgggaataatctgagtgtttcattcaccaccatgtcaaggtactccatctgtaccacggcatcataggtaggtggtgccttattgggcaaaactgcatcaatctccttttgcagtttctgctggacatcagggtgagtggccagttcatataaagtgaaggaaagaacactgctggtggtttcatagccagcaaaaatgaagattattgactgggctgcgagctccagatcagacagagctttgtgggactcagttttttttccgaattctgggagtcaatccattcagccttgaggaaattctagccgg

SEQ ID NO: 216378 - DNA, 720 bp, Homo Sapiens
tctgcccaaaagccctttaatgggcctcctatttattgttcttttgttcatttgttagagttgaatgaactataataacttgtctgacataataagaatgccacaggtataacagataaacctggcaggtggtccaggaatgagagtgtcacaaaataatcactcaacacaagggccacagacctggagattcttcccagccatccctcactcctgccccaggacacaacccatgcaggcccccattccataggaagaggcaggtcccacagtgtctgtggctagaccttaacactgagcagagatgcccgggaagatggcacttcctatgctcgttcccaagtgctctgctcatctgccatgcaggtcaggaccataccccgagtttgtgaggcacccacctctcatactcaccacctcatatgaccacctatcatacccacctctcctatgacccttgcaattgtcccagtgaggtgggaagagcctggactagccccattttgcacacagggaaactaaggacacactcggaccgaatgtaatacacccgtgccatgcgcttgctgtgccctgagcttcacattttcacctagaattccctggggggtggggagtgggggacaggtcagctagggttttttttctacgggcccgttccagttccccaattatcgctttctggatacttcgcggctatcccacctcttaaggaccgac

SEQ ID NO: 216379 - DNA, 869 bp, Homo Sapiens
  misc_feature (643)..(643): n is a, c, g, or t
acaaaacagttccttttattacctggaaaccatggaaaaagaaacctaagtgctctggcccagtcctggggctctgggaggctcacgctccctcctcaggctggggacccaggtctgtccgtgccctcatcttcctcctctgccatgaccacctcctccagggtacgtcctcgaagtttgctctccactaacaccttgcacgtactggcaggcggtagcccttcctccacgtagcgacccctcaggaacacaactctctcctctccgtccaagggcagcccgtgggcctggcacaggtcccgtgcttccctgagtccatccagggccaagaggttgaccatgaagcccagaggcaaggtctggcccttgggggtgctaaaggcacgagcgaagcgggccagggcttcccggcgggcatggcccacatggcactgcacagcgcaacttggcaggtagggcagggtctggagcagacggaacaggcgggcagcattgccctctcggaaggcagcatctaccgccaaggccttgcggaggggcgggcaggcgcgcagggcagcaggcagctgtagaacctcatgcagggcttccaccgagcccaggttatagagcagaaagaggccctggaaggcgggttggcggnggtgcggcccggcgccccgcgcgtagcagcgccgcagcgagccgaagccctcctgcacctgggcctgcagcagcaccgggtccgcgggtccccgcgccgcgtcgggcccgagccgcgccactacggccagcagcgtggccagcgccgcctccagcaccaccggtgcctcggcgttgcccgcttcctgcagcgccaggtccaggccacagctcgcaagcggtctgcc

SEQ ID NO: 216380 - DNA, 866 bp, Homo Sapiens
  misc_feature (857)..(857): n is a, c, g, or t
gtgattaacaaaccctttatttctagaaaacaggaaaaacaaaattaaaaaacaaaaccaataatttctatctggcccctgccccagccctcccacccacccacatatcctccttttggggggaccatgatgcatgcatagggatgggagctgaaggaaactgtgttccttgggcagaaaaaagtccttgggtctaggtgttctcctccaagttgatatccctcccagccttgcccaccctccagacacaccaagaaggaggaattctggagcagtgccagaaggactgccctgaagctccttggggaataggcggctgagtcagcaccacccccatggttttcaccagttacagctcatcttcatccagcttggcaagtctggcttggcagggaggggtttttggagttggagagactggaggagagtcatggggagcctgggggatgtcaccaagggcctgtttatccagtggcaagagggctctggccacctcccctttgggtgacagcagcagagaggggagagagccattgatgggtgtgtgtgtgctgccctgggcctgatctccaagccgaattcttccagggctccccactccaggccctcttggccgccccaggctgttgtcctgcctctcccgtctctggtactcaattggtgactgcactgcgtttgagaagtcccggtggctttccaagatctgagccaaatgccatgatcccaggccttactggaacgcagggttttgcaccccgtcaggaaattaccgcttggttcccacccttcttggcccttttggaggtcacttcgcaaaacggcaaaggggtcaccctttggggtttcccccttccganccctagaca

SEQ ID NO: 216381 - DNA, 921 bp, Homo Sapiens
tcactttcttgttatatgagataaactatacaaacttgattttcttcaccaaaagtaacagcggtattttccgtatttttctagataaaccacagcacttattttgtaggttttccaggttttgcttataaatcaagatgaggcagtatataagagtcatggaaaaagacagagaaaaaaaacagacaaatcagttgtcagtatccatggcctctgattctgtctcaaccatgaaacagaagtgttcaacatatacctgctaaaaagcttaggaagatgtaggctccacaaaggaatgtaaacagcaacgagatgtggaacaacagcaggcttttccattcaaactttgtcatttgtttctttaagttcaagaaagacaaaatctacactgaaatccttgtttggtgagctcacaagcttttctccggtaatttcttgtaactgtccagtatagatttttaacatacttaaaactcctattagtcaaaggtcaattgtgggcttcactacaacattttataaaatgtattccttcctcccacacctcttcaaaatatatttcttcaaagaattcataacacccaacaagtagagatccacagtgataataaatgctatgtttaaaatgacttaactgaaacaattccagagtgccatcaacagagatcattccaaagggaaacttggcactttaaacgtttctcttttggaataacatgtaggtccttaaagcttgtgagttcaaactggggccatttaaacaggtaaattatcaatggctaatggcttcaagggggacctataggccaaagatatttaatgaattataacggtctaaatacaccttatgggtttttttttttcatattctcatattttagaaagccctttttctaaaagctttcttaggctttttcgaca

SEQ ID NO: 216382 - DNA, 888 bp, Homo Sapiens
aaaagttacaaacgtttatatggaatgtaacatataaagatgcagcctttttcctagggcaagggaaggaagggcagttacataaggcacaggaatcgcagcaagcaccagctgaaggcagggccctagtgggagaggaagttggcactggggtccccctgcagctgttgatggggaggtagagaccccctcaaagtgccatggtctgaggctgaactaattggccaagcagatgctaggcagcggcgggggggcggtggctatatccaccgtctttggtgcagcttgcccttccacaccccagccctcttgtaaaaccccagagtcctgggttccagaggcctcctttggagcagaggccctggaagggggtgggagagagtgcatggggaaagtgtgaaagctgatatgcctgtgtgccgagggactgctgggacagtggtgggaggtagcaggagagcggctctcatacatacccctccttgggaaccaccagggcaggcggccagggagtatgtaagggattgggccccccttctgtcccctgcagtgtacatgggaggaaaggggtctgccaataggaggggccatgggcaggtgaccattttggagttctggtatgaggggatgggtcttcctcacaccatggtgggcccttaaacggggtaatgctagaggtcccctcggccctcttcttcttttaaaaacttttttttccatgtaggaagtggtttttcagcaatataatcttttcaccccccaaatccgagtccctgtggatacttgttgccctaatttcttttgctttgtgaatgatttttatggacatggttcccccattgttttctggaggcaggactacattggcgggtgacttccgggggtttc

SEQ ID NO: 216383 - DNA, 900 bp, Homo Sapiens
  misc_feature (886)..(886): n is a, c, g, or t
attttctgccccgtttattaatcttgggttggtccagaagccgggtttatacactcaatatgcaagagctacagacaaaaagtcttcagggcccacccctcacccccactctctggatctttcacccatccacctgtcagggatgaaactctttagagataggaagagccccccactttgccgatagggagactgagggccagaggctgcatcagtgacttccatgccactgttcacccaccagtgtcccctcttcataccactgctcacccaccaggatcttgcattctcttggctcccaagaacaaagcagagagctaagctaccttagtcgttggttctctccaagactcacccactctgtaactcgcggagcctgccaatccctgtttgaagggccatgcagtgaaagaaggggttaaaattcagcatcctaagcatctccagaggcttaggctgacactgtccccttcacatcccagaaagccaacctctggctcctcctgacagtccgacttcagagaaatgaaccaaaccaattcaacatccaatgctgctaaagccagagaggcacagcaaggtagaggcagagacagggaagcgatattttcctcatcggccttggaacatcttgtctgttacttgcaagcttataaacatacattgcttttcatcagaagcttaaatgaacacggtttgcaacagctccttttccaatggagagatggtttgtttgggaactggtattttagaatttccattcttctattctccacagggttccactgttatcaatctttcctgtccccatcttccatgggcccaaagccagagttcaagaaggacagtcccttatgttctttgtccccattcccaccataatttnaaaactactcctgg

SEQ ID NO: 216384 - DNA, 890 bp, Homo Sapiens
  misc_feature (853)..(853): n is a, c, g, or t
aaaaaccgtcatagtctttatgttggttggaaatcacagaaattaggcaggaaaaaaaaacccaagggaacaaatacaaacagcacagcgttccccacagttctctgctctgctctcctgcgagccggggaaggagaggggcagcctgagctcgggcgggggctgggcctggctgcccgcggctcagctctcctcgtccagggcctccgagtccccccgtgccctctcgcgctcctgccggtcgctcccaggcctgtccaggtcgggaccctcccgtacgtcgtgcaggtcttcagaggagccacaccttggcccctcctccgagtcccgaccctcctcgtgctccttgtcctctgcgctctcccccttctgtgatgtggcctcgccattcactggggctgagagatcggtgctgggcttgtcctccgccttctcctggggggcctcctccccggccagctcctccccggccagcttctcctcggccttctccttctccatcccagccttgttcactttctgcaccgcctcgatctttgggccgaggacccgcgacttgagccgggtatagacttctgctgccttctccattacgtccttgttcgctttgtaacggcgaatcttcttcaaggtggccaccacgtcttgtgttcttctggaggatctgagaggtcacctgcagggttcccagctcctctagggcttcaagcaacctttttacgtccggcctggcgaccctttagggcaaacttgatctcactgggcaggtttttgcagtttttccctccacggaggggcttcttttttttttttaaacttcccgggccaaaagagaaagccctcggaaccggtntccgggggtccggttccaacctttaacgggcctgggg

SEQ ID NO: 216385 - DNA, 686 bp, Homo Sapiens; identical to SEQ ID NO: 44555

SEQ ID NO: 216386 - DNA, 893 bp, Homo Sapiens
gacaggcttgattcagagtcccagaaataaccttttacagaaagggaaccataacattacacaacaaagtatagctgtaaaatctcaaataagaaaggcaatgctttctttagatcaccaaaaataatgtttcacagagagggaaccgttagaagcaaatgcatagctgcaaattttcttttgccatcaatatcgattccctctaaaatactttgagactactttgtggtttccgagtacaaactaaacctttttggacagagttgctcggcttcatcaaaaaaataaaaccaatttgcaaaaaaaaatttgtttaatgctaacaaataaagagacaatgtggttcttgctaactaactgcaatgtctactgaaatggcctaacctattccacgaatatttcactgtgaacatagttgctttttccttgccatcacagatggcctgcaaagtaacaagtgtcgtgtcagagcactttcaggcacccagggaatcattcctaacagaataactgcagtatgtgggcaactcaaacaacagagccccaaggtgggcattgtgtttgcgctgtgggtaaagacccaccaccttgttagttattcacctggaacccagagcgccaaactagacagagcagttgctcttacagaaccaacaacattttaataaattgcccgggggttcttggtgctgtaatgtgcctcacaggcagcgacataagcccgctctgggaagaagtcatcgtggtattctgctaaaaaactcaaaagagatcaaagtgcttcaataaagccttcagattcttctaagagaaggacatcttttccaggatttctggaagtttcacaaacaatcgcaacaatatgttgggccccaataaagttaggagggggg

SEQ ID NO: 216387 - DNA, 929 bp, Homo Sapiens
gggggkgrkggstgcattttagactaatcataggcatatcctttgctttctctatgtcaggggtctcagcattkcttgcagaatatgtgccccagtgtctggatgtctgaatgacctaaatktgagckggtcatcaatgagtatttattagcacattgctcttaagaagtkaataactcggccaggcacggtggctcaggcctgtaattccagcactttgggaggcggaggtgggcggatcacctgaggtcgggagctggggaccagcctgaccagcatggagaaaccccgtctctaccaaaaatacaaaattagccggctgtagtggcatatgcctgtaatcccagctacctgggcggccgaggcaggagaatcgcttgaacctgggaggcggaggctgcagtkagacgagatcacgccactgcactccagcctgggcaacaagagcaaaaccccatctcaaacaacaactaaragaagttaataactctgcctaakagcacatttagatttttatttttttttccatgaatcatctccattcactcactcttaggtttatactttcccctaaaattcccccatgaaacttctaarattagtttcatgctatgtatttgtttgataggcacagaaggtttacagctgcatggtcagtaagcgatactttggtcatgaatgtatatatacatatatatttgcratgctgagaaaragagagactgctgttaaaratcaaaattctcgtggaatgaagagaagccactgagatttttttcaaccagaatgaaaatraatrarakatcamtatmtgmaaaataaaaagattttwtgttattmawtwtgraagamatttattgagtatttgaaaatgttaataagaatagaaaaaggaaagaagagtaaagttwtgaataawttwwtttttt

SEQ ID NO: 216388 - DNA, 1000 bp, Homo Sapiens
ctgtataactgatacataacacacgggcaaactgtgggagtaacctggttgattaacttttctcctcagtttcaccagggaacaataataggtacctgagtctttgatgaaaaacttaaccttaagaactagcaaaataacattctcaaataattaataaagaatcccagtagcagaaatgttttaactggcatgtttcttctttgtccgctaaaatgtattgacaccacacatggaataatgcattatgacaataattaactttttgaagtttggtgttttgagagtatgaaatgaatgaataagataaaatatccttgcatatgcatgtragacctataaggaacgcagtattgaaaataaaggaatcaaaatttttacccatggaattttagggttgggtaaatcattcatttatcttaaatctatggtttgctggcagttatcaatctgctcaattttagcattgttgtatacaagaaagtaaaaatttaggtataacataagccagcctcttaagttctctatagtgattatctgtgtactgactgaatcagtgaatgagaacactagacataccagaaactcgtgcttgtcatctccaagccaatggacttaactgtttgtggcatttaagtccataaaacatacttcactgtcaaacacataggcttataggtttcgtcagttttccatgtgtaagataaatgtctgttcttagccatccagatattcagtcaaatttaaatacaaccttggaagcctcatggtagaaggtgtagctctcacattcttcaaagaattttcaaaacacttccactacttgatgtatcattaataattctatctttagcaaaaaactctggacagagaatgaatagggaggcatggattgggagaaagatatgtgtgtctgamaaggatttaagtcagatatataagtctacacycactcaaatgggkaaaaacmcaaatwaatacaacyggawaaaaaaaawaa

SEQ ID NO: 216389 - DNA, 786 bp, Homo Sapiens
  misc_feature (29)..(29): n is a, c, g, or t
acagggataacacctattcaaaggtagtnaaaagagggcctggggcctsggagaaactaggctctcccaggggggtactccaacactgatcatagggactgggggatccccaaacctgagatgggcctcataggccacagatattccccaacactgacacttcaagaacggaactgtccccataggggagcctcagaaccccactctcatgggtagtccctcttaggagttgggagggctgatgtcaggggactttagagaaaaaagggaacatggggaggagagaagctaaaaatgtcctgagtggcctggaaggagacccctgtggtgggcagggggtgggttctccacccatacagccagatacggaggagcagcagcagcaaaagcagccacaagttaaaaacatggtttctcacttcccaacttcggccttgagagaaagggacagcacggagcaatcccccaaatgagaggacatgaggtaggggaggcctggaattgtcattcatggaggagcagaggaagggggttctgggaggccaagtctctactaaaaccccgtctctactaaaaatgggggataatatgggagccatgaggtggtcacaggcacaccaaagcctgacatctgctttccaaggccaccacttggtctctggaccgaggagttcctggggaccctgaatatatcctcaggagagccaaggttcaatgcaggtctcataaagggtacggttggagtgccaggctgtgtgggagataccggccattggacacctcact

SEQ ID NO: 216390 - DNA, 722 bp, Homo Sapiens; identical to SEQ ID NO: 51265

SEQ ID NO: 216391 - DNA, 1000 bp, Homo Sapiens
  misc_feature (390)..(390): n is a, c, g, or t
  misc_feature (495)..(495): n is a, c, g, or t
  misc_feature (552)..(552): n is a, c, g, or t
agagtgctggctgcctacccaacattctcccctaatgtcttagtgtcagaacccctttgttattagggatagtcacgtacccagcaaataagccacatctcccagcctccattccaggtaggggtgggtggttagtgagatggaagcagaagtcattgggtggagcttttgggaaagctctttaaaagcgccctttgctcttctcccctttcctccattttcccttccctaaacacaaaataggcagckagagctccagtaaccatcttgtagcaaacctaacattggaagccatttgtcaaggttggcagggcagagatacagcctctgagtatctgatgacctgtcctgccagtcctggactccgaaacattatttttcttttatgtnctggaaaaaataaacctgcttctcgttgaagccattgttagtttgagtcgctcttcctagcagctgaaggtaattccttactaataccagctggcctcagtagtntcacaggtccttctcttctagcaatccaagatgtcatcatcctctggcgcataaganaatcccaggaatgcacttgaggccccagagctgctggccacagtgtcaggggtacagccaatggacttggacacagcttcctgggtgaactctgggtcaaaatgcttcaagtcagcaggtcctgtcacatttgggttgaagggtggagttagcctcttgtggtacaggtcatcccagtttatggggctgaagaatacatggttcttaatctcaagaaagtctgctttggagcccagccgctgcctctggtccttgtggagaaggctttgcaggaggtcacaggcggccactgtycggcctccggggatctgtagcggctggtgcagaatgttctcatacatctgggatacatcttggctgtagaagggcggcaggcatggagcwtctcgtaragactgccccaagcaccacagtcactgycgatmataaggyyttycgagcaytcagg

SEQ ID NO: 216392 - DNA, 805 bp, Homo Sapiens; identical to SEQ ID NO: 42959
  misc_feature (15)..(15): n is a, c, g, or t
  misc_feature (17)..(17): n is a, c, g, or t
  misc_feature (766)..(766): n is a, c, g, or t
  misc_feature (770)..(770): n is a, c, g, or t
  misc_feature (774)..(783): n is a, c, g, or t
  misc_feature (785)..(786): n is a, c, g, or t
  misc_feature (788)..(788): n is a, c, g, or t
  misc_feature (790)..(792): n is a, c, g, or t
  misc_feature (794)..(795): n is a, c, g, or t
  misc_feature (801)..(801): n is a, c, g, or t

SEQ ID NO: 216393 - DNA, 814 bp, Homo Sapiens
  misc_feature (708)..(708): n is a, c, g, or t
tttctcaaagctgtcagtttattcgcttaaaatacctaagtcctcagaagcagcagggctgcggtggaggggctgcgccctcagtgcccccgtgccttcctccgcacggcctgcaccagcagctccgagtagtgttccagcagggcctgcaggtctgggctggccagggggtacagcgtcggtggggacgggggtcctgggctgggcagagcctgggctggggccacactagtccccaccaggcattcagcctccagctggctgtggatccacaggaaggtggagaccagctcagtccgtgcctgctgctgcccggtgtccacctggccactggagaccaacacacggtaaaggtcgagggcttcttggaaggtggtctgcagcctgtgcaagatgttccccaccctgctcagctcaaggggagatgggggcagggctttaaccggcacccagggctcactccagcgggcagggctgccctggaacagaccaagtgcaccggaggtgggctccaggagggaggcagtgccgcccaggatgccaggccggccctctggaagctggggggtactggggtgggcaggaaggccaggggacttaggagctgggagacctgggccaaaggcaaagccgtggagcctagggcgcttcttttcccagggctaggggctggaagcttactgcaggggccggtgcacccaggcttgntattcacggtgggcagcaggagcccttcaaagcccttgtaaggttcgggctaaggttgcccgggccctcggggttccccaggaacccaggtaggcttctgccctca

SEQ ID NO: 216394 - DNA, 882 bp, Homo Sapiens; identical to SEQ ID NO: 54673

SEQ ID NO: 216395 - DNA, 902 bp, Homo Sapiens; identical to SEQ ID NO: 44685

SEQ ID NO: 216396 - DNA, 825 bp, Homo Sapiens
gtctcctatcaccctttttaaaaaaagagaaaagctgtaaaagtcaggccctgtgggtagggaagcggccaagtccccagccagggccggaatccggagtgggtgccaggcggagctgctgcgaatgcaggcacggcgggccgtctggccagaggctgatgcaggtgggcggccttggcaagggtagcctagggctggcgccaccgctaatcaccaccctcgaagccctcctcctcttctggaactgggtctgcatcccagcatgtgatgtcgatctctggaggcttgttgtagaacacaggaggcggagccttggcacagagctcttccgattgggcaaactcctcctcctgtgattgactgaagtacccctcactggcctgggtcccctccttctgggtggtctcgccattggttagcaggtggggctccggctcctgctcttgctccagctcctcaagggctgagggcagagttggggttctggggggcagccaggggctcccctttcactttctctgggttacagaaggtggctggcggctcaggcagctcatcaaagttgagaagggtggcacagccttcgcctgctggcagcagtggctccggagccacctcattcagcaggggcacctctgccagggtgatctcagtacccgagggtggtgtgggggcccctggccctacccctgaagcgtggaggcccctttcccgttgccaggccataggttaatgaggccggttgtggttggcgggtaccgttgctgtcaacaggggtgttacgccgcgccattgtctagatttcaatggtgtaccagccgcatc

SEQ ID NO: 216397 - DNA, 908 bp, Homo Sapiens
ggttcactaaatttattttaaaaatataaaacgtttcttacaagagcattacattctgcacactgctctgaacagatgccagggacatgtggactattgttacttttcctccctgtcccaccccccaaatgttacagtgaccacaaagcaaggtgttcacaataattacatggggggaattttttaaaccaccaacaataacgaaaaataaaatccactcactctgctgctgtttcaaaatttcaatgttagtttttgcacgcccttcccccccccaaccctgtttgtaaggaactaaaacattacatctggtgaacagcaaagatttcactacacctcaaatgcagaacacctatgaagcagaggaatgttggctttttaaacagaagcagataaaaaaaaaaagatgcaggactccttcagttcttcactagtcttagaaaaactttccagaatactgcttcacactataaaaaagaaaaaatatcttgcattagaatccttcaacatctgcatactgcttcacactgttctgcagcaaatactgtgcattctgtatctggtcctgtgttcctgtaatggtaatgatccgatcttcggatccttctaaaggctcatcaattttgatcgaagctcccgactcatgacggatttgtttaatccgctgaccacctttgccaataatagatccagccaaatttttgggaatagttacttgtgtagtaataataggtccaccaagatcaccatatgagccacgaccccctgcataggaataatcatatccggagccaccctgtggttcataagccatttgcctttctgaggggctcctgttttctattgcagatcccaagtttcatcaccactggaaccaaccatgccggtgtaacggttttcaagttctc

SEQ ID NO: 216398 - DNA, 858 bp, Homo Sapiens; identical to SEQ ID NO: 50624
  misc_feature (749)..(749): n is a, c, g, or t
  misc_feature (827)..(827): n is a, c, g, or t

SEQ ID NO: 216399 - DNA, 1000 bp, Homo Sapiens
gaagacttaggctgaggcctcagaaggagatctccatcctttgtccagagcagaacaggatggccatgtcccaggaatcattgaccttcaaggacgtgtttgtggacttcaccctggaggagtggcagcaactggactctgcccagaagaacctctacagggatgtcatgcttgagaactacagccacctggtgtccgtggggtatctagttgcgaaccagatgtgatcttcaggttgggaccaggtgaagagtcctggatggcagatggggggaccccggtacgacctgtgcagaagtctggcaagttgatgagcagatagatcactacaaggaaagccaagacaaacttccttggcaagctgcattcataggcaaggaaacactgaaggatgaaagcggtcaagaatccagaacatgtagaaaaagcatttatctgagcacagaatttgattctgtaaggcaaagactccctaaatattattcgtgggaaaaggcattcaaaacatcatttaaactttcttggtcaaaatggaagctatgtaagaaagaaagatgatggatgtaaagcatattggaaagtatgcttccattataatcttcataaagctcaacctgcagagagattttttgaccctaatcaacgagggaaagccctccaccaaaagcaagcccttagaaaaagtcagagaagtcaaactggggagaaactctacaaatgtactgaatgtggaaaagtgtttatccagaaagcaaacttagttgtacatcaaagaactcacaccggagagaaaccttatgaatgctgcgaatgtgcaaaagccttcagccagaagtcaaccctcatagcacaccagagaactcacacaggggagagccctatgaatgcagtaatgtggaaaaactttatcmgragthactctgattaaamatagaaattcatatggggrggmcyataatgmggtttkktagaagccttagtdggagkwaayytaattaaa

SEQ ID NO: 216400 - DNA, 877 bp, Homo Sapiens
  misc_feature (664)..(664): n is a, c, g, or t
ttttataccggaaatgccgaccatcacagggaggacagaccagacacaaatgcctgtgctcacaacacggatgggaggatcatcacggctcagggcacacatgcatttccttagaaacaggcagacaaagagagcataaataccacacaacagccaggctcagggggctgcgggccacagagggctgcgcttcaaaggcagtcagaggcattaaatacgggacctacacaatacactccacttcaccatacataatttatatattaaaagaaaggggaccacagtatctatacgtgcaagcggctgtggtggagaaaatgaacgggggggcagccatgcacgggaggggctccctgtataccctcccgacgcctcgtccccacccttcccacagagtcacttgggatcacaaaacgcatgggccggccggggcgcagcctcgggaggtcctgcctggtctcctcggcatggacctctgagctccccgtgagccgggaggtgcctggaaccaagaacacttgaaccctgcatgtcaccacatccctgggagttgccctggaagggaccgggccaggcgtgaggggaggaatgtcgcgttggtcaggtggaggagggaggcgcagtcaccgggccgggcaggggcaacgcatgccccaggcccggngccccgcgagagcaggaacgattgccgggcatcccattcttgcaagcaaagcttaaacggcacgaaaagccctgtttttctctgcaaactgtcaggggctcgctccgcttaaaactgattgcgaccggttggggccgcacttgaattaggcggaccaacggaggggttcgtttttgggcccccttggaggaattctctccaaggataaggttg

SEQ ID NO: 216401 - DNA, 693 bp, Homo Sapiens
ttttcttgatttattcagtttaatttaatacttaaacattcattttcgaataaaaatactatgtcttgtactagggatacaaagacttggttattcttgttggagtaatgattctcctctatctggggaggtcatcctctgcagttggggactgaaggactgggagatgggagattgaaacttaaagaggtaaaggtatgtcttggaataaaactagttatcagtcaccaccagaccatcatggcggctagaattccagaaacggtgaatagaagttcatcttctattttgtcttcatggaatatatcactctggtaaacagctggttctaaatatgatggttagactttcaaggtcttcattttttagatgtaattcttcaaggagggtgtctagaaaccgtgtaaacaccataccttcctgagaatgtttctgaatgccaagaattggggtcagtaatgacagcaacaccatagcaattaaagtccattccgcaggtttgtgtataatatttctatttgttaacctgaaagttcgaacaagatttttaagtcgtgtgtaaatatctcccaatgctatttgaagaggaaccataagcccaggcaacactttactcacctttttaagtacgatgcgttttctaatctggttttgggaacttgagtctattagtggaaaggtcggaaccatgct

SEQ ID NO: 216402 - DNA, 890 bp, Homo Sapiens
tttatagagtttatttgaaaagatgctgaatttattcccaagtataattttaaaaagctgtttaggacccaaacatatttaaacatctcttacacatacagaatttcagtttacaaatattccagaaggcattttcttaagcagtgaaccatgcagaatactgttgctaaacatcgtttctgccttcctcgtgttctcttggtagtttttactgtttggcttgatcctgctgaggaatgtgcttaccactggaagccagatgcagattcggcaagtgtttcttgcctcttacaaggcaccgcgtgtaacgtcctgaccagctgttggtcatttgtggcagaggggtgtggctgcttttcgcctgcatctcgcgtgctttaggcagatcagtctggagtgcaggggaggatgaagacaggtggacttgggctcatctttcatcagttaagtagccaattatctaacttgtatttctggaaactgaaaaggaaagtttctagaaaccgtaagaacaatttaagttgggatttagaatagctgacacatttttagatgggactgaaatgagtaagaaaggttctccaagatgtatgattttaagtccttactccataaatcttcattaaacacatctcagttttggcctgactcactggggtgtcaagcagctactcaccctgcctcaactacgtaagctgcaccttggcaggaaaagggctcacaggttacagatagagcttgatgagctcatcgctgactgctgagggtgtcagcacccccaggtctgttaacagcaaagtgatttaaggaggggcagtgtattccaacccacggatgctccttttggaggctttgtccagcttgcccgaactttaaaggggcttgcctta

SEQ ID NO: 216403 - DNA, 944 bp, Homo Sapiens; identical to SEQ ID NO: 51799

SEQ ID NO: 216404 - DNA, 1000 bp, Homo Sapiens
  misc_feature (1)..(2): n is a, c, g, or t
nncagtaccagagctgggtgacttggatattggatatatccataacgagcatcatatgaaatcaatcaacacaggtaagtctctgcaggctatttgcagaatccttctgtgtcctcttgaacaaagctgattatttccatgccatttacatcaaaagagaggaaattaagacccctagtgggctgtgagaccactcacaacaccttttagggactggggagagaagagaggtctgcccgtcacaagcatgctggggtaaatggtaaacgcagtatgattctgccagatggtaggagcagatggctcctgccccagcaaaggccaatagccatttaaaaagtgcaacacagctgctgaaagcatctcacatacttggcactcacagggaatctccccagtgggaatgtccatatctatgaagtttcacttcttactgatggttccctcccaatggctgctcccagagttccactctagggtgagctgttgggctgaacagagacagcacattgcttagactgctaaggcctgtgtccggtgtgaaattcccaatggcgggtaaggttcagcctccaggggaagggctttcctgcatctgctgcactcattaactactgctagttccccaccatatagtaagtcgggggcattggcctaagactttcccccacatttgctacactcttaaagcttttctccagcatgaaccctctggtgcagaacaagtgtctgtttccggatgaattctctcccgcactcactacacacataaggcctttccccagtgtgggctttccagtgcctgatgaggktgggtctttgdagtgaaggcttcccgcacttgcygcactcmtaaggcttttctccagagatramtttctggtgctgaatgagtatggagrtgcasacgaaabttatacacaaytggtacactcataawcactgctgtgaatwctcmgtgtwaattarcgkgggagcttttgtwaargcttyccmcatt

SEQ ID NO: 216405 - DNA, 795 bp, Homo Sapiens
aatataaacagcggccgttgacctctttattttattaaaatggcacataattattaaaacagcatactgatcactttatacttctgctagcccccaggggagctgctgggggcggcatgtgagtgccctcccgaagggtacagattcatgcattgagcaattcgtgttctttatcggttttcccaacagcatcaggatttgagagtgggtcgaggtcagcgaagaggctgaaccaggcagtcaggtctgaggcagccttagcaggttcttgtagcgaggcctgtaagtctttcatattttggtctaaaagctgcgaaggaaggaaacctgagcctgtctgggccttggggtctggctctcccagggccatagtgggcactggctccttcacttggccgtctccaaacacagcggcccactctttgctgaactcgccctcttccaaggaggaagcattgaagatctcactcaacagcagcaggtcatctttgtcagcaccttcaggttccggggtccctgccactggtcccaggcaagcaccttcctcagatttcatgtctaatagttcatctatgggtcctgagcatgcagtatgtgtagagcctttgtctaaggcagataaaatactttttccatcttcagtcttaaaactagaggattccttgcgctggttttcttcctctaatgaaattaattgggctcggctcctgcacggctgaatttgtactttcctgctgggtgagtttcttcttctcttcttctcaactaattttttaaagggtcttgtaagctttt

SEQ ID NO: 216406 - DNA, 1000 bp, Homo Sapiens
tattgagaacagstttcatgcaggcaagatcctkcaccagggatgcatatattaaaaatacatgtactttgsgttgaaggagctgaaaaattagaaggaaaggggggatctaaataactgcaatgaagaagaggaagtgaggggcacagttagcaaagtacggctaaaatgtggcgggagttcagaccaggaagagactgcttcccacttgtaagtcagggaaggccctctggagtkagggatatctaaaacaggcctgatgatccattaatagttgaacatgtggaggttgckaggaccccattccatctggagataaaatttgaakkkraaagtcccagaacccaggtcagaacaacaaatcctgcaaaattaaattgagcttatattgacaaacaatcattaatcagaaacaagcraaaataacaaaatttttacaaaragagttgagaggacgtcatcatcacgatgtgttcaggtgtgtctggagcccttgggctgctggtctctcaccccaaaaggagaagggtgacgaggaggctcatggtgtgtcttaacagaaacagcgtttcctgaaccaaagcgcaagacctatcagaagaagttaaggcactatcaccgccaagatgatgaagcccacggaactgtgatgctcccagtagaggacgatgtcctggccctctagactgctgttcttcacccgacaggacaggtcagctgcctccccagcggccacctccagggttgcgcggagataccatgtcccatcagcactgggcaagatgtcccctcgctgagtgccctgctgctcctgctcaccccgcatccacatcacccacacgggstttgggkagattctgagamatggcacamaagcygcagatggccarggccaggacttggggcatgggamaacaagsctycgggcttcacttgccgctggagaagtkctttcctgcctcmaraaraacaaragraaagtgggcggkgttaytaaaaa

SEQ ID NO: 216407 - DNA, 1000 bp, Homo Sapiens
agccgagcgagttagtgtcagccgagggccgaaaccggaaggcggtgctgtgccagcgttgcggctcccgggtgctgcagccagggaccgctctcttctctcgccgacagcttttccttccctccatgagaaagaagccagctctgtctgacggcagcaatcctgacggcgatctcctccaggaacactggctggttgaggacatgttcatttttgagaatgtgggcttcaccaaggacgtgggcaacatcaagtttctggtctgcgcagactgtgaaattggaccaattggctggcattgcctagatgacaagaacagtttctatgtggccttggaacgagtttcccatgagtaactgaggggaggggtaatcagctccatctccaaagataaacctactccccacaagaactggcctttaatgtggtataactgttccgctgccttcttgtctgtgctaatataaatactgagtaccagcatgtccatttgaacatgcagagggttaatcctgcttcctaaagcctcaagtacatgcctcctgcttagttcactttgtatcacatttcctaagctcccttttcccccagttttgggacactgtgcttacctccaaaaatctcatctcttccctggcattctccctaggctctgttttgcccaggggctcccgctttttcttgctctagaggagcagtattcaaccttttagctatgatgacacataacaaaagatgtttatgtactaatagttgaaatctgcctttttctcattcaagaaggcatacaaatatctgagagtgactttgttgtatggctacccttgtgatctacagtaatttattctttctaaaagtaaagattttcaaaactcagtatttaaccactaacagaacmwtactttggatgctcyctawacmtgkttgrscccctscctaggtgrgatgmatttwttgtgwarwggggkggccyctccctgaaattktaktttttttwtta

SEQ ID NO: 216408 - DNA, 909 bp, Homo Sapiens
ctttttacgcttttatacaaaacaggacgtgatcccagcccaattttccaacaaaagtcaccacctcaatttgatttggtcaagccctctctggctggggagtgggctggccgacaagagcaaggccccgtcccagccatccaacactctgtccttccctgccccaggatggacacccaacatgtggagaagttgctcttgaagctgctcactgggcctcgttgaagcgggtcaccattgtcttgtgcagtgtctccttgtaggactcggttgaggtgaccccgtaggagctgccccgtgcacccaggccggagccccgcacccgtgtttgggcctcgataggcgttacaatgccctgcttcttgcggcccaggccgctgccctctttccagcccatggcctgcagcatccgactgccaatgttgtcactgcccagcccgtcccgagtaggctgctcgaagtctacagaggctgtggatatgccgccgtacttcctcctcttgggctctggcggctcggggatgccatacttttctctgcgttcagctgcacggtcccggtacttcatttgctccatgtcattcttctctagtgcttctagctcgttttctgacaagtgggctcgccggtgaatctcaaggttttgcttgtggagccctgagagctgctggtgccggatgagcgcccctttgctggggaactggcgtcggaagagcagacaggccagcttttggccgtcgggggagcttctcctcccggtcagggcccccacgctcctggttctccctaatgggacttttcccgctggaggctgccaccagtcctcgcgggggggttgggcgggtcgtcacttggccattttggggggaatccatgcggggggggcggccttttcgggtaggggctccc

SEQ ID NO: 216409 - DNA, 867 bp, Homo Sapiens
gacccagttagtctgttctttattttccttggaaaatacagggttacttatcaacaaaataactgtccatccggtggggaagtgccatccggtggcttctatgtacaggcccatccctgggaaccacatttccagagggggcctccccctgaggcccccattggccccctcccaggtatccaagaataaatcacatggtgacagctgccggcatgggtgagtgggacccaggcctattacccggccagagggtttgggggcctctctcctggaagcctgctctttccacaccccctttcccagccaggctgtcttggacactcccggggctccgctgaggggcacatgattcccgctttggacttcttttgagatgtcattttaacactgaggcatcctggcctcccttcccggaagatgggttatttgcagtgctgtcttttcttttagtcccggtttttgtacaaaaacaatgatactccccattggactgtatttttgcccaagaaacaaaagtgcctcaacaggtacagttctgctggtcaatctgcttccggcagggctccatggtgacagccacgcccaccccactccggcccgatgtcattcgggtcacctccctccaggtgtttgtatctgggtccgtaacactccacactgtccagggaccgtgggaccatcataacctccaagggacgtatattcttccctggtggacagtgatcccccaggcatctttccggtgttttattggtggctttaaaaggtccccgttttttttttccacaactgtaggcgttcacgctcgttcaccatctcatctgaccatccatattcccccattcgaattaaatacctgtttgttca

SEQ ID NO: 216410 - DNA, 801 bp, Homo Sapiens
ctgtgctttatctcgaaaataccttctccccctgccccagacagtgggcggggagggggcagcaaaaaatagaagacgtccctccctattgcacatggaccctatatacaggcccacctggctgaggctggcgggactcttggcacattcttggatccctgctcaggaggggaggggtgacggggtggcatcacacgtgagatggggacctccaggcggccactctggtcctggctactgatccttgcacttcttggtcctcagttccttcctggtcccgtctctggccctggtcccctctggcaacgtccccctgcttggctcggcctcccacctccatcctggcctcgggtggccccctcggctcctggggactctgctcccctcccagtccggaggtcccaggggggctatggcttctctgagacttcccccggagccctgtcactcgtgttcacacgggggaaggggtgcgtgtggcagaagcagctgtataaatacgggtgcgggaaagtccctccgggtcacttggagagtttgctgatgacgcggatcaacgctgcattctcatccttgaggcgctggttgtcagcgcggaggtcagacagggccttcagctcctcctccagctctgcggccttgcgttccagggcctgcgctcgcctctctcccgttcccggcgggctggcctctccgcgccgsttcttgcctctgcgtggcccgctcccccycccccttgcgctgtgccccccgccgcgtggtctcggttcsggcyycgcgccccgctyckttctccctgcg

SEQ ID NO: 216411 - DNA, 927 bp, Homo Sapiens; identical to SEQ ID NO: 40641

SEQ ID NO: 216412 - DNA, 697 bp, Homo Sapiens
tcctgcggtttctgtttttatttggcaacatctcgtttattaccatcatgaatatcatttggacctctgcaaagactatatacattcacattaacgtacacgctcagcttcaggcctctggcgggctgttcgtggctggttcagtagctgggtcactcccgtattgcactgagttcctagaactcctgatagccacgcacacagatgccaggccacgggccacgccacgcgcacagatgccaggccacgggccacgccacacacacagatgccaggccacgggccacgccacgcacacagatgccaggccacgggccacaccacgcacacagatgccaagccacgggccacgccacacgcacagatgccaggctgcgggccgtgcctgctgtctgtccttgtactcggtgcaagcatgaatttctttatccctttatttccttcttgaaatcgctgaggcagttgagaggagtggagggagggtggtcagggctggaggatgggagggagcacttttgatagaaaacgttaccgagacacaccccagggtcagaggcgaacgcatttgcggggtggctgagtaggagccccagggctatgtacacggtcatggcctttcctggtgaagttgtcccagccctgcctccgcttgtcgtttttttgttttttccccccaagttttctagatatggtaata

SEQ ID NO: 216413 - DNA, 633 bp, Homo Sapiens; identical to SEQ ID NO: 51860

SEQ ID NO: 216414 - DNA, 892 bp, Homo Sapiens
cggcggaaccatttttttacagttgactttacaacccaaagacacctatgttcttcatataaaaacattagtatagatacccatactttctagaaaatgattatacagaccctttcaaagaaaaatgtattccattatataggtttcagtgaggttgcttggaaaaaactcacatctggactgattcctaaaacatagcattccaccactctgcaacttttggttcaaagtatagattattgtcatcagtatgtggtgcctgtattcttacatatttgataatacatatatagactggcttatcacttaatgttccattggttcatcagccttttctgcaggttcatcagcaggttgagcaggctgtgcctttctctgtggtctttcttcaagaccttccaggaatggagacacatcatcatcatcatagattgtaaactccaagtctttaccaacaattccaatggaaacattctttgtagtcaggtcctgttctgcaggaagcgtctctcttaaggcacgcagaccatgtttaactagttcatttaaattacactccataaattcagacatatgtctctccaagtaagtacgagctgattgggaacgggctccaatggacatggctctgcagtcaaaatagttagcagatggacaggtttggaaaatgtgagggcccatatcatcataaccagcaataaggagaccaacaccatatggtctccggccatatcgttgtgttggtatctgggtcttgcttccaattagagatacaggacgagacccaggcagtggtctattcgatacaaatcttggattcaaacacttctgacgccataaattacataacagtcttacattcaccattaagccccgcaattgaaataccaat

SEQ ID NO: 216415 - DNA, 892 bp, Homo Sapiens
aagcacaggagcctttattttacatttttctaaagaggacattgtttaagtgagcagctaacagaatttataagagagaaagtgacagcaaaggtaactggctcaagtccctctgtgtacggtacgccatgtacatttcatgtctgagcaccttgtgtgtgtggtttaagtgaaggtaaggcagtgtagattgtgcgaacaagagatctgtgttctgtcatcaggaaaggctactacatgcatcacacaaaatgcacaacctgaaatgcttcaatctgcaaccgaagtttcctcaagcaagaattcgcatgaacactgacgaacacatacagagcaacttgggcagagagaatggatgatgccatgaggcagtgaggttagcacactgatcaagagccccaaaagcaggagccgtcccagtggcagagcaggctaggagggtgagcagcagccatctccagccaccttgagttccttcctgccttcactctaagttgagcagctccacgtcaaagatgagggtggcattgggagggatgacaccggggtggcccgtggctccatatgccacatcaggggtgcaggtcagcttcgccctctgccccaagctcatctagcagggatgggggcagatggggagaggagaaagaggacccagcttgatttaaaagaaaaaagttagatgactatgggattttcccaaaccctcctcaatgttaactttgaagatctcagatgaattctacctgggatacattgaaaatcgggctaacagctttcacaaacccagtattttgccctcagcaagaattttgacttggggggcattaccccccccaggatgggttctataattcatggcctcttgacaaacatttactgggtttttcaa

SEQ ID NO: 216416 - DNA, 426 bp, Homo Sapiens
tggtctsdwctcckwcctcavgygmtcvcccacbttrgcctcbkaaagtgctgagattacaggtgtaagccactacgcctggsctcagstgggvcaatctaaatgcacaaaatagcactatgccaggtaatatatcatatgtcactcaaaatgtaactggstatcaagctcatgatgactgtttgcttctgaacttttcaagaaatgtttgcsacttgcstggcacactggaagctcaacaaattcstgtagcataagggaatgaatgaatgaatgaacagdggggdggrggaggaaactcagcgaatttggctccbtgmtggcacctgtacacatgcagaccatcttgtaaagcttcttactggtcgcattttgagagggggggaacaatacaaaatcatcakcagactckkgkatatakaawca

SEQ ID NO: 216417 - DNA, 876 bp, Homo Sapiens
  misc_feature (28)..(28): n is a, c, g, or t
  misc_feature (789)..(789): n is a, c, g, or t
  misc_feature (811)..(811): n is a, c, g, or t
  misc_feature (839)..(839): n is a, c, g, or t
agaccccccgcccccccacgtattccanagccgcttccaaaccacagcctatcctctgctccatttcactcttgccctcacagactttcagcctccatgctctgagacaactgtggaagggatggaaaccctattttcttttctccaagaccatggttggtctgcttccctcactcgggctccttgacagtcttctagaagagagaaggaggaaaagaagcagttcctgatgttacaaatgaacaaggatctcccagccttagtctttgagaaaagatggctgaaagagaggaactctccaagtcattccgcaaacaaatgcccatttaaacatcatccttgtcttgtgaagaaaacaggaagaatgtcatgtaccatgtggatcaccttcagttcaaagttgcagcaaagtgaagaaagaaactactggaagccacccagcaatgcactgtttagtcatcaattaggagcccatgggaggataatagggagactgggtggaggctcagtgtgtaataatctcttgtctaatgtatgtgtgtcactgccatgttgtatgaacaatagtgagggctcacatttacttaacacttgtgtgcgcaaatctgggtttttcttcctttccagaactatgactcgatcataaaatctgttttgtttgcatgcatgcccaaaacaaccctgtaagtagaacattgtcattatctctgttttagagatgaggaaacaggctcagagaagctcagaaatttgttcaagatcgcacagctagtaaatggcagaagtagngattgtgaacccagggaatctncagagcctctgtgtaaccatgatgttanatttttttttctctttaaaaacaaaattaaaaccttg

SEQ ID NO: 216418 - DNA, 883 bp, Homo Sapiens; identical to SEQ ID NO: 51018
  misc_feature (631)..(631): n is a, c, g, or t
  misc_feature (659)..(659): n is a, c, g, or t
  misc_feature (681)..(681): n is a, c, g, or t
  misc_feature (758)..(758): n is a, c, g, or t

SEQ ID NO: 216419 - DNA, 872 bp, Homo Sapiens
  misc_feature (23)..(23): n is a, c, g, or t
tgggaataatacttgttaaactntctcttataaatatgcattaaaacgtccgataacacaagccaagggctgtaaaattaaggttaaatcaagactgaatttcccgcacggaccagcaggaaagccagttacctaaaagagcctaatccccaaatccgctgaaggtgcagggcggcctcagtcccggggcatcttgaactggtccttctccctgcgcacggcccgcatggtggtcaccgggtccgtctcacctgcgtgctgctgcaccgtcttctccctcactctcatgaaggggttgtaggtaaactcctctgccagggtggatggcactgtgggctccccgatgctgtacttctccttggcccaggccagcttctcccggatggcggcattgccgggctccacgtggcgtgcaaacttgaggttgttgatggtgtactcgtggccacagtagactcttgtgtccggggggagccggcccaagacctccagcagagctttacacatctcatccgcagtcccttcatagaacttcccgcagccagccacaaacaaggtgtcaccttgtgaacacggcagggggctccgagcctccgggcttgctcacgaagtaacaaatgtgtcctgaagtgtggcacggggtcttcaggcacttgacgtttaaaaaccccacctgcagtgtggacaggtgagtgatcttgtgagtcagggccccgatacggccgttatccccggacaccttaagtcccgatttcagcttgaccagttttttttttccgccaacatggtcccttataagttaaaaagaagaccctggctgcctgtttaatttaggggggctggcccgttgatcttgagggctcgcctcgctg

SEQ ID NO: 216420 - DNA, 801 bp, Homo Sapiens
cttaaaaatgtgctttattttctcttagtgaactttatccaggaccagtgggggtgggagagccaagtgaggcccaaaggcagctgtgggctggctgcggggcctgtggttgtgtactcattcctatgagtgggtgagtgatggggactgggcaggaggacagggaggggacaggagctggctgctgttggggatgactaggaccacagctccttggtccttggcttggaccggggaagggcactcgctaggggtggcagtgagatggcatgcctcttccatgaggtggtgcccgcttcctgcccaagtgggagccaggaagccagcgggggcctgaggcatgcctgccctgtgggtagctcccgaaagattccagactcgctctttagaatcaggtggctcactgagctctgtattttgtttcctggagctttcactggtttcttcccctgagataccccaagtgacatgaaaagcatactcagggcctagagacactttactggggatgggcttctgtcacaggtcagaggtctgagaagaggggcaggccccactcctttccactagtagagaaaggttgacagagaatcatttcttgcttctcttggccgtagttttggtttgtgctgcgggccttagccacagaggccttgagggcatggggttgcttgtgccccccttcctttcccagaaagagttttggcggtccctgggaattcatcttgtttgttttttttgaggttagcgggaggctcgtgtttgatggactctttctcacggatccgctcggcttccttt

SEQ ID NO: 216421 - DNA, 946 bp, Homo Sapiens; identical to SEQ ID NO: 48905

SEQ ID NO: 216422 - DNA, 731 bp, Homo Sapiens; identical to SEQ ID NO: 54284
  misc_feature (657)..(727): n is a, c, g, or t

SEQ ID NO: 216423 - DNA, 971 bp, Homo Sapiens
  misc_feature (163)..(163): n is a, c, g, or t
tattttcttaaaataaacaaccttaaaactttcatccaatccccaacttctctttcccccgtacatctcttcacgtccttggctgttattccgcacactgacctcggacacacagctactgcacggagagagggagggagatctggcaagggctccggcagtncctctcctctccatggcgcagttcgtatttacacacggcccttggcgaacgtcctttcaacgcagttgcccataggccctgggacaggaaggcccagatcagggtcccagcagggcctccctcaggccacaacgctggctgtgccttcacaggagtcagagcatttccagccagtctcaggcgcggggcatgctgggaccaggggcaccaccccttgctccccttccttcactcagcaaagccacaaataatttactctttaaataccaagacacttagctattgttcatttgctcccaggtgaaagaaccttctttaaatatgtcgtgtttattttcttaaataaaaacaaagcagaaaaccccaccattaacaagaggacactgcagaggcttatgtacaacacgtgtcccgcgaggctggcgcaggactgccactcactccaaaatttctttggagcagagagacagatcgtccagataacaacttttacactcagcaagccagacacaaaaaagaccacctgaaaaaaaatatgttttgaaaatctgcatttaaaaaagaatactcaactgcatttgaaattttctggattttttctgcgaaacaccacgagatttggccaaaaaaaaaaaaaaamcaaaaaamaaaacaaaaaaaaaatgtcagagaaggraaaccaggttttgwtttwtaaaacatcmgactagtagaagaaaagctggaatccmrcyggsctagtttgaaaaaatcgtgcamtcgttttkttgttttggttttgtgctwttttgaagkgtttttaaaaaag

SEQ ID NO: 216424 - DNA, 913 bp, Homo Sapiens
  misc_feature (731)..(731): n is a, c, g, or t
cagggagcagttatttggtgaatgctgacggcaacatatccagagagacaagatgggaaagttgctgagacaagaaagcctagggaaactttaggctagatacaaaattcacacagggaaaggcacggactctggggagactgggaaggtcctcagccattcagcaccatgcggacgagctctgtggaaaggaaaggtgggatgagccagggaacagggctgtggaggggtacgccaagggccaggggactaccagactgcaaaggtagcataagcgggaacatgcccacagcaaccaaccctggggtcagtttgcagaggagccaccttgagtctgaccagttctccatgcccctagctcccctcccagcagctgttagtcccccacccaaacctaagcagcaagaacacagcagaggcagaaaagttctccactacacctacagctactgtcagccactggcgggaggagaggacagagttttgggttagggtacctccaagctgcccagcgagggaaggggaaaggactgttcagctatagcagcagaatggggcaggcaacccatacccctctatgccagctacccatgctccagggccagaaggtccaccctaaagcaagactggcataccaggctggtgagagttcccagacaccagcacccagtgccggataagtaaaaccctagggcccattctaaaagtaaggaggtactgtacccccaggntggcttcctttttgcaggatacccttcccttccctgacaccgctcccttccatgaaaccttgtcaaggatggaatctccaatggtctattaggtttatggcgccgggtgaattatattaccaccggtttggcgtaatcaaacgaacaccccggccgggataccactttatgaggagcagcct

SEQ ID NO: 216425 - DNA, 707 bp, Homo Sapiens
cctcggtacagcggagacagacacgaagggcgggcgggagggctgcatgcaggggcgtgcattggctgctgccgcttttgtaattgaattgttttaaacctcaaacaaacaggactgccgctgtcactcaggccctccagagccactggctgcgaaggttggacctccggctggaatctcctaaagcccctgtggctgagctcactgcagcggtgcggcaggggcccctgagcagtgatagtggacattgagccacttgccatcccgacggtgccagacccgggtctcttctgactggctggtgcgaggccgaccctgcccgtcgatgtactgggtgaggcggatgtaggcgatgcacgctgcgtcctccccaatcacgtggacgtgtgggtttaggatggtggtatggataggcttgctgttcttggacaggagattctcaaagtaaaacttatggaaatccatcccctccacgaggttaccaagggcctcaggctcaaaggaagtgaggcctggatcacaaatcttcgtgtaggcctcaaagtccccattgttgatggcttcaatcagctgttctgtaatcttaatgatctcctgttttcgccactttgaggtcctcatcttctgtgggggtgttggagctctctgtggagcccttgatcccatctggagcgttgggtaccacagtgggtttgcggctcccttga

SEQ ID NO: 216426 - DNA, 908 bp, Homo Sapiens
aaacttttattttgttatacaaccaaaaatcttaaaactatcttagtacattaacgttttaacaggtcaacttttagtctttatgagcagttttcacgaagttttactcgacatttaaaaaatgtagttaacatactgtagatgcttcaatattgctgcttattctttgtaatcttatttggcataatataatcatgttcagagttattttaaagtaacttaaagtgaacagacgcactccctcctccccccaccctcaattaaaaaaaaaaggaaaacagaaagaaagaaaaagaacaaaaaataagattaggttctaggaggagggaaaccctaatccaagtgtggggatacagaagtcagctttttgcacccattctccatgctacagaataaaatttgagactacagccaaatattttctaaaacctttcaagacgctccagtggatttctggatttgttcctttaaaatcaggatactctgcctttgctcagggggcagcatggcaatctgatctgcagtcagttgaagaacctgcatgatcaaagctgccttctcctgatcctgtggagtgacctggctctgcccaggactaaaactgctaggctggcttccaccttgcttgcttgccccctgtatacctcctccttgtatacctcctccttgtatactgactccttgtatgcctgccccctgcatccctcctacttgtatgcctgctccctgcatgcctgttccttgtatgcctgtaccctgcataccagctccaggatcccccacccctggaatgcctgggacctgtctgggtcccctgaggaggccacctgcccctttattaatgggaccaggaccctggattccaccaggcatagggcctttttgaacttgggaacaggcccccttat

SEQ ID NO: 216427 - DNA, 695 bp, Homo Sapiens
ttatttaagaagatcaacattccaagaacagcaaaagtgagtccatttgaaccaagaccactcctttcctcccccaactccaaactcagcgagatcaaaactccattcgacgggtacagccaagaatacagggctccctctctctggagctccaaggcagagggctgtcttctcaggaaggacaatctgtcaggaattctcatcttgcctccagtgtgcatatttagatgaatgatgttcaattgccagctccctcataaaggccatcctcagagtttctgttttaagtgaggtcatattgattcagagacagtacataacctgtcaccctaaggcctttctccattctaaactttctggtgttgaatagggttaggcctttggctgaaacctttttccatattcactacattgtccacattgtaaactgtccagtgttgaatgagactggaggcgtggctaacggatttccatctggtaccttcaagatttcttccactgagaactctctgctgctgaatgaggttgaaacgctgcctaaaggattgcacacaatcacctgcatttgtccagtgcgaatacttcgatgtttaaaaagactgctcggcgggtgaaaaaaactgtccacattgcctgcacttataacgctttcctccagtgagaacccctctgatgttttacacagcctgggaatt

SEQ ID NO: 216428 - DNA, 687 bp, Homo Sapiens
taatgtatctattcaacaagcatttgttgaacacattctatgtgctagatgttgagttcagataatttcatcaaaagaagattgtacaagttctgacaaagccaagcccctgggcagtctccacaatcccagcccactcttaaaagcacaaaggctgtagccaccattgtctgccactggacaaacggccaattgctttggggaaagccccatcctgcctggctgtaagtagctctgattgagggttggaggaaggagtaaaagtgagggagtgggctgcttccaacagaactgacaggaactactacctgttaatttgtttttatttacactgaatcagtccacagttcaatcccctagcctatacgatgctctttcccctggccatcatctttccctccctgtcacctacacagtcaacctgtcccaaaccttggcccacttcatcctgcccttctgcggtcacagctgcctgctgggtgggagtccgggggaatggtatgtgtggtcaccagagggcactgagtgggcttcagtggcatgtgaatcctggcagagtctcggatccccgatggggagaggagaaagcacaagccaagacaacgagtgtgggaaggaggcaggggctaattgacgggtggcgggtggggttccccactccattttaccccttgctgcttctttttt

SEQ ID NO: 216429 - DNA, 645 bp, Homo Sapiens; identical to SEQ ID NO: 52496

SEQ ID NO: 216430 - DNA, 1000 bp, Homo Sapiens
  misc_feature (587)..(587): n is a, c, g, or t
ggtggtcctcctcatcgccgggggtctcttcatgttcacctacaagtccaaaaarttcaacgtggagggcttcgccttggtgctgggggcctcgttcatcggtggcattcgctggaccctcacccagatgctcctgcagaaggctgaactcggcctccagaatcccatcgacaccatgttccacctgcagccactcatgttcctggggctcttccctctctttgctgtatttgaaggtctccatttgtccacatctgagaaaatcttccgtttccaggacacagggctgctcctgcgggtacttgggagcctcttccttggcgggattctcgcctttggtttgggcttctctgagttcctcctggtctccagaacctccagcctcactctctccattgccggcatttttaaggaagtctgcactttgctgttggcagctcatctgctgggcgatcagatcagcctcctgaactggctgggcttcgcctctgcctctcgggaatatccctccacgttgccctcaaagccctgcattccagaggtgatggtggccccaaggccttgaaggggctgggctccagcccgancctggagctgctgctccggagcagccagcgggaggaaggtgacaatgaggaggaggagtactttgtggcccaggggcagcagtgaccagccagggcaaatggcttagaagcaggccactccccagcctgctgccagcactcactgtgctcaagccgccagggctcatcatggtagctgggagctgtggacgggagttaccaggtggtggggscaagccagggactcatgacttttgcccctccctttcagagcstggtcacacaaggggsgagcaccaggccagcctggggactggscagagctsggsccaagctgcgygggaatcgcrcaggagaagggagtgggyggkttcttccaccactyccaggrctykaaavcgaraatawttckaaggcaaacagcttytaaaggg

SEQ ID NO: 216431 - DNA, 912 bp, Homo Sapiens
ttttaatctttcacgatcacaacatttttaatataacaaacatttttgataatatacaaacagcaatcacaacagcatccacatggcagcaaggggaccagggcacagagagggggagcgggctggggagggacagttttcagggtcccagttgcttccctggcttgaaatcaccctggtcctagcagaggacaggttaaggctgccagaggcagagggtccctgaccctggcccggagacagactgcccaggcaggccctctgataccatcttccaaccatggcagcctccaggaaaagccagatccatttaggagataacaggaaggtggctgtgattgacaggaaaggcaacatggttcctcagcatcctgctgatcacacctctgggaggggctgctggattgaagaggacctaagaatcttcctgggagcaggacagaaatgggatctaagtctacctactaactaacattcccgcctgtgacaccagaaagctggagtgggtctgctcagatgtacaggaagagaaaggaatgacaaagcctttggctcagcaggactggagccttgacaggcactgaccaagaaagcctctaggtgggccagggaggtctgtgggaaagctttggatcaatggtactcaagggtgcacagtggcacagtggccttagttagaatttatgaagacgaaaagaacacaagtcagaatttagaactgaagtacctgcttcttataggcctgtagaggaaaagcgagatcatccttctggccaggactaggggagacccaaggcctgttcttttcctaggggctgagtttgacagaccttggattgcagctgatggcccccaaagtcctcttagataggcccctgcaggaactcgcctgtgagggccttgtttgcccct

SEQ ID NO: 216432 - DNA, 1000 bp, Homo Sapiens
  misc_feature (25)..(25): n is a, c, g, or t
  misc_feature (32)..(32): n is a, c, g, or t
catattttttgagttttcaattttngtccttnttggaacatttctgcacattagaaaatgtcatcgctattctttttacaaaaragcagttttcctgaagcctaggggttcaaaaaatacaacacaacacttccaagtcaaataccaattgcatgctaacaatgagcattgtgaacagagtaacctaattctaggccatttccaaccatcattcaggattaaagagttaggaaggataaattaccacataatcataatctataaaaatactggcccagattgcactaaaaaactctcaataaataaatattggacatttgctttatgaaagtcagtggagatgtgctcttcagaaatcatgtccatagtttcagcctgctttttacaaatcacacatacagagtctaacagatgacaaaggttatagaacaggaaagaatacaacttgatagaaaaacgtctttgacatggtatgtctataaaggaatgcaactaatattgttgagttgcttatgttgcagtttcaaaggcaatactaagagatccaaactgtttttagtcatagtggtgttactgaattgaatgttcagctcctaaggtaacaccattgaaggggacaacattcattaggatgcattaattccggaatttttccttacaatccaactgcactgctttgtcacccctggtaggcgtctgtscatggtacttcctgaggagtgaagctgttttctgctaccctttcctgtctggtggctcaggaagttcagtgtctcggtgtctgatgcagtgaatacctgggattacagtctggcatgctcattccttagaacacaggtttattctcaggatgattgatagcaagtgattctggtttccagtctggtttgaaaaaagtgaatattgaatgtccgtgcccagttcttwaagactcgtttctctgtkatwaagcgggtgatgactgcgcttgcgtcctcgctcatggggrgaggwmattgta

SEQ ID NO: 216433 - DNA, 736 bp, Homo Sapiens
gccagcagcagctttattagtggtgctgggttcttccataccctacagcgtgctcggaagcattcccgagggtttctgcccaacgcctcccggcgctcgggacaacactgtgtagcattgatactggaatgatataaataaagctttggtgtgtaggtttgcaggagagagtacaggttaacactgtgatacgaaaacttcagacaacaccagctctcaatgtgaattgggtttttggccaaggggggaacttctaagtgactggacactgggcccgttgccatggctactcgaggcaccagtggcaggaggagggagtctagggctgaggctccgcgtggccctgtcgcttcgccttcatctgcaggtaccgccctttgccttcctcaaagcgcttcttctcgtcctcggtctcgggcaccagctggggcacaggcagcgacctgccttcctggctcagcgacacgtaggtgaagaaggcactggcggcccggtagcgcttctgagagctgtccacaacagggtcggcgtccaccaacacctcgatctccatggacttattgctcgtgaaggtcatgcgtcccgagatggtgatgacgcagccttttctgatcttgtcatgaaaattaatggcgtccacggaagctgtgacaatgttggttttgcagtggcgtgcagccccaatcccggcgacctcatccatgagcttcatggtcacaccttccgtgcacaaagg

SEQ ID NO: 216434 - DNA, 875 bp, Homo Sapiens
ctgtcctaggcgttctttaatgacagttaaggggcccattaaacagcaaacagcttggcaaggccctggggtgtggtgtgggcacgagtgccttgtgccagtctggccccagcacagcccctttctccagtgactcctggtatggtcaacagcttctggcccaggcctgggccccgagaaggctggagtcctctgctgggtgtacagctgccctgcaggctctgtgaagcgtctatgagcccagcccaggcctggctctaaaagaagtccgaagctttgcgccgggcagggagctgcagcaggttgtccgtgatggaggccgggtcctgtgtgagaggggtgcgtgtggcagagccaggcgccggtgtgcttgtgggggtctgcagcccactggccggggtcttgaggtgggtggagcgtgctggggatggtgtgtagctggcccgcagggcccggtctgtgtacttgctggccgtcctgctcacaaggcgctgtagggctggcgacatggctgggctcaggcctttgggggtgaggctggccagattctccgttattcttcgcaaggctttctggtttttggcccgtttttgggcagcggcctcgtttggcatcttaagacccagccgttccttggttcttggctccaggaatttaaaagctggcccggtttttctgcccacgttggccgttttcgacccttaaattctcaaggtggtgttctaaaccttccccaagaattattcgggggctttttaacactagtttcagggcaacgcggggccctcaatattccatttcacccccctcgagttcctccctgggggaatcactttttttcctattggtccccactcctcccttgtttgccctgg

SEQ ID NO: 216435 - DNA, 1000 bp, Homo Sapiens
tatcaccaagttcctcattttactctcttccatacaatctgtgggaaccatcccataggagtataaggcagtaactgaggactcttacccacgccactctcagatgtatgttaaacctcaagattcaccaaaaaactccaaggtttttattttcacttttaatgatcttttacttaataataaaatgaaaaataagaatataggaatacatacaatctatatacatatatttattgcaaatacttaaaattcttatgtaaaatgattttctatatttgtgaaaaaatatgactttttaaatggtgttgacaccaacttctctgtacataccctcaattccaatgttaacaattcctttaaaaaggcaaaagacacaaaagtttagcatttaccaaaccagtctgtacaaaccttacagccagaagggaaaaaaatagcttgtggtaaataagtcaattttcttttaaaataaaaaataaaccccaaaactattccccttattgcatttttctgaaataatctgagtgtctttagagtaacttcctttgaaataatttgtgccttaacagtgaggtcctacatcaaacataccatatatgagaaattcaaagtcttccactgtcactttttacagatattaaaatatatattacttaaaakatattactggaaagctatttttaaaattgatcttcaatagttgtatcaaatgtaaagcattaaaaaarataaagtaaccaagaatctacgaarctattgcttcaactwtaggaaatgttttacctactgttctctttcaataggtttgtaggtattgaaacatggtaggaaaggccctgcctatcaccatgtttctcaaagtctctatggactattctataaattgagctgaaaactacccttggccaagttacttacttagcacacagttgttaggrgatggggrgactttccctcctkctatgtwtgtgaaactctaggtcaaraaaaaaatctggca

SEQ ID NO: 216436 - DNA, 935 bp, Homo Sapiens
  misc_feature (32)..(32): n is a, c, g, or t
aavaaataatatacactgtatttatcaccttntaagcaacaaaaacatgacttgtaattattcaaataaggtaggatttttctcttaagtacacttcttaaaagtcattcacaagacaactgggcatccactaagaccaaggcactgtgagggaggcaaacagcacaacatcctcacctcaaggagctcagcctgggatgaagacagacacacacaactccagcatgaggccaaggggtagcctgttatgggatcaagtggtggcagaatcaagaagtggttctgaaagtgttctttagtcacagagaccagtaggtttgaracccagtgatgttactttttaactttgtgccttacctactataagcctcagcttcatccactacagtatgccaccctcttaatagaatttatgtaagaattacagaaacatacaagtaaaggattaagtgtagagccagcatgaggaaaggttcaggaatgtggttgctcatatgactgctatgcttacttctgtacatggagcactgtgggagaataaaagaaaggggtggtcattccttagagcatgttctcactgggggaaatcctggcatcttgagcaggacaattcttcactgtataggactaccttgacatttagcatcctggtcccatggcagcagaaggccagtagcacccccatcattatgataaccaagaatcatacccacacatttccaaactccctctgaaggggttaccacccctgctgaaaactgcttttccagagggaccatctacatttagaaacaatttagttctcttaataaaacgagagtgaattctttgagagtatattcaaggatcagatgcattrgggcctggtggcagggacgctaggacaggaatgttcagtatagtttgaaagcagaatcctttcctgatgagtccca

SEQ ID NO: 216437 - DNA, 961 bp, Homo Sapiens
gggatcaggacgccgtgcaggtactcactcccggccacctggggaccaccgcagtcacattgatcctgtctcccccagtcccactccagctgcccaccttctcccggcagccgcccttgcaccgtttgcctgccgtatccgcccassagggggacaggtacacaagcagggcaaactgtttattcatgaatgaatgaatgagtgagtgaatgaatgactagaattcttagcccttgtaatcctagcactttgggaggccgaggcaggaggatcacttgaggccaggagtttgagaccagcctgggcaacatagtgagactgtctctaacttaaattttaatcacacacacattctttkssbssssgggggkgcggggcacggartctagcacggggcccaggcwaaaatrmagtggcgtractcactamaawctctggcttctggttcaagtgagtctcctgcctcagcctccccagtagctgggatcacaggtgcccaccaccatgcmaggctaattttkgtatttkkagtaaaaatggggtttcgccatgttggccaggctggtctcgaactcctgacctwaagtgatccgcccgcctcagcctcccaaagtgktggaattaaaggaatgagaaaatatgaaaagcaaaatttttaaaattaaagggktttaaatatggagatagaaaahtggagtkgaakttcmagctcattttktvgctmtctatgaagytaagtgttgtwatttgaaaratgaggamaatatagratgsaacctcacyttaagaaaagaatccatggacttkgaggscagagagttgctccggaamagggtgttggtcttttgttacttggtcawaartaggcgttttcctttttgatttggktctaggaggttagtgtgcattggcgttctgttggcctgcttccagcccctattctcctgcctcaggttcatta

SEQ ID NO: 216438 - DNA, 907 bp, Homo Sapiens
ttttagcagtgtttatttttgttaaaagaaaccattgaattgaaggtcaagacaccttctgattgcacagattaaacaagaaagtattacttatttcaactttacaaagcatcttattgatttaaaaagatccatactattgataaagttcaccatgaacatatatgtaataaggagactaaaatattcattttacatatctacaacatgtatttcatatttctaatcaaccacaaatcatataggaaaatatttaggtccatgaaaaagtttcaaaacattaaaaaattaaagttttgaaacaaatcacatgtgaaagctcattaaataataacattgacaaataaatagttaatcagctttacttattagctgctgccatgcatttctggcattccattccaagcgagggtcagcatgcagggtataattttatactatgcgaccgtaaagagctacagggcttatttttgaagtgaaatgtcacagggtctttcattctctttcaaaggaagatcactcatggctgctaaactgttcccatgaagagtaccaaaaaagcacctttctgaaatgttactgtgaagattcatgacaacattattttttttaacctgttttgaaggagttttgtttaggagaggggatgggccagtagatggaggggtatctgagaagccccttttctgttttaaaatatattgattcactgatgctttatagtatcaacagttcttttaagaacaattgaggaattaaaactacagggatacgttggaaattaaaatgccaaaattgcattcatgggatataccctaacatctctgtaaaaacttggtaaaaggaaaaaaccatttccccaaaaaagggttcctggaaaccttaaacaaccagtttgcttggggtt

SEQ ID NO: 216439 - DNA, 822 bp, Homo Sapiens
aaaacaccttgactaatgaagaaagcttttctcccaagctttgaacatttttttaaacattttataagtttttttttgtattttaatatataaatacagaaacctatcttgcatgggctgatgccacgtgtgaacatcaatggctaaaatgttctcaaacatagtgcctgaaaacaggggtagctgtacatatttcttagtaagtctttttttgtttaagttttctgaaaaaaaaaatccacgagggcctaagaataatgttcaggcatttttgcaggacacttgtgattgttaaatcctctgaactgaccggaaccaggaggaaagaagggaaaagagatgggatcagtaggaagaaagttctcaatgggttgttttttggcaatgaagtcaagatattagggtctcaaggggagaaaagagcaaaaaaccagccagaaaaatagagggaaaaatccaaacaaacccaaagtatagaagttggtggtggagagggccagttggggcaggggaagagaccgtgtgctcgcccgccgttagaaggctgtcagcgaggccttatttgtgttcttctgttactgagtgggttatggcctggcagcaaacagcacgctttaaacatcacgagggaaaacaccagccgacactagacttttttttatataatctttttttgtaaacactttaaagacagacccacactgcctttcaaagttgaatataaaaaatgcccttttccttcttggccttgagtgtccaggggtaagtgtctagatgttgttttattcctttcttcatatttgtcctcatccaatctggtgt

SEQ ID NO: 216440 - DNA, 1000 bp, Homo Sapiens
  misc_feature (867)..(867): n is a, c, g, or t
aaratgaactggcccttttctacttccaagcttttaacagataccaccatatttgacagaattcccagagtgaattgcttgtgttattagtagattcagtgcccccagctgggataggcaagccatgacagcttccctgtttcacctacagaagtcttatctgagggatctattcacagtaagcaccaaggtctccatgtcttgaggtcagtttcattgtcttttgaaaagtgcatgcttcatttgaacaattcattcagcagcagatggactttcagtgatttaaaataaaattttgatccaaagctcaggacacaaaccacagtggtaaaattgagtagcatataatatcagactaaattatctgtaattttccacaacccagattgtatgtgttttatgtgtgtttaaataaatatgttagatacacgtgtatacatacacccatatacaacagatccaagactggctgacttcatttgaaatggttgaatctgctgtgtaataaagtggttcaaccatgattaggaactgaaatttagtagaagagggaaaaggagttaatgtaacaaattattttagctacaaaccccggtaatagagcacttgggggatgggatggggtgggttggtgagacaatcagaatggtaaattgattaaatgctcctaaccctgtaattttgtgcatagagcaccctatgctgtggaaataactgttcttagatttcattgtaactggactgttcaggttgcccagagggaaaracattcctaattctaawaaaawaacytttattttgtkattcmataggtacttatgtttattttatagttaaaaatgactaaaggkggctawwagccmccgntatwwkkgcctattymctgttccccttaawawaaatktcaaaattggtktttytttgmgggamyktgawkggcccctyccccmmmtttamytggttatgagctttvrggvtttttkaaratttcmattytgca

SEQ ID NO: 216441 - DNA, 890 bp, Homo Sapiens
  misc_feature (56)..(56): n is a, c, g, or t
tcagaaggctatttattgaaagaatcaatgatgttacaaggatgcatttcacgtangccctaaaaggctgggtatccataagtgcatggttcatggctgttgggactaagaaagccttctggtcaatgagccacacatatgtcctgggctccctccctgtcaatgaagatgtgatgagtttcagagtggtggctggatctaggccaagcaccaaacacaaaccagtactctcctttgggtcttctggaactaaggttttataaacttccgtaacagtgggggcagcactcagttggttacaattcatgccattcctgaaagtagtccactatggggatccccaaacaaccagtagcataatgagttcctgacaggcatcctagccaatcagtagggagggtctgagtagaattacccattgtcaaactatgtatcagataatagaagcacagccttggcattgtgtgtgagctaatcatggtgcaccataaacaaggtgttttggatggtcagcatctcagaagggcagattctgccattgaatattccattttgcatcacagaggagagactaattgagctacacatactacatttcagcccccatgcacaattttttccctgcaaagaatgaagaatacttgggtgctgctgcatgccatccatgatgagagaaaggcaatgaatcctgctatgtggcatgcaaagaatccagtaggaaaggttcaccatcaatacgaccaatatcttgccccatgattcatatttagggctgggaaaatttatctatctttgggaggcagctcttgtgtaaaaggaatcaatgtccagttgtgcccaaattggtctgcatggtcaatgtcaacacaccaacaaagtcctgtaagttc

SEQ ID NO: 216442 - DNA, 852 bp, Homo Sapiens
aataaaaaatgcactttttatttgttgaacatatttgaaactgtaaaaagatttctctgtccatcaccagaaatccagaagacacctgaagaggactgactgtttctttgccacggggaaggtgtgatgaaacaattaaaatcccatgcatccctggcccttcctccacgttgcccctcagaatgcctgcagctgcagcaggcaggaggcagcaggagaacccgggctgtggaaggcccctctgcctctctgggaaagctgctggggaagccagaggtcacagtgcattggaggcctggctttcagccactggccaggccaaaatgaaacatctgctcaagtctccccaggcaccttgctgggggtgagtgggagaaagaagtggagaaaactgatgctggaccacaagttatcaccctgtaccttggctttgaagtggcccctgctggtacaggagcagggtgagagtaaaagtaaataaataaaagcaacatgcttcaaggagagagggtgacagacccactgaagcaccccgtgtcctggctcgaccagggataagccagggcgtgatgatttaaaacactctgatctgaggccaatggcatcaaaatacaaattgctgaagtgggagaggaagtgaagggctgtttgttagggggactacagtggagattctggtgagtgtgggtgggctcgccagtgaccccaatattttctttggtaacaaccagagtaagcattaggatgccccagctgccctctactgccagtttctgggaaggaccacacagcagccccaacctgaacccacacagccgggacggtataagagaagaagccggagaaagagag

SEQ ID NO: 216443 - DNA, 729 bp, Homo Sapiens; identical to SEQ ID NO: 50230

SEQ ID NO: 216444 - DNA, 1000 bp, Homo Sapiens
atggctgtgtgggagccaggcaggcggtgacgtggcagagctgccagcaggggcccaagagactgcagcaggttggtgctcacagtggatctgagggatgggcgtgcgtggcagggccttggccatggcccctgaccaacccctgtgcaccaaacaccacactgagctcagaatccgggcagagagggaaccactggtacagtgaggccaaggcacacgcagccgggcctgcagactcgagcccagcagggaccattaggtctcgggaggaggcagctgagggcgacaggatctgcacagagcagtgaggggcagaggacgcagggaccagatgggtctcccaggccaggtgagcccagaacggcccttcccagcccctctagagggtaggttgggggcagtagctcaccaggcccaggagcagcccatcctggaggcaaagcctatcccaaaacctggccctgcctcttcctgaggtgaccttgagtccgtaaaactgacgcccctggggtgacgcttgagagccggaagctgttccaggaggagggaggggcctcggtttctcccggggcatgtgggcaggaaggccctcgggatcccgcatcagtcccacggccgcggtgcggtcgtcacctgtgawcacggctgcctggcgccccctgccggccccacctcagcccttcctcgcaggcctggcccggggcaacccagtgggcctgatgctgcctggcacctcgaggccccagagccagttagcagacgctcgctcgcccatctccctagagtyccgctgtgcagctgacaccycctgccccagccccacggctctyagctgtccggttcyagcgtccactccgacagcyactgcaggmaggggcccgctgttgcctyagtctcagggggcttggttgggggkggagraggcggccgggccaagcaggagtycggagggctkcttgsctkgggccctatccycggggtarggtcggggtgccstaag

SEQ ID NO: 216445 - DNA, 903 bp, Homo Sapiens
tgggcccggcgtggttctccgggcgggtttaattgagtcccggggcgcaggaagcgccgcccgccgcccgcggggccggggttcaggggcgggaaagcggggccaaggcgggctttgaggcctgcccctcgggcgggagtgagggagttggtccgaagccgccgtgtgaagtcgggggaagcgggaaggagcccgcgccgagggccaggccgcgggggcggcccgggtaggcgcggggctggtgcgggctccgggccgtccgtttcggggtccacctcgcttggtcctggcggcccactcggcctgcgcctcggctgcgctcacaggtgcgtgtcctcctcgaacacgtccgagtcctcggggtcccgcttgccccccatgagcgccccccagctccccgggccgttgagggccccgccgccgttcaggctggggtgcttctcctgcatctccgactggctgtcgctggccacgtccagcgtggggttgtcgtggcagccgttctccacgaagcgcatctcctcgccgtgcgacacgtgcttgagcttgggcagccggcgctgccagcagtttgtagagcaggccatgcgcattgatgatgatgcagatggcccctatgaccaccagcaccacgaagagcgtgccgtagtcgctgcgccacctggctggcccgcgcctgtcagttgctgggttgtggaatagtttttggttgccaatcttcctacaggctcctgcgggttgtcccccaacatggaaaggacttctttgagtggggaccattctcttgtttttccaccaaggtcttgagaagggtgctgtccttttttagctgggcttgtttcagagaggttgggcacagtccctatggtggcccatgtcctagggcggtggtctgtacctttt

SEQ ID NO: 216446 - DNA, 904 bp, Homo Sapiens
gttcaagtattcctttatttaaagttgaaaaatgtaccatactgcattattgcaaaaattcactggtacaaaacactttgcagctggtgagaaggcaataaaaagttgatttttaaactcattactataaattattcttacagtactttgcaaattcagaatttcaaactgcatgttctttttctaaattgcccacagtactcgaggttcctgaagctaaggcagctgtttcagaggagggggaggaggtagcagatgtcaagggatttccatttctctttcgatgccgacatacttcagggcatcagcctggctgtatctgtaatcaaaaaacagctcttcgccagtctggatggctctcttggcaaaaatacctatcctgtgatcaccgttaaccatcataacttttgcatagcagtttggatttaccgaatgatttgcaaaacgaattttgttacccttgcgggttgcatccaccacaaaatcattgttcaagttgaacagaaagctgcacatgtatttatcatacactttccctcttctgtcagcttcatcttgagaaataatctctccacagtattctgagatgaattcatttttctgcacaggatctttgataaaaatcccccagcctgccacgtcagatggtgccagcaatagatgctttttggagccccgttgaatactgcagttcttgcaggacacatttttactgtgccaatggtcagcgtgttccacaggtagcacagaggtcaagggtcacacctcttggacagccaggttgcaccgggcactgctttggtgttgcacctggggttttgcaaccggcatccccggaaggcggttttggaccctctggactacattggccaaaactttttactaaaaatttttgcttttacac

SEQ ID NO: 216447 - DNA, 953 bp, Homo Sapiens; identical to SEQ ID NO: 46932
  misc_feature (56)..(56): n is a, c, g, or t

SEQ ID NO: 216448 - DNA, 956 bp, Homo Sapiens; identical to SEQ ID NO: 50965

SEQ ID NO: 216449 - DNA, 916 bp, Homo Sapiens
  misc_feature (753)..(753): n is a, c, g, or t
  misc_feature (848)..(848): n is a, c, g, or t
  misc_feature (905)..(905): n is a, c, g, or t
cgagccataaaaacttttaatgaaggaggacacagctcagagcccttcccatgcggcccaaccctgccccacggagaccggccatggcaaccgctcaatcagaaggtgttcttgatgcggccggccaccagcctaaggatgtccccgatcttcttctgccagttggcgatgtccttggacacggcgcaccacagctccccatgccgaggctctgcactctcacagcgcttcctcacctcctcctgctgctcctcagtgccatgctgcagctcaaacttgtagaagaaggcccaggcatcccccaggtccgagtcaatcttcacagtgcggtggaaccactccctggccttggtgatcttccgctgactccaaaacagcttggccacggccaggagcacatgggggtcatgctcacacttcttcagggcatccacgctcttggtcctcctctggggccttgcctcgaggaagatggcctcagaccacaggataccggagttggggcactcctgcagcgccttggccatgagtgtatttgcgatgttcttcagccccgcacggtactccagccgcacggactccaaccacagcccagggttctttgggttcttcagacgagacttttccaaaatggcccgtgctcgagtaagctgcccaatcttctcctccagccgagagagcaaaagccacaggggttgtggagttggggacacttttttcaacccctggttattaggcttcccgcgccttctncatcatctcccttctgcttcctcgatctgccccttcatcatccaccagcttggggaagtcccttatagttgccggaaggcgctttctcgcacagnatcttggggcttgccttgaggttgtctttgcccccacttccagctttcacagacttnattgaaccacc

SEQ ID NO: 216450 - DNA, 867 bp, Homo Sapiens
  misc_feature (761)..(761): n is a, c, g, or t
attatggctttttttagggtaagagattacacgcaagagaataaggctacaaatgctccaaacatgggtccagaactctggctcttttgtgaggcctagagtcacagaaaatgccatctgttaagaagctgcttttgcataaaaaaatataaaaagttacaaaattccatcaaagacagatacacagtataaatcgttaggtgaacacagaaggctggtctcatctcctgcagtggcccatagacctgccctgaggtctggaagttcactgtcctgagggtccaggaactcctgcctgctggctgggctctaggaagaaggagggtttggctgggcccgcccagctccccatgacactgtcactgtgatgccactgttgtaccctctgtcttctggaccagtcagtctatgagctcttctttgaaacagtcttagacccagaatggtcatctcacccccagaagacatggtttccaagggtgggaggtgttagttatgggtgccgagccccacttcctgggcgacaaggcaaaggtcaatttctccctgcttcaagaatgaagagggaactggtgctccttgaaccaaagattcttggaagggtcattgtcaccaaagtggcttggtgtgggcaggagcaccaagtgcagacaaacccaccggggccctggcggggacagccctgtcatgggtttctgcctttgttccctgttagtggaaacaagaagacccccgaccccccgcccacctatcaagcatgngaccaacctgctgccccaaaatccagcacaggactcttgcttttgttcttcccttgcggctggggttttttggcaagaaaaccctttaaaaggggctataaagcct

SEQ ID NO: 216451 - DNA, 884 bp, Homo Sapiens
  misc_feature (657)..(657): n is a, c, g, or t
  misc_feature (707)..(707): n is a, c, g, or t
agtaggttcctttccccgctttattttttagctgctttttgggttttatacaatgaacatgtattaattgtagaagaaaacgatgtcatcctttatgataaaatccatttccattttagcttttttaaaaaaacaaaaagctgttgtggacagatgaacatccaagtactgggcacacctccagccctccctcttccactgaaggccattgcctattcctagaaagttctttcccaggtatgcagctttcagtttccacttcagaggccacagtgtctggggaacggactgcccccaatactaaagggagtcaaatctctttaattccgcactcctcagtacaacaagaagtcccttctttaggccactgatggaaacctggaacccccttttgatggcagcatggcgtcctaggccttgacacagcggctggggtttgggctgtcccaaaccgcacaccccaaccctggtctacccacagttctggctatgggctgtctctgccactgaacatcagggttcggtcagaagatgaaatcccaagggggacagaggtcagtagaggaagctcaatgagaaaggtgctgtttgctcagccagaaaacagctgcctggcattcgccgctgaactatgaacccgtgggggtgaactacccncaggaggaatcaggcctgggcgatgcaagggtgccaacaggaggggcggnaggagcatgtacgggtaaactgaatactgtggcccattccataaataacaatttagacttttttgaagctactgagaaagcggccagctttaagttttacagttaaacatcatctaattccgattgggaaaggaaagaggaccacaccctttaaagttggccttcaccagggaagaa

SEQ ID NO: 216452 - DNA, 1000 bp, Homo Sapiens
gtggctgagtttgggactttccctgtggaccttaccaaaacacgacttcaggttcaaggccaaagcattgatgcccgtttcaaagagataaaatatagagggatgttccatgcgctgtttcgcatctgtaaagaggaaggtgtattggctctctattcaggaattgctcctgcgttgctaagacaagcatcatatggcaccattaaaattgggatttaccaaagcttgaagcgcttattcgtagaacgtttagaagatgaaactcttttaattaatatgatctgtggggtagtgtcaggagtgatatcttccactatagccaatcccaccgatgttctaaagattcgaatgcaggctcaaggaagcttgttccaagggagcatgattggragctttatcgatatataccaacaagaaggcaccaggggtctgtggaggggtgtggttccaactgctcagcgtgctgccatcgttgtaggagtagagctaccagtctatgatattactaagaagcatttaatattgtcaggaatgatgggcgatacaattttaactcacttcgtttccagctttacatgtggtttggctggggctctggcctccaacccggttgatgtggttcgaactcgcatgatgaaccagagggcaatcgtgggacatgtggatctctataagggcactgttgatggtattttaaagatgtggaaacatgagggcttttttgcactctataaaggattttggccaaactggcttcggcttggaccctggaacatcattttttttattacatacgagcagctaaagaggcttcaaatctaagaactgaaattatatgtgagcccascctgccagcctttctactcctttgcccttttyccgtgttctaatgkattttgacaatgttgttagtgtttacaagccgktggkctcctaagggcmtchkaatggargaaartggggkggtstaaartwtttytatktttktgttamaatttta

SEQ ID NO: 216453 - DNA, 1000 bp, Homo Sapiens
ctaccgcgacccgcccgacggcagtggccgcctggaccagctgctctccctctccatggtctgggccaaccatctcttcctaggctgcagttacaataaagaccttttagacaaggtgatggaaatggccgatgggattgaagtggaagacctgccacaatttactaccagaagtgaattaatgaaaaagcatcaaagctaagccagaagatttatcacattttcatcatcagctacaggattagaaaggaggctgggatgaatgtgacatagaccacagcagctctcttaagactcctggtattaccaacataaagaggcaggtggaatgagaaggactctgtctagattggcttttttaacattctcattttcccaggagttatcactgtaaaagtatgcatggatatttatgtatttataaatcatgcactctaagatgagttcatcaacattgtaaaagccctcttttctgttttcaggtttttttttttcttatcgacaaggtctcactctgtcgcccaggcagaagcacaaaggtgcagtattggctcattgcagcctcgaactcctgggctcatattttcagggttttttgttttttgttttgtttttttgagacagagtcttgctctgttgcccaggcagtagtgcagtggcgcgatatattttcagtttttaaacgtcagaatttttgtttaaaatgcctttttgggctgggcacagtggcttatgcccataataatcccagcactttggggaggccgaggtgagcagatcacctgaggttaggagtttgagaccagcctggccaacacgatgaaacccgtctctactaaaawamaammaaattagckgggatggggggggmtctgtatccmgctmycaggrgstgaasagaagactgytgaactgggggtggggktgcgtarcaaawcsmcattgmmycatctgggsgaaaawaaaacgyycaaaaataaataawaawaaaaaaaaaaaa

SEQ ID NO: 216454 - DNA, 1000 bp, Homo Sapiens
taggcctaagagggcaagaggaagaaatagtatttctggagcctagtgagagctagagtcatggmggaggggacttctggaagaagctaaaatcttgaagggatgcagtcccattaaatgagttccttggtcagagacaactttgtgtaggatactctgatgatgattaaggcattctggaagtccatggagatggtgatgacagaatcattgtcagcaaagaaggtaaatgtgtgtctaaaatacatattcatttccatgaggaaaagtttctgttttcatgatgatgaaaggtgtcccatgtaataatcctaacaccatgggactggctgatgcccctaaggaatggtgtcttataaaggctcatcatcttctctgttgtcaggttgggcacttagtattagtacaagatcagccttggtgagtagaagttcgtgttgttgagtccaggcatagcttccataatatcgatgctaaaatttaatatcatgatttttcttttcatagcaacctgtaatcccagcactttggggggccaaggcaagtggatcacttgagcccaggagttcaaggccatcctgggcaatgtggcaaaaccatctgaaagatctcagaagtgtgctttgcatatacactttctcaggaagctactggaagatatgttctgttagttttgagggctgggaagttcaagactgggcagtcacatccgacaacttcttttgagggcatcaaaacatggcaaagaaacaaaaggggaaacaggtacacgcaaaagacaccaagcacaagaggcagactcactttattacaacmaacctcctcacagtaactaatccagtcmcatgagcacaagatmtctccmamtcaaaagagactgmwttattccmtcatcarggggrttcctcmatgmayaaatgctcttaagggtacmactcccaaamtgtcamatkgggacmatcymamatgratttggatggggaaacaaawtmaaaawata

SEQ ID NO: 216455 - DNA, 1000 bp, Homo Sapiens
tggaagaggaaagtgacaactagagattgataactatatcctctgcaatcctcagaagaaagawaggggccctttgggttgtttcaggtaaagtacatcaatgggactacaggaaagakaatttcacacacggtctttctgcatcagtaattttaatagagactcttagtggttatcaacaactggtcagttgttttttgtttttttttttccacactgctctctggattcgaacctagtgaattctgggctcagtcctcctcctccatctctttcttgatccagtccacgtagttgagcactttggtgtagaagccatagcccctgctgcacccgatgccccaggacacgatgcccgtggccacccagcgatcagtgttcgggtcccttactgcaaaaacgcccccactatccccctggcaggcgtcctgctttagagatgggtgtccagcacagaacatgttttgagagaacacatccatcctattctttccccggagccagttctcacaggcctgtggattagctacgggcagacggacaaacctgaggtcatgagcaatcttctcctccatgaccccgaagccactgacatagcccatcaagcccaggtcgtagaaggtatcgttgtcagggaggcagatggggaggaggttgggacccagggtgacactattttccagctccagcagggcgatgtccccctcaaaattgtaggactcatcctgacggtagtccgggtggacgctgaccctgcggatgggggtgatttcctagcttcatgagctcttccacatttgtgtggsccaggracacatccaaagaggcgttgctttgcgcttcgtgttccttgggatacagggtgtgggcagctgtgaggatccagcggtcgcccagcagggccccgcccccgcgcccgtggatgttggtcgamactgccaggggaagtgcgccatgttkggtttttgccyccgakrwgcgcgcctctgttcamggggtt

SEQ ID NO: 216456 - DNA, 877 bp, Homo Sapiens
  misc_feature (22)..(22): n is a, c, g, or t
  misc_feature (736)..(736): n is a, c, g, or t
  misc_feature (769)..(769): n is a, c, g, or t
  misc_feature (771)..(771): n is a, c, g, or t
aggaagtaagactgaagcaggnagtaagttatgtcccctactgcaggtcttaactaacagtggaggggcctgccgacctgcggttttctcattgcttttgctctaatgtatgttcatgcttcagtttggaaagagaaaaaagtcatactaatttgcttctttttcaatgtagtgcttgaattgagatatataaatttagcattttttataactatcactactatccacatcaaaagaagaactatgacatcttttagaaaagggaacgaattgtcatttattggaaacattttagatccccagaggtataagtttcaaaccagtcttagcttttcaagttgttgatcagacccttctcttaacagagagataccacagtcactagagataccctgaggttcatgtcatcccaaaacccacagcactcagaagctaacctctacacccactcacactgtgagtattcagttcggtttcattttactgaaaacctgtgaaacctctttttataaaaatcaggcaattaaatcccttttcatcacacaattattgagccttgttccccatggctcaccaaaatgtgctcaattttgtgagagaaagactgtactccataactgactattcacgtcccatctttttggctcttccccaaagcagaatccttactgttggttgacagtaatctctttttaaaaagtaactctcagctttttccttagcaccagagcctttncgctcccggagacgagagggtcattacatactntntttttttttttctggaaataggggcattgtgactttatagcctaactggagctgtctgaacctgtggtcaggctcaagagccagcagggggagcagcaaactcaaa

SEQ ID NO: 216457 - DNA, 894 bp, Homo Sapiens
cackckmamaccavagcagkataataacatttaagtggttaacatacacaggaaaaccakatacagagtataatttbcaaacacagtattgctgcttttkkcccctcctcyyyywttwwaagarrrrsrragaaaaaahaaabbgggkaaagagcaacacaaaatcaaaattggcagctcactgaatgcttaaaattcaggaaatttgttctttaactaaaatggaatatattcaccatctctaacacgctaggctactttttkgkbaatacatagtttddttddatccattctttagttgggaaaaaaaaggtttaattatttgtcttcagagacaagaatcaacactgttttagtgttccttgttacactttatatatatatatgtgtgtgtgtatatatatgtggacattgatctatatacggcttatatgtcattgtctagggtgagcagcatgcatgggtatgaagaggcaagtaaactgcattgtgtcatccaagtaaaacacagcacggcctcctgccactgacagaccctgtttccataatttctggatgagaaagccaagtcatgtcagtagttaatcagctctggaggaaagtgaacacctataaacacggcagaatgcaatacttccagaaaggcttttaacacctacagaatctaaacattttktahatatttttttttaacaatctttttttctaattttttttttttcytatcaycatattcaaattttttctwaatccccchcccccctatttaaaattcattaactaccmccccccattttactttcccaacyacataaatttaaaattttccaymttttahccmtatcccatcacttttcaaatwamaaatctttttcccatttttcyttaaataaa

SEQ ID NO: 216458 - DNA, 1000 bp, Homo Sapiens
cagagacaagtgatttgggggatattctcgattaacaagccaaagaatcaggaaaatgggctggaagcgggtagccacacacctctctccctgtgtggggcctctaatatgtgactgatgccttccttttctgtgcctttgaaatctcatgcaagattggctataggtgaattgtattacgaaaccatccaagttcttctagattttattgtcctatcgcaagtctctcttctcaattcaaaaagcagttatccagaggttctttcaccactctcttttcttgtgtttcaaaggmagtgggacaacagaaagcttctcccgttgcttccactaaaaggatttctcatctattaatggtatgagttctttcatgttctcgacatgaactggcacgaataaaggctttgccacattgcttgcattgatagggtttctctccagtgtgagtcctttcatgatatcgaatgtaattggaaataaaggccttaccacagtgcttacattcatagggtttctctccagtgtgagtcctttcatgatatcgaatggaactggaacaagtgaaggctttgcacataccttacactcatatggcttatctccagtgtgtgtcctttcatgtatatgcaaggwagagaaatacctgaatgcttttccacattgcttacattcatggggcttctctccagtgtgcgtcctttcatgtatacgcaaggaagaaaaatacttgaatacttttccacattccttacattcatgggggtttctctccactgtgcgtcctttcatgaatttgaagttgtgaagcacatctaaagcctttcccacactgcttacatccatagggtttatcctcagtgtgtgtcttttcatgcctttgaaggtccgaggtmatctgaaggcttwmcacattgcywcattcataggggttctctcagtgtgagtcttcatgctttgargkgtrrcamactaaaggttccmmatgctwmatcaagggttt

SEQ ID NO: 216459 - DNA, 985 bp, Homo Sapiens; identical to SEQ ID NO: 55553

SEQ ID NO: 216460 - DNA, 576 bp, Homo Sapiens; identical to SEQ ID NO: 40710
  misc_feature (575)..(575): n is a, c, g, or t

SEQ ID NO: 216461 - DNA, 997 bp, Homo Sapiens
  misc_feature (10)..(10): n is a, c, g, or t
  misc_feature (12)..(12): n is a, c, g, or t
  misc_feature (14)..(15): n is a, c, g, or t
  misc_feature (46)..(46): n is a, c, g, or t
  misc_feature (188)..(188): n is a, c, g, or t
  misc_feature (570)..(570): n is a, c, g, or t
  misc_feature (671)..(671): n is a, c, g, or t
tttctccttntntnntcagggtgktctcaaacccctatacctcgtnttaccacccccctcgacctcccaaattgctgggattacaggcgtcacaccttgcccagccctcacacctaggttttttaccaatacccactacccccacctcctgaaaatctgcaaacccccagagamagcmaacatgcctnctccttacccgagacgttggctgccatgctcccgtgccgatcctcagcctgtttytgctamccaattycccagcycctcccccaatmaccagttgcttagtgggccctgtccccagccccatccccagttactggcccagccagcagagcaggccagcgtacctttccacccacgtttccttcctcattgtkccacaaccctyctgaggttcaarcwcatctgctraaagtgtaaamtgtctgcttgcacggctctttggtgggacttgggggaggggccactyatggytgytgctgmaacmaatgaaammaacccacgttcagggtaggggagagacccagcttccaggaagaaaccaggtgggagggactctcgggtgtngccggcccaggactctttgggttgctttgtagtgkgkkcyagaatcccccatcccaaacgctgacgtggacccctggccaattcagttctttactggagtngaagggctggggacacaactcctttatgaaaggaaaccgagggccacatctcgggccccaatctggggcgttcaatccagccgctgctccggtgcggcttgggctcaggccactctcttccctgggcggccccggccccggcctcgcccaccatcccgggaagccctctgggcccccgcctggcctgggctccctgggacttgtccttggtcttgggaacttctggtcacaaaggcgaccctgcctcgatccatttcccaccgcttcsgttycgccctggagatttgsaagccgtttctgcttggctcgggaacaggtctyatggg

SEQ ID NO: 216462 - DNA, 974 bp, Homo Sapiens; identical to SEQ ID NO: 43905

SEQ ID NO: 216463 - DNA, 805 bp, Homo Sapiens
  misc_feature (23)..(23): n is a, c, g, or t
tttgatattactcatacaccagnattcagatcatgaatgactgacagatattttgttgggcagtcctgatttaaaactaagactggcttgtggttaaatgaatatgttcagtttttgaattttaatagtaactccaattcagtaaatggtatcactgtttaccccttttaaagatatgattagacttcgttagtaatgttcaacttttcacaaagatggtgagtgccatcttaaaacttactggagattggttttatatttagatttatataactggttatgtgaatatatttaaatactggggaaattgcttcactgtcttagaaccaagcaagattcacctgtgttttgtgttcatgttcatttgcctcttaaaggcaagggttgaagataaataaggtagcaatgtctatagttttggccttaactatgccaatctaattataattccctgtatttaaaatggtttcttttacttattgaaaggcattttagtgtggtttatgtgtaatattaaagattattcaacacctctcacatcttacagatctataaggtcacatgcttttaaaatagtagcaagttaaacttcactcttgaattctttacaatctaagtcaaactaagttataatttaggattgtctttaaacagccattcagaaacaaaactgtagaactgtgtatttgattgggaatggtgcttttgccaacttaaaaggattaaagtaacggagatatacacaaattttaaaattatgtgtgatcacaagactaaagataattaataagaaaacccacagatc

SEQ ID NO: 216464 - DNA, 897 bp, Homo Sapiens
gaagccaccccttattttattaaaatgtgtacaagagatggggaaggaaaaggaccagactgtactgtggccatgtacacaaaggcatgcaccacatcccagctctgctgccctgggctgtcccacaggcagctctctagaacttgagagcctcaaaaggggcctcatgaagcccagatcttccctggtcaagctgatggcattcgtataactgaaagttggggaagaccaccaggtcagtggagtggagaggttttgtatatggtcttctttgaagaaacttacttcttgcaagccctggcatcttccaattggctgtcctagtagtggacgtggcatcagcctaccagcaatggaggtctactcacccttcactgagttttgtccctgaagtcagaagccctggcacagccaagttcacaggccaaatcacacttcaggcccacactgcttcacgcaatgacacacgtacagacggatatacagaaacacttctcaaggagtgcatgagcatggttcatttcatatttctttcaatccagtctttaaaaggcagcaccttggtgaaggcagtggagagcctgtggctgcatgttttatcatagctccagctgaccagtcccatcagatgccagcgtggctcaggagatgctcgtcccgggaaggacacagccgcgatgcctcctgtctctgcagtgcagatatcagaaggggcagtgggttcccagctggcacagaacatgttatcagtgacactcactgggatgccatggtcctcatgctgctcctcacacagcagcgagtccaccacactgaccaccccagagcgcagtgtgtcgttcttgtagccagggctccttacggttgccaggacattccagccagccccagtgatgt

SEQ ID NO: 216465 - DNA, 600 bp, Homo Sapiens
ttattaaaaatctcttatattgaaaataacattaagagcatgttgttttcataataaataaccccaaaatacctttcatttcaacaacaaagactttaggatacgataaaacaaatccaaatcagtagcttaatttaactgaaatgtttttaaaggaaaaaataaaaaggaggggttgctgaggtcactgctaaactgcagttttcacaactgggggtttacaaaaaagtctgaaaagatgagtatttttatacaaataaatcagtgggaaaatctgcacagacacctttatttacaaactctgtgtccaagtccaggctaataatcctgaataggttttaaaaaagataatttaaacacatttttgcagtgttcacatattaaaaaatcattttttcaacgtcaaaatgaggtcatccgcaaaggcacctaaacttttaaaaaaataaaaaataaaaaaactccactggtgatggatgaggagagagctgagggagcgctcctgggggagcgcggtgggggtaagataagggatgggggctccgagggcttggacctgcaggaaggaaaaagccgcgcgtcctcccgctcacgggacca

SEQ ID NO: 216466 - DNA, 864 bp, Homo Sapiens
aaaccggaccctgtctcacgaagtgggcattgacatgtgccattctatggcacacggtgtgcacttaatcatcatgttttagcattttgatcttctgcttatggcgctcaatttctttctgcagacgctcaatctccttcttatgatgaacgatttcttcttcatggtgttttttcaaagctgccagttgttctctactctgtgctctacaaggacacggtggctcagggtttaatttcaatccttcaccccaaagagatctcaaagcataacctgtaatgtctaagcaaggaataggagttccaattccatgggagtctagctggtcatcctcttctactcctcaactagtgaaagaataccccatcttaaattgaggtgtagccatcttaagaagaccaaagagcttattgctttcagattcctctttaaaatagaaaactccagagagatgtgacacaagtccctaataccttatgaggggaacaacccaggcaacttgacttccctttagggaaaaaacaaggaacaaaatgaggaagacagacaaaggggttgcagcttaaaggcaaatatccatttcctattccaatctgtctagagctttttttgcctatagaatgaatggcccattgttaggtcaataaagggtctctttgtttgcgcagtcctttcccagctcacttttaggttcccagaagtggacctgcattacaacgtctggtttgggttaccattaggtccttattttcccttaactccaaaatgcaggcgcttaaattacatttttcccccaccggctgtaccttggttcctctattccgtctggcacgcgtcctctgcgatattttccccccttaaggc

SEQ ID NO: 216467 - DNA, 918 bp, Homo Sapiens
  misc_feature (579)..(579): n is a, c, g, or t
ggcatgttggctgtggcagtgccatttattatattattagaagggtttagcagccatctcaaaaaaataaataaattataaataagagggacacagctagtaagagtaagaaagaggtaaaatgaacaaaagagaaaacagtagcttcaaacacccaactttcctttaaggaagtccctgggccttaagtcaggatttgtttcaaacacatttcatggagaaaggaagaaagaggcattttctagtctcaacctgccccacacaacttgggtggtgatctggaaaacttgctcatagccaagccctagaccagctcagccactgtgtggatcttctgatggcgaatgaggttgcagtgtcgattaaagcttttcccacattcaatgcactggtgaggtcgctcccctgtgtggcttctctgatgttcaatgagaaatgaacgccgactgtagctcttactgcactggctgcactgatacggcttttctcctttgtggattctctgatgctggataagacccgcactctgactgaagaccttcccacactccttgcagtggtaccgtttctgtatattgnggattcctcggtgattaaaaagaccagaactttgactgaaggctttcccacattcattacattcataaggtctttcttcagtatgaattctttgatgtcgaatgagacctgagctctgagtaaagctcttcccacattcattacatttgtgttgcccctctcctaagaggtttccccactggcctttttatcctatcccttatgttcacccaacttctcccagttgaggggatccgtgcttgggataacttcccaaggtcttggttaattaaaacaatttttccatcgagggttccaactatcttttaggacacagtttttctctttaacaacccaact

SEQ ID NO: 216468 - DNA, 1000 bp, Homo Sapiens
  misc_feature (967)..(967): n is a, c, g, or t
ttggagaattatttttcaactaaatgtttatttgcaaatgaactacagacacactccttgagtgtccactttcaggataaggaactcataaaggcaacaccatatttacaactttgatcagatctctctcctggtgtgacttttctgaagcactgcacatgaattcatttgcaggaggatgtcctacattacacttatactgtttttctgtagtgtgtattctcacatgtcgccttaaggatgaggaacaattgaatgctttcccacaatgcttacattgataaggtttctctccagtgtgcagtctcatatgtattggtaaagatgatggccatttgaagaccttcccacattccttacattcatagggcttctctacagtgtgcgtcctcacatgttgttgcaaaagttcaggccaactgaaagctttcccacactgcttgcatttatagagtttctctgcggtatgccttctcatatgtttttgtaaggatatgtggcaatagaaagctttcccacatagcttgcattcataggatttgtcttcagggtgcattctcacatgttctcgaaagcaagcagacaagctgaaggctttcccacactgcttacattcatagggtttctctctagtatgtgttctcatatgttttcgtaaagatatgggccaattgaaagttttcccacattgcttgcactcatagggtttctctccagtgtgcaccctcatgtgttctcgaaaggaggaggggtgactgaatgctttcccgcactggttgcattcatagggtttctctccaccatgagttctttcatgtcttcgaaaggactggggataaatgaaggtcttcccacactgtttgcattcgtagggtttctctcagtktgaatctttcatgtttccgaaagavtggagaaaatggargttttccmcatgtttgswtcgtggggttbbstssaktgtdtntaghatttttgggaaaagggaaaaaaatgragg

SEQ ID NO: 216469 - DNA, 1000 bp, Homo Sapiens
agtggcacgatcttagctcactgcaacctctgcctcccgagttcacgccattctcctacctcagcctcccaagcagctaggactataggcgcccgccaccaagcccagctaactttttgtatttttagtagagatggggtttcactgtgttagccgaatggtctctatctccttacctcgtgatcccccccgcctcagcctcccaaagtgctaggagtacaggcgtgagcaccgcacctggcctgcctatgtccacttttggcatgcacttctgccaccttgcacattgtagactaacagagtttcaccattcctgtctcgttgcccaaccactcaccttcctcaagaccccaccttcaattcctgcttaaratatgtaacatggattctccttgtctttttaagataaagacccaaatccttatcactgactgaaagcccttttgtggctacactatgcctagtctagccctatctgccctcaggtgggcctcatctgatcacatgctctcaggtattctctccactacagctgcattggtctttcgttcctggaatacaacatgcctcctgccaccaagggctgctgtcctttctgctataaratattgtcattcctctcttcatctacttcaagtatattctactttcagatctcagttcaaatgccactttatcaggtaaaccacttttctggtcaggcgcagtggctcatgcctgtwattccagcaccttggggaagctgaggcaggagaatcacttgaggccaggaggtgaagaacagcytgggcaacatggkaaaacctcactgtgatggctaatactgagtgtcaattkgatttggatagagggrcacaaagtattawtcytgggkgtgtytgtktkggtkttgccaaaagagaataacatttgagttagttgggtgggggaagcarwccacccttatytggkgggmmaaytymtyagctccacaagttwaagcaggagagtcygtccccta

SEQ ID NO: 216470 - DNA, 731 bp, Homo Sapiens; identical to SEQ ID NO: 44898

SEQ ID NO: 216471 - DNA, 976 bp, Homo Sapiens; identical to SEQ ID NO: 49810

SEQ ID NO: 216472 - DNA, 892 bp, Homo Sapiens
gttttattgggtattgacagtgtacgttttaatacaagcctaaatacaaacacaattcttacatattcagccacttattctgcaaaacaacatgccaagatcaaccttgaaaagtttataaaaaccaaaatccagaaaatatcttcctcaactctaaggactccatatacaaatgcaaaaattgctatttgtcaataatcacattaagtgttgagttattgactgagcagtaaaaaacaatttctgatttttaaattaaatagctccagataaaagcatgttattttccacatacgctatctttgtattctgcacagagttccaaggcaaagattgctcctggctttatgaattaccagagatgatgacttgtgtggctgacttatcacaggtcttttactcttccttcctgatagatccttagcttctttgggaggtggcatatgaattggtttccacggaattggattataaaaggctggttctggataggaatttccactgtaaaaacctgtaagttttccattggcataaccatagctctttgcagctggacgaggtttatgtttcgcattttccaaccattcttgaaactttttttctgctatttcctttttctcctgtatttcagcttgctgttggttttctttttccttttctttcttcttcctctcacattcttcagcattttttttctttaaccattcttgatatttttcttttgctttttcttgcaagtattctttctccagttactttgctgctgtttcctccattcctttattaattattgggtctcttccttttcttttttggtcattctttttctgaacccattacttgggcttttcttcacaaaaatctttcttttttcaggttcctccattccttt

SEQ ID NO: 216473 - DNA, 848 bp, Homo Sapiens
  misc_feature (674)..(674): n is a, c, g, or t
  misc_feature (734)..(734): n is a, c, g, or t
tttagtaaatctttattgagctccacggggtgcgtgaatttaggatctataatttacataagtaggaaagtgttactttagcccccttttttaaaaaaaagcaaattacaatttctgtatatatttcaagtgaatcatttaatgtgagtgaggctcagttaggtgttaccataagtattaacagaagaaaaagggaaagcacaaacattttccctctaccagaaaagggtctgatgtaagataaactagcctgttggtttaacaatagctcattaaaaaggccagagaatctgggagaagatgtacttggaagcactgtcctctgagggcccattcccaagggacagcaaaatactgaaaaaaattaactggctcaaaaattatattgagagataaaaagagttagtcacagcttagaaaaaaattccagaataaatgacactagctagattagtaattctgatgtttccttgtcatagtactctgtgcgaaacagagggactacaaactggtgcccctttgaacagagtggttttaaataatagattctccagtgcaccaactgtattttcaagtataattctggtatttgtacctagaaatacagaagaaaagcagcaaggagaaagtgtcaagtatataggacataaaatgatttggcagccctagaattnccagtatgagtctttttcatcaggaaaatcacattctggctcagtccaaggtaacactgngagcaatgatattgatggcttgttataagcaggaggcacagtgaaagtatggatcctggctttcttctttatccggtggaagaaaactgggacaataactgcctgctgatggcc

SEQ ID NO: 216474 - DNA, 918 bp, Homo Sapiens
  misc_feature (644)..(644): n is a, c, g, or t
caattactttattgatttcttacataaaatcctgccaactagcattacgtccactcttgcatcattaaaaacaaagggtatttcctccttggtattttcaaatgatgcattatacaataaacgaagttagaacttaaaatgcaccctgattaattatgtaaactggtaatttgttttaaaaagcataataatttggttcctttcttcataaaatggaaatttaaatatttcttctgatagtcttgaggttatcattatgagtagtgcaaagtgtggcacatatagtttcatctagaagggtgtgtatcttacacaccttaaacaaacagaatgtgcattaacaaaatgcatacagtcaatgcatgatagaaagcatgtttcaaatataaggcagcccctccggccaccatattatttaggttttgcattatcatttatggcattatagattaattacacataacttttatacattttaaccctgaagataagaaaaataactgttgcttgaaagaaattcttccaggtagccatttggtttgtatcaggagaaaccgaacctccatgagtttagcgtctgccaagtcggaatcattagctgaagtgagtgaatgagatacgcagcgcatttcacagtgactgtntcccaagtcctggcaatgcctctgctcccacagtccaccagatgaagcatttccgggattacccttctatgtggttttcccttttcattcctttttgctggattaacgattacctgcattatttcctctttttcccttttctgtggcctttcatttttaattatccattaaaccccttccagaatattcctcagagagctccataagaggaaagtcctgggagattggaaaatccaagggaggcaaaactggggtattgaaattgtcctcgcct

SEQ ID NO: 216475 - DNA, 755 bp, Homo Sapiens
tttttttaggttatccaacaaatatttattgagtatgtatgatgtacagccattgttttaaatgctgagggtatagcagtgatatacagttcctgcttacatgaaacttacattccaataaaaagagacaaaaaaaaatttagatataatgttggttagcggtaagtgcttttgagaaaatcgtgaggaaaggattggagagtgacaggttgtaattttaagagggaggccggggactgcctcttgatcattaacatttgagcagagacatgagtcaggtgagagagcgggctctgcggctatctggagaaagagcgttctaagctaaggcaacagccaatgtaaatgccttgaagtagaagctcccttgtattcaaagaataccaagaaggccaacgtggctgcagtacaccgcacaaggggagaacagtaggctatagggtcagacacgtagtgaaggacaggtcattagggccttacagatctttcaattttttctaggctgtgatggaaagccacaaagaagagaatcacattttaaaataatttttttaaaaattgctttggctactgtgtggaaaacggacccttaagaatcaatagcagaggcagggagataattaggaagggtttggtattagtccagggaagagatgattggtggctttagaaaaatggtggtagtttttggaagagtgctaaaatggttttgtttctcggaggctttcgcgaggttcgcgttaccaggattagtt

SEQ ID NO: 216476 - DNA, 917 bp, Homo Sapiens; identical to SEQ ID NO: 48250

SEQ ID NO: 216477 - DNA, 803 bp, Homo Sapiens
gtaaaatagtcttatttgattttaaaatagtcataatgtgaaaatttctcaaagcttaagagtaacagtctagagccaaggttgggagtgggggccaggcctcacacagagcccagcttgaggcccctgagccccaccctcctttccagagggagggaggagacagctgagggggccctgaatcagtcctctccctcgtccccaaggccagctgtgccaggcccctggagggcaacagctcatgcggaggactggggggggaagcaaacaggtaggaaacggaaatgaggttaacaattacaccatcacccccaaaaaaaaacaaaataacaaaacttgtgactatgaaaggatggaagatgaatactgataaactcctcagctccccagaaaagcccagtctgggctgggttgggctgattggaggaaaggtcttgagacccaactgcatgttacctctgaagaataaatattctaagaaaaagggaaaaccatgaggcaagctgctgcagtcagtcaacgcagttgacaggcctggcatggcccacaacctgaccccatccacacaggaaacagctgtgcgcgtctggatagaggagaggtcaagggcttggactgtggaccctgagctgccaaggtgtggggactccttgcagtcctggtgcagcaatggcaggaaggccagcaggggccctagttgagcaggttgccccgctcctggccctgggtcaggctgtccttgcggggcacggtggtgaaccccccatcttttggggctgggcctgggggcgactgcactgggg

SEQ ID NO: 216478 - DNA, 896 bp, Homo Sapiens
  misc_feature (582)..(582): n is a, c, g, or t
  misc_feature (606)..(606): n is a, c, g, or t
  misc_feature (631)..(631): n is a, c, g, or t
  misc_feature (729)..(729): n is a, c, g, or t
aaagctacaccaagaaaatgttttaattaaactacagaaacaatggttataatacagaatattcataagcaaaaagatacaccatgttataagtacttacaaagttacaaccatttgcttccttaacattttccatgttaagttcatacatgtagatatgatcagatttaccatttttagggggaagagggaaaaaaaggtgtatttatcatcagctagatgtgctcactgtatgctccgttatttatatgcaaggcccgggtgactggaagtgcagttgtcaggcattttaataaactggacagccatttgtttctgcacgacaaggcatctttacacaggagcaatcgggagaaaacaggaaacagccaagcactctgcactgcaacacgccaccttaacagctaaccagcattactcaactgctacacaactgcgccttttcaatagccagttgcttgttccaaggactcttcttcgatggactatgtggtcctttttccccaagtcctccgtttacactgcttgccgatacatcattttcttaagaggacaccgctccttcctcttcaggagacttgnggggactcttcgatcgcgacctgnatttggattccctcttggacactgngggaggactcctggaccgagaccgggacctggaccgcgaacgagatctggagaccgacgaggacttggatttggaccttcgtgcggatctggacttgnaggtcgaccgagatcgagaacgagtgcgggaccgagacttcgagcggctgtagcgagatccgcttgaagacctggaacggcttcgactccggggatcggttgtggggacacccgcctagggcttgggtttccggggtccgtagaccccggcccccgtacctgtgggg

SEQ ID NO: 216479 - DNA, 919 bp, Homo Sapiens
aaattaaccccatttattataggcccgtgatgtctcaaagagtagaggagcgtctactggtctttcaactccttcagtcttctgatggcggactttaccgtgacagcggaagtggtactggaaagaaagattcagtttccaacataattaagcatgttaacatagaaaatggcaaataagtaaatctgcctcgtttttgtgttaaagtcgcttcccaaattttcctagaaagaattatactgagatagactgctctaccaatactttgctgcagtcaatccaaagatctaaccaacattagattactcctcggaaattagtggcttctaaactacatgatggcatcctttaagagccatgccttcaggatcttgcagaattagacatacaatctcatgcatctgatttctcaaccagagttgcttttttttttataagtaactcagttgtggacaagcaagctttaactccccctaccccatcccatgaaaaagaaatggttctaagaggctgacctaaacttattaaaagggaatggacagattacaagaaatgaataaattacaagatgatacagtgagaacattgattaaggaaataagagcggacactaaagtgcctttgggaaagacagctattgaaatgactacaaaagttttacccataaattcaggaaccttttccctgaaaatcaccatccctggtttgaaagtttataaaaaaattcactttcctatcagaaaccaagaaagccctctagttcccattttccatttctgtcctaaaaaaaaccccccacagggaatttatatttttttccaacctttttccaacttgtcttggtttaaggtttaaaatgagctggaacctttaaaaacccaattctttaaattaccccctaaccctttaatgggcctta

SEQ ID NO: 216480 - DNA, 778 bp, Homo Sapiens
gtccagaaacttttattggaaagaaacgagctgcagcaaagtgacactcagtgcacgcggccaaatgggcgaggtgggggtacaggtgggcaccggggccggcccaagaccagagccggtgactgctggggcctgctcgtggggcctccggccacagaccctttgggctggagtgtgcaggcccagtagaaatacaaaaataaactctgcggtccagctgtccctgctgtggcagttcatttgggcagggcagtcgctcctcccaccaggccccctgctgacaagtccggccacagcatgggcagcaggagtctgaggggtgagtgggcatccacaggatggagccaaagggctaggcaggtatggccttgggcagtgccaggactgtggcagcgccagggtctggccagcagctggggaggccccaggggcctctcaggtggacaggtccaggcattggttgaagctggatgaagctggggcctcggctcctcctcatcaaatacagatcactgggaccctgtcctcctccatggtgctggtctcctcggcctcattgcccctgctttttgtttcttcctcacctacttcttccccagctccatgtccagctcgttgcctgcctctgagggtgttgtggtggagcccctgatggaactgttgcttaagaatacgatcccctggacccgcttgtttgttaagaattcctccgaaggttcagaggcctatcttccttccccgaactggattttgagttcaagtatgggcttattagctg

SEQ ID NO: 216481 - DNA, 552 bp, Homo Sapiens; identical to SEQ ID NO: 51686

SEQ ID NO: 216482 - DNA, 795 bp, Homo Sapiens; identical to SEQ ID NO: 51826

SEQ ID NO: 216483 - DNA, 699 bp, Homo Sapiens
  misc_feature (14)..(14): n is a, c, g, or t
  misc_feature (37)..(37): n is a, c, g, or t
  misc_feature (42)..(42): n is a, c, g, or t
  misc_feature (44)..(44): n is a, c, g, or t
  misc_feature (630)..(631): n is a, c, g, or t
tacttaacacccgntggctattgtgggtcactgtggnagggngnaatgaacgtatgggatccctgacctgtggttactggaaaacagttgacatttagagagaggctgaattcttgggcttcccgtagcccccatcctgagtgtgccaacagggactagaagcatctctagtctgcaaagcgaggaacaagtgatactctgtccaatttttccaatattgttatactcatgaatagagattaatgaaattgaagagcatattcaagagaaagactaaaggagaagtcgtctgccccgtggacaggcagcttgagtggtgcttgagaaaatgtacatgaaattgcttgttaaaaaatattcacgcctgtaatcccagctcttttgggaggccgaggcgggcagattactaggtcaggagatcgagaccatcctggctaacacggtgaaaccccgtccctactaaaaatacaaaaacaaaattagccgggcgtggcggcgggcgcctgtggtcccagctattggggaggctgaggcaggagaatggcgtgaacccgggaggcggagcttgcagtgaacggagatggcgccactgcactccagcctgggcgagagagcgagactctgtctcannaaaaaaaaaatatatatatatatatatggatatatccatcagagacatgtaaaggattaaaggtcgat

SEQ ID NO: 216484 - DNA, 838 bp, Homo Sapiens
  misc_feature (519)..(519): n is a, c, g, or t
actgattatttataaagttacgctcccttgaagaggtgtgccccacacaggcttctccctagcagagcagcagtgcccacaaacccaccccagggtgggctgtcacgggggcctcacgccagggaccccgcccctcagggactgctcgtgtccagatcttggccagcatggaaaactccagatagtgggggcaggggtccaggtcatctttattacgccccaggtcaagggttctttgtacaaaaataggtctccgtttgccagcagtgtccctccagcagctcaagttaatgtgtagaaaatggattctctgtgcccttagaaaatcctctcccctccggaaaaatctccaagtgttggtgccccccgccccactgcagtcgagaagctgtggggaggggcggcgtcggaggaagccgccagcccttatggggccagctccaagcccgtttccaccgcggcattggtcaggctgggccggacgaacgaggcggcgtcggcggtgcggggggtggtggngtgggtccccggctcgctgggggcggagcgcgggccggtccacctggcgggctccccggcgatgagcgcgccggccgctcgctcgggttccggggcttgggctcataggtcgagggcgcctagtagccccctaaccagctgaagaagccgagtagctcgcgcttcgaggactcagcgcgccttcgcagccgttgtcttccgacgagtaggcggaacccgggaagccggcttcgagcttgccccggtgtcccgtggaccaaaaacccccggagggcaaggtcgttacccctggtggttccaggcggcgccgggtggtgca

SEQ ID NO: 216485 - DNA, 898 bp, Homo Sapiens
caggcttttttttctaggaacgccgagatgagcctccagaggtttccagcgaagctgtaacaatccaccctgcagctctatgacagggaggagggcgaatcaaatccatcatcttacgccagacttcagccctgcgggagctgctgcctccaaagaaagcggggacctgggcggactgcgtctctcccccgtgtggagaacgtgacagatgtgaaggttgggctgacagacacacggcctgcagcagcccagccagtcccccacagcatcgagccaagtcatttaaaaaggatttaggccactgcctttttctgagggaggagcggccagcatgtgccccgcggctcactgggcctgtctaatcacacagcagtggcaaaaggagtatctgccagacgcttcctatcactctattctgtctcctcatccacctgaagttcaccccgtttccccaatgacttagaatggctttgtgcttagttttaattgtagtttgtgctattctgtgaattaacaattcaaacaaaataagaaagccatgttgttaaacagtagaggagccagggactctgtctccattctctcatcacacacaagtcatgcatctaccaaaaaaaaaaaaaacaaaaaaacacaccaccaaaaaaactgtcctttgaggacgcacagggtgtgaacagataaggaacctgcagcttagattaaacagccccttgccaggtccacactcaaggactgtgaccagccaaacaaccatgaggtccagacaccttccctggtggaagggtttgccacacccaaaaaagttgtcgcctttagaaaagggacactggcttttttcctccctacatttaccccgggaaagcccgggattcaaaccgcaaaaagggccccccaa

SEQ ID NO: 216486 - DNA, 826 bp, Homo Sapiens
atatakkkkggggatttttgttttgttttgttttttaaaaaaagatacaaacaatcttcaaagtttacctttttggacttaaggcataacatgaaattgcgcattattctaaagcttaattttgaaatgaactagtttaagtgctatcaaaccctgtttgcgtttacattatttaaattatatagtattttatttctgttcttgctgtaaattctaatgctgttcatggattgtgcaattcctatgcaatcggtctttgcctgctgagagttattaacagtgcagtgtggaatccagagtgagctttcattttctcagttatcttttcagttcaatgcatgctgtttaattgtgtggaagatccaatccatttttgttgtccagccaccatgatgtgcatcattcatttgtttcatgaaatactccaaagcctcttgctcagttttatctaaggctagggtctttcgaatgtatgcaatgtcatcaaaagattgtagttctggcattccagagccaagcatcattgagaaaagatttatgaagagattggcatgctgtcgaatagctagataagccttgtaacacatctcctgaaacctctcaaattctcttgtctttgtgcattcttgggctcctttactaatcactattaagaaatcctgtgtcaaaacaaatggcacacgttctcgtttataaccaaattttttcttcttgtgatccaaaaagtgtccaaaatctatatgaaacagttgtccatcgtctttcaccatgatgttactattgtgacgatctccaattcccaaaatgaaggtagctacacagtatc

SEQ ID NO: 216487 - DNA, 887 bp, Homo Sapiens
  misc_feature (35)..(35): n is a, c, g, or t
  misc_feature (45)..(45): n is a, c, g, or t
  misc_feature (622)..(622): n is a, c, g, or t
  misc_feature (629)..(629): n is a, c, g, or t
  misc_feature (707)..(708): n is a, c, g, or t
  misc_feature (717)..(717): n is a, c, g, or t
  misc_feature (738)..(738): n is a, c, g, or t
  misc_feature (751)..(751): n is a, c, g, or t
  misc_feature (754)..(754): n is a, c, g, or t
  misc_feature (757)..(757): n is a, c, g, or t
  misc_feature (765)..(766): n is a, c, g, or t
tgggttggagtgcctaaggctcattaaaagcctgnaaaagcaagnaatcaaagatacttttgatggagctttaggctatgctaagctctttaatgtaaacaagcacctctaacgctaaaagcacccttgcaagaaaggtaggagttactattcacatcctagagtcaaggaaaaagagaagatgtttgacttgctcaaagtcaagcaggtaatgtcagaattgaatctcaaatctatatctttatagatttgcagttctggtttatataataccaaagtcacatacaggtaatttcccaccattgaaccttcctgttggtgtgagatgccaaatctgtgaaaaccagacacaggtggccaggtgggtgtcgaactcctgacctcaagtgatccgcctgcctcagcctcccaaagtgctgggattacaggtgtgagtcaccacatctggtcggattttaactattctaataggtatgtagtggtattaattgttttaatctgcagttcaccaataatatatgaatttagcatcttttcatatgtttgccatctgtatagctttggtgaggtatctgttagaggttttgcccatttttaattggattgctcattttcttattgntgaattntaagtgttccttgtatattttgtataacagacctttatcagataggtctttttgcaaatatttttcctcccaggctgnnggcttattnttctcaatcccttgatccctnctctttaactttnttnttncttttttnnctttttttaaagaaaatggttagcattaatatacaccagttggtccatttttttaaagactaaaaccatctcacagaattgttctggaatcaggaaataaaagatctttccccccaccctt

SEQ ID NO: 216488 - DNA, 892 bp, Homo Sapiens
ttgagtctttatttccttggtgaggcgggccccagggtggggtgggctgcctggctgaggctcctgtagacccaccaacctaggggcacttttctgggcaccacaggtaaggcactgcctgggggctggaggaggctggaggaggatgcccaagctccccacactcctcaccccagaccggggaagctggatatcctccgtgttgtcctctccccatagctggtctgaggctgtggtttacacgcaggcacaggtaggcgattctgagcatcaacgcagatggaggggagggtgagccgtcgtgggagaactggcccaagaccagcacctggctggtgtcgccagccccggctgcattggtgggtgaggcaggtctggctggagtctgggtctgcaggcctggccggggcaggttgtgggggaccaaggagccctgggtgtgaaccccactgtggaggcagcaggcacctagtggtgccactgggacacccggctccaggactccggatgtcacacatgcgtgagtcttggcgtctacacccccctcggggccagtgagtgagcagtggcccgtggtccccgccagatctcccccagagtggacttggcttcgccggaccagtgccctgctctgagctgccgctggctgttccacctttgaaaccacgccgagttgccttatgaaccgacttggacggcaatatgggagacgcttggagggttttttggcccaacacaccccggggttaggagcccagtcccgtgccctttcccagtgggcacactgggctttttcttatggccttcacaggaacccaaaggggcaccacatagggcagggggggaacccggagttttttgggttggccgggaatgggcgttaccctcttgg

SEQ ID NO: 216489 - DNA, 831 bp, Homo Sapiens
  misc_feature (819)..(819): n is a, c, g, or t
ttcttaaaaaaaagtttattaaaagtgttcttaatgcttgaaacggaaaagattcccaaaatatacagacgcctcttttctcatagaaatagattattttttataatacaaaaaaagaccaaaaaacaaaacaaaacaaaacatcaacagcaacaagcccgtaggaacatctttaagcgattactcagggcccggctgacagttacacgtgggttgcgtcagtcccgtgtacacacgcgttcagccatgtttaaaccgattgcatcaacttcgaaaccggcccgcccgccggcgcctggagaggggcagagggagaagcagagagtttatcattcatctgtacacatagacgtttcttctttaaataacaccacgggcgggagccccatctgcatgtgcggttggtttggacaaaaatatagatatatatatataataaaatattaaaattaccgacgggctccccgcgctgccaagtgccccagtgccaaagttttgccggcgccgccgggggcgggggcgagggcgcgggcgcgggcgctccccggagtctcagccccggccggcagggggacgcgcgcgggggccgcgctagcagtggccggaggaggcgagcaggggctcgggcagctgcttgaacaagttccgcagggtgctgagctcgcgcgacagctgctccaccttcttctgcagccgctcgttctcggccgtgagctccaggaccttgtgctgcgtctccaggttgcgcatcttggccttgtcgcggctctgcgcacggcgatgttgttgcgctcgcgccgaatctgtactcgtcgctgngcttgatcccgg

SEQ ID NO: 216490 - DNA, 846 bp, Homo Sapiens
ggaacttcttgcgaatgattttataggaagccatttgtgttcaagtgaaggcagaggcgtccaccccaagtcaccagagcgcaggtgcagagaggaaaagctgtcagctagtgccagcctccaagggccagcgctacccttcaacagctggaggcaccactgtgcgaggctttccacaccggcctccctcaggaacaagacatcctcaccaggcaggggtgaggtatgggctccaggactggcttcagcaggcaccaggctggggcaccagctggggcctgggtacgcccagaaggtcacacagacggttgcgctgctctctcaccactgcaagctccgcgtcccacgcagtgtcactgagcacagtcaccacctcgtccagcacatccgcgcccacgacgtcactgtaggtgagcaatgtctcgtacacctggctggccgtggtcttccggatcagcgggaaacggtggcagaggagcagacacagctgcaggagggcctgcctcctcacgtcgccggggaactgcaccatcccgcagaacctgggcagagcagatccgtgagcacagtgcgggcctggggccccaagccggaggtgtgtgtgtgcgtacatctgcactgtgcctacacacacgagtgtcgcacttggaaagtcaactgcgatgcctgacaggagcttctggatatctttttgaatccttgatttctttttttacagagcggcaagcaactttaacagcaaagggggtggtccctccttccggggggaaagaatgtcaaaaacagcccggggggtgaagcaccgtggtcccatcggtttttaagcaggcggcaacggaccaccct

SEQ ID NO: 216491 - DNA, 981 bp, Homo Sapiens; identical to SEQ ID NO: 48427

SEQ ID NO: 216492 - DNA, 885 bp, Homo Sapiens; identical to SEQ ID NO: 51179

SEQ ID NO: 216493 - DNA, 871 bp, Homo Sapiens; identical to SEQ ID NO: 44179
  misc_feature (661)..(661): n is a, c, g, or t
  misc_feature (710)..(710): n is a, c, g, or t

SEQ ID NO: 216494 - DNA, 885 bp, Homo Sapiens
  misc_feature (600)..(600): n is a, c, g, or t
  misc_feature (840)..(840): n is a, c, g, or t
tagaataaactttgtttttattatacacatggatgaaaaataaaggtttttatgtacatacgacatatagtgcaaatgaaaagcttttaaataccatggatagacatgttgttggaaacaaaaggagatgaatgatgggggttaggatggtcgtcctggaactgcaggagggggtcgcctagtaaaaacaaaacaaaacaaaacaaaataacaaaaagaaagacacagatgcagaggaagaaaacaatgtttaaattataaaataaacccaaataatagcatgcaaaaatagctcacaaaagtcaaattcaaatcacacacaaaaacatgcagacatgcaaaggaaatgaagggacatcacatagctaagttagcagttcccaggacttttcctggctactagcaatgttctaggtatgagccatttgagctcactcaaaaagcttcttattttgcaccatggaatgataaatccatgcactcttattcaggagaactgggactagtccccgagccaaatacctttataacttgtatatttgattttcaaccctgattttgtgaaactcagttatttccaaagatttcaatgaatgttgngaaatctccatagggggagaggtagttgattgtatccaatggcaggttaacatttttcttaagtgaggtaaattagaatgtgttaagagatcaaatgagcaatgtaatcacattgcagagaatgccagaggttgatctcagaaaataggatttgtaaaatataatttgttttcaggggagttgttcctggtgtgtaattaccctgactctcaggcctatggaaaattagggaggaaggtntgggttccttgcgaacccttaggattttcttagggattaccctct

SEQ ID NO: 216495 - DNA, 727 bp, Homo Sapiens; identical to SEQ ID NO: 46329

SEQ ID NO: 216496 - DNA, 909 bp, Homo Sapiens
ggaggcccacatgtttattaggccggtcctgacacctgcctgcggggaaggaccaccgagaccagatcctgggtgccatggggtgcagggacagaccggtgcatggcagcggctgcgcctagccgcgctcgcagatgacctcaaccacactgggctccatgggcacagggtctgggcagcgcagggcagcagaggccaccacttcgtccagcagcaagtgcacgagttcttcgtcggccacaaaacgccacaggtagagctgcagaaagtggcagtccacttgcacctgctgcagcccgaagcgcccaaaggtgcgcagccgcacacactccagcagcgtcttcaggctgatcttgatgatgccggtcagcaccgacaccttgttgaactccacagggctgaacacatcaatacgttcagagaatagcttctggatattgctcaagaggttggtgtccatcggggcactgggggtatagctgggggcgtagcggccctgctgccgagagctgctgtacacggagaaagtcctcttgctggagtcgctgctctgggccttgcgaacaccctcttcgtacaggagccccacctgcacgtcgatggcggtggtatcctccaccacccgctttatgacggcccgcacattccggggctccagagtgctgagccagtcgcgagtcctcacgctcttgcgcagcatctgtgatatgaccaggccctgcacctttacggtgggggctagcaacccgccgcgccgtttccctggcctttgcacacagggggcttcagggccgtcacttgggaacttgtattttgactcagaaacgtgtttatcatccgatgagtggtgctgttacgcaaatggcggcccgtctttgatttccagccataagccgggtgtagcaccag

SEQ ID NO: 216497 - DNA, 662 bp, Homo Sapiens; identical to SEQ ID NO: 43575

SEQ ID NO: 216498 - DNA, 710 bp, Homo Sapiens; identical to SEQ ID NO: 41816

SEQ ID NO: 216499 - DNA, 845 bp, Homo Sapiens
ggcataaaaaggcaaacatgtgctttagtgtctgacaagaagttttgtcctccccaggcatatggcatcaaggctgggcctaacccagtctcatgaccttgtgaatccagtccacaaacacagagacacgcgtgaagacagctggccagcgggaccttgcgcatactcggttggggattataattccttccaggacccagcagttgtgggtaaagcaggcaagtgggcccccgtagtcaccctcacaggcccccacaggggccaacagtccctcagtgcacatctcactctcccgcacacgtcctcggtgcttgatgttacactcctggttggagatgacattcagcaaggccacatttaggactgtgtcattacccgtacctttggtctcaccccagcctgcaatctcacacttggtccctggaggcaccacataccattcagggggcaggcagatcagggccacacgctggttcagggtcacagatctctccagcttgagcaggacaagctgggagcctgagggcccacacaccatcttggctactgggacccgctgtaggcttggctctccatgctgtgggttctggaacagggtgcccaaccatacctcatagcccgtgagaggcatatggcaggaggagaagcactgccgggcagtcagtatccactgctcctttactagagaccccccgcagaaatgctggcccgattccgcaagctgactgtccagggtgagttgcccggatggcccccaaccccgcgcagctttgaaccgccgctgattccacccggtccccccctcttgccacactttcttaaactggaacttggcttgggggggt

SEQ ID NO: 216500 - DNA, 589 bp, Homo Sapiens
  misc_feature (10)..(10): n is a, c, g, or t
cttcacaagnagtaaccctttattttcgcttaaattcttaaaaatacttttttggcagttgtcacataaaatgtcctaatgtaaaaaaaataataataataattaaaaagcaaagcatgaaaaaacagacccaaaatgttaagattttatttacaaagcttttttgttgtacagaaagtaaaaatgctgttacaatctcagtgtaactggtagccacagacggttgactcaccaatcacagctatccacgctacagcaagaatcttacacaaaaacctaacaacgcttacaattttgttggggtgaagtccacaagcttggtggtagattaccaagagggactacatggaaggaaggcggaatgtcacaggaactattctttggctctttgggtgggtgggtgtcctggggtttgtatcacagctacctttgttttttttttaaattgctactcaatccacgagcagtccatcctttactgaacatttctgtttttgtagtttacctggatgccttaatttatttttccttccatcatatgcttcctttttttcgtctttttaccctttatccaccccccttttcttct

SEQ ID NO: 216501 - DNA, 881 bp, Homo Sapiens
tcaggacacatcctcctaattttattttaagattttatagggaaaaaatacaaatacaaagttaacaaacattgtatagttcaatcccctcatgcaagaaggcgtttttaagcactgggccacatagacaactgggatttcctgatattagggaaataaattattaacaatttacattattagagcattagtattgacactaaacatttatgaaatgctaccatgcgctaagcacttcaggtactgtatctcttttaattcttgtaactattgagatggctagtggtgtcatttccattttacagagaagggctctgtcacaccatgcagcccactaccagcggactccgtagtttctatattgtctccttccctctatgtgctctcccaattgggaaccagaaggtagggtataaaataggaggtgatgcgtttacttttcagtgtccaggcatatcaaggtttgaattaaaatttgctgaacatcatgtaacactaaaggtcatcctggccatctttctattcgtaataacattctaaagagcattggatttctagatgcaaatgtggaaccctacaaatgttcatacctcttgtaaaagataggaaaatgttttttaggaggcatgttgtttggggacttttttgtgaggatttagaacagtttagtcagtctgaatatttattctaccaaaccctgtacaatagcattacatttatgcagaaaataatggatataaatgattatgagttagtgatttgttttttcccaaaggccattagactaggtgtcttacctttttcttagagggccaaaaagtaaatgtttttagacttggaagccatacaatctggaaggtgtgggaagaaccacagacaaa

SEQ ID NO: 216502 - DNA, 964 bp, Homo Sapiens; identical to SEQ ID NO: 44797

SEQ ID NO: 216503 - DNA, 812 bp, Homo Sapiens
ggcggcatctctttacgccgcaagaccgccggagcccggtgagccggagtgctctgcccagcctggctgcagttgttggccagagctcagagctctcctgggcctggcagatggctctgcctgcacttctttttgggactcagagactaaattagaaaggggtgggggtagccccaggagaacccactttcattgtcaatcttgaggtcaaagaaaaccagaggtctgtcttctgcttgggggtcagcaaggttctcgtccaggaccctgagggtgctggggccttccagctggaggtcactggactcactgctgctgtcatccagctctcgggaggacgagttttcggcatctgagtcttccgagctgctgatcaccacaacgcgttcctctgcctccccggcgccactggccacgtggttgctgttgggcaggaagacctcacttcctatgacggggctcctggggctaggcggtccatccaggtggggtggtgagactgccttggaggtgctgggcctgggctgctccggggagctccgagccaaccttgcctccttcccctcctcagactccatcttgatgaccttcctggggcactgggtcttgctgcacttcctcttcttggcttgcgttgtattggagacatcctctccataggaagggcctttgatggagaaggcgtacacttgcacggggtgggcccccgggcactgactggaccacaggccatagggctgggcttttagccaagccccaggggccctgaaccctgggccctttactcttttctgcctcctttggggcaaggt

SEQ ID NO: 216504 - DNA, 934 bp, Homo Sapiens
ttttttttttttttcccctttttacacataaacaaagtagtaagaaataatacaggattaaaactgcaaaagtagttaatcagtagaatatgtatgcacacaaaaaatccagataggaagacaggcttatttacaatgaaagtaaggtaaaattaacgtagttttcttatgaaataataaaaaaaaatcaaacatatgctacaatgggcaccactgttcacagcaatattaaagaggagaaaacaacacttatttaatagggacagatataccacaaggtacaacatcagtgcaataaattcacaaaactatattacagctagttaatcagtttaagaattgttcccgtcagtcacattttttggccctcagaagttcattcctaaagatttcaactactctaaatttctagctaccaagaagttaagaatgattataagaagctttccaaggagttatgaaatctttgtagaccagaggccaactatcatcacctcaagtctgctctcaccaacagcccttgtatttttcagggagaaatctctaggaaaaagtcagacacttagtgtagtcactatctcccatgtcaaacctaggggactaaaatggtcagtattaccataaaatgataatttttgaggtttacctttaaagggcttatttctggttcttaaaaattatattaagattattcttttcactcgaaatggaatattcgactataacatcacaagtacttgctgtccctttttgcccagtttgtaagagtgaaaagttcattagacattgagtccttcaaccctactggtttactattagcctaatggtccagcttgaaaaattttgaaatttataaaccatgcttttgaacatcctaaaattgcaaattttttggcaaatcctgcctctacaaaacagcctctttaagggattt

SEQ ID NO: 216505 - DNA, 1000 bp, Homo Sapiens
agtagagatgcggtttcactgtgttagccagggtggtctcgatcttctgaccttgtgatctgcccgccttggcctcccaaagtgctgggattaaaataaattgtttttaattagctgggggtggtgttgcacgcctgtagtcccagctactcaagaggctgaggtgggaggatcgcttgaacccaggaggtcaaggctatagtgagccatgatcatactattgcacttcagcatgggcgacagtgtgagaccctgtcacgaaaaaaaaaaaaagtttctttttctttaaaattactagactattcttagagcagttttaggtttacagaaaaactgagcacaaagcacagagttcccatatactccctgtctccacacccagaatgtcccttattataaatgtcttgtctttggtgtggtactcttcagtctctcttcatctgtagcagtgcccatgcctttttttttttttttttaatgtcatttatttgttgaagaaactgggtcatttgttgtgtagaatgttccacattctgggtttgtccttgtgctagtgtttaacacacccctcctctcctatatttcttgtgtgttggtggttagatttagaaacctgattagattcatgtcccacatttttggcaagaaaaattcccaggtggttctgtgaacttcttcttgcgtcacatcaggcacttggtgtctggtgcccagttgtagtgatgtgaagattgattagccatctgcagcactcctaamaacctctcttgatcgcatcctgggrtyactgccctggaaacatcctctcccttttcttagcccckstttcttcccttgcctgcctggbttytatgctcccmagccatcttytaggcaccagattgagggyccatggsaagmgcarggacaggggagcadgkascykacccmaggaaaaraktgggggmcttkmwttttcaggttaawycmyacmacctsccagrmcggtgmamccccccct

SEQ ID NO: 216506 - DNA, 478 bp, Homo Sapiens
tttcggacaacaatgaaatagtttatttccttcaaatattttaaggtacgaacgtcagaaataaaaatgcagcatttaaccctggaacctcaaatatcactgattatactcaaaggagcagaggcattgttttccatctgattcctcagttcctcacacacacaaccatccccctcaccccatgatctgaaaagcgaaatgaggaattcaccctaaaattagtgtggagaaaacaagcaaattaggttatttactaagtgactacataaaaaactgagtatgagaccaagaaaaatagattctgtagttttagttaaaaaaaaaaattgacttgtaaatcccaactactcggggggctgagacacaagagtcgcttgaacccaggaggcagagtgttgcagtgagctgagattgcaccgctgcactccagcctggacaatacagccagactccatctcaaaaaaaaaaataattaata

SEQ ID NO: 216507 - DNA, 904 bp, Homo Sapiens; identical to SEQ ID NO: 45446

SEQ ID NO: 216508 - DNA, 923 bp, Homo Sapiens
ttgcacaatcactcctttattatactgatatggaaaaaggatttagtacagttatgctcagatgaacactggacccatgtggcagggtcaagcaactagaacatgattcagaaatcagtgaaagatacacttggacaggaccaagaggcatttcactgccatgaaacaaggcaggaagggattctaatacacacaccaggaagcactcctgcccctcagaggtcaaggagctgatcctatattggtatgaggaatggcttattttctgatgaccacatgtgggactatttcaaccgccacaagaaaccccagaagggttattgttttgtattatatatactatacttttttaataaaagtaaattaacacataacgaaattcaggattgatcccaacctagagccagatcctctggggtcagggaggaaacagttgtcacatcaccacgcaggttacattcgtcttccactggaatgactagagcccccaggcagtaggcagtgacctgactgcagaagagcagaggacagactccgctcatggggacagacaggctctgttgcttctcctcactggtcatggcttagcatggttcctccccaaagtccttagtaaacaaagcactcgcaaaaacccaagtcactactttttaaactctgttggataaggggagcttttccatagcttagactgagaacctgtgctctagaactgctattctgactagattgtatgaagggagtgggtgcaggcgacaaaatggctaaaatgaaaatgggagccactggtcccccgtctgcagctacaacttcaagatgtctacagatgttggtcagtgtggacatgtgcaagtgggaaggggccagagggacaagaacggccagtgagggtggctccttggggacagtattccttccgcgcc

SEQ ID NO: 216509 - DNA, 528 bp, Homo Sapiens
gaggcccgacggctttattggttcagggcccagtcccgtcccctcgcccgcggacgcccgggtccgcggcgctcagcggctgtcacgggggcggcgcagctgccccatcatgtcggccagcatgcggttgcacagcgcggcgtaggggttgagcagcaccagctggcgccgcgcgaaggggctgcccagccgtgccgccctctcgaagtccctgcgggcgtcgtcgtctcggccctgcagccgcgccaggagtccgcgctgcacaaagctctggcgggcggcgcggccccggccgccgctcagctccaccgcgcgttccagatcctccagggcgcctgccacgtctccctggagtcgccgggcctgggcacggttgttgtaggctgaagccctctcaggcagcaggcagatggcttggccaaacctctccagggctgtgctgaggtccccagcctctgctgccatcaccccctgcagctccagggccttggactgttccagctgtgcttgagggaaaacttcatcttc

SEQ ID NO: 216510 - DNA, 901 bp, Homo Sapiens
  misc_feature (857)..(857): n is a, c, g, or t
  misc_feature (860)..(860): n is a, c, g, or t
  misc_feature (898)..(898): n is a, c, g, or t
ggctgcaagtgaggcgcagcttagcctgacgcagatgcccgccggcaacgtgttcaccacggccgagggactcttctccacgctgcccttccccgtctacagcaacggcatccacgcggcacagactctggagcgcaaggaggactgaggcgccgcccgtcctgggcccggccaggccccgcttggaggaggcatcgtcggcattttcgtttagacctttaattctagcactttgaattcgagcaggtcagcgtcttctctcgccacgacggtccccattccaccccctctttctttcacctgacttattctttcgtgtaaagatatgtttattttttgccttcagagggtcagacgaccagttgcctgccgttttgtcttcttctaaggtgtgtgttgggttgttttgctttcctttgcatctttattaagatgtctttcatgtgtatatgcctctgccatagaatactcagtcttgtggtcaagagagttctcaagtgacaaccattggggtttcttcataaagatcttgatatgatcaagatggaaagagacaagcataaacaatgtgccctgtttgactaagtcaaatgaaatagggtggtttttgtttctgttcctaattcctttaaaaaatagggggaatagtattttagaattttatgcagaatttaattctctttttacggttaagattttaagattttcttacttgcacataaaaataatttgggttctttaaacttaaatttctggcctgtgactagaatgtttaaaaaaaaaaaaagtcggactaaatgttaattactgaaacatttacttaatttctaaaccatggggctatcatttattaatcnggnaatggcttcatacaaaaatgcagctccttgggctgagnttt

SEQ ID NO: 216511 - DNA, 894 bp, Homo Sapiens
  misc_feature (648)..(648): n is a, c, g, or t
tgcccttctggttatttatcctcgcatgctaatgcagtaagaggacccttttatgccaagcaaatttatacttttggataaaaatagaatgatggcaattttatcatttttattattataaccattattactgtcacaacaggaaaccacggagtcctggccaggcaccctaagcatcttacatgcgttacattacttaatggtttacaacaaaatattagtcagaaacgttcattaaagataaaacacagccaaagaatctgccgggaattaactgtgggctactcgcatggtactgtgaatagcacaccttctgcttttatgagctgaagggcaagtaagccttttccttaccatgcaaaaatgcggacacctggggcaggacaccaggctgctccccgacattaagacaatgaaacatgagggctgatgctctatagaagcaactgatgcagaggttggtgtacataacctgattacagtatccccttggtccggggccttggatcaaaagggttaaatggttcacaataatactgtaaatggtatttttttctaaaaatttactgtatctagtgtcataataaaactgtttagtaaaaaaggatagaatcaaaactcttcctgcctcttatgttggaaattagncgaagtatctacaattactgaataatatctcactggccattgagaaacagctgatgagggactccttcctaacgtgggcttgttaggtttgtttctggagggtagcgacgcttgatattctcccacaaaaagtccagttaggttccaaacctaggggaggaggccacctcttaacaggggccccccgctcttcgcgccaaaaggccctgtgttgcagcttctgggcataggcccccacctaaaagg

SEQ ID NO: 216512 - DNA, 873 bp, Homo Sapiens
ttgtaattgctctatttattaataccatatatacaaatgttcacaatatcaatgcattcttgttggcatgctagacagaggcattatttttgaagatcttttaaaaatattttgacttgttcccccttcacactcatttttaaattgtttggatgaggtcctcaatgtctataatgtcaatgcaagaaaaaatacagagagaagtagtaaaataacacaatagcaattaattggggaaaaacaaaatatcatggccttcacaagaagcaacaacacagctttgtaacagggttatacaggtttcaactgagaggcaaagatgcactaaactgcctacacatacccaggtatgtaacaagcaaggaggccacctcaagttcagtttccttcatgcatgacacatgctttttttctcctcatggacaattattgaagtgtttcgttacatgtcttaggcagcctgaagaaggtaggaaagccttagtagagggaaaatcaaaccaaatgagattaagtcaaaagaacagataactatcgtctgcttatctacttaaaggtgtgtggcatttaccacagtgaggagctaacaggagcctcccacactacatgcagggcccaaaggggccagcgatggtgtgataaccagtcacccgatgatgagttgcagttggaccaagtacagatggaggggctggcccatgcagggcctcggggtgaggttcactaggactagcctcaaggggaccttggctaccctttgtggcaccacaagggctttacaaatggacactacacccgacgggggctgaaaggtgcaccatatactgggtgggaggttcacttccccttgttgggaaagggtgttatgagagc

SEQ ID NO: 216513 - DNA, 866 bp, Homo Sapiens
tttagagaaacgttccattatttttttgtcgaagaaaaaaacccatataaatattagagtataaaacttgcgtgagacacaggaagagggtggggtgggagctacgtgactatgcgaagagaagcgcttataggagaagtcagtacgggggagggggtcgccttagcgcgtggacacagcacaaaacacaacacgggccgccgcgggcagatcaaggacagacggctgcgcggagcccgccgcccgctgcccacccgccatcacgtaaaagcacaccgcactacactactggctattctacaccagccgaaagagggagggggcgctacactactgtaagggcaggtctggggttctctggcagccccgctggatggccggggacccaggggcagaagggggtgggagaagaaggtctatgcacaaggaggcactggggacctttaaccaggctatggccactagggggcgccctggggacctgcgcagtggccttttacggaagagaaaccggcccctggcccgggcgaagggactgagcgcttcagcgagggccacgggcccctgtttaaagaagaccccttacctgggcttagacaatttccttgttcattttgcaacccctgcactctaatttccccgccttccgccaaaccccagaggacctcaacacatggctccttgagtttggtcccccaccctttcttgtttggggacttcccctgtcacccctttccccacgagcgcccttcttgccggaccaccggcccccccagagaggcgccttttgtccctcttatggggggcactgcgtcctcaacttctcttcgaacctttcttcgccttgtgaatgaccatcttaaccc

SEQ ID NO: 216514 - DNA, 913 bp, Homo Sapiens
gagtttaaataatatctattttcccttaggtaggttctctttctctctaacaagcactcaagggcaaggatatgataaatatttaggtacacccctccccaccaagagattggggggtgaagagctgggcacgcatctgacctttcttcctctattcctataaaaataaaaggaagcagaaatctgcttcaatgagtaaacaagtcacctacactccaaaataacccatgcacactgtttctggggagggagatggccaggccaggagagttgggccacatgatgggggacattcactctgccacctgcagcacccctgtactggggaggggtggccagtgccacagtggactctgagatgaaagggtgtttcttccactggcctttggcctgtcaccagcctcctccgcggtggcaggcagtacaagagtgatggcaatgtgactggaacagaaatagtttctaccaggcacacaaaagctcctgtaagccccgtagttccgtcctgcaaagggcctcagtgggaaccaggtctgcagacccgagtgggcagagagacgggtggaagcaggtgccccagatggtcccgcaggcgtcaccgtctggtttggagaccttaagggagttgggctttaaacttctctcccaggtctcaggtggagactagggagtttgacctaaaggtcctccaagggagagccaaggctcttggaaacagaatctggtttaccatcttttaaacaaaaggcaaatgtctctctcttccttcagaaagagtcattaacacttaaaattcttttctttggaagttttttcctttcccgatgcatttccaagttttggcccaaagaaagggggcttttcccaagggtcaggggctccatcacttgggccccagaaaaaggaactgttc

SEQ ID NO: 216515 - DNA, 905 bp, Homo Sapiens
  misc_feature (722)..(722): n is a, c, g, or t
ttttaattatttttttttaattaaaatactgttatacccagtggaatgcggcagcaatcctggtacagggtggcataacaaaacagccatgtttacattttaaatatttacgataacttaaacatacagacacacatcatggtctttggcagaaaatgttcacagcacaaaaaatactttaaaagaaataccaaatattaatccaaaatatattaagttgttttttttctttcacaatattttttgcctttttttcctcttttttctttttgctttgtaaacaatgcacatgaaccaaatgtatttttcagctttaaacaggggtaggggaattttttaaaaaaaattgcaattgtccagcaaatgcaaatgtttaaaaaggaaacttgaggaaccatggaaataaaacaacacataccaaacctaaaaacgataaaggaagaaaacaaagaatcaaggagaactaaaaacggtaaagacaaaactgctaaaacccaccaatagctcctggggctgaagtgagggactctttaagaccagaagtcaaagtcactgctgctagcaggctgccatgtgggtgtttcaccccaattccaaagcatctggtcctgctttagggcgctgggcatgggtagcttgaggagccagcctcctgggcactgttttgtgatggggactccattcagaggactatttgactcttgtagctcattaactagttntcaactgctttgctcctctcccaaaccctccaggtgggaatgaagacacttatgctaacaagacatctccagtttctcagagagaactgttacggggtagggccaccgaaagcccacctgggggcatggcagatgtctgttcacggtggctcatttcatttggctcagggcttatgaccaaac

SEQ ID NO: 216516 - DNA, 840 bp, Homo Sapiens
  misc_feature (39)..(39): n is a, c, g, or t
aaaagtaaacctttaatggtcgaaagtgcaaacttgggngaatggcagaaaacatcacacacaaggctgtcacttcacacttggaaggttgcacagcggccgggcagaggcgctcctcacttgccagacggggtggcggccaggcagaggtgctcctcactttccacacggtgtgggggccgggcagaggtgcttctcagttcccagatggtgctgggctgtcggactccattgctggatgtgtgacttgggtttaagcttctcccttctgctctcatctggaaatgctgacagcctgggcatttcctcctttggcactggagactgaagcctggcaaggccctgccctcagcaggaactccccctgggccccactctgtgaccttgagcccaagacaggatttttcctttaccttcttccagccactttgggcctcccggctctctcagagccctgttaggtaggtgacaactctgttcccactgttttttttttcttcgtgtatttttagtagagatgcagtttcaccatgttggccaggctggttcgaactcctgacctcaggtgatccactcgcctcagctgcccaaagtgctggcattacaggtgtgagccaccgcgcccggcccccggttcccaccttcttaagtgtatgtgttgacatcatgtttcaccccaaccaaaccttgggtgggcagcctctgtaggggaccactcacagctggcctgtagtcacggtcccctgcagagccctgtcccggtgcgtcgtcccctgccccgggcctgctctgcctgatgtgcactggccgctcggctcttgtgactcccggggccctccg

SEQ ID NO: 216517 - DNA, 821 bp, Homo Sapiens
gtratggtattaattataaacatcaagtctattttcacacaaatcgtcacgagtacacactgataaagacatgcgctgggtaagagtcattattggtacataaacatactgggatttgggcataaaaacacagtatcaattaatagctttagcagtctcaaaatagacttcaacgacattcatatatatttcctaatttaaattgtgttagaaacattgcatctactttgaggaacaaattctgtaacagaagagggaagacaggtaggcaagaaggcaggagatttttagttgtatactaaggtttagttttggcacattgaaagtatcatgttttcctattagatttctgaatttgtgaacaaacattaacagttgctgttctttaatatgacctcattcatactatatttgtgggaaaatacaactttagttttttctgtttacttatttttttatttttccactattgctcagtgaaggtactaaccaaatattttttagaagaaagaaacgacgtttaaacctaacacattcttcatgtatttttactgtggcaagtagtcattcacaatgtgatataatcattactcttagtagtcattcaccatgtgataaratcattacacttccaaacagcactgcattttttgccttcccggaatattttcctttccttaaatagaacatcatttctcattaggatggacttataggatgcatttgggggatagttgagatcaagattttattttcaataataatattttcraaattwtsraaattascatataattsttgaagttaagaaggkgtttttt

SEQ ID NO: 216518 - DNA, 552 bp, Homo Sapiens; identical to SEQ ID NO: 59510

SEQ ID NO: 216519 - DNA, 777 bp, Homo Sapiens
  misc_feature (723)..(723): n is a, c, g, or t
ccctggtggcttattagtccgtccccacgcccacggctccctccaccaggcagacagaggggaggccaccccactgcaaagggtcccagccagtgggcaccaacctcaggaagacgtggtccccacctggagcttccctcggctgccctggcccttgagcccgtcctgaggatttgtgctttgactctgacagggagcagcaggaagctgccagcccactgcctccatgcgggtccttggagggcagacggtggagcggcgcttcctcagctcccgcggtcaggccccatcagggatggtcacagtccagccacaggggcgactctgcccatcagtccccctggggcagcgaccagatcctggctggggcagcaccgggacaggccctctctatgggcctaaggtcaatgcaggtgggggcttgctgggcccaggccaatgaacccacccgtaggagccctcactgggcagcagggccaggagggcaccagggactggccgtagagtccactcagggcaggcgtctgtggcttggaacctgccctcgccaaggcactggggggttaaggagcagatccctcagacggccttgggccagaagctccctggagagctgggccaccttgaggagctgtttgggagccttaaccctgtcccagggggctccttggcaccccctgaggagcgttaagtaccatccccaaagtttgggtgccctttgtnccgcccttaaacaccaaggataaccgccgtcatgggggttcccgcctggccagt

SEQ ID NO: 216520 - DNA, 914 bp, Homo Sapiens
ttttwatatwatctgtaacttckgttccaagtaccaagggggggccagggctggcctgagtgggggcctcacagtkygctggacaaagtgaccggtttttctccataaataagacaaagaaaccctggggatctggagaaggatctgaggccattaaactgcaaatcccaaccgaaaacgaagaagcaaaagtttcttttttggttcttttaaacgtctaaagagcataaaattaagaaaaatacaaatccattacaaacacttctcatctgtggggggaaaaggtacaaacgcgatttttttttcccaacagccgaatcccaaactcggaaaacaaaagatcaccctcagaaaagccgacacccaagtccccgcctccgcaggctgcgggtggagaggcggcgccgccccaggatcggcgggagctgtgcttgagttctaggaactgatggagagacggacagcggtgcgctccgctcggagaggcgtctgcggccccggggctaccgcgcctccacctccgggggatttcgggacggggagtagtcgcgcgcctcgcccggcccgaggccccccagcggagtagtccggctccgcggcggcccggggggcgtggggggcccggccgccgtcaccagggggggcggtgcgccgagggcggcggcggcgggcggggtccgcgccaggagcccattgtgcagcgcggcgggcgagaggcgcgggaagtgcagggctcccagcgagggcagcagcgcgccgtccaaggcgggggcggcgggcggsaggtgcgggggccgcgcgcgctccarctccccgcgcaggcgctcsggggstgtycccgtgggggtcscggtcscggtmcgggasgycccgggggctcccccacgcgcgggcgmcccccsgstggggggsgg

SEQ ID NO: 216521 - DNA, 491 bp, Homo Sapiens; identical to SEQ ID NO: 40724

SEQ ID NO: 216522 - DNA, 1000 bp, Homo Sapiens
agaaggaaaccagagctgggactgctgccgtctgtccggtagagtgaagcaagggggctggaatagggcctgttcagcccctgtccctgctgaaacggctgtgggaggctgggccctgggacgccctctcatagcgtccagcgatccagacaaataggagagccgtgacggcctgaatgccagccagcaggaagaagtagaggtccatccggcaattgttgatgttcccaaagtccttggggcagtgcagccagcccccgggcaaggacagcagtgccactaggctggagcccaacagtgagcccacccccgacaggcagaagaagatgcccatgatggcgccctgcatggagcgcggggcctctgagtaggcaaactccaggcctgggatgctggcaaagatctcactgatcccaatgagcaggtactgagggatctgccaccagatggacagtggtgccgcgttgtacaggacctccccaatctgctgggacacggtctcgttgtggtggatgtagtgtaagcgctccatctccaggactccgtgtagctgctgccctgggctctcagggccacagagatgttggccgggttggctgggaaaatgtttgggatgtggaggtgaagaccctgcaggacataggtggactgcatctggaagtagaccatccagtagggcacagggtcaccatgacgggcaagatcttcaccagcacctggaagttggcgatgtcctcttgcggggaagccctggctggggagacctctcgtcggccagcacgcgggcacattgacggtctctggccgagtgtcgttgccacagctgggggcagcagtyttggagagcgagcttaagcatagaggacacttggctgcccatcgggggcttggtgatgaagacgggggkggmaaraggagakgaaaaakgcaggccacacasccacagggakgckgtagccagcaggagckgakgkgkgckgaakaamgcacaccasagcga

SEQ ID NO: 216523 - DNA, 866 bp, Homo Sapiens; identical to SEQ ID NO: 47194

SEQ ID NO: 216524 - DNA, 1000 bp, Homo Sapiens
actgttgaaattaaagataccaatacgtaacattcaacaggtttttccatttttattatgggcacaaaaccattggtatgatatagttaaaagtgatggtgtgccaaaatgtctacacaattaattaacatgctaacttaaatacagcggttaaagtaatttttgctacagttaaatcttaaatgctactctacacaataatcataaacaagtccacatggcaattatgtaacaatagaaaaaaagaaacaaacgtatcccattttcttcattccagcagcaatacctttactgatattaatctgttaattaggtgtgcttatatattgcgtaatatactatattggtatgcatgctaaaatctttctatctctatttttgcaaggcaccatacaataagttctctaagtttccacactactaacaaaaaaaacataattctaagattaaatgcaaacttttacctaaaatgggaaataaaatgaaaattaagaatttaaaatttgaccttggggcaaatgacaaactttgtaaaaatatggtttaaatgaatctttccctttgtcttcctaatttaaattctgctccctaagttgctggtcagaaagataaagaaatctagaaaggcaaacaaatcatgttattaaagaatcttttaaaaaatctgcatgagactgccatccaaattaaaatacacattggggagaacaactaaatttttaactttcagaatccatggttttccatacttgccattttgtaaaatgtcctattagatccagaataatttcataggtaaaacaccactattaatgtaaacacaattgrggrctctacaattgtcactttgtttttcttgccatgtggtatctctctgttatctgactcaacwagkctagcmagatgctacttkggaawgcaataaagmagcatattttcctaatcttwagaccagkcattaaawttwttatttaaatatcttagattwcttcagaaatta

SEQ ID NO: 216525 - DNA, 1000 bp, Homo Sapiens
gagtcattattatttgggagctggggttcttacaatgctagaaataatatcacttcctatttacataatgtatacacccaaagatattttatgtactagactccagattaccctttcttaataaatatctcagggtaaggaaagaaagaaactgtatagatatatttaaaatagagaatactttccaagcaatacatgatacttttcctaaaagactctaaaagaaaaagattctgtaactctcttttagcaccaaattattgtttatcttgctggatattttatatgaacagtgttaatttagatgcactaaagcaaaggtaggcaaactacaaccatgagtcaaacatggccacacccattcatttgctattgtctaagctggttttgcactacaactgcagagttgaatagatgcagcagatcctttacagaaaaagttttctgacctcaattctaaagtaattgtagtagggagctggaggactttctttccctttatggtaattttttgagctacaaaagagccttgcagaaatgggtgaagggattaatcttttaaaaataaatgctatatattaggaaaataaaaaatattttagagccaagttaacaagtacttcagcaaaacatgctagttttatgcaggggattctgtattccaaatggatacaatccgacatatataaaagaaacagattcttaactattgactcttatttagcaaatgcaacagacaagaatatccaacttgatatttataaaaggtagactttttccaaaagtgtataagctcaaagaaaaaatgcaacctgtcaattaatatatactatgtaatatatattattgtgtatttatgattagccatcataaatgcccattgcttggcctttaagaatatcacaaatatttatatwaattwatacaattkttgcagaggtcctgtaraawaayctcaaagrmaaactggtcawtaawawatttwatgktatkwtttttt

SEQ ID NO: 216526 - DNA, 1000 bp, Homo Sapiens
  misc_feature (17)..(17): n is a, c, g, or t
  misc_feature (19)..(19): n is a, c, g, or t
aacaatagctctgagancnagaaggctggaaatgcacattcagaaatgaggtaagcaggacccagtgaggcacgacgtggtttactagaagtggccggtttcctggcagctttgtaaatggactctaacctcagtggaatctgggccccggctggatcaggaggcgaccatatggcttttcttgtttcacgtgaagaatctgttgcgctgagagcaccaggagcaggtagaagacccgggcagccatcctgcgggggctgagaggtgacaccaggctgctgaagtcgggctccctgttagcctgcagctccagtgccactgccctgtgcactgcttccagtgagagcagctcgagctctgggggcagcaccaaaggcatctccatgggcacctcagggagttcaggcaccacgggcaatgcaggagcttctggcgcctccacctcaggccaggcccaccgttcttctggtgggatgaggctgatgcgggacttctcctcttcagctgcctctagggagatctctaaagacaccataaggggaacactgggctccagggcctccctcgggacctcaatctcacttggaacttcaatctttctcctttcctcctcagcggctgcctcctcaggcagctctcgcctgagggcttttgggggtggctgggcacaatgggtccagagacccagtagttcagggggtagccagccagagagagttggggttctgaacaactccgcaggcctctgatggtcctctcgggcggctgcaccatgggacattcccagcagtgggctctggtttgcagttgttcctggaatttctccggggagatctgagtytccttgtcccagaacagtaaccggcgacgacggcggsggcgaggaggtggggggactgggggcctcctctgttgagtggggagggcaggtaggggcaagctgccattactcttttctktawtctggtggacgctaacaggaccacaccgccctagagga

SEQ ID NO: 216527 - DNA, 925 bp, Homo Sapiens
  misc_feature (662)..(662): n is a, c, g, or t
  misc_feature (665)..(665): n is a, c, g, or t
  misc_feature (684)..(684): n is a, c, g, or t
  misc_feature (837)..(837): n is a, c, g, or t
gacaggatctcgaccctgccagtataaagctaaagctgagttcataaaaagggatgatttggccgacggtcatctgccagattctgatgatgattcagaagtcagtgtggaagaagatcagagggagaggcaggcgctctttgacttatcaagctgctccctgaggcccaaaagcttcaagtgtcagacttgtaaaaagtcatatatagggaagtggggactggcccagcattttaaacttaatccaggccatggccagctggaccctgagatggtgctatctgagaaagccaatgggagcaccctccgggggtgcacagaggaaaggacgctcagcctgaccttcccggggctgtccgtgccagcggctccgcgtgagggaggggcccgctcctgcttggtgagagagtcagcacgcagtggcctgcaggtaatgtttgcatctgggtgtcgttttcggccattctcacactgttataaagaaatacttgagaccaggtattttataaagaaaagaggtttagttggctcacagttccacaggctgtacgggaagcatggtgctggcatctgctcagcttctggggatgcttcagaatcagtcacggtgaaggcagagtgggagcaggcatgtcacgtggccacagcagggacaaggggcncgngtaggtgctgcacactttntttttccttttcttttttggagacggagtctcgctctgtcgcccagcctgagtacagtggcgcgatctcgggttactgcaagctccggcttcctgtttcacgcccattctcctggcttagccttcccgagtagctggaacttacggccgcccngccaccaagcttggaaattttttcctattttaagaaaaaaccgggttttatccgtgttatgcccagatgggcttagaccttctgacct

SEQ ID NO: 216528 - DNA, 998 bp, Homo Sapiens
ggrggggrgkggggsgattcggctcactgcaaccttctcctcccgggttcaagcaattcccctgcctcagcctcccaagtagctgggattacaggcgcacgcaccacgcccaactaatttttttgtatttttagtagagacggggtttcaccatgttggccagactggtctcaaacttctgacctcgtgatccgcccgcctcggcctccctaagtgctgggattacaggcgtgagcactgcacccggccgatgtatgcatttttaaaacaattaaattttcatattatagataagtctgactataggttatataggaaactatacctaaaagcaaccactatggtttttagatatgccttcctttaagttaaaaagtttaaggctcctattttggagggataccctaaagacattttctcacagtatgacctcaatgcatctacatatatgctactggaaaactggaaataaaacacaactcttgttaaatatatcattcttcaactttaaagagaaacagaaaaccattttaactacatcccttcttatttctcaatactggtttgttaagaacttctgccactcaaaaaggtaggtgyttttccataaatttagcttaaracagaagattaaataggtggggagcatggtaagacaatgacatataarrcaarrcccttactatcttgatttataccttccctatcccatgaaacttcctacgttgcaaacactgatttcctacaaaccatgaagatttcctatgatatttgcctatccttttattaaactaggggccaaaactgacatcattgctgcaattaacttttacttgttctggtgaaatgcttcttcctaaatggcttcgccctaaccagaaatataagcagttttgatggttaccataaatkragccagaaatggaaataccaacagtaacccaaaaggvgggcaaagaaccccaattgaaartmatmaacaaaatatatkccaaaaa

SEQ ID NO: 216529 - DNA, 1000 bp, Homo Sapiens
ttctatttatctagcaacagaggaaaacaaaaaatcatgtaagaaataccagcatttgcacaataaattaattctccctcttccctggtaccagagtccttaccacccctgaactttgaatcacaaaagctcaagtaaaccttcatgtgtagctaccagtttgtgttcttaatcatgttccccctgagtttcaaatatgttaaaaatcccccatgcaatctgaatcagacctttgtctttcctaggttacaaagactcaaatggccaaccatcaccattatgttacctgaggtcacttaactctgtggctttcaactctgtggctttcaactctgtggctttcgtgtaagatggcggtatagggccatggacaccaatgccaaagaatagtttcagggtttttttgcaaaaacattgtgtcatccatgaacatgaagcatttaccaactaaacataccctaaaatagtttctgttgactaaatctttcatagttcattcattgtctggtgagagcacagagctaagaggaccagcgttasatatattagagtcccttaagaggtacttgctttgccgtgccacataaccataggtcacccacctctagttctacaggaatccatcatctctgttggaataactcaaaatacaggctcttgatggtaggttaaaaacatggtcctgttatgtgatagataacacaatactgtgttttgaagttaagtcgaaaattgtaggggttatcagtaacctagaaaagaaaacagcttgtccatgtagaaagattagaggatctaaattaaattggaaattgtyctatttgcatcaytcttctccctaactttatcaataaagacctgatttccctcactttattctggaactkawawtgtamacatgakatccataggtgkatagaatrggggtacagactttwtgatatmtgtttaaagatraaggagactgtaayctgattcaawtgrgtbtgtaamactagta

SEQ ID NO: 216530 - DNA, 897 bp, Homo Sapiens
  misc_feature (3)..(3): n is a, c, g, or t
  misc_feature (736)..(736): n is a, c, g, or t
ttntaggtccatatatagtttatatgctacaagatcttgatattcttgaagactggacaacaattaggaaggcaatggctacattggggccacacagagtgaaaacggaaccacctgtgaaactggaaaaacatctgcacagtgctagatctgaagagggaagactatattatgatggtgaatggtatatacgtggacaaacaatatgtattgataaaaaagatgaatgtcctacaagtgctgtaattacaacaattaaccatgatgaagtttggtttaagaggcctgatggaagcaaatctaagctttacatttcacagctacagaaaggaaaatattcaattaaacattcataatcatgatttaagtgttatctaaatttaccttattagtgttaccaaatgtaagtgccatgagagtaaaaaaatgtattcaataacttaatattctcactgaatcatgagagaatgtgtatttgtaggtagtactctaaatagatctcattgatatgttattaaaagaaacagtaataaaaattttatcacgatccttacgttgatttgcctcttaggtccgatgaccaataggtattctgtatatggtagggggttttctttctaaacatttttcttttggttttaaaaaaagttatgcaaattttgtcttatctttagtaaactatgactacatttatctgcaatttttaaaaatttccatatcttttgccattcattgnggtgtttggaaaataaggccgatagaatgtttcctataaatggtttggtcctaagaccattagtggtaaaccagaaccggaaatttaaacatatttatttatgggggatgtttattttggctttattaggtttatttaaaaactggtggccataccttaca

SEQ ID NO: 216531 - DNA, 834 bp, Homo Sapiens
ttttgatatatctttttaatgccgtgctgctcagccctcagcagaacttcagtttccatgaaataaacaatgactatataaaattccacctttctgaaactgcagtctgacgtcaggtgaagctcaggtgaaagtttctttcccaagcagcccatctgtgttccatcaagagagtcaaggttctccaagtgaggggagctgtgcctggatcctgcctccaagtcacatgagcactagctcatagtggcagggtgggggtgggaggggcaggtctaaactcacagaagtcaagtcttaagacagtgggtgacccagattgccatagaggtcaggcctgcggtgctggaacacaggcaggtgtcggcgcaactgtcgcagatagttgaggtctattcgggcaaggcagaggcctggcccctcagagcagcgggccaccactgttccccaggggtctaccaccatgctgtggccataacttgctctcttctcatggtggcgtccacactgtgctgctgccactacatagcactgggtttcgatagcacgggcccgcagcaacacctcccagtgggctgggcctgtaatggatccaaaagctgaaggataggtaagtatctctgctccagcttgagccaatgccagagagagttcagggaaccgcatgtcattagcagacagcttgaccaatctttgcctgctggtgtgctgacaggtgactcaagactgggcccagcctggtataagttgttttcacacataggccccctgccctggaaatttttacttcacacaaaatgtgtctttccctgtaaggtgggcccattcctggcccct

SEQ ID NO: 216532 - DNA, 911 bp, Homo Sapiens
  misc_feature (622)..(622): n is a, c, g, or t
  misc_feature (790)..(790): n is a, c, g, or t
atatttttacctttattagttatgctgatgatattatgtccacagactgtattaaaggcagtgatcactaacacagaacacgacagggcgaagaggcagccgggccgattgcaggacgtggcctgtcgggccagggtcgctgacatgcacgctggtagctcatacactgctaccctcagcacaggctgcaggaatagggacaagacagatgccgccggactcttagaagctatttaataaatatcatccaaaaacaaaatggaaaagaaacaagaaaccctccgagcacaaccaccttaggccaactgaatgtaatctagtttattcaaccaaaaattgagagagaaggaaaatattgaaacaaacaaacgaaagaaagcagttcttaagactagcagtaaataaatttatacaacagttcggtctgtataatatgatgaaataaatctacatcttttcttattttggtgctttgaattatacatacaaacaacaattacagggacttgttcacaaagcatgtaggcctagaaaaaggctctctgaaaccctcaatggcaactggtgaacggtaacactgattgcccagaactggtatttcctttgcagaggccaacagctntgaacaaatgattcgcctacaacttttttctttttttttcttttctcttttttcttttttttattttcttttaatgcatcaaacaactgtggccagtgaaaggaaacaaaactggcagtttgtccatttgaatatcagacctagttccttcttaatttccacactatnttctcccatattccttaaacttcttggcatcctttattcccttacagctacccagatgcaaaaaagtcatggcccagtatttcttaccatataagttatatggcattgttcagcatatttt

SEQ ID NO: 216533 - DNA, 1000 bp, Homo Sapiens
ttgctgcagtttggaagtagtttgttatcaggattatcaaagcatcattgctatttatgacaatgactttaagaaatgcaagaatatttggaacactgtagaaaaaatattttagcctggaaggcaaatactaatttcaggaactattgatctgttataaaacaggaccactcagacatttagctctaagactttcacatatccgttgttagaggcgtatagtggggggcatgactcagcttctgcttaagtacaaggtgttgtctgcagcgaaggaagaatttgattgtagtatcaacagaaccagacagaactctttgaatataattatatatcttggaaactgactcatcaaagctattagattacatggcatcatttaagcatcactgggctctgtacttttcattatctgtacttttcattatggagtataataggctttatttggtacagaaattgggtctaagatgaaacaacttgtgatttttgaataaacttttggggattagttactttgatgttgtcaagatagcaccatagtaagtcctctgtctttcctcttgatttatttataatttagaatcagtttatgattttaaaaaatgtgacagacacagtggcatgcaccagtagtaccagccacatgggaaactgaggcagaaggatcacttgatcccagaagatagagaccaccctgggcaacataatgagagccccatctcaaaaaaaaaaaaatcaattcccaataccattccagaacacttttaatataaccagatgaaattgtgatcactactttactgtaatgtttaaaatggtcctcagtccatatttaagtacaatcttagtgtttctgtgcamcctaatatattagaaacaaaaawtgtattgcmtttgaataggdaawactccggaatgrgggttatttcttttwacarttkccaatagawtkgttwrtkwcgwttatctkttawtttcmggbyaagcccmggkbagt

SEQ ID NO: 216534 - DNA, 683 bp, Homo Sapiens
cggcgggagcatgcagtggcggagcccggcctgccacccgctcactcgccccaagtctgagaaataaatacattcatcactgcacaaacatattgatacaaaaacaacactgttaagagtgtttgcaccgtctatgttggtaaggaccagacccagtcagccccttccgctgcctggggtggggttagggggccccaggagtggggacccaccagagtcgacagagctgcgcaaaggtcccggctttttggcttgagtgggaccctcgcatcaacccatccccaagggtcacgggcagagcagcagggggacccaagcccagactcgggtcctgtggccagaactgacggccatccccgcgtaggctagctggtcaggaccagcatggtccggccagagggccttgggggctggtcagcacgggcccaagctctttggtgccagctgggcttggaggggccctgggaatggggacgagggctcaggtgactccagggaggcttccaatccctcccccagccccagggctacccttctctgcccgtgagccactccagggccaactcagaagggtttccagcagcaggggagggttccctggactggccttacagctgctgaggtctgaaactgtaaaagcttatgtaaacaatgagataaatatattagcatcttttttctga

SEQ ID NO: 216535 - DNA, 756 bp, Homo Sapiens; identical to SEQ ID NO: 40321
  misc_feature (15)..(15): n is a, c, g, or t
  misc_feature (22)..(22): n is a, c, g, or t

SEQ ID NO: 216536 - DNA, 970 bp, Homo Sapiens; identical to SEQ ID NO: 46821

SEQ ID NO: 216537 - DNA, 749 bp, Homo Sapiens
agatgaaagaaacaatcatgaaccaggaaaaactcgccaaactgcaggcacaagtgcgcattggtgggaaaggaactgctcgcagaaagaagaaggtggttcatagaacagccacagcagatgacaaaaaacttcagttctccttaaagaagttaggggtaaacaatatctctggtattgaagaggtgaatatgtttacaaaccaaggaacagtgatccactttaacaaccctaaagttcaggcatctctggcagcgaacactttcaccattacaggccatgctgagacaaagcagctgacagaaatgctacccagcatcttaaaccagcttggtgcggatagtctgactagtttaaggagactggccgaagctctgcccaaacaatctgtggatggaaaagcaccacttgctactggagaggatgatgatgatgaagttccagatcttgtggagaattttgatgaggcttccaagaatgaggcaaactgaattgagtcaacttctgaagataaaacctgaagaagttactgggagctgctattttatattatgactgctttttaagaaatttttgtttatggatctgataaaatctagatctctaatatttttaagcccaagccccttgggacactgcagctcttttcagtttttgcttatacacaattcattctttgcagctaattaagccgaagaagcctgggaatcaagtttgaaacaaagattaataaagttctttgcctagta

SEQ ID NO: 216538 - DNA, 977 bp, Homo Sapiens
  misc_feature (23)..(23): n is a, c, g, or t
aaaaacaatccctccttctcatnaaagcacaattttacagaggaaaagggagatgtgaaactatacacaattcaaatctaattaatatataatttttttgtggaatacagatggagggaatacatcacaatactaaaggtgattatctttggatggtgggattacaggtgattatatattttttatatttctatagtttaaaaatattccatgatgacctataattacttttacttattttttgagacaaaatctcaccctgttgaccaaggctggagcgcagtgggtgcaatctcggcttagtgcaatctcggtgtagtctcgacctcacaggctcaagtgatcctcccacctcagcctccggagaagccgggactacaggcacataccaccatgcccagctaattttttgtagagacaggatttcgccatgttgtccatgctggtcccgaactcctgagctcacataatcctcctgcctcggcctcccaaagtaccgggactacaggtgtgagccaccttgactggcctataattacttttataatcagaaaaaaaattataaatraatatgaaaagtgccaggaactttcttttgtggagccacacactgggctcaaggaatcatttgagctgggttctgcaggggtgggagtcttkgcgcgggccctggtccttgctgtgtgaccctggagactcactactttccctccctggcctttgtttgcctggkaagacaagatgctccctagggkcctttgcagcttaataagtaaagtattcgccttggtctcatccatcccagctctttgcccagcttccagtgactcctctgtgcctggagagaagggcagcgccttactcatgccttgaggtgctgacacttccgtcaccacctcgctccttccagacytgcctgggarthctkcctcytggcttcaccksatmaggkytsmctctyararcctgccttcctt

SEQ ID NO: 216539 - DNA, 892 bp, Homo Sapiens
cggcggcagtgtctgtggtggccgcggcggcgagagcgacggtcccatctttcccaccctcttggttgccgctggccacacgccctccgctggcggcgacttctcagctccgtgcgcccgggctggacagtgagcctcgagaggagacgcgggcggctagagccggagtggggcgagccgcggaacccggccgggagccgcgcgaggcgtgatcggagggtatggttggcatggaattgaatttcatctgtctgtgggaattgtaagcaagattgccatcacgaaagccaaagtggatttctccagtgtggtgtgcctgcccccttccgtcattgctgtgaatgggctggacggavgaggggccggcgaaaatgatgatgaaccaktgctcktgtccttatctkcgtgcacccagtcccctagagttaagctkttgccaatgaactgcaggtagctctccttgcagcccgagctgaccctaggcctccaccctggcaggaatcccaatttgcctccacttagtgagcggaagaatgtgctacagttgaaactccagcagcgccggacccgggaagaactggtgagccaagggatcatgccgcctttgaaaagtccagccgcatttcatgagcagagaaggagcttggagcgggccaggacagaggactatctcaaacggaagattcgttcccggccggagagatcggagctggtcaggatgcacattttggaagagacctcggctgagccatccctccaggccaagcagctgaagctgaagagagccagactagccgatgacctcaatgagaagattgcacagaggcctggccccatggagctggtggagaraacatcytcctgttgagtcmrcctgaaggaagcatcattg

SEQ ID NO: 216540 - DNA, 915 bp, Homo Sapiens
gacaggaatatatgaataaatcactgccatacaggttttccaatacacaagtgctagaaaatacacacaattccccaatgcgtaagttgtgctaatgtctttccaagttctgggttgggaagtggagggtggcagcgtttgtttgtgcgcaaccgtccagtcctgttcacagcgaggatttggagtcctccagggtctcatcatgggagtgatttgtcagcggacgcctctgccctgtctggcttcaggtccagggaagctttgaagcagtcaagccttgtctttgtaccccatgtgtcctgtctttgttgagtcactcagagatcactcctggacctctggggttggagttccagtgatggcttatggcggcccactcactatggtgggctgagtggaagctccttaaccatgtccccagagacactgaggtgctcgctcttttaatgtcctcgtttgttgccgtaagttctttgctaggtttcattttggcatttggcaaatcagcctggaagtctggccccatgacagcaatcactccctccccaccctcctgaagctagaggaagatttgctcagatccattaattaaagcaggaattggtgtgacaatgagctgcatggtttagggagtctttgggagccttggaagtcctgaaggacagacaatcttgtactaagaagtcacaggtgccctggctgcccttgctgcccctcggcctctttgacacaggggccccacctcctctgtagtgggttccatcgctggagctggagatcagcgttacktaaaaatgagatggctgagcagatgtgccacctctgaccatggttggaactgaacccttgcaatcacgtaagcctttagcagctctcaagcttgctctcagccctctcagccctcagagggaacac

SEQ ID NO: 216541 - DNA, 1000 bp, Homo Sapiens
  misc_feature (587)..(587): n is a, c, g, or t
  misc_feature (986)..(986): n is a, c, g, or t
gtccaaggagctgctgacggcgggaagcgacggccgcggaggtatatgggacaggttgctcatcaactcccaacctaagtccagaaagacctccactcttcaaacagttcggatagagaggagtcccttattggaccaggtacagacatttctcccacagatggcacgggcaaatgaaaagctaagaaaagaaatggcagctgcaccacctggtcgtttcaatattgaaaacattgatgggcctcatagtaaagttatacaaatggatgtggctttgtttgagatgaatcagtcggattcaaaagaagtggacagttcagaagagagttcacaagacagttcagagaacagttcagaatcagaagacgaagatgacagcatcccatctgaagtcaccatagataacattaagcttcccaattctgaaggtggaaaaggcaagattgaagttttggacagtccagcaagtaaaamaaagaaatagtcaaataaattatctgawaagaaacaggtgacatatgtctgcyaattctgtgaaaragaatgtgattcacgggttcttttgcttttcaggcacctatggtstntttatatgttaaaractttagacaagttaaatttgacagagtttctttgggcaaagaatgattaatgagtkaggtagcattgtaaactgaaaggggttcagagacctccgctctacagcaaggaaagtgtgcttttatcagctgaacacagaagtagagtacaggaataacttgatgggttacagctaggtgtttgcctaaataaggcaaagaggrgactaaggctgcctgatgtcccataggtatggtctgatctaaggagatctaaggctgccttgtccgatgggctgaggmtggctgtattgtawttggcacaaytggctatttgttataaaatamacwcmtgagttaggtttggkgtgtrakwcaggatwacttgwggggtamrcaagggttgcnyaataggcaagagg

SEQ ID NO: 216542 - DNA, 911 bp, Homo Sapiens
  misc_feature (20)..(20): n is a, c, g, or t
  misc_feature (46)..(46): n is a, c, g, or t
tgagcaagttctcaggacanagacctggggtagaatcacatccgtnatgggaatgtgggatcagtyttcgggcacagccttggcacgccatccttcatcctatgagtggactgtgtcatagttaaaaaataaatatctaaaactgatacagtatcatttctcaaatagaccaaggaaaatggaaaacaaaataattcagcttttcagaatatctgaaaagatgacattgatattgaacagggacctggttatggaccacaggaggccagtcattggccttgagtccatgatccaaggtcagtggctctaagtggtaaagccaaggaacgggaacccacgtaacgtgtccttcagtctgtccttatcaagacaggacaatggctggtatttctaatccttatcttacttgcttttgaaatgaagcagaatctcttaagatggaaagaaaggaaagtcaattttacagccagaggtaggaaagcgtgagttgttttgtgaaatggtcattccttgcacatcttataggcatcctgagagccttgttcagcgccatcttgggaaagcaaaggctaaggccagaagacacagcttctatggtcccggtccatgcgcttccctggccttctcgctaacaaatctgtgagtgccatggctggagagacccaggcgggaggcaaggagccaatgtcagtcacctcatccacatacctggagttctgcmattattttgtctcmttcttcttcttcttcctcctcatcctttgaggaggaggtggtgacaggcggtggggatggggtccaggctgaagcaggctcctctgctggatattttgtagctctggtctgtgggcttggtccagcatcttcactggcttgccttagcggtgatgtcctcctttctgccggtgtag

SEQ ID NO: 216543 - DNA, 965 bp, Homo Sapiens
  misc_feature (636)..(636): n is a, c, g, or t
  misc_feature (795)..(795): n is a, c, g, or t
  misc_feature (834)..(834): n is a, c, g, or t
  misc_feature (847)..(847): n is a, c, g, or t
  misc_feature (929)..(929): n is a, c, g, or t
  misc_feature (945)..(945): n is a, c, g, or t
cacactccttttctcccctccacctgctgagtcacctgctttcctgtggaagaggcctcagcacctgccactttgccggcctccccatctgggaggctggagcctggccttagcagccccttttcagacctactgggccccttgggtgcccaggcagatgaagcaggctgcagcgcccagccttcaccagagcggcagccctcccctctcgaaccacggccagtctccccctcagcgtatatgctgcgcctgcccccacccgccggagcctacatccagaatgaacacagctaccaggtgggcagcgccttactctggaagcggcgagccgaggcagcccttgatgcccttgacaaggcccagcgccagctgcaggcctgcaagcggcgggagcagcggctgcggttgagactgaccaagctgcagcaggagcgggcacgggagaagcgggcacaggcagatgcccgccagactctgaaggagcatgtgcaggactttgccatgcagctgagcagcagcatggcctgaggggctgctggactgaccgaggggctgcccagcaagactgcagcctcttcctccctcagatcccaccagacccaccaggtgccataataaagcggattctagacgganggcctgctgtctggctcagctgggggctggagcccctctgagtactaagcttgctgccccagacagtggctgcagctcctagagggctcagtccaagctctttgccaaggagacagggagcctggctctcaccctcagagctactggtagacaggtggnagtcagccctgctagcgcagactcgggccccacagggtnctctgaagggcangatgtgtgagtagggcccagataatctccagcgccctttcatagacttgacaggctgactaaacagcagcccttgggacctntaaaccattaaatcgnttaagcagacatgaaggctt

SEQ ID NO: 216544 - DNA, 870 bp, Homo Sapiens
tacatcaaaatggtttattttttggatatagacatttaaaacattcatctccaagaacagcttcaatcaggtatacaataagaaatagactttaaatcctaatacagaaaaggtaacagaatttttttgaatgctgctgtagacactagtgttagaaaaaaaagtttataaatggttttgcaccaaaaaaatatgcaaagaaacttgaaaatagaaattgtttgccatttgttgctctggttgctgtttaatatagacccagtgactgattgtcttcagcacacatctaatttggccatttactgcatttggctaatgtgatccaaaatgtgatctagatagtgcttttcactggaggattgacaaacacgctacatacattagtgaatcttcataccacctcagtgaggtagcttagaaatattatacagaaattgaggcacaaagaggtaagtgacttgcccaaagttcccaacagcacagtccctggaagaggaggtaactctccacacaggactcatgtgccagaaagctggacagggacaccctcatgtagcatttagtaaatacttagataaagctgtagctgatcctttgagttttcagtaccctaaagtagtaggggaagtcttttgggcaactctcctacccttggctctcaactttcctactgttgttctcttatgaactccttcacctctttgaagactgtagcagccttcaatggggaccagacctcttacctttattctgatctgtcatctatttggtagttttgtttgtttgaggtgtgtccgttggacagacatggtcaaaagcaacagattggaaggtgcctattagggagtaactgcttattttttctgacag

SEQ ID NO: 216545 - DNA, 886 bp, Homo Sapiens
aaatcatacaaatcttttattaaagatctactcatacccatggctgaaatcatctattattgttgctagttagcctctcttctatagttgggtaatgttgtcttgccactgtgtttgccatctctcccaagtgaaaagaacactttttaaaaaaaattaattgctccaagttttcaggcccaggggaggctctcccattctcctccttcaatagtcccgtccaggaagggtgatcttgtggataaattcatcatacttcactttgccattgggttcgatatctgcttccctgaagagatcatccacttccttgtgggtgagcttctcccccagactcgtgagttttgaccgcaggtcggacgccatgacgtaacctttcttctccttgtccaccatcaacatggctagaagaatttctttctttgggtcttcttgttttatttgcatgtgcataatggtcagaaaagtggagaaatccagctctccatttccgtctatcccgtgggtctgcaggtgccgctgcacctcccctggcgtcgggctggcccccaggcacctcatggccaccatgaggtcggtggcttttatcttccccctctgctgcttgtcatacagggagaagcattccttgtactcattctggggcctcggctgctacccgtgggcttgctgctcccagaaccgggttcagttccctttcctccagcctcaagtctaaagtctgcccagctgggtggaagccccgggtaataaatgctcgcttgccatggagactgggccccgacgccaccagggtcagattccagcttccttgagcacagcttatgacccggcccccggggcaggttgggttttttgaggaataggggcctgcaaaaagcctctc

SEQ ID NO: 216546 - DNA, 869 bp, Homo Sapiens
ggattccttcaactttaattgtgggggtaaaatacggcagccactgaagataaaatacggtccctgggagtaatcacaatgctgttttcttttgtaaagtggacataagagtagtttttttttttttttattagcgcaagtggtcaaaagttgtcaaaattgtcctcattcctcgattgtctcttttttaccagtctcttgcccttcaaacagaggatacctggcctccacatcagcccatgtgatgttgccattggctaggtcttggactatgctgggcagctcagagatctctgctcttatctgccgcattgagtcacggtccctcagagttgcagtgtggggggtcttgttcactgtgtcaaagtcaatggtgacaccaaaagccacgccaatctcatcagtcctggcatagcgccttccgattgacccagaggaatcgtctactttgtgagatactccatgcctggtcagggcttccgataattccttgacaaatggcatgaactcctggttttggctcagtgggaggacggaacatttgaatggagcaactacagcagggaaactgaagaatgttctctgttcatctccttctcgtacatggaatgtatgttcaaataccgtatacatgatcctacccaggccgaaggaaggttcaattacattcggaacaacttttttcacatatagtgttttctgggaatctcttcacattgatcatgtccttttgttaactgaaaatgtttttcctttcagtttcaattgggaattccccttttctcattcaacagcatcttcatttctgtaatgtagcacctcatcaccaatgggcaagtaactccatctcccagttttggctccttttt

SEQ ID NO: 216547 - DNA, 867 bp, Homo Sapiens
  misc_feature (851)..(852): n is a, c, g, or t
tcaggttttaattgtacatagtgactgtgaaaaagcaattattcccataattaaaatacaaactataaaaaaacagactcaaagaaaagaaagatgacagagtgaaagaaggtacatttctttcgtgttcaaaccacggagttcacaacacagcagcacacacagctgggcgctttgtggtctcggcaccctcggcttccccttcacggggccgctttcgactagtagaaggctgggctagaacctggggtagagctgtggattcattttcctcagacagaagatcttgaaactttctcttcatgtcttcatcctgaagccacgggtgtcttaaggcttcttctgtcgtaaaacgtgcctttggatccactaccaacaacttcttgacaaggtccagagctttctctgagacttctgcccagacttcaggaatgaagttgtattttccactggtgatctgatccttcagtgacacttgagtcctatgctcagagaaaggtggatacccactaaggcagataaaaagaataactcctaaactccagcagtccacagcacggttatacccagcagtcccaacagaaacaagaacttcaggcgccaagtaggtgggggttccacataaggttctcatgagagaggtctctcccaaaatcttggagtgcccaaaatcagtaatctttataagacagtcctcttcttgagatgacagtaaaacattctctggctttaagtcacggtgtataataccgttttcatgaaggtactgcacagccaagagcatctggtaaaaatagagcttgcaggtagctttcttcaggcgtttattccccaccactttgtcaaacagnntctcccccttccatc

SEQ ID NO: 216548 - DNA, 880 bp, Homo Sapiens
ttgagtgtctttaatacctccctaagggcagcccctccctctactgagaggctcttggctctggccccaagagcagctggaaggccctggcctgacttcaccacttgatgtccaggctgtgtgtgccacgctcctggctctggtacgtggtatgcagcacctctcgggccttgggggagttgatcccctccagccactcctggtacagctcctgcacgtgtgcactggactccggacgccgcacagggatgtcagcgtaaatgccttccatctgccgcagcagggccttatccgcatgtccgtctggagtctgggcttggcctctgccatttaagcatcctccagcacaggcgaggacctccacaaagtggaatgggaacttgcccttcttaagcttcaggatcatgttctggatgtttcgaaagccataggctgcagcaaagcgtaacaccacctctccgttcttctcaagggtgacctcttggaagtctttgtttctcagggctcggtaagtgacctcctccacatcctcgttgaacagctccttggccgcatgtctgaagatgtgtgccaggggcccgtctgagctgcctccatcatgacgcgtcactttgtcctctttaagtctccaacctaacaggcagagaaatacaggtccttatgaatgcctgacgtccgtgacagaaagagggaacccaacttcctggggccataacaatccaagttcgcaccaaagaagcttaatccctggcccgaagtttaaactttggaaaaaggcccattcttaccatttggaggggtctttgagagggcccgtcctttagctccggccaaggggggagacctttaattacaccccgggcccattgcccaagttttt

SEQ ID NO: 216549 - DNA, 902 bp, Homo Sapiens
gaaaaaatactttaatttgtaatttattggaacctttaatatataatatggcaatttttctgggatttaactctaggacatgattgctgctggtatttagcaaaaggctcgggttcacacctagcgctaataaaatgcttttctgaataaaaacatattatcaaacaaaatgaattcaaatatattctttaaaaaattattttaaagtttgttctattcagtctaacacaataaagggagataccatggtttaacgtaattagctgattttatacactgcatatctttaagtccacttaataataagtatattattaagtgatagagaacactcaatatagcgatttttacagaactaggaaataaatttctttcttttttttttgagacagagtcttgaggaaatacatttctaagaaggatttttacagacactcatctttcatacccaaccacagggtctaactctaaagaggataaaaccaattactttcgtcccaagagctcatgactaatgacagcgtaaatctatgctatcaaaacctgcgtctctcatctgttacgagtattcaggcaggattcaaatattctcaaagaaagaaacacagtgcatgctgtgatcgcctgcttagcaacaacaagcactgcatcccaaactatctcctcccaggaattaaaatgaggccagttgtgtacacctgcatttcctccactgtggtactgcagaaggtctcagtgtcacaaagaatccttttgtctttttttataattatgggcacagctttcttttccaagttgaccccgactgccagttcaacaaagtcataaccagcaaaaaatgggttgggcctcttatctgaaatcccctcccgaaaaaggtttactttctttttggccctacc

SEQ ID NO: 216550 - DNA, 881 bp, Homo Sapiens
gctttttgtttctaatatagtttaatgcaactgcagggtccctttttctgatttcaaaactgacaggctataggtgagtgtcagagacaccgagaaccccagcacccagttgaattgcagtgtaatcctccattttcttttcttaacagggaagccckaagtaatctaactgcattgaccagtgacagtgatactgacagcagcagtgacagcgacagtgacaccagtgaaggcaaatgaaagtggagattcaggagcagcaatggtctcaccatagctgctggaatcacacctgagaactgagatataccaatatttaacattgttacaaagaagaaaagatacagatttggtgaatttgttactgtgaggtacagtcagtacacagctgacttatgtagatttaagctgctaatatgctacttaaccatctattaatgcaccattaaaggcttagcatttaagtagcaacattgcggttttcagacacatggtgaggtccatggctcttgtcatcaggataagcctgcacacctagagtgtcggtgagctgacctcacgatgctgtcctcgtgcgattgccctctcctgctgctggacttctgcctttgttggcctgatgtgctgctgtgatgctggtccttcatcttaggtgttcatgcagttctaacacagttggggttgggtcaatagtttcccaatttcaggatatttcgatgtcagaaataacgcatcttaggaatgactaaacaagataatggcagtttaggctgcacaactggkaaaatgactgtagataaatgttgttattagtgtcmcgtttgtatttttgttaatatagccgctgccataagtttctaacttgatcagcawtraatktt

SEQ ID NO: 216551 - DNA, 978 bp, Homo Sapiens
  misc_feature (22)..(24): n is a, c, g, or t
  misc_feature (27)..(27): n is a, c, g, or t
  misc_feature (30)..(34): n is a, c, g, or t
  misc_feature (36)..(36): n is a, c, g, or t
  misc_feature (38)..(41): n is a, c, g, or t
  misc_feature (44)..(45): n is a, c, g, or t
  misc_feature (47)..(48): n is a, c, g, or t
  misc_feature (50)..(50): n is a, c, g, or t
  misc_feature (559)..(559): n is a, c, g, or t
  misc_feature (569)..(569): n is a, c, g, or t
  misc_feature (571)..(571): n is a, c, g, or t
  misc_feature (576)..(576): n is a, c, g, or t
  misc_feature (579)..(579): n is a, c, g, or t
  misc_feature (583)..(585): n is a, c, g, or t
  misc_feature (590)..(590): n is a, c, g, or t
  misc_feature (597)..(597): n is a, c, g, or t
  misc_feature (604)..(604): n is a, c, g, or t
  misc_feature (608)..(608): n is a, c, g, or t
  misc_feature (624)..(625): n is a, c, g, or t
  misc_feature (627)..(627): n is a, c, g, or t
  misc_feature (632)..(633): n is a, c, g, or t
  misc_feature (639)..(639): n is a, c, g, or t
  misc_feature (643)..(643): n is a, c, g, or t
  misc_feature (819)..(819): n is a, c, g, or t
  misc_feature (832)..(832): n is a, c, g, or t
ccaccmccttgtcaagcctttnnnacnttnnnnncngnnnnccnntnncncttccatcttttttactttcgataaataatatctttgtgtatatgtatatatagatagatatacttaatcaataagtcatttagcagggtttttacattttatactgcattcatccaaaacagctctttccagatcgataggatgcaaatgaggtaagaattaaggcaaacccaaaaggcatgcaaatgtagtacatttatattcactgataatacaagcttctgtggtgtgtggaccagacacaggagccaagggtccctctgtgtctgtccaatagtattttacaggagggtagtgacatagcttataattaagttacattaccatgggggtctcagtgctactaacattatgtaatcaaggagatacgagcattagcaaaacatgaacaagaagtcatataactctttgcagcacatttctgcccaggctttggcggaagagggatttttatgaaatgatattacacatatcacattgtggcaggttgtttgtyttgttttatatntgacttttananttacnttngacnnntgacnttacacntgacacnacgngtgctttacamacacnngnagacnngtaacntttntaggtwgtaacaagacaataatttgtrvtgtgtgtgwtrtrtatatatwwtttatwtatttttttthtwtttttatttrmtgmagamtgtaatkgaaamwttgaraatttttgttaadgtaaatwaaatttaatataagabamattwatkgwttgwgaaattrargttgttawtanwatggaggggganamactttgacgaatwytttgwatwmawamtgtgtaaactggwcywctttgtacttawacawctkraykgtaawcttgwctacacrmtrmacrgrcgwcaggacaaacacatacatwtacaacatgaacacagwaacyaacattttg

SEQ ID NO: 216552 - DNA, 676 bp, Homo Sapiens; identical to SEQ ID NO: 44760

SEQ ID NO: 216553 - DNA, 854 bp, Homo Sapiens
aaaaatcattttattttaaaaacaaaagagggaatggatgcagaagcccgtctgggctctccgtggagtcgccccttcccaatggcgatggccgctccctgtggcctcagcttcctccgtggaatgaaggggtccaggtgacaccttcctcgaagggtgggcgtgggcctgaggctcccaagtcggccaggggctcggcctggctcagaagaggtgcttcacatcaacagtggtacggggtggccgctgggccctgggtagcgtggggtaggggtcgggggaagtcgctgtagggcaggctgaaggggtagaggggtctgtaacgtgagtcctgccagagcagcttgtcctccaggaaggcgacggtgggcagcgtcaggaccagcgtctggtgcttgagcatgctgtgcacatttaggccaacagccgggatcaagttgaaggtcttaagcctagaggtggcctccacgatgctctgtggcatctcctcgtgtgttaagtccacgaggagtacggagtccccccagcggcggtagtgcgccagctctgtcaggtactgtgggtctccgatgggcagttctagggagtccatgatgtgcaaggcgtcctgggccagcttgacggtcagtgccactttgagacccagcgcccgcactttaatgggcagcatggactagtaacttggggggccccctgttggccatgggccaacacctccttcttcgccaggagcggaaaagcggattgcttgccattgtccggggcacctgcccagatggctcttctttggggccaggggttttccagacacaccgtcccggcaacccttgggtttctcagtatatgggtcttgg

SEQ ID NO: 216554 - DNA, 1000 bp, Homo Sapiens
  misc_feature (978)..(978): n is a, c, g, or t
gtcgaagagctgctagaggaagctctgagatgtgtgcagaaattgaggaaggagcagagggagtgacagctagagaccaatacgggcatttaatcccaactaaggtagcctcaggaccccagggtctgtcaggggccaggaagccctcctttcccagtccaaggttgagagggtcctgtcatttcctgtcccaagtaggtggttggggcatttaggcccagccatcagcaaaataagcacagttgatcttgagcttccacttcctctggcctgatcagttccctgggcctcaactatttccacttttcccatagtaacttcctagggcactgcagccagctgaagctgagaccagttcaagagctggatgcataacacatggctctcaaatttcatgcacccccctctgacaagtgaagattttttgcagaaatattttttcctttagtgagctgatgtgtgaactggttaaccaacatgacccccacccactgctacgtttgtgaagctgattccctccaaagatcttgttaacggaatcagctttttctaaaggtaacgatgactaaatggaagacagaaggtgcatgtsaagttcttgggcacatactatgtccccagtaaatgagtatcatcagttagactcttctgagcggttcaagttgaattttacaaaatttccatcataaaactgggtattggaatttcaggacaaaagcaagacaaacatggttcatattcaggacaaatcatcaaatgtgaaccctcttaactcaccattgttacccaaatgcttggatgtgaactagttatgagttttaaaatcacaatgttgcttgaaagaagtkagcyacaaaagratgtgtwttattctgtytwcatagtttcaaatataagttaaacaaactatattawttaggaawcatwcmtgggaatmcatataaagcaggcagtawttctrgggggraaggghtktcnggrggrgggscmaggggggttt

SEQ ID NO: 216555 - DNA, 812 bp, Homo Sapiens; identical to SEQ ID NO: 50731
  misc_feature (65)..(65): n is a, c, g, or t

SEQ ID NO: 216556 - DNA, 814 bp, Homo Sapiens; identical to SEQ ID NO: 54373
  misc_feature (22)..(22): n is a, c, g, or t
  misc_feature (65)..(65): n is a, c, g, or t
  misc_feature (773)..(773): n is a, c, g, or t
  misc_feature (791)..(791): n is a, c, g, or t

SEQ ID NO: 216557 - DNA, 933 bp, Homo Sapiens
gtgcacaaatgtgaaaaggaagagacagagggaccaacggagacacagagcaggcaatgggcgcacaaaccggtcgtgtgtccttctcaagagctgcccaactgggagacagtcccacccacctcaaaggccctttagcagagctggggcctgcatctcctccaggtctgggtggcctcagggtggaaggcactctccctgccatggctcccctaagggctgggcctctaacctgtctgcatcccagggtgatgcctacacagcccagggcttcataaatgcaggttctcatgaactgacccactcagcagctgcctccccaggagacccacgcagagtgagggaccaggacaaaagggcttcatggggactccctaggtattattgctgtgaataagcataggccattgtgactcactggcattgaagaggggacagggcacatgggatgcctagcagatgtccgaagcagttcaaccatgcagggcaacacattgcaatctgtaactcagagatgctgccatgtctagtggagagaggcccaggacaccagaggttcatgaacagccagcaaacactccccaccagcacccttaatgcttggcagggctgggattattccaaactttgagtccctggccactaagggattggggccctgatacccaaaaaagcaagaattgaagtctgggctatccctggtgagatctgaacctgtagatcccgtggtcaggccatgggttgttgccttcctttgctggaggtttgatgccttatgaggggcaactggagaaatgggacacctagatggagcagaaacacaatgctggatgttgccaggcacacaggcatacccccaggacctcctgcacttgggaaagtataggaccagaaaggaaatggtgcagggaatgccacaaggcamttctggag

SEQ ID NO: 216558 - DNA, 959 bp, Homo Sapiens
atcagaagctgttccaagcactttatttgctttatctcagctcctctcagcaaccctatggggtaggggatatggtatccctgttgtgtagacatggaagctgaggctcagagagtttacatgcaagggcactttagctaccaggctgactccaaaatccatattcataagtgctagactgtttagctactataaatccctgtaaagtagtgtcactagcctgtaggaccaggatcaaaacaaaacaaatggccacttcagaaatcttgccttcatttgttgccacgatggatgcaagtaatttttctttttggcaggtgctgtgctcttggctcagtaacagcccaaattatgaggagatcaccaagtggtacctgggttggaagtcgatgttctcagaccaagtgctggcacatccatctgtcaaggacaaatttaatgaggcacttgatatcatgaaccgggcggtgtcctccaacgttggtaagtgaggattcccattttggatgtcctggccccaagtttcagattttacacatgtaaatgacacagaatcagagttttctggttcctgtaggcagcctaaaccttaggtcacacttttgcacatagcaacagactctcaccctgctgactggggtacatggtcagctggcacccactgcccaggtctaccatgactgagaggggcatcttccctgagtggagactgacttaagctggattcagatgatgtcagtctaaccccaggccccgccctcttaaccactgtgctgtgtggccttttaaggctcattcatgcctgagcatgctgcttaggtgacgcatctkacagtgtggagtttggcacgcggtctgacacttggtgattgctcagccttaatcagccccattttacctgttaaacagtgagatctactttataggctaaaagggrgagtragtdcatgcttktgtat

SEQ ID NO: 216559 - DNA, 855 bp, Homo Sapiens
  misc_feature (34)..(34): n is a, c, g, or t
ttattccatttttccaggtaatacatattaactntaagctaaaaacaatacatagttcttagaaaatcaaccccgaattattgtgtggcctgggctttgtgattatgtgcccagcctttgttcctccagaattttaaagtgaatgcagtgctcaaaacaaacttacgatagcacagggaaaccttccctaaataaagttttgttattagaagagaaatccaaaaagaggcctctactgccttcattcaagtgtcgagaatttcaaaatggaaataatattaaaagagcaatcgatttttttccatctcacactagtaggcttgaaggaggcaaatttggaccaaaaatctagacatagctccttgcatagggtttgatattaagcacacacttgcactgaataactccatatccaccctatagtacaaaaattcatttcaaatgcaaacgttgtgcaatgaccaggtcatatttttaagatcactctttaaaatatcattttactgatcacaaaattatataataaggatcttatatgggttaggtattaagtttgataccaaagcaactatagcatcaagctacataaatattagcaccattttttatctagtccagtgaaatgtaaaactatccatcaaactgttttttaccaaagcagtcaacaagaaaaattgttttacttcctgatatatgctttgctcctccctcctctttgctaggaatacttttgaacactctaaaagaagtacagtcggccctttgtattcgtggagttctgcatccatgggtttcaacccaatccaaattgaaaaatatttgggggggcaaaaaggatgggtttcactctgcgct

SEQ ID NO: 216560 - DNA, 893 bp, Homo Sapiens
  misc_feature (553)..(553): n is a, c, g, or t
  misc_feature (571)..(571): n is a, c, g, or t
  misc_feature (616)..(616): n is a, c, g, or t
  misc_feature (638)..(638): n is a, c, g, or t
  misc_feature (736)..(736): n is a, c, g, or t
  misc_feature (770)..(770): n is a, c, g, or t
  misc_feature (787)..(787): n is a, c, g, or t
  misc_feature (828)..(828): n is a, c, g, or t
  misc_feature (848)..(848): n is a, c, g, or t
  misc_feature (862)..(862): n is a, c, g, or t
acggtttggccgaacacttgcagaaattaatgcaaaccgagctgatgcagaggaggaagcagctacccgaatacctgcttagttcctgaaaaggggagtgtaactagtggatttgggaaaggttcttaagtagatcctgagactatttgcatgcttctgtctaaatgataattaaaaggaaatttcatggattaaaccatgggtttaatgcagcaaggaaacttacaatgtccctttatatataacatgcatcttgttttggatttgtgtcattttttaatatagctgattgacttcacagaaagcagcttttttgaattctaatacataggtgtatatttggtattagttattttgagttcttttcaacttataacactgtatacagttatttctaaagcacagatgaaataagttctgcatatttttaaataatcacagttccctgttatacagataatgttctcactacccataatatgtaggaacattgtttctccttagccgtagtatgcatacacctatccatgttcattctgacatcctttgttgnctttataattcatgtggnagttacctataaataaaaacaaatatgcgttaacttttcaaattntcatttttactccttacaactngaatttttccatcttttataaaatatattttttccatatctttctttaagctcctgctgtgagcagccatctcaaacctatagagctgtgtaccctanaataccatgtggtatatactatagatctcccagngcattatgaattgatgnctagatatcttgtggggaaaaatttcccctaggttactttngcttactacttatatctttncatctaaactattncctagaagataataaaagctgctatattttt

SEQ ID NO: 216561 - DNA, 739 bp, Homo Sapiens; identical to SEQ ID NO: 42208
  misc_feature (613)..(614): n is a, c, g, or t
  misc_feature (617)..(618): n is a, c, g, or t
  misc_feature (621)..(621): n is a, c, g, or t
  misc_feature (624)..(625): n is a, c, g, or t
  misc_feature (634)..(636): n is a, c, g, or t
  misc_feature (641)..(641): n is a, c, g, or t
  misc_feature (644)..(644): n is a, c, g, or t
  misc_feature (646)..(651): n is a, c, g, or t
  misc_feature (654)..(655): n is a, c, g, or t
  misc_feature (658)..(660): n is a, c, g, or t
  misc_feature (662)..(665): n is a, c, g, or t
  misc_feature (678)..(678): n is a, c, g, or t
  misc_feature (681)..(681): n is a, c, g, or t
  misc_feature (687)..(687): n is a, c, g, or t
  misc_feature (689)..(689): n is a, c, g, or t
  misc_feature (692)..(692): n is a, c, g, or t
  misc_feature (694)..(694): n is a, c, g, or t
  misc_feature (698)..(699): n is a, c, g, or t
  misc_feature (710)..(713): n is a, c, g, or t
  misc_feature (724)..(726): n is a, c, g, or t
  misc_feature (733)..(733): n is a, c, g, or t

SEQ ID NO: 216562 - DNA, 882 bp, Homo Sapiens
  misc_feature (837)..(837): n is a, c, g, or t
ataaatcctttttattttaagaccgtttgaattaggttttctgtgatttaaaaccaaaagatccctaacctatatattcatcatacttagcccattcctaccttcccacaggatagcacagggaatacaggtaaggtcactacagatttattggttacactaaagcccagggtatcaagctgaaaaggtcagaggcagcaaccaggtactaagtagactgggtgactcagctgtctgtacagaggagaatggacttccttaggaaaagaatagccaaatgagaagcaagtgcaaagaagggcctctactaggcaaagttaacgtagggatataaacactcttccccacagacctgtatcatgggggtgttgcttttgggtctttatgctcctgggataaggaactttgaagcacatgctcctttaagtctttattaccctgtggtgcagtgtctacctctccctttgccaaaggaaaagcctccttttggcttctgctgcccttgatgacactcacttttgaggggaccaagggaattttatcttctgcttctttggtatgctgggaaccggggccccttcctcctttggaaacagtaccatctccctgaccctgggcaagtactgcccccttttcagcctctcccattggccctggcctctctgcccctccagctgagttgccttcccctcctgagccccatgtctcccatggtaaccttgaggactgggcagattccatggcagctgctgacttgagaggggtagaaatcctttccccactttcacctgacttttttcgagggcgcccccgtttccttttggcatcacttgctgnatcctctatatcctgctttgctgctttagctgggggagcctgccc

SEQ ID NO: 216563 - DNA, 875 bp, Homo Sapiens
  misc_feature (30)..(30): n is a, c, g, or t
tggcaaatagattaatgcagagtgtaactntaattgattgatagtggctgcctagagtgctgtgttgagtaggtttctgaggatgcaccctggcttgaagagaaagactggcaggattaacaatatctaaaatctcacttgtaggagaaaccacaggcaccagagctgccactggtgctggcaccagctccaccaaggccagcgaagagcccaaatgtgagagtggcggtcaggctggcaccagcactgaagccaccactggtgctggcactggcactggcactgttattggtactggtactggcaccagtgctggcactgccactctcttgggctttggctttagcttctgctcccgcctggatccgggctttggcccagggtccgatatcagcttcgtcccagttgcagggcccggcagcattctccgagccgagcccaatgcccattcgagctctaatctcggccctagccttggcttcagctgcagcctcagctgcagccttcaaatccgcttccatcgcctctcggtactgagctgcccattccttgggatccttcttttgtaccttgcaggcaaacttgaggactttcatcttgctggtctcatagtaagagcgcaggccccagaagaactcatattcagggggattgctattggggactctggcatagtccaggtacttttgcttcacaaactcatcagggatgagcttcttaacgtcccccaagagtgaatgatgttatcccagggcgcaagcccaactttggcagaaccttccagatgacagcctcactggaccgattttcattcatggaagagatgcttaaaaagccctatgagccgcacccaccttggggggagtcccttaatc

SEQ ID NO: 216564 - DNA, 751 bp, Homo Sapiens
tgttgccactgtttattagggccctgaacgggtggtgcgtggacatgcaacacactcgggcccacagcagcgtgaccggccgctcccaagccccgggcgcacaaccacagccaggagcagcccctgccaccactgggccaccgtccagggccccacaggaccagccgaaggtgccccgggccgaggccagctgggtcaggtgtacccctagcctggggttgagtgaggagcggcacccccagtatcctgtgtaccccaagttgcccaggaggccgagggggccttgggctccatctgcactggccaccccgtgccaagcatcacagctgcgtgagcaggtttgtgtgtgagcgtgtggcggggcctggttgtccccttcctaaggcgtaactgctataagcatctccacctctcccgctcgggaaaaagccacagagcctggcgatgtcctcaaggggtcccggtggctccagtgcacccagcacacctcagcgcctctggctggcaagccaggagaagaaggtgcgaggccgtgggcgaggtgcctggaggacgcgcatggtgcgtggggagcgccaggctttgatggtggcgtcgtcgctggccgtgagcagcagtttctgctcctggggacttgaaaccactgatttgaccacattcttgtgcccgaacctgtccagacagatgttgtagtgggggtcccaaaatgaacccgtgccggttcttccgtcctgctggccacaaaagccct

SEQ ID NO: 216565 - DNA, 910 bp, Homo Sapiens; identical to SEQ ID NO: 42712

SEQ ID NO: 216566 - DNA, 924 bp, Homo Sapiens; identical to SEQ ID NO: 51745
  misc_feature (7)..(7): n is a, c, g, or t
  misc_feature (26)..(26): n is a, c, g, or t
  misc_feature (31)..(31): n is a, c, g, or t

SEQ ID NO: 216567 - DNA, 766 bp, Homo Sapiens
ttaacttaatttttaattttaattacaaaaaagatgagtctgagaatgcatgtacagaagttttaaatgaatcaacttgtcatcaacagctttagggatcagtggagtggtcttaacagtccttgagttcaggctggagctggcagggaagatggggagccgcagacagcgtcctgtgctctaggaacacgggtacctgcactcaagccttaggaggcacgggggtccactggagcctaagacagatgtcctgggctgcctgtcgctcgcagctagctattgtttcctcctgctttcctccggtcctcacctgagctctgatcgccaggggaaggagctggtgtgaagtactcctcagggagggagaagctgtctgtctccgtctctgcagagctccccccagttgggcccgtggagtgagggctccaggcctgctgcacggggatgttctggctgctccgggccctccgcggggaaggctgaatgccgtccttctgctgtgctctcgctggggaagaggtcctgaaccaggaggatgagggcaagcaggtcggccgggcgcagggagctggcactgtggtctagagtagattgccagcagcttggaatgcacgagcaggaaagcatgcatggtcctcctagcctttctcgtttggggcttggtgttgacaagcctgtgaggacttgcccgtttcaacgccctttatgcaccgtcttcacagaagctggagggccgcaataatttctcttccagggccttccacgg

SEQ ID NO: 216568 - DNA, 876 bp, Homo Sapiens
  misc_feature (6)..(6): n is a, c, g, or t
cagggnccaaatgctcccctttattagtggttactcagctaccaaagacagacacattggctcaggcagctcaactgccagctggggaacatccagctccagaaacagggagcagcagcggcaccaggagaatggcaaagcaggtcactgggaccccagaactgacctgggccctccttcacccgaccccaggccagaccttcctacaaagatgaatgtgtgccctgcccccacttctcatactggttctctccccgggaaagtgcatagttgcctggagatgcagcatcccagggcctgaacaagctgggccacacaccgggatcaggcttcccaagggtagagccagagcatggccatataggtccaagccaaagaggcaggtaggacaggaaactgattggaggtaacatccaacaggtcatggatgctaggcagggagctggatcacaggcctcctggagctaccagagagagaagggaaagggagccaaagttctggggtaggggagaggaagggaaagggaagaagggcctagacctaggtaccttttcaggtaccagggactgtgaccattgctcccaagagagaaaatgggagaggggagaggcaattatattttgtgcccaaacctaaaggaccatcaggaagagaatttccagaggcccctggctcaggatggcctgtaagcctaggtattgggttcaagctgaagccaggcccgagtagccaagtgggggtttggatttttgtcccaacagcttaggcaagcttttggtgggagaagggaaagggggaaaagggccaatgctcttttgggcgagaacccattcccttcaagccccgtaaaaggttgggcctttaccacgcatttt

SEQ ID NO: 216569 - DNA, 918 bp, Homo Sapiens; identical to SEQ ID NO: 46840

SEQ ID NO: 216570 - DNA, 1000 bp, Homo Sapiens
  misc_feature (528)..(528): n is a, c, g, or t
gaagtcatgggtaactgagagtatcacatactatctgtggcttcacacgtggaagatgggaggctctggaaggaagaggggattgctgaccccttggcctctccccactccttctctctgtctcttccctctctccagggggtgacatccgttcaccacctaggaggggagctccttggaccawacagcagacgttgtctgggtgacaraaatggagatgttcagcagaacagccgtgccatgagcataggactgacatcttccccctgtggtgtctccttctgcaggtgccttattaagtggctggaggttcgtaaagtgtgtcccctgtgcaacatgccagttctacagctggcccagttgcacagtaagcaggaccgtggaccccctcaggggccccttcctggggcagagaacattgtatagcttaccgcaaggatcagactgttgctggacacgacgtctgtgtggagccaggaggaacacatgtggtgtctgtatggctgctctctacctaggacaccagcngccacttcttttgcctcaagaagaactcttgggccagccaaactgggaactaggtgtctgggtcttgtgacaaccaaagcactttgacactaccccctgccgagagaagaggagtggatgagcctgcgggtttgcctcaagaaacttcatgagggtctcttactaactccattacactctctctcctggagcctcawctccatgtcaagcaggagggtaaagaagggaactaagagcaggtctttcaagccacacccccacctgcggatggatgggtttctctgtaggccatgcaggcytttgtcgcagcaaamcttcccagcarcccttgagccaartaaaaacagcaccamcagccaccagtggttggtgaggcgtacccmcaargctcatgttgtwtgctttgaaaaggcatctkgcttkgagtrcatttcctcgtcmccawtccccycaggttaaaaactgccataaa

SEQ ID NO: 216571 - DNA, 900 bp, Homo Sapiens
  misc_feature (74)..(74): n is a, c, g, or t
tctttaatgcatttttaataatttttttgcctcatttaccagataaatcatctaaataaatagatgctatacangtctcttaccaatgtcagtacaaaaataaaaccgcgctctacatccactctgactctcccagcacacacacactcagcaaaggcatgtgcttggaatcaactcgtgcccccgacccctcccagatacattcatttagtctgaacaaagctcgaagctcattctgtgcaaaggaagcgctcttgtgctgagacctggtggccgcagctggccacttcgaaagcaaaagctaaaccacctcacagaagcacagcgcctgcccccagaacaaggggacaggaggagcttggcaacgaggtcatcacccgaacagcagtgacagtcctgcattccaggcggctgtgccaggggtgggggtacctcctccgcaccccccaccacaaaaggaaaagtgcccacgggtctctacattcaaagcgggtgggggctgggggaaagaaaggcagatgggcaaatgctttctaaaccctccccccacccccaagagtactggccttttaagagggctgcgggggtggagggcactgtctgccttgctctactgggccactctgggctggaaggagccttcacggccacagccgtaggcgaccttcaagaggtcacctgtcctggaggatggtcctaaaggcccaaagtcttttccccagggagttgtgtacctacagccaatgaccaccgggttgccctggccggtaacttaggccccctgttccaggtcacccccttgggttcagcctccccggaccagtggttcccaagggcctaaaaggggtgtaaaaagaaaaatcgcccctctttccacaaaaatataagcggccatcaccc

SEQ ID NO: 216572 - DNA, 834 bp, Homo Sapiens
  misc_feature (505)..(505): n is a, c, g, or t
  misc_feature (690)..(690): n is a, c, g, or t
ctttttttttttttttcgttaccgggcctagtgcacgatggtgcttaaaaatctcaaatgcctcttcaatgtctcctacattgagactacctttttcctggccaagacgtttaacctgaatttaactatgataaataatgattaaagaaatgcattgtatggggcattctaaaagatatctggcctagaagcttcaaaaatacaaatgtcaagcaaggaagaaaaaggcagggaacagttccagattaaaggagaccaaagaatcacatcaactaaatatagtatcaatctttgattaatcttgaaatattttttaaacagctacagaagttgggatcaggaaaatgttctaaaattagatcgtggtgccagctacacaatttggtaaatatattaaaagtcactgaattgtatactttaaatgagtaaactttatgctatataaattatatttccataaaactttattaaaaaagctatatggtgaatctttcagacaagaganatctgaattgaactatgtattagaatattttaatcaatgttacacttctttggggtactggaaccttttctcccaagagattgttagtgggaatgtaaaatggttcagctgccacagaaaacagtttggcagcttcctcaaaaggttaaacctagagttaccatatgacctaacaattcccctcnctaagattgtacccaggaaaactggaaacacatgtccatgccaacgcttgccatttttttccctgttatgcaagaaatttggtctttgccggcttttggctgtactccacatttggtttccccattaaataaaaaacctttcct

SEQ ID NO: 216573 - DNA, 975 bp, Homo Sapiens
tcaactgatgagcgtgccagccttgaggaaggacagagtgcgggaagcagagtgtgggaagttggaaaaaataatctgcaaggtaaacaccttcaagtcaatttcaagaggctggctagaaaccgccaggacttcagggggccctgtctcgcgggtctccctgcgccctcagcactttggcttggtataaggccaccttgtccctgaagagaggcctattttaagctgagcaagaaaaggtgagaaaractaaaatcagctttgtgcagagacgccaatttctgctgcacacatggaaacgatgtgcacatacagcaagctggcccagctcccggccacgtggctcacactgtccgtgctcacccacccgttgccttcacccccagcagcactggttgtgaaaagggtaactgcctgagccaccccaccactgcgggcctgccaaggacaggcaggaactcagccatgccccgcaaggagcccaggggcatctccagggacggctccccagcctatgggctcgctccctgagaggccgtgctcgggctcgcctgctcagctcactccgaaagcctctgctcagacctgcacccagtcacagcagcacagatgtgcaggaggagaccatttccacggaccctccgactcctaggaggcagtcccttagggactggccctaacaacaaatgaggagaagccaagttctctgctttctgcagacagggcctcccctggatgggatcttcctctgaggcgagcttcagatctgctcaagcttcctgcagtggggccaggaggcagggcctgggcaggggagaccagaacctctcggtgatgcctccgaatggcagggctcagacacacacacctggctgggtaagtccctgcagtgaaaccgaracggtcttttgcctgcamagcccgggsagamtctstctcacggkgkgcgrcatccaagtttyaaatcacargacc

SEQ ID NO: 216574 - DNA, 1000 bp, Homo Sapiens
tagtccatctcataatccatactaccagcrtcaaatgtccttgagtgcaagakagcaatcgtcatcacccacgatggccctggaccaaacgaaggcagtttgggcctataccccaagtcaatatggtggcttccatcatccaggatggctgccctgcagagtccagtgtggtagctgatggcagttcaggatggctgttcacatggtccagtgtggccccttgatcctctctagcgcatagaagcttcctctgcatatgatgtatagcagctcttttcctccaagtcctcttgtttgagaatgtagtgggcagactagatccttcttggcccagccaaaggagcttcagccttcagaagccaaggagcatgggagggaggagacatttgccagtgcccaactctgggctcctcctccatgtgcctacggcaggtgggatctccccaggtggaacgtctacccctgtcgggaccttgttctggttccgcttggtcccatgtggccaggccctcaggggcctaggcttttcatgctggtgcctgtgcccgcagaagctgagctcagggcctggccaggacatagcggctggcagctgagaggtcccactggtaatgctccaggatgcgccacagtyagctctggaccggctactcaggtggaagagctgatctaccttgaggttccggatggcagaaaccacatctcccccagtggctcctagtgctgtctggcactcctggtgggtgacccatgcacactcagctccatctttcatcctctccaggggcatgttcctcctcttggccccgtgctgggggcgcatcccaaaratttgccttctttctgtcttcatctatgcttcctgggtgttgatctcccgggccaggggttcctytgtkgactggacgggtggtkggaacccccgcmtytkcmacsttactbcgagggtkggaagtkccmmtttaargkksramatttgccctycaaatttggrgygggg

SEQ ID NO: 216575 - DNA, 889 bp, Homo Sapiens
  misc_feature (638)..(638): n is a, c, g, or t
  misc_feature (676)..(676): n is a, c, g, or t
tttttttttaaaaaaaagaaattctggttaaaagtatttcagaccaaaaggaggtcataaaaactgttcatataattactctatgagaaaaaaatccctgtatggaaaggggcactgaagatctggcacagagaaacaaggggagacagggcagtgataagatccagccctatttttctagcatgcatttacgaccttgtggatatgtctgtactgggtgttaatagccccctccttgtatttaaaaaaaaaattaagaaattaaagtgaatctgtgtgctaatgaagtctgcagttacagaatctcaaagccaagcctgtaaagtctgtaaggcaagatctttgtcatcagggacgggaagagacggataagataatggtaggcactaaaggctggttcagccgagctctgggcagaacagcctcaaaaataaggcaactgtggcttctcagtttgagactgccaccagaaaggcccatggaagcaggaaaaaagagccactgatggcagatcacaggaagatattcggatagggcaatgatcacagttagatggcaggactcagggtctcagggaggcaggaaaccgtggaactgacactcaaggggaatgtctttgcaagtcctatgcacgactncaagcagcaatttctggggtttggagatttgttagttntgcgacgtattccccccaaagaagacatgaagtggccccctggagagtgagaccaccaggcagaacctcaccagcgtgagctgatgagagtggaaggacttctggggacccgctccttcacgttgctgagtctacaacgttgtaggtcccagagagctctgagtgggcagtatggtcacgtctgcaggcatcagcagaggggtgagcacagcc

SEQ ID NO: 216576 - DNA, 889 bp, Homo Sapiens
aaagtgggcctttatttttcaatttgtatagcaaaaccagcctaagtgaacatggatgctcttcaatatttttccagtattaaatgaaaaaagacctctgccccagcccacatttcctttgttgaatgagtagagaagactgagaagtatcactcacccgtgatgtggtttgtcccttttccagccagtgtgttggtaataaaagtcacctttcagagctttggtccctgtaatgcccgtctttcctgtgtccaggaataacctttgctactaggcagtcctctgaaagatttgtagaaggttaaagtggaaagggacttggaagctcatagaatccatgcctcttcttttagcatcaaggaattagaagtcctgagagatgaagaatgttgtcttccaactcaaaccatttctgaagccatttccctgttactgcattgcccacaacccttccccattgctatcctcatcctgctaatgctgtttttaatgactgacagtctgatcttgtctttggcagcaaacattttgcttcacagattcctacttaaggctagagaggggctcctcattgtcactgtacagagcaggctggtcagctttacacaggtgtcagatgaaccgtcacagccagatttgcatgtttggcctcaggagggcttcaaggtccaacatcttgacgtaagaagcgtttccagttctttcatgctcaaataacaagggctaactggaagctgtttcatcccaaatcccttatttgagggccttaacatttattccatttttcgccacaagggtgtatgcttggtaaccctttttgccccaaatttaaagcttgactgagccccctgctctaaaaggggtggagggagattttggccattggacc

SEQ ID NO: 216577 - DNA, 914 bp, Homo Sapiens
gaaaaaaacactgccactttatgtattattatgttggggaggaatgataacagggaacaagaagagaagcaggggttaatccactcactttcctctttagagaagctccctcacccatcccaacacctcaagtcacactcatgaagatagagacagtcatttgggagatttaaagggatatcctcaaaacagaacaccagcctctcaccaccagagatgaccggaaatatgttttctcttcttccttccctgcatcaggggaagaggctggtgaagttggtgagcatcagctggaccagctgccctgggtagagagcatgggctgctgggtcagatgtctcctgctctggccgaaacagggttggtccaaacacaattcccaggttgtggggtgtcatgcgattcttatctgagtgtgctatcaccctgcataaatgctccaggaggtaccgtagagtgtcatggttgggctttggcattgagcctattaattcttgtatctgagagaggcactgctctgattcggagagtgcaagggcagcacggaaatggggcagcagcagtggtggcaccagaggctggggcagctcccggagaaaaagcttcagggctccggtgaccacatgaatgtcatcccactcagtactgtccaaatttaaccgaccttcttgtcctgcctgtcttggaacacataccctccattggaggtgaccgcacgctttcttcccacataaagcgaagcttctggaccactgcccagttcccgcttacccggataatgcccctcacatcttaaaccttttttattcccagcaagcaatgcagagccccacaaagctttggcacccggggtattctttcccgcttggcgaagggtgatttcatactggcagtcctgaccccttggctctggg

SEQ ID NO: 216578 - DNA, 905 bp, Homo Sapiens
  misc_feature (2)..(4): n is a, c, g, or t
tnnnagtttctaaggaatgaatccccgagctgtggcaggaaggacacagccggctcctgacgcacacctgatttgattcaacaccgagtcggcacagacacaaccagagatggcctgggtccaggctggggctgcacgggctgtgtcctggacagccaggagggaggccccgcacacagacggccgccgggcagggggcctgagcgggacaggcctggccacagcccatgtccttggccttccacataggtgcacacattgtctgcccagagagggccaagatgccccaggcaccccttcgctccgggggctcaggacacaggctcccagctgaggccacgcctggacccagagctgatgtttggctgcacgcgagcccactcgggacagacccaagaacacgaattctgtccctttggatttaaggctggtgttttttgacatttacttcagtttttctctctgaaattaaaattacctgagtaaaagattttaagacattaaaaaagccaaaaacacagaatccctgcaggcagacggtgccagggaggtggcggccagggccaggatgccaggggcacggtggggtcggctggagctccagggctgggcctttcccagtctcgcctgccctggagcccccaggagccgcccctgggccgacgctcctgtggccggagcacaggaaggcacagtgaggtagggacagtggccattgtcccccgcctgccaccagggctgagagggcagcgcacgcctcggcccctcctataagcccctgccccctcggagctgggtgtcttgtccagaagccggggacggccctgcagtgtgggaggggaggggctgcsggagcctgagctcagacagtkaaatwatcctttatttgggtgggctgggggagg

SEQ ID NO: 216579 - DNA, 1000 bp, Homo Sapiens
taataaacggttgaagtataaattttgaaattagttaccaaaaatcatttactaaacagtagttttactaaaaatactaggattgggaaaaataaacactaatagaaagtactccaaaatgttaacaacgtttctatgggcattgggattgggggtggtttatactttctcattttctgtattaccaacacttacaattcacaatcaggagaaaaacctattatatgatacttaaaacattaaatctctgattgtcacctataggaaaaggcaactcactatccatttgaaagatccctttagacttctgatcgacctcactcgataactgcacaacctctggacacaaagaggccgaattgtccccccaatttcacctcccctattacccacaacagcagtgatatggtttggctcttgtgtccccacccaaatctccaatagtaatccccaggtgttgagggagggtcgtggtgggaggtgattagatcatgggagcagatttcccccttgttctcatgatagtgaattctcatgagatttggctgattgataagtgcctagcatttcccctgcactctctcttgccaccttgtgaagaaggtgcttgcttccccttcgccttccaccatgatttaagtttcctgaggcctccccagccctgcagaactgtcagtsaattaaacctcttttttttttttaataaatkacccagtatcaggkagtatcttcatagcactgtgaaartggactaatasaagsagtgatsassaagtsttctttagaratgasactacctaggrtatcttagaagaggaatcaaactttcttttaggtattaattgccctcagcaattgtgggttaattaaractgccaaaakaaarrttkgbcgrgagrgttactggcagaggttwtagcccatacaatggsatgaagataarwtaggttttgagrcasccatcatsagggctctytctscasaggaattrttgtgataa

SEQ ID NO: 216580 - DNA, 1000 bp, Homo Sapiens
cagtttgagaaatcctgacctcaaacaattcgaaatcttgtttgaaagcggggggttcagggtgtcctccacacactcatgagcggggaatgacacagagtttgtaacgtggtgggatacagccaaacccaatatgtatagggctgaggtcgatatcctttgggtcaacgagaggcttcaaattaaaatgctgcaaaatggcacacaacaaaagaaacaactccatgcgagccaggccttctccagcacacactcgttttcctgtggaaaatggcttgaaatagtcactgtacttgaactttccattttcattcaggaagtgttctggcttaaacttttctggatcaggaaattcttggttgtcatacaaaacagagtccagagttggcactacgactgtgcccttggggatgaggtatcctctgaaaatggtgtctcgggttgcttcatggggcaggttggagggcacgagggtgatgaaccgctgaatctcatgcaccacagcatccatgtagggcatctcttgcctatccttgatggcagggattcggcttggcccaatcaccctgtcaatttcttcatggagcttctcttcgatctcagggtatttcatgagaatcaggagcccatatctcagagttgtgctggtggtctctgtccccgcaaagaacaggtcggccacagtcacggtgataccgtccattgtgtacaagcgctctgcactgtgcttttccttctccatttccacgagcaggcagtcggtgaggtcccggggacagttggggtccagagattgatggtgctccttcaccctttcagacacatactcttttacttyagccacattttttatgacttttctgtggcttccaggcaagtagtgtagaaagctgggaaaattattgtaaagctggrccmaggaagtcygagtaggtggagtctcattaacaawamatagccttagaamttctcaycwtkktgtcaaawgcttbgggagagg

SEQ ID NO: 216581 - DNA, 870 bp, Homo Sapiens; identical to SEQ ID NO: 55134

SEQ ID NO: 216582 - DNA, 714 bp, Homo Sapiens; identical to SEQ ID NO: 53591

SEQ ID NO: 216583 - DNA, 896 bp, Homo Sapiens
tgttcttagctcactgttcctttgaactccttggcttttgtgctcttcctgcttywstctyttgtgtttttgggactacaggcatgccccaccatacccaccttwttttgamttttctttttttgcatagatgaggtcttgtcatattgcccagtctggtctcagactcccagcctcaagcgatcctcccaccttgggattacaggtgtgagccaccacacccaggtgttgggattacaggtgtgtgccaccacacccagcacatttgtmattccagtyatttgaatgttttctctttttaccctgatatgtttagctaaaggtttgtcaattttgttgatctttccaaagaaccagcttttggtttcactggttttcccagtttctatttcattaacttttgctttaatcttgattacatccttccttttgctgtcttcaggtttagtatgcytttctttttccagtgtcttatggtggtgaatcgattactgatttgagagcyttctttttattgtaggcattaacagccataaatttccctagaagcattgcttgagccttatcccatacattttggtatgccatgtcttcattttcattcatctcaatgtatttcttagtgtattttcttatttctcttttgatttcctcttcggcccactgactatttaagagtgagccgtttgtgggtcttctaaatacctttctattattgactctaatttcattctattgtggtcagagaacatactgtgtattcattctatcattttaatctattgaggtttcatggcctagcgtgcagaatgttcctagtgtagttgagaagaatattctgctgttgtwaggtgcagtgctcatcactggaaataaagatcacaaaaaatgtatat

SEQ ID NO: 216584 - DNA, 771 bp, Homo Sapiens
tcttttaaatgggcattatttatgtttacataaaggtagcaaatgttacataagttgtttccttaagaacatttattttgtacaatcacattgttatcaagcaagacttatggaaaatttcctgggtccacaacactgaactttgaaactactgtagcatcctcttttccaagtttaaacatgactttgtgcactgaagaagtatggcttcgcattgcacagtggtcacatgtgacaacctgacaccaagcgagaagccttttgatgaagaatgttttatcttttgttgagttacaaaatggtactttcatgtgtgtgattatcaaacccatattttttttcagttcatttctgctacaataaaaataaaccagttaaaactaagcagtatagcaatgtaatcgaccaactatctatcatgttatattttatatacgatgtgttaggtgatattgatgcttaatattacacatctgtcatttaatatactttggtcaatacaaagttagaacatgtatggtcaataaacaaacaaaaagatttccctgaacatcgacgcattgttttaacaatcacataaacttaggttcattcctcagaaagcgtggcgggaattgctgacccattaaaaataaaccccatctactggagaacattttctttcaatatacaccattttaatacattcttctaaatgactactactatatacctgtcttcgttactcgccttaaaacacttatccactttgggacacgatcagtacatgat

SEQ ID NO: 216585 - DNA, 826 bp, Homo Sapiens
  misc_feature (35)..(35): n is a, c, g, or t
ttttttaaacagagcttattgtatttaatacattntaaaatttgaaaaattgtaggaaagcagcagacttgaactggagcaattctaacaaggaataattctggccccttggcaaaactgatcagttttaaaacaaagtaaagttcacatctgtgaggtggacaaaaaagtgtgacttctgtacaaactacatttaaaatttcatgtctaacatctttgcaatgtgctcatgagggtttttctgaagtcctgcctggtccctgcctaaagaaagacgtggaacctccatatacaaacaaacttgattcaaggtgttttgtttgttttgtttttttaaaaaaaaaggaaaaagaaagacaaaggaaaaaagaaatatggatggctgttgttggcaatggaaactgtaaggagactgtgtcctcaccactcatggcttgtttatttgtcagaggcctcgggaggcccaggacacttcacggccatcacagcaccaactgcggctgtcaccttttttttttcttttttgcatttcctaccttttgacatatatatatatattttatatattttttacaccttgaggatatcactattccaattgttcccataatgaataccaggtgtggcctttaatggatataaatgtggctttttattccattttaccgtccaggaatttgtttttgttgtcccaactctgacataaaatgttcccttttttggttggagccaattggctgggctgtgttttccctttttgccctaaaaaaaaatgtccatttcaattccaacagtgtttcggcttttattcccgtttgaaggcagg

SEQ ID NO: 216586 - DNA, 919 bp, Homo Sapiens
taagaaagtttattaatgtgtaattttagcaaagttattgcaacaggttgaaaatgcagacacactattacaggctgtaaagtaacaaatgagttttacacaattaaaatattaacacatacttatgggatttgttgaatgactaacagacccataaaagaaattaaatctgagacgaaatccagtattagcacctacaatatctctgacagtgaaacttttaatggtttctctctcctaatgtatttttaaactctctcccaaatacagcgctctcaaaccccaaggataaacgaaaggcataagcagccccgatcctaggaacgtacagccaaaagcagagctacaaatatggactcagacttgagagttttactgagaagtaacttactgtacttgagccaatcataagatttctgtgcactgaatactgtatatgagaaaattctgtgggtcataaggtttgccttagggatagttaaaaattagtaatatacagtattattcctatcaaatttttttctcataagttatatttataacaaaactataattaaaatattttttatacctgcttattccatatccagggacacagcgggaacatttatgtgtctgatggtttggcatccactttattgtggttactgatttttgggatgaacaagcagcatgtatcatatctttccaacattcaaggtaatggaaacattgacataaacactcttcaaagaaaaaactggcaattgcattaacaactgttttaattagaaaataatggttttataaaaacaataaccttatacattttttttttaaatagcctctaacttggggaactgtgtatgtaaaaccgaattttaggatttgagcttggggacaaaccggaatttttttaaaatctgggagggtccaaacg

SEQ ID NO: 216587 - DNA, 646 bp, Homo Sapiens
ttgtggaatcgcgtatgggaagtgacctgccctggtgcatttggctgtttcatcaagttgccaccagcatttctaaggagaaagaaaccatttttagggaaatggtgatttaagataaagccacgaaactcacaaaattcaggtcgtatgctgccgtaattctaaaaatacattttgttttgacttgggtaattttgttcaggagaaaaataattagagacgaaactctaaagcttctggatttgataagtttgtcagtggggaagggacaatgctaccgggttgtttttttttgattttttttttttttcgagatgaagtctcactctgtcatccaggctgtagtgaattggtgcaatctcagctcactgcaacctttgcctcccgggttaaagtgattctcctgcctcagacttcctagtagctggggttactggcatgtgacaccacacccagccaatttttgtattttttagtagcaccagtgtttcaccatgtttcccaggctgttcttcgaacccctgacatcaggtgtatccgcccacctttggctcttccaaagtgcctgtttttatcaggccgtgagcctcccgtgcccctgcccctttttctttgggaagaccttaactggggctcatttcccggg

SEQ ID NO: 216588 - DNA, 1000 bp, Homo Sapiens
cccacaagccttttcagcctgggtgactgaggctgaggagatggggacacatggaacatatggggagggttctggcacagtgtgtcctgcccaaagctgagggtggtggccactggggatctgccctcgcgctggccaaggtctgccatcactccatgaggcagaactctgactcctgctgtcgcatgttgggtaacacatacagagccacagctgcaatagccaagaataccataggcttccacaacccaaacatgttctgcattaggacgacgtctcagcccaccagcaccagagcaaagccgagatgaccaccaggcctacaagaggcaaggagaagatggggggattgggggtaggggatgacttattagcacactttcctttgtcctccggaatggggtgggaggccttgagctctttcagctccagctggcagagcaggaggtcctgctccagctggtcatacatgtgcttctgccgctccagctcgtccttgctggcctggtacagctgcttcatctcctgaagctgagcgtgcgtctctgtgtccttctcattgctctctttgaaggaggccaccgtatccctgaggtgctgcagctctgcctcatggcactgcagctcctcctgcagctgctgctgccgttccagcagcttttccttctcacatgtgacgttctggtgctggaggtgcagcttctgcagccggcacagtaactcctgggtgacactgtgggaggtctgaaaccgaagcacctcattctgagcacacttgagctccctctgcagccgcctctgctcctcctcactgacctggcgatgatgctggtagctcttccaactcacaacacaattcctgacacttkgttcttcatgccatgcatctgctcttcagcatcccgtagctgstgccgtamaactgcatttcaggatcaggytctaagaaatcatttctgaagtctgarmatytctgaggtatmtcagtgtttgggvtgca

SEQ ID NO: 216589 - DNA, 799 bp, Homo Sapiens
tttcgttggaaagtctattttgaaaccatactgatcatgaacacaataaacagggagggaagctcgggctcagccaggaaacctgccacaaggaagatgtttggaactatccaggagtagtgtcaaacactaacaccatatttacaagtctaatttggaacctggccctttttaagtgcaggaggaagttggaggagaagccatgcatgaagtaaaaaatacatatacacagacataaacacccacattttcacacttcttttgcccatttgttccacaaggaacaaatgagagagagaagcccagcctctctccctggagtccgtatacttactacagatttgttagagaagccccagatggggcttggattcaaggagcagacttcactcttactggccccactcacgtgacaattcaccaagggaatgcttgggacacaagcatgaatgtccggaagaggcaagaaaatatatggctcacttaacttacacattacacataagaggcctcagtttctccaagtactttcacatttgatctttagcagacttctaacctgcagagacagagctcagccaagctgtgagacacagaggaaagcagcattttgatccagtgtgcactgggtcagtcactttatccgagacggtcacacatgccagccccaggtaagtcccttggggcttgcagcttgtttctttgtggagtggaaatttgggttttttccttaagtgaattttccctgctgttgcacttgagctccacgttgttcgctctggaacccgagacagctgct

SEQ ID NO: 216590 - DNA, 860 bp, Homo Sapiens
gccatttgcatttataagaaagacaccgttctcagcatcctcagaaggggcagctaagctttataggaggtttcggggattctgattgaacgtaacaaataatagtataaatgaggaagatttaatatggcaaaattcacataatttagaatccagcagagagcacgtgtgggctatttggaatggacagtgaagggccaccttttgcaaaacggagtgactggcaagtgacaagttggaaatacttttctttcaaaagactggttctaacaaatgttgacagtgtggccaaaatcactcccacagctcccattgttgctaaggtgaaaacccttggagaggctgtttcaggcttatctgtggtgcctgaaggcgtcctcttacctacttgtccttcacctaaacacttcactgcccctggcagcatccgctgggaccatcctgggacagagctggctcatgctccagccacatccccagggatgccctcctgtggaacaaatgccatgcatgtgtgcttgggctcatttccagtaaagatacatcacagtctatgtaataatgatgagaacttaaaaaaaaaaacacacacacaaggccaacaactttagaatctgagcagtttctcataatgttaaaaatcatttttaaataaagttaccacattttcaataaaacttattcatcctttcttgaaacagaaacatttggaattaaaacatatcttgtaaaaaatcatgagccctgccaaagagttggcctgggagcttggctccttctttttgtgcgggttccggaggcttaacgtacctcccccgtggtccctggggtggcccgtgtagcaccagtgggggggaaac

SEQ ID NO: 216591 - DNA, 865 bp, Homo Sapiens
tgtaggcattatcaaattgatctgttgtgaaatcggtgctgaattaacattaatgtaactccagtgaaaaaaatgaatttgatcaattattatcaggaataaacattaagccatgacggtgctcaagttatcttctgatgacactgctgtattaaatgtacttttcctatgagaaccttagaaaaataaaaatttctgagtagatcatctttatcttttctttttatatatttatagccatattttaatataataggccatgaggtgatatgtaaacatacataatttcaacaaattttgtcaaataaaatcatatttctagctagaaacttgccttctaatcattttaaatgaataatccaatcatccgtcaaaacaaattttttttttaaatgactgttaaatcctaaccttcattttcccctggggaaatagcattaaaattgttacacaatctgctatagaaagtgggattctctattttgaagccactagcttgcatttgcacatctagcacaggagaatcttcatccagtgatgagcgggttacacggatgaacgctaagctttcgctgcacaggtgcagggccccagacctcacagatttgcctctctcccttgccgccaagggagattccggacttgcacaaaggcgtgaattggattcttaggcttttcagcatttgtacttttccaaaaaaacctcgatgtggctcccgaaatcagggtggcccttcaataaacttcttggccgcttctctttggatagaaaatttgggcatctctttcagtgggccgtgcaatgttctacacagaccgcttcctctgtcttcctaattcattacggtgcaacatgaatgtcccg

SEQ ID NO: 216592 - DNA, 1000 bp, Homo Sapiens
acaacactaacgggttctttgaacaaatagttttgaacagaacagataagagtgagtcgaagcactgatttaactaattggtgatataatcaaatataatttccagtagttaatcagaaccacagtaataataactgaggaatagggtgtaaacaaataacaaataattaaaagccattttattgtcaatactgactgtcatacaactgaaacacttggaaggaaaatcacaagaatccacaaaaggacagattcagagaagtgcaagggacaaagtatctacaatagaaaatcatttcgtgacattgacttctttctgtccagctgtaaaagagggaacacagagtcaatatctatagagcacgtttcaattacactaagaatttaaaaaagaaaaagaaaataaagaaaattattgtattgcagagttttccaatgaccacacaattagccaggactttaagcttcttctcttggycgtcattycccttgcygtcattctgtgacctcctggcygamtctgtgggtgrgrcatcacaagtgtgttaacaattcttggcagtbactgtcagtgctcagatctgtaggctggaaaagtctctgttcgatgaagcttcagagggctggaaacatcttgcaagcggtagagctgtcccgtgctgtgctgccgtgtgatgtgctgccagtaggcgctgcgaggcaggggcacatggtgctcagcgaggcggcccgctcactcatcttcatctggagcatcgagtttttcacactctgtagcaagcgctcgtgctgctcggctatggcmaggcagcagagtggactttctgatagatggcctccccgtctcgggtctgaaagataaacagcccttcaccagtttcacacattctccctgcctcaaaagtgraccacgtagtatcacgtccataccgccgcaggggcttagcgggcmaagaaatgagttttaytctgggattttkgacgtccaaagaaagatata

SEQ ID NO: 216593 - DNA, 1000 bp, Homo Sapiens
caccaaaccatccataatgcacccagataggcccacccccaaaagcctggacaccttgagcacacagttatgaccaggacagactcatctctataggcaaatagctgctggcaaactggcattacctggtttgtggggatgggggggcaagtgtgtggcctctcggcctggttagcaagaagcattcagggtaggcctaggttagtcgtgttagttcttccctgtgctgagcagagacttccagaagcaccagaaacggagccagatgaaaggaccccaacacctccccccgccaacctttgacagaatataggggcatcttcagcctggacacgcatgcatctcccctctcagaccctcagcacttcttccactcccatcaagagccccctcacggtccctctcacactctgccagtccccctagacacccctcctcttctctgccctctctcctgtgccctctctcctcagcccctgttggttccaggctgagatgcgtccccacctgattaggcccaaatctgggctcctcgtcagcactggggcctggcctctgccccctccaggacagggtcagggatggggcctcactgttgtatggcctgggtaccccctccagtgggccaccctgcagcagagggcatgtactgggggcccgaagcagggtggctgtgaaagcagcaataatgagtaggttcccagctgcagccaagaccagtgtggccactgtgcctgccaggcccagggcaggttcctgtgtggccagccaggctctgcgtgatcccatatcagccagcactgcctccagctggaagtgggtgcccagcactgcacagatgtggaataactggtggctgtggccgatgtaatcaaagcgtcctggtgccagcctttcaggcaggtgggaggcgaagaggaagccagtkagcagcsccagaagaratggtagccatggctggtgctcagggcctcctgcccacagccgtggccctgcccca

SEQ ID NO: 216594 - DNA, 494 bp, Homo Sapiens
  misc_feature (478)..(484): n is a, c, g, or t
  misc_feature (486)..(490): n is a, c, g, or t
  misc_feature (493)..(493): n is a, c, g, or t
tttcttctttataaatttttctttgttttttttttccagaggagtttcgctcttgtcccccaggctggagtggtgcagtggcacgatctcaggtcactgcaacctctgcctcctgggttcaaacgattctcctgcctcagcctcccaaagtgctaggattacaggcgtgagccactgcgcccggcctctttaataaatatttttaagtgcatcttccccttcaggctttgtttggagtcccagtgctacaaacattgtatttttcacagcagatgtgttcctgaaaagtgtatagaaacctgttctgggaacctgaatgcttttggaatgcacggggagagtctgccagctaaaggactcctggcaacattctgtgaaatatgaaactggaaaactggatttgtcgaaaactaattgtgcccattttctcacatttttgatccattggggttttttttttttgtttttggtttttttnnnnnnngnnnnnggnt

SEQ ID NO: 216595 - DNA, 890 bp, Homo Sapiens
  misc_feature (672)..(672): n is a, c, g, or t
  misc_feature (677)..(677): n is a, c, g, or t
  misc_feature (812)..(812): n is a, c, g, or t
  misc_feature (852)..(852): n is a, c, g, or t
  misc_feature (865)..(865): n is a, c, g, or t
agcaaaaaaaattcctgtttattgttggacaacattgtttacacatacatcaaacaggccaaaaaaaataaacagcaacttcatagacaaaaaaggaaaaaaaaagaaaccttttatctttggcctttttaaccatctcatacaaaccaactacttatagtacagctaagtacatacacaaaaaagttactggaatgctcggaataagattgtttttctgttgtcatttttgctttttttacaaggttttttttctcctttgagattataatgaacatggtcacaccacaagtaaagtcagaagtaggacagagaacgctccgaaggctggtttggtcatccgagatcattaaaaatggctgaccctaacaatatgtacaaaaatataaaatgtaaataaaaaatacaaacaaatttcctttttaaagtacttttaagaaaaaaagcagggccttggaagttttggttcttttttcctcccctgttgcaaattctcatggtttgggttgggtggtggagagcgcgtgtcatctgcgggtggcactgcccacggtgggcgggcgggcctctctactcgaaggtgaccacgtttagattctgagacgggaagtggagggtgaataggtcacggcggcctttttttttttagtttaacttttccttttttgctgnctagncatcctcgtcggtcttctgcttcttggtatcgacatcggcatcctcatcatcttcagctgcccgcttgcccgtagctgactcagcttttctcattttcatctccattctcttccttaaccataaccttcttcttnctccctctcttccttccccaccttcttcctcttcttgggnctacctaattggncagcctcctgcttccccattttcct

SEQ ID NO: 216596 - DNA, 870 bp, Homo Sapiens
taaatggtggcaactggtatttattacaattatataccagtcctatcttccgttctgaggtctatacatgatcacacaaatgaacatgtgtttcctggggggaaggacagagctggctgttggtcaggaaggccctgctgcctggctcctcctccggagtgagcccccatctcgccatgggattagctgaaccattacacggcaagcgggggcatcggaagcgcagcgtggtttcatttgtctgggaggacgacggggcatgagtggggttggggctggggacaggcacctgacgggtccagggccgggcccagggagggagggggatggcagacaccagagggaccgcagctcctcctccactgaggagtcgggaggcagtagggacgctagctctggccatgcgtggtgtcacggtagtcaagacactcagcaaacacaccctgggcaaggcgtctgtccgggagagggggctggggaggggcttgggccccgaggcttcgctgccttcagcctgacttgagatcaaagccaaaggcagctgcccccggggcttgggccgtgccttggtcctttcgcccaggctagaggaggcccagtgtccagaagtttttttccccaaactgccaacagcccccagtgcagctgaggacaggtctgcgcctttaattaggcatccaacctgccctcaccaggcccgaagggggaagtcaagctttggccccgctacgttaaacctcacaggccctccctcaaggcctcaatgtaataaacctctgcccttattcccccccagccatattttctattttcactcgttcctgcggaagtttcccttactttataatgcgacctggcccatactccgcc

SEQ ID NO: 216597 - DNA, 850 bp, Homo Sapiens
tcaaatatacacgaggtgtttcctttaatatgtacacatttacaaaaatgcactttcacgaggaggggcggccggggccggcaggtgggcagcgcctggtgccacggcacgcgtggacagttgcgaggggtctgtgtgaaggcacttgtcacgagcttcaatactgccgccgtcccaggatgggagaactgcgcagcaggaagggcacttctgaaagcacagtggagagatcgctggagcgggcgttctgggcaggaggaagcacagacggcaggcagggtggactggccagcaagcgcgaggttgacctgccggccttgggccacgccgatgacctcaggccccactaacaaccacaggtgcgtcaacagccacgggccgtgccggcagccagggccacatcaataaccagggtcccaccgaccaccgtaggtcccaccgacagccacaggtcccattgacagccacgagtcccaccgacagccacaggccacaccatcagccacgggtcccaccaacagccatgggccacaccaacacagccatgggtctcaccggcactttggcctggagccacagagaaacccgagtgaggaataaaaggaagattctgttaacagtgcacaacctctgttaacaaacgctacgatttggtgacgacgcatacaccctttgctctcttcttttatacagcgagtgccacccaccggtaactttacaaaaatagcacctattccgagaatactccatttgttttagtcctgccaggtacctgaatcaattatacaaggtttaacgaacccctagaaaattaactattcggttctttgtttcttgggggcgtctttta

SEQ ID NO: 216598 - DNA, 917 bp, Homo Sapiens
tttaaaataaactttttaaagcagttaaacttagcattaaataacactctttaaatggtacacctatgaagcaagagttaaatataaacccagtctaatcctgtacacttgtgattaattgtgacaatcttaagttgctcacttctttcccatttaccaattcagagaaagcccgtttcctgttttctcctcaccactttgccttggcatcacaccaaccctgcctcgggcttcagctgcagatcctccccagcccctcctcccagctgggctgactccagtcccagccccagtctccaccaactgagcagcgtacgcagggttgtgtctggcttccagcatctaccaccccttcagagcaacttccaacatgggacaggagaggaagctcgcattgcttggtctgaacagatttaaggaggttttatcacaaggacctgaaaacttcctaagcatgctttctccttgcacagctgaggaggggcaatggtgggagcggggcaggggggtggcaggggcggcaggggctctcaactaagggctctgaatcacagaggggacagatgctgccttagtccttcttgcctcccagggccaggcttcttgtgaggagcttccctgggctggacggggtcagtgtggagactgtgggggattccagctccactctgtctaagagggtcttcttaaggccagcttgggagaacttttctttggtcgcccttggacttgagcttttcgtgttcggaaccaggagggcttaacctgcattgattgaccaagaaagcggaagccccccactttctaaacagtggcaaggccggggatggtggtttcccccagggggagcaaaacttggcccttaaactgccatgggatgcctgttccgagaccacaaagaattttgtcagcctccc

SEQ ID NO: 216599 - DNA, 1000 bp, Homo Sapiens
gcgttcccatcttcaccttggtggcagccctacctctgagattttaaggtctacggaaagtgcaggcttccaggagtaatgaggtggagcattttctcaggttaccaacagccttgacatattcttctcctaagtatttttcatatgtgtttctgtcatgaagtttggccaaacatactgtgtcatctctgaacagaaggtccttggtttccgaccggaacaaacaaaagttgcccgagcagtcagttacgttgcttccaaataggtgctgctgttgacgtaatatcttgtggacgcaagcttccttatctttccgtgtgaccacagcgtgattcggggctctggccaggtggcagttcgcatactcctccacaggtttcctggtaccatcaaggcacagcaactcatagtctttttcattcagattcttagcccatggatcagggttttttcccccagtgttctgtgggacagtctggtgtttcacaaaggccacatctcccttctcaaccagacacctgaaagcgcctgtgtagcgcgtagtatccctctttgttgttgggttcacacaggtttaggcctgagcccatacacagcttacagagactggagtttttcttagacccaggggcacaaccttcactgaaaaattcatcaaatctgcagtggttgatcttattgtagagcaggcccatggggatgttccagccagcggttctgccaactgccgtatggrggacttcttgcctttcagattgtyccaggtgaggtcagaagctgatttcttcaccactgctacagcaaaataccctgcctctggtgtwtcctcacaattatcgctcttattgttgttttctgccaagacaggsaccagaacacacttgcccgctatgtagacaaacccycmwccaagctcatgsatcagctyctcattyatgatcttgsgatgcagtttcggttgtctytgckraamaamtctatttycctcmctgtwaaactc

SEQ ID NO: 216600 - DNA, 896 bp, Homo Sapiens
aaaatcagtttattgtggcatcaaaatattgacagagctgttatcagtcaagagcagtcttcttgttgctaaaacgaagaggcagcctgagcctggctccatccaaccacctcttctaatgctctttaactggcagtgcttcctataaatgacaccaagcaatagagatgattattgtttccactgaatagagtaagttccttgattggtttaacatatatagactgcctgagagaataaaaacatcaccatacaataggttaacggtaaatcaaggtcttcgtagttgtgatgggagaaaagggttggctgctggaaacagtatggtgccctggaggctgcgtacgtacacaccctaagaattcacatcaccattagcagaagattagaagtcaatggatatggatgcttgtgcagaatcttctcgccccctgacataaatttcacagggaatctcctccattactcggtcttccagggcctgctcagggcactcatgtccctgtttgaaagtgtaactacttttcttgaaggtgctattaaatgttttcattggctgtggttgtgcaaagtcatttcggaaaggaagttccatggaactgaggttggtcctgctttgtttgacgctggaggcctgcgacccacagtggttggtcctggatgcaccggcaggcggtggaagacctcccaatcttctggtagttggccaattcttccgacaagtctgccaagtctgaagtaatttcttagtcccttagtgaaaacagttcataatgcgggaggatccaacaccttcttggaacaccgttttatttaaagcgggctttgcatgccttgaccctctcttccgggcgtggttccacttgcccctaaaatacgacccaatgtgacggacc

SEQ ID NO: 216601 - DNA, 890 bp, Homo Sapiens
cccagagatgctttattacatgggtttcatcagtccataatgatgggtccctatgcccatgcgaggagacaggaacatctgtgtggtacatggcactgttcccctctcagctacgcagtcagatgggggcagggggatgaatgggtgcttggcttccctgctgttgggcaggctctgagatctcagcagacagaaatgaaagcctggcaaatagggaggcaggaatgttcaagcatcggtgacctccatgttctgcagcctgttttctagggtgacgtctcttgctgctgctttctttttgctgccctcatgttgcttcttctgcttctttgatggctcctgctcaatgggcgcaggcttcacaaaggggatcagttcttgcagtcctggcggcatgaactccttcaatttctcaggcacagtgatgcccttctctgtctggtagttctccaggatggcgcagatggtacgggtagtggcgcacatggtagcattgagcatatggacaaactccaccttgtccatcatcttcttggtttgcccatatcggattcgaagccggcgagcctggtaatccgtgcaattagaacaggagaccaactcacggaaggctcctgagcccggaaaccaggcctccaggtcaagcttcttactggcagcatgattcaaagaacctgagacaatattcacaatgtggtaaggaatccccagggactggtagaactcctctgcggtgggaattatctctttcaaactctcccatgacttgttggcatggggtgatgagtccaacaaactgtcaatcttttaaactggagggctcggaagatgccaccggtgtcacggccatgggagccccacctcctggacgaggcgttagcacggccagc

SEQ ID NO: 216602 - DNA, 896 bp, Homo Sapiens
  misc_feature (18)..(18): n is a, c, g, or t
tgcaaaaagcacctttanttaccaaaataccagcacggggggctcacaggacgcccttttcacaatattctctaacacgtacactgaagcgctgcaaaatccctggcggtgcccgcaatctaacgtctacaataacctcaacccccttagttacagaaaaactctgcaacaggcagtggaatggagagacggcaagtcgccgcggacgcctgggctctcagctgctgaacaatgacatcgttttctccaggggttgaaatccatgtccatggctgacaacccaacaaggctgggacccaaattcgtacagagatgaggcagagtggagagaaacaactctggctgagccagagtctccagccactacttcttattcctgggctttagctcttcggctgcattacgcaggaaaatgtaattttttttctggggattataaaattcatgtccctttgaccagtcgtagctggaagcgtatgcaaatatgtttccattgtgattgaaacagcaagctgagatgggctgatctaactgttccgaagtttttagttttgttctggcatctttgtcccagaagctgaatctaccatcagatcccacagttgcaagggtgccatgaacaggatggaacgcgattccatttaccgcataaatgtcctgaggagctgaagtgttggttccattagatcgatgacatttaaaggtgaagttatctttggcggggttcggggggttgatatagggaatagcaactctcccctcgatacttcccagggcaaaaccagaaagcttgctctgtttgcctttaaaaataagcacacaccgatgctgatgtttcaagggaagattctatccttcctagattccaaaaggttgtattctcttaacttgataga

SEQ ID NO: 216603 - DNA, 892 bp, Homo Sapiens
aaacatatttattatttttacagactcaaaataccactaataatcctgcaatgcatgctggtgtcatgtgacaccaggcctggaatacacctctgtccagcaggcacttgtctcaggtgaggcagttttctgagggggctcccaggagcagcatctcaggacacctgagagggagggggctgcaaggaacacctctgtgtgcacacgcctgtgctgtgctggagatgagctgtcaccttgaggtggcgtcagaccttgactctggcttgggagccccaaggttaagggaaggttaagacatgatcaaggtgcccatgagattgtgacagggacatgctgggtttctgtggcttgactgcttggatgaacatctcatttttcaatcacacagttgcagtgcagaaaggcatcaggaggcttggtctggtattaggaactgaagaagcagcccaatccctgaccagaacggtagcatcaaatgccttgtggtttccaggtggctgtggtagtgactcaggagtcctttagtgtgttctcgtgaacaccaggttatgtggatggcaccttatacttttcaaagctctttcaatctgtccgctcattctcttctaggcattgtagcttataccccttcctctcaccgacgctggtttagacctgtcaaggtcttgagcgtcactgctgcacccatgagtccttgcaccagtgcctctcctgtggactttacctgctttgcagtgtggcccatgttcattgcataattaaccccgtttttccaggaagcgccaagtgttcctaaaggtctggagagtagtcctggatcatcaaccagctctgtttgtgtttgtaaatggcagcccaccatggcctcggcgggttggtcccagttaaa

SEQ ID NO: 216604 - DNA, 920 bp, Homo Sapiens
gtttctaaaacatttttattgtaaaaagttcaagaagcccatttaccaagccaaaaagtatcagaattaaataacacataatttttatagacacatttttctgtacaaagggctgatctttataggaattttaaataaataatctaaaaatcaatgtcactgattgcaaaataggtctctctctcgaccgtctcaaggtgacatgcattctatgcagccaaaagatgaggggtttgacatctgtgacgagcccgggcagtgagtctctggcgaagatttctcactttcttaataagattctgtcccgtggtgtcccattctactgctcttctatttaaagaaatctgtgttgagggatccatttcagaagagtcatttaattgtgaggttctaggcaaacagcttgagtcctgttcattttggaacctgggttcttctttatgacatggattttcagcatgttctacagccgcatttatctcttgctttaaaaaccactttctagacgcatctgaaagagcagaagctttctttgctgatctcaaacggaactcttttccttcagcttccttccacttcttggcttcctcctccaccattgcatttattatctctatttctttccttctgttttccctaaggagtttggctacttccctggtaacatttggttcgttgtagaccatcacatttttgtttatgtaaagactgaattctgcccagccggtttttaagcatgcttgtttcaacctttgccaaaattttctttaaaatacctttttgaggtttttctgcttttggggtttcaccttgctttttttcaagcttaagaaaaccaggggttcttcaaggaaccaccttttcgctctaatagacatctcgcattccggttggaatttttttttgccaagaaacttctt

SEQ ID NO: 216605 - DNA, 735 bp, Homo Sapiens; identical to SEQ ID NO: 48113

SEQ ID NO: 216606 - DNA, 845 bp, Homo Sapiens
aatgcatcttgtttatttggcttttgaaactgttataacacaacttataacattgggaaatacattattttattaatacaaagtagttttcatagtaaaataccaaattaattaaaaggcagaatgaaacgtaccatatacatgtagacgacaaatgaaaactgtcaaagtatccttctctctaaaaagccacaaattacgttctttgaagtaagtattgggttttatttcctaaactatacacatcaatatcacctcctgaagctttttacccagtttcacggttggtatttcggacatgcaatgttccatgctgtcaaacttggaatgcctcgtttggatacagggagacaaagacttggagacccagaagcctgaaagtggttcttgaccgactttgtccactcaaattaaggcatcatgcagctggtcatcacttacattgctggttgcacgcaggcacacacacaccagtgctcacagccagcacttgttaagaatggttgagctggaccaaatggtatacgtgtctttcatcaatataaacatggactgcattcatctggacacgggcctttcccgcctaccgagcctgcccaccacccgaagtttaagctcatcttggaggacctgacactcaggaagccgtctcccgttgttccaccggctttgtggccccaatgtctgcataagctgctgatttgccttgggaaaacaaaccagcatcgatttcagagaaattactggataatttgcgctgtgaggcgcctagatcgcaagccgcacttcgaaaatgacagccgttcccgtgcacttgtccagtcatttcggttggcaattccggg

SEQ ID NO: 216607 - DNA, 926 bp, Homo Sapiens
aacatggaattattgattagtttggccaactttagtcctatctttcccaatcccaggcatgttaacaatccttgaaaaatcatgctacattactttggaggaaaatacttccagatgaacatgtttcaagacatactagaaaattattcctatcaaaacatcctttttctgtgtcagctacctcatttctaatgcagtgcacatcaatctaatgtcagtatgaatacacatcaaccaggtgctggctttctaaagtgattcctttgcagatgccaaaatgacagtcctggggcagtgtacagagaggccaaggggaagccatgcctgctgccacatgtctctggatcatctccctctcctacgcagtgttcaatctttgattaacaattgcaagtgaccccgatagagagggaagacagtcaagaagacaagcaaagggaactggaaagctatgcaaaattgcaatgtctagctgagccctgaggggtatccttatttggatgcattggccacaagcatggtgacattaaggactggaggccaacatggacactggaataggaggactttccaggcagatgaggagcaggtatgactgcttcacagacacctcccaaagacatgccatgggcagtgggttggtgcatgggaaactggatccgatctgtctcataccaagctaaggaaacaaggataacaaggaagtttttcctgtacccttgatttttttcaatatgtggggtcctagagttgggatgaaagcccagtctttttaagtgaaaccctggtaaagattttgtaatgaacaatttttttaaaatgaaaagaaaggaaaaggataaagccttgcccttgaaaccagaaatacccctatacattggggcaagggagcaggttattgccacttaaagggtgttgaattcttt

SEQ ID NO: 216608 - DNA, 937 bp, Homo Sapiens
agaatcaggtcttaagttctaaagcgggtcagaaatatcccgcagtgaggaaatgttgtaatcattgtaaaaataattagcaggtgactaagatcatgaccacaactgacaaagacgtgtgcagatcccacgaaaataggaacatttgctcgactgtcaactttacaaataaaatcgggctccaacccaggagtggccgaggggcactggcgagggaagggctgtcggcgctgccgcccgatgcctagcacgactgagacccctctgccacatggcggggacgcggggttcccaccgcgtggccgagcagaaattccttgaacttctcccccatccaaggaattgtggcatctcggagggctggaccggcacacgccggctcaggagggtgccagggtctgggaatgttctcttcacaacagaacaggaatgtacagtcagcttctgtaaagtgctccgatactcagtacaaaaatacaaaacactgatgataaacatggcacacatgggatctgacggggggcggacagcgtcgctgatggccagggaccgggctgggcagagttgaggtcgtcggaggggccaggagcctggggacacctggccactgtgttctcaggaccttgtcaccaatgggctgtatggctgtggggctctggttcccggttggcaccagctcctgccccgccccctcctgagcccacagcacccagtgggcgcctctgcccaggggagcacttcctgatggagtttcccctcccttgtgcccatctgtccccgagtggcgggaatgtccctgttcactgtattcagcgtcacaggagtgcctctgccagcacagtgggagaagggctgaatccccccgggatctgcagttcccaggaccctgggttcgggagaaggacttggccctggcargggctcacatgtaccccac

SEQ ID NO: 216609 - DNA, 1000 bp, Homo Sapiens
tggtcatggcgccccgaaccctcttcctgctgctctcgggggccctgaccctgaccgagacctgggcgggctcccactccatgaggtatttcagcgccgccgtgtcccggcccggccgcggggagccccgcttcatcgccatgggctacgtggacgacacgcagttcgtgcggttcgacagcgactcggcgtgtccgaggatggagccgcgggcgccgtgggtggagcaggaggggccggagtattgggaagaggagacacggaacaccaaggcccacgcacagactgacagaatgaacctgcagaccctgcgcggctactacaaccagagcgaggccagttctcacaccctccagtggatgattggctgcgacctggggtccgacggacgcctcctccgcgggtatgaacagtatgcctacgatggcaaggattacctcgccctgaacgaggacctgcgctcctggaccgcagcggacactgcggctcagatctccaagcgcaagtgtgaggcggccaatgtggctgaacaaaggagagcctacctggagggcacgtgcgtggagtggctccacagatacctggagaacgggaaggagatgctgcagcgcgcggacccccccaagacacacgtgacccaccaccctgtctttgactatgaggccaccctgaggtgctgggccctgggcttctaccctgcggagatcatactgacctggcagcgggatggggaggaccagacccaggacgtggagctcgtggagaccaggcctgcaggggatggaaccttccagaagtgggcagctgtggtggtgccttctggagaggagcagagatacacgtgccatgtgcagcatgagggggctgccggagcccctcatgctgagatggaagcagtcttccctgcccaccatccccatcatgggtatcgttgctggcctggttgtycttgcagctgtagtcactggagctgcggtsgygctgtgctgtggagaaaaaa

SEQ ID NO: 216610 - DNA, 928 bp, Homo Sapiens
  misc_feature (11)..(11): n is a, c, g, or t
  misc_feature (20)..(20): n is a, c, g, or t
  misc_feature (603)..(603): n is a, c, g, or t
  misc_feature (673)..(673): n is a, c, g, or t
gtgtatttcantccccttgncaatatttatttggaaacatttcaaactacagaaaagttatgcaaattacatcaggaacacacacatcccctgtgcggagatctgtgctttatgtctttgaaagtaagttgtcgagatcacagcactccacccctccacaccgaagcccgcagcttctcaggaaagggcagtcttgtgtaatcagtgcatatcatcacacacaggatgtctgacactggcaccacgctgccatctcagagtccatttcaatgctgggggtcatcggttttcagcaggttcttccctgggttcaacgcgtcttcccgccagagggatggaatcttgggtgagtgttgaaatgcgtcagaaacaaaaacgcaaagtggaactggagcacgtcacagaccttggaccagaagtggcctgtgaggcactggaagagacgccaccgtgcgagctgatggtcacacagcttgaggaccacaaagcccaggcaagagagcacccccaaagctaagtaggtagccgaggtggtgctgccatagtgcctgtgggtgcgcacgcctgccccacagcggccaccacgtgagcacccagtgcgancctcgaagccctggggatgtagcagagcgaggccataactggccagggagacgcacctcwagagagaggnacagcyacgggccgccagccgcggmtctwggtagaggcaccagggccacggggcgmttcacamgmatgggcagttctagccacttgctcgagcaccgsgggacgggcgscacttggktcacacgggcasmscttgmscgggggcactgmcgmsgggcactggctcgcacmcgctcyttacggacrgsgggmccmccscscaygccgcgsccsctgtgcgcmcgacacgcssmgcasgctgtgggcmtbttmcacg

SEQ ID NO: 216611 - DNA, 823 bp, Homo Sapiens; identical to SEQ ID NO: 48416
  misc_feature (563)..(563): n is a, c, g, or t
  misc_feature (578)..(578): n is a, c, g, or t
  misc_feature (710)..(710): n is a, c, g, or t
  misc_feature (746)..(746): n is a, c, g, or t

SEQ ID NO: 216612 - DNA, 885 bp, Homo Sapiens
  misc_feature (685)..(685): n is a, c, g, or t
aaaaagtacgctttattactgttaaaattggttggaagcagggtttaggtatgcagcaccaagggtttcttggatcattattaggttcgatgttagtgctagaaaacttacaataacagtgacttaagcaagggagagactatttctcacctgaaagtacaaaggtgtcagatcacgactgacaggatgttctacagtaccagacacctagactccttttaaccttgttgatttttctatgcaatggcttcctttcccagggtcatcctggggtctaggatgactgctccagttccagtcatcatgtatacattccagccagcaggaagaaagaggaggtgaagggcaggatatctccatttaaggacttgtcatttttgcttatatcctattaactagaacagtcactaagacaaatctaactaggaaagtgagtattctgggtagtcatgtacttttgttaaatggagaattctattacagaaaggggaaaggatactgatggacaacttgcagtctctgccacattcctgagttaaacttatgtaactaggcagaggtaaagctagccaaccactgtcttccactatagggaggggcaagctgcttatcactgaacagactcacctcaagggtcaatcgcttgcaggaggggaacacagaaggggctgagccacacatgctngggttccttcttatttccacaactgatgttcgacttttttacgtggcagtacagagatctgtcaaaaggcaggaaagcagtccatgatttggcccccagtaacaaggtttccttagtttcccaatgacctacctttctttgtcttcactgactgttaaattaaaatactttccttgaatatcataagaagattcttcctc

SEQ ID NO: 216613 - DNA, 926 bp, Homo Sapiens
aaggcacttttttttttcttggcatcaatgaatatgcacttcagaaatctacggagaacttttttcactttgtatttgttcccagcattctagccaggagtacaaaataggagctcttcaagcagcacatgaagatggcccaggagccttcagccatccagagcagcagagcagcacctaaatctccacacacttcccagtataaccactaagaacacactagacccttggcattaggggatttatcatttccagttctattatctgggaatgactccaagggtttgtgacaagcttttgaaacgtaagtgctaagacgagtgtggacaagtcactgagctaatgaagaatagacccactgtctgcttggctctgctattttgtacctgtcttcacatgtggggaaacttcataactgtgcccacaaatcagagaaattcgcaaaggactagacaatgtattgcctgtgaacttcagaggcaactggaaatagtgcaactggaaatcaactagcttcatacataggcggatttgtttccagcgaccaaaagcacagaagataagaaaacttttcaggtgatggccatattctcatcatatcctctctgggtggagtctgcctgttgccacaaaaaccttgaccctacatcaagttacacctttaccaaagggaagatacaggcatccagataaaaggtccttgtttggaagggcagccattaggggagaactgaacttaaaaaaaaaaaaaaaaaaattccaagctgggttccaccagttactttggtttccagaaacaaagaaatggttcttaacccacttttggcacccctttttttataaattccagaaataccacaagcctttgtcccaaaacagggggggccaaaaatccaaaggcctgggggctctaaaaaccggctctc

SEQ ID NO: 216614 - DNA, 830 bp, Homo Sapiens
  misc_feature (21)..(21): n is a, c, g, or t
gcttktgaaaataaagtttangagacatagcatatgaataccactgtaatacacatgaaatattctatcagaccctaaaaattaacataaacttttaactttctcatagtcaacaaaatagtggctggttgccaattttattagataagttggttacagcattttaattatcattttacgtctatctaggtgtagctgaaattcaaaatgcacatcaaagtaaaactatatcacaactcaatgccatactaaatgtacttggcctctgcaatagaattctagtcagacttcattttttactcccttcttatgacccaagtggctttaacaggaatgcaggacttagtgctgatcatcacacaacataccactttctttttagaacctctacaaaattttgaggggagatggtggcattagccctgtggaacagatcttgatcacctcaataacactggcccattatctgtccagcagaacccattgtgaaatagtacaaggtgcacagcccttcactgattacaggcaagtgttacagtagcctagccataaggaaggggagttacatcatagtacaaaatacagtataaragcgttatttaacattccacactgaagattactctgatgccttcaaacagtcgtttggatgttagccacttaaacaaatacatcactaaggtaaacratataaacataccaaaacccygtatggttaaatacaatttccatggkacaaaaatcaaagccyggtgawggttttacagattgcyttttacacaatgtcttwaattgccaaakawttwmaamatttaagrgggaawamtttg

SEQ ID NO: 216615 - DNA, 910 bp, Homo Sapiens
  misc_feature (740)..(740): n is a, c, g, or t
ggcacaatcctcattttaaaaatgaaatgctaaatatgttagaaacagatcacaacattttaatgactgggataagcaaaatgagtccaacctttattctgataatagccagtaaatttgcaaagagaggagacaaactgtaattgtatacataaaaacacctagtcccactttaaaattttaatatctatatatagtactgtatttaatttttaaagatgaagacagcaaaaatattcacattaaaatatcttacagaaatcattattcttctattcaagaaaaccaattatactaagttaacagggaaaatttaacagaggaaattctccttgggacacttattgaactgaggatttcacttcatagtttaaaaaagtaaacaggtctcaggtgtctttttcatgggtaggtcaccttatcaatctgaattacagttcatgggtaaagctaactttttttgtgtgaaataagttaataatgccaattcagtttcttgtaaacaaatgtctgtatcaaaccactataattactgtgtaacaccttgtagtatcagtgaagtggctgagaattaaatgatcacttatgcccttatctttagatacagtaccttcaaaagaaggcctaatgtggacaagctaacatgggtgtgctaaacctacgcacaggagactccatctgcgtatgtcttgtattactctttccatcccaaataacctttatcagctgttttaccactngaatgaaaagtagtcaaaggaaataattatgtttaatcattattggttgtgctataaaataagggaatacagtgggagtgttttgtgaataaacttcatatactattcccaaccaacccacaggtacacgcaacattttgagttgcaaaatggaagttttttaaatgtgg

SEQ ID NO: 216616 - DNA, 849 bp, Homo Sapiens
  misc_feature (30)..(30): n is a, c, g, or t
gttacaaacagaacacattttttgtggccnggggaattcgctttttttcagttgatgactttgtgaacattcccaggtattggagcctctgtggccttaaatgtggctcagtggagggagacccagcatagccaggccagtatggagcacctcacgcacagctctcagaagctgcaggcggacgaacatctgaccaaagaggtgtggtcgtggtttccccaggatgtgtacccggttgtagtaggagctgaaatccatgctgagctgtaccaggaacttgcatatctagagacagagactgagtcactggcccatctctttgctcttgtgccccaggccagaataaagaatagagtgtagagtgtcctggttgtctatgcctcaccatctctgtgcgtacagcaatgtggagccccggggctgtgcagtccagcactgctgtccggctcagcagatccggaaaggggaggatactgttgaagagcaacaaccactcaccctgttggggagaaaggtgctgggaggggaagtccaggcctccttgtgccagctaccaggagggacactcacctcatcatgtagcagtgagaagtccagactgctcacaggaggaaaagtggggtacagaccttgtttcatactacacttgtaaccttcaaagagtgtggcaagacgggcacaattacacatgacaaaggtgcccactctttgtgccccttcgtggagatactgcttgtcagtcagagcccggcaagagctgactcctgtgcgggctgcgcttcagcatcttcaaacttggatgggggcccacaggagagtacccccaaagatcccttttccaggcctggg

SEQ ID NO: 216617 - DNA, 818 bp, Homo Sapiens
agttatacaagagtttaatacagtccttatcttttaccatttgaaaaaagtaacttgttttaatttataaaagaaaataggctatagaatattaatctctgtgaaacaataagacaagtgtatgaaaattattttacagctactttttcatggctgttgacctactggaacaagagcaaaacctgcattagatgagtggtcataagattctccataagttgatgtccaataataatgctttttaaggccattggagacttctgcaagatatacacgtccatctaccacaaatggctccacatctgtattgtctggttttagacaacccatttgaattaagtctgaatatgctatacacgtagcctcatcaaatttgtttccccaaatgtagatatgagagaaagtgagatttgttttcattgattgtgaaagtgcaacaagtccttctccctctatgttgttgctgactactgacaacgctttaagactcctgttgtgtgaagtaagagtttcactgagatagtttgcgcctgcattttctattcagctgacattaaggtagcgcaggctactgttcagatacagggcataacatatctggtgtataccactggtttttatatcatgcctacacatgggtagtgcaacaagacaggtgtttttctttcaaaatgccgcgcttacatggactggtagactctttcctgttcaccggcacaggattaggtcgggtttaggggttatttgccctaaattcgcctccgctttcgaggttaagcactcgtaagcacaatggttattaaaccttttgcatttcc

SEQ ID NO: 216618 - DNA, 898 bp, Homo Sapiens
ttgaccttttaattgctgggtagttttaaataaatggagaaagcacctttcagaagctacactagcaggaaaaaattccatcaagcatttacatagtaaatttctataatttcacaaaagattcttgatcttacttgaagtatacatgagggaaagagccccctcagcaggtgttcccgttgcttacagaagcaaactaaaggacctaaaactggaggcaagccaggatgccaaaaagggggaagagaaatgataaagaaccattcataaattccatgtctacttcaagacatttgtctaatgacccttacataataagtattttagggaaaactaccacccttttaagataaaagtacaatcttaaaagctgtagttctcaattatagtaatatttcttacttccagtaatatgtctcaataccttggactgctggatgtcaaaagacaatacctgggggtcatctatgagatctgaacaaatagaggaattctctaggactgtatactctctattttggctttttgaatgaagtacagacaggcttctctgctatcctccaggcagtgtaatagtcaaggaaaagggcaacagtattggatcattccttagacactaatcagctggggaaagagttcattggcaaaagtgtcctcccaagaatggtttacaccaagcagagaggacatgtcactgaatggggaaagggaacccccgtatccacagtcactgtaagcatccagtaggccaggaagatggcttttggccagtggcttggatgaaaagcatattttgagataccccaccttccggaacgaaggcattcttctaacaggtttcttcctttcactggagaaccatgcaatttcaggggggaatcattcttcttggaggggc

SEQ ID NO: 216619 - DNA, 863 bp, Homo Sapiens; identical to SEQ ID NO: 47269

SEQ ID NO: 216620 - DNA, 378 bp, Homo Sapiens
atgaatattttatgatgcaaatgacattagtacaagcagtctacgaatagagttcaatagtcacacacatatattggggtaagcacaaaatatttcgactagaggggtgcaagcaagcaggtttggagagcactgacatgaaagggtgatgcaggtcaggttcacaattaatgaaaaaacggagaaaaagagggagtatggcaaaccataggctgggtcatgccccaactcgcagtgggaagatgcttatttagcttgctgccatgcgaggatgggggcctaggactattgggtgttctgagttctaaagaaaaatgcagaccttggcttggcgcggtggctcacgcctgtaatcccagcgctttgggagaccgaggt

SEQ ID NO: 216621 - DNA, 512 bp, Homo Sapiens
agtactgaaagagcccaacacaattaccctgtaaactctctgttagggcaaccaccaccacctgtcttccaggacacatttttagatactctgacaggccactgcatctcagattcaggggagaaaataagttgtcacctccccttcaaagttccagagtaaacaaatggtgccatcattcaagataacatgctgatcaccctcctcccaaaaagcaagagcttgtttatggctgaggaatcggcggattgtctgaatgacacatatacagagcccccacggatttctgcacactctgggtctgtgctggtggaacattgccaatcagttcttaatgaggcacctgtgtgtaaatacatgcttggtcttctctgcagagaactgaggctaaactctgtccctacttctggttttgccctgtcatgtcgtaacgaggtgggccttttgaggccattttagtttgagttcgagccaaccacctctgttggttagatgatgaataaaaaggttct

SEQ ID NO: 216622 - DNA, 456 bp, Homo Sapiens; identical to SEQ ID NO: 40897

SEQ ID NO: 216623 - DNA, 754 bp, Homo Sapiens; identical to SEQ ID NO: 47281

SEQ ID NO: 216624 - DNA, 587 bp, Homo Sapiens; identical to SEQ ID NO: 45577

SEQ ID NO: 216625 - DNA, 636 bp, Homo Sapiens; identical to SEQ ID NO: 52015

SEQ ID NO: 216626 - DNA, 691 bp, Homo Sapiens
ttttttttttaagacagagtctcgctctgtcgccaggctggagtgcagtggcacgatctcggctcactgccccttctgcctcctgggttccagcgattctcctgcctcagcctcccaagtagctgggactacaggcacgtgccaccatgcccagctaatttttgtatttttagtagagacggagtttcaccatgttggccaggatgatctcaatctcttgaccttgtgatccgccctcctcggcctcccaaagtgctgggattacaggcatgagccaccgcgcccagcctggaaattctttacagtgtagcactgccccccaaccctgccccataactccgagactgaggggctggatcaaagctggcaagagctctgtccaccatttaataagagcttcagttctgccaagggcattcctaactatttttatactagcatggatgttcgtctcagaggcaaccacagatatgagggtcaggctagattgaggtaaaaaaaaatcctttttgagggcctaggtgcactcatcttggctggctacagcagcaagtaaacatgccagccaactaactacaaagggttcctggaatgagactcttaactacttgccctgggagagaagcaggcccattaagggttcggttaggagaccttgggtttgatttggcagcatctaatcagtttttac

SEQ ID NO: 216627 - DNA, 591 bp, Homo Sapiens
gatcttccgggtttaatagaaggagcacatatgaacaaaggaatgggccacaaattcctcaagcatatagaaagaactagacaactactttttgttgttgatatttctggatttcagctttcttctcacactcaatacaggacagcttttgaaaccataatactgcttacaaaagagttggaattgtacaaagaggaacttcagacaaaacctgcactcttggcagttaataaaatggacttgccagatgcccaagataagttccatgaattgatgagccagctccagaatcctaaagattttctgcatttatttgaaaaaaacatgattccagagaggactgtagagttccaacatatcatccccatatctgcagttactggagaaggaatcgaagaattaaagaattgtataagaaagtcactggatgaacaggccaaccaggaaaatgatgcacttcataagaaacagttgcttaatttgtggatttctgatacaatgtcttctactgagccaccatcaaagcatgctgttactacttccaaaatggatataatttaaatatattaaaaatggtattgatggaacagt

SEQ ID NO: 216628 - DNA, 720 bp, Homo Sapiens; identical to SEQ ID NO: 50559

SEQ ID NO: 216629 - DNA, 649 bp, Homo Sapiens
ccacgcgtccggcatgacggtggagcatgtggaatgccaagatgctggtgtccgggaggctcctggtcccttggaaggggcaggcgaggcggggggtgaggaggctgacgagaagcccccccagtttgtgtgccgagagtgcaaggagaccttctccacaatgacgctgctgcgtcggcacgagcgctcacacccggagctccggcccttcccctgcacccagtgcggcaagagcttctctgaccgggctgggctgcgcaaacacagccgcactcacagctcagtgcgcccctacacctgcccccattgtcccaaggccttcttgagtgccagcgacttgcgcaagcatgaacgcacccaccctgtgcccatggggacccccacacccctggagcccctggtggctttgctaggaatgcctgaagaggggccggcctgaagcccatgaccccccagcaccacactccgggagcccagcccccatcgggggcttcctgtacctccttttgcctggctctgctctttagactccagatccctacccctcagcaactagctcccctgtcggccagctaagagagctgggacagtggaggctggcagaagctgagacgtgactgtctaggagtaacactcattaaagctttca

SEQ ID NO: 216630 - DNA, 607 bp, Homo Sapiens; identical to SEQ ID NO: 50192

SEQ ID NO: 216631 - DNA, 741 bp, Homo Sapiens; identical to SEQ ID NO: 53211

SEQ ID NO: 216632 - DNA, 607 bp, Homo Sapiens
cgtccggacctctagtcaagacctttgcactaggatagttaatgtgaaccatggcaactgatcacaacaatgtctttcagatcagatccattttatcctccttgttttacagcaagggatattaattacctatgttacctttccctgggactatgaatgtgcaaaattccaatgttcatggtctctccctttaaacctatattctaccccttttacattatagaaagggatgctggaaacccagagtccttctcttgggactcttaatgtgtatttctaattatccatgactcttaatgtgcatattttcaattgcctaattgatttcaattgtctaagacatttcaaatgtctaattgattagaactgagtcttttatatcaagctaatatctagcttttatatcaagctaatatcttgacttctcagcatcatagaagggggtactgatttcctaaagtctttcttgaatttctattatgcaaaattgccctgaggccgggtgtggtggctcacacctgtaatcccagcactttgggaggctgaggtgggaagatcccttactgccaggagtttgagaccagcctggccaacattaaaaaaaaaa

SEQ ID NO: 216633 - DNA, 589 bp, Homo Sapiens; identical to SEQ ID NO: 45781

SEQ ID NO: 216634 - DNA, 601 bp, Homo Sapiens; identical to SEQ ID NO: 50508

SEQ ID NO: 216635 - DNA, 594 bp, Homo Sapiens; identical to SEQ ID NO: 45519

SEQ ID NO: 216636 - DNA, 547 bp, Homo Sapiens; identical to SEQ ID NO: 47181

SEQ ID NO: 216637 - DNA, 569 bp, Homo Sapiens
gggttgtctttttaactgatgcataagagctttttaaattttctcttttttaagagttaggatcttgctgtgtggcttaactctcaaactcttgggctctagcagtcctcccaccttagcctcccgagtagctgggactacaggcatgtgctgctgtgtgcagcagatgtgtacaaaagagctttaaaggtagtactgaaaacagttcctttatagttctatgttgaaaataatttcttcccacttttttattgtcttaatttacagattttttgctgtgcagtaggttttatgttgtcaaatgtattaatcttttaacctaggttttaagttaaaatgctttccccatgctaagatttttaaaaagaaaaactcttccatgtttcctaatatttatactgtttcaaatttttatgttcaaatctttgatccatctgaaattcactttggtgtaaggaataaggaagcattctaaatagatgtcatacacatcaacaaatatatatatagcccccacccaaatgtggatgtaaactgtttctacatcattattgaataatccatcctct

SEQ ID NO: 216638 - DNA, 674 bp, Homo Sapiens
ccggggagggggtctcattggttgctcagcctggtctcaaactcctgggcttaagcagtcctcccaccttgacttccacagtgccgagattacaggcatgagccaccacacctggccaagtttaatttgttcatggctgagaacagttagctcggaatacttacattgttttttgaataaggaattccttattctgagtgagtcacgaatgagagctgatagatgctttcttgaaaagggcaatacagtcatcccttggtatccatgggggattggttccaggaacccaacttgatatcagaatccatgggtgctcaagtcccattatagagaatgggttatatggtatttgcatataacctacatacatcctcctgtgtactttaaatcatctgaagatgattacttatacctaataaaatacctacacatcacttcatttgcatggattcaacatagtgcttggtgttcagtaaattcaagttttgcttttttggaactttgtggaatttttctttttctgaatatttttgattggcagttggttgaagccatggatgcagaacccatggatatggagggctgactgtacttacttacatatctatctatctttgagtaacaaactctttgggggaaaagaggggaagtgtattgagcaagagaaggcaaaa

SEQ ID NO: 216639 - DNA, 706 bp, Homo Sapiens; identical to SEQ ID NO: 45774

SEQ ID NO: 216640 - DNA, 646 bp, Homo Sapiens
tttgagtgaaatattttattgaaaatagttaatttaaaatatatacatcatttttcaaaagccatgtgactgataaaaatatcaaactttccatacaagcatcatctcagcttcatcccctcggcaaagtgtctcccgaatctttccagatggacatttcgtttgagtctctagcgccctctggtgaaacaccatgaaattgcccaaaaacgtaattcaggctctgctcaggacggaaggtgaaatagcagaatgagcgcctatttcaatgtgacaggttgtgatgtgctgccttctccccgagctcaggagaaaggcagcctctgtgagtgcttctctctctttagggaaagtattcttcccatggacactcagccaagcttattgcaaaataccttcttcctaagttttcatcatcactgccttctgaaaaaacaaaaaccggtcaatacagacaggataaataatgaaagcctccaagtcattcaggaccaggcccctactcctcgcaaatgttaaaaggacagcaaaaatgataaagcaagctgagtatgcaagaaaagctttcctagtggtccccgattcttcaagctgtctttacaataatgaataccaccactctagtcaactcagggttacattttct

SEQ ID NO: 216641 - DNA, 633 bp, Homo Sapiens; identical to SEQ ID NO: 54591

SEQ ID NO: 216642 - DNA, 722 bp, Homo Sapiens
ggggcggatccgctctgcagcacgaacccatctccagccgcagccgcagccgccgcccgggccgaggagcagccgcagcagccgccaccagtggccgagtgagcggagccgagtttgaggcagcgcctagcggtgaatcggggccctcaccatgagttcctcgcctgttaatgtaaaaaagctgaaggtgtcggagctgaaagaggagctcaagaagcgacgcctttctgacaagggtctcaaggccgagctcatggagcgactccaggctgcgctggacgacgaggaggccgggggccgccccgccatggagcccgggaacggcagcctagacctgggcggggattccgctgggcgctcgggagcaggcctcgagcaggaggccgcggccggcggcgatgaagaggaggaggaagaggaagaggaggaggaaggaatctccgctctggacggcgaccagatggagctaggagaggagaacggggccgcgggggcggccgactcgggcccgatggaggaggaggaggccgcctcggaagacgagaacggcgacgatcagggtttccaggaaggggaagatgagctcggggacgaagaggaaggcgcgggcgacgagaacgggcacggggagcagcagcctcaaccgccggcgacgcagcagcaacagccccaacagcagcgcggggccgccaaggaggccgcggggaagagcagcggcccca

SEQ ID NO: 216643 - DNA, 753 bp, Homo Sapiens
gccgtacatgaccagagggaaagggccccagctgtccagggtgcagataatcagagggcacaggcccgggctggccagagggcagaggctgcacataatcagagggcaggggccccaggtatccaggaagctgaagtctcagctgcccaagggaccacaggaacagctccaggagccagggcccggaaacaggtcaagacagtgaggttccagacccctggacgcttttcgtggttttgcaagcgccggagagccttctggcacactccccggttgccaaccctgcccaagagagtccccagggcaggagaggccaggaacctcagggtgctgagggccgaggccagagcagaagctgagcagggagagcaagaagaccagctgtgaggtgagggctagagacagcccacgggccctccctccaagtgtgggagggagagatgctctgcctctgaacttcaaagtggaggtggagtgctggccacgtctccacctaacaaccctctttattctcttgttaaagttttgttcatgctttgatttttttttaaattttttagagacagggtctcactctgttgcccaggctggagtgcagtggcatgatcataactcactgcagcctcaaacttctggcctcaagtgatcctcctgcctcggcctcccaaaatgctgggattacagatgtgagccaccacacacaccatctgattaaaaaaaaaaaatactgattccttgtagcaacccaaaaaa

SEQ ID NO: 216644 - DNA, 588 bp, Homo Sapiens; identical to SEQ ID NO: 46873

SEQ ID NO: 216645 - DNA, 703 bp, Homo Sapiens; identical to SEQ ID NO: 44273

SEQ ID NO: 216646 - DNA, 709 bp, Homo Sapiens; identical to SEQ ID NO: 53030

SEQ ID NO: 216647 - DNA, 534 bp, Homo Sapiens; identical to SEQ ID NO: 40125

SEQ ID NO: 216648 - DNA, 550 bp, Homo Sapiens
ccccgcgtccgctttttattaaaaatagtttttatattggacacatgtttacagataccattttaagaagacctaaggcatacaaatgtgggcttttggcttgcttcactgaatgaagataaagatataaaaacccagatctgcctgagggtagtcgtttaaagacagccgctaacatggaattctcacaattgttcttttgagggatattttaagccttgttctcttatcgtcgtaggtaagcacttgtaccatgaaaaccgtaacctgtacttcaagaaaacattcacatttctgctacaagaaaaggttctgatgatttaaatgtttaagacttatggcagctcttcagaaagaaaaaggaagtcttcataagatacagagatagggaggctgaggcgggtggattgtgaggtcaggagtttaagaccagcctggcaacatagtgaaaccccatctctaataaaaatacaaaaaattagctgggcgtggtggcaggcgcctgtaatcccagctacttgggaggctgagacaggagaatcacttgaac

SEQ ID NO: 216649 - DNA, 650 bp, Homo Sapiens
ccccgcgtccgagcaatgaacttgaaaggttgcctggactcgctggagcaaaggaaagcgattttgtttgtataattaaatgatctgttcttctacttcactcttcctgttgaaaaactgtgtgatttttttttttttttaagtaaagtttgtagctcctcccatgcccaggaaagcacagaactcaagtgtggtggccgtctgagctgtcctttcgctggccccgctgtccgcaggggcttcctacctgtgtgagaggtcgtagcgggagacagcaacagagagtaggcggctgggccacgtccttcacagggcgtcatgtgcctttctattttcatcttagaaaatttcctcagcaaaccgatgagagattgtggttgcaagcttcagtatttgcctcgcttcccttttcatatttacagaattaaaacaacctcaagtacctcagactctgcattccaaaccaaggcacccagcagccaaagtgtcgagggcatttaagtggcattaatggcaggagagatggttttagaatctatggagtggtggaagttacggatagaagggaaaaggcaaaaactatttaccctgcctttgcaggctggggtttttgaaccgaggaaggctgggacgcctgtttccagatggtt

SEQ ID NO: 216650 - DNA, 521 bp, Homo Sapiens; identical to SEQ ID NO: 47142

SEQ ID NO: 216651 - DNA, 507 bp, Homo Sapiens
ttgtttcttattttcttatttatttatttatttattttgagatggagtgtcactcttgttgcccagcctagagtgcaatgatgtgatctcagctcaccacaacctccgcctcccgggttcaagcgattcctctgcctcagcctccctagttgctgggattacaggcatgtgccaccacacccggctaattttttgtatttgtagtagagacggggtttctccatattaggctggtcttgaactcccaacctcaggtgatctgcccaccttgacatcccaaagtcctgggattacaggcatgagccaccgtacctggtcttgtttcttattttctattttttatttttttgagaggcaggagaatggcgggtgaacccaggaggtggagcttgcagtaagcccagatagcaccattgcaactccagcctgggagacagagtgagactccgtctattaaaaaaaaaaattataaataaaaaaatgtattttaaccagttaaaaaaaaaa

SEQ ID NO: 216652 - DNA, 518 bp, Homo Sapiens; identical to SEQ ID NO: 40672

SEQ ID NO: 216653 - DNA, 603 bp, Homo Sapiens
agctggggaaatgggcccgcgagccaggccggcgcttctcctcctgatgcttttgcagaccgcggtcctgcaggggcgcttgctgcgttcacactctctgcactacctcttcatgggtgcctcagagcaggaccttggtctttccttgtttgaagctttgggctacgtggatgaccagctgttcgtgttctatgatcatgagagtcgccgtgtggagccccgaactccatgggtttccagtagaatttcaagccagatgtggctgcagctgagtcagagtctgaaagggtgggatcacatgttcactgttgacttctggactattatggaaaatcacaaccacagcaaggagtcccacaccctgcaggtcatcctgggctgtgaaatgcaagaagacaacagtaccgagggctactggaagtacgggtatgatgggcaggaccaccttgaattctgccctgacacactggattggagagcagcagaacccagggcctggcccaccaagctggagtgggaaaggcacaagattcgggccaggcagaacagggcctacctggagagggactgccctgcacagctgcagcagttgctggagctggg

SEQ ID NO: 216654 - DNA, 523 bp, Homo Sapiens
cccacgcgtccgcggacgcgtggggtgtatggcctagatgtttcataaggctggagtccctggtcagccccaccagattagtgcttctaccctaggcagggctttcttggtctaatggtaataagcaccgacactgctaagcactttacgtgcattattatttcattgaaaagaactgtcaagtgaaatactttttagcacagtaactggctttgtgggctctagagaagagttaatgaggcagtgcatgttcttggcccagagtaagtgcttagtgaatgctttctaactccgaaccccagccacatccagggactgggtgttgagcaaaaggggccttcaagatgttcaaggcacttggattttctcctgtctctcatcggcttttcttaacgggcctcagtgggtgcatgtgattatccacgtttcacctatgaaacatgaacagaggagactgacttatcagtgattcttccgcgggttcggacagggcctcgattctgttttaaactccagtagtccc

SEQ ID NO: 216655 - DNA, 685 bp, Homo Sapiens; identical to SEQ ID NO: 52565

SEQ ID NO: 216656 - DNA, 397 bp, Homo Sapiens
  misc_feature (376)..(376): n is a, c, g, or t
ccttttttttttttttttttaataacttaaaacagttcttttcagaaatgcttttttccagctggtttgtcagaaccacattcctgcaaggttgggccagaatgctgtgccccgagcagctccatctactctgccaacagcagccctccagcctctgcgggaaggcacgccttcccacgccaacaccctgtagactcctggccccatggactgtcaggcagttattttggcctgggacgtggctctgctaactggctgctgtgtttttccagttgtgagaagagcttccaggggagttcttcagataatcatcatcttgatcttaaatgtaaatattgccaccgtggtttaaagagagattaatgatttgccgacngctccatacatccttaggaag

SEQ ID NO: 216657 - DNA, 617 bp, Homo Sapiens
ttttttttaacagttaacaccttctgtaagatgctttatttcattgaccaacaacatggggtctgaaaacccagcgggaggggtctttttatcacagagccagtcccaggcgagctgatgcatctctgctcctctgcccctcaggagctctcatcctccaaccccagctgcccccacagccccaccccattcacagaaagagggctaccacgtgcctcagcccccctgcccaggctgccagctcccaggtccttttggagaaggactgatctaggcagggaggagagaaggccaacccctccagggctcactgaggaaggccaaagcctttcagaagcagttcctgcagtgacgtaatccacagcctgggatctgcatggccctgagatgcctgcggcaggctggccaaggggctggtgtgaagaaagagggcaggccccataagctgtggccaacaggggcaggggccctgcctggagtaaagtgctctggcctaggctgcgtgggtttcactgccctgcagccccagcctcccttccctctgatgccaggcacagggagcctagtcctcactggagttgtcaaactcctcccagtcagacacactcatcacctca

SEQ ID NO: 216658 - DNA, 577 bp, Homo Sapiens
  misc_feature (566)..(566): n is a, c, g, or t
ctgtattcatccacctttccagttactaatacaataggtgatacaggtgaggcagatatcaattttggatctattcccctgtatggtgtattttttttctagctgtccttagattattatttacataagtttgtcgcaaagggctttgtgaaggagattttttttccctttctgatgattacaagatcaactgggagaaaagatggtaaataaaaccaatgcactgaatattgatctctgaagtaacatgaaaaagtgatactgattcacaaagagttcagaaactgcagatgcttttccctagtatgtgtaaacatttgagataaagtggcgctcatcaatatacttagatggcaaaaatgtttgacttattaaaagagtcccattaagaacaatcaaggagtttaatcatagcaaccaaatttgcacttccctcagtatcagtcagaaataaatacaggaaatttaagactcaacttttctgttctgatcaagagatcctatttatgaagggaagattatgaaaagtctcagtgatggacagaaagccaaatagttgcgattgntgaaatctttg

SEQ ID NO: 216659 - DNA, 625 bp, Homo Sapiens
cgcgtccgaaaattaatctggaacattcagtgccaatgtatgctgaacagttggtgcatgtggtcagcagccttactcaaccttctgataacctgcttcattattgttatgtacactgctatcttaagatatttggtttccaggcaggactgacgtctttggattgcagtggatcttactgcttacctgtaccagttattccctctttcagcactgctctttatgggaaacttctgaaactccccacatgctggaccaaaagatctcagattgctataactgaaggtatatttgaacttccaaatctcacaattcaagctacaagagcacagacacttctcttgcaagcaatatatcaaagttggtctcatcttggaaatgtcagctcttccgcagtgattgaagctttgataaatgaaatcttcctaagtatagagattgggtcttgctatgttgcccaggttgatcttgaactcctggcctcaaatgatcctcccacctcaacctcctgaagtgccgggattggaggcccaagccactgtgcctggccctttataaattatgttataatttcatgtaatacataattgtatagtcaaaatggctcacatattaaatattcttt

SEQ ID NO: 216660 - DNA, 517 bp, Homo Sapiens; identical to SEQ ID NO: 54541

SEQ ID NO: 216661 - DNA, 542 bp, Homo Sapiens; identical to SEQ ID NO: 41761

SEQ ID NO: 216662 - DNA, 640 bp, Homo Sapiens; identical to SEQ ID NO: 55089

SEQ ID NO: 216663 - DNA, 705 bp, Homo Sapiens; identical to SEQ ID NO: 49090

SEQ ID NO: 216664 - DNA, 600 bp, Homo Sapiens
  misc_feature (536)..(536): n is a, c, g, or t
  misc_feature (563)..(563): n is a, c, g, or t
gccgcagtttattagagagccctgtcccctgattaaaagaggacacgtgcccacgggggtctcctccttcccggacgaggggctcagctggggtgcccctgtggcaccactcacaggccaggagccagggaagttctggggaagcactttcccagaaacccaccccagaccccaaggtagctcagggcttctcagaggcaggcccagatccggtcccaccgcagggaccaaccatgggccccgcctgcctgaggcctgcagcgggccaagccggctggcatgggctggcctattctgttgggtgggttcttggcccaccagagctggacaggcaggtgatcaagccacgttgggtgtgctgggggcctccgtgggcactcactggggctccggccagaagacctgcatgacgctctgcttcctggagcggtgtggcaggctgggcacatcctagaggcctgaaggtgccgttgccagcaggcttggcagcgctggaagtcacaggcagggcactggaagggcaccacgtcctctgncccacaggcctggcacacacagtctgntgagaggggcccgcccggagctcccgtggcctgctgc

SEQ ID NO: 216665 - DNA, 610 bp, Homo Sapiens; identical to SEQ ID NO: 53233

SEQ ID NO: 216666 - DNA, 619 bp, Homo Sapiens; identical to SEQ ID NO: 48864

SEQ ID NO: 216667 - DNA, 611 bp, Homo Sapiens
ctggtcttgaactcctgacctcaggtgatccacacgcttcagcctcccaaagtgctgggattacaggcgtgagccaccacgcccagcctaaatatttctttatagcaatgcaaggatggcctaacacactgcctaaatcaaaattgctattcacttcaagggtattcattacctgactagcttttttgggtgcatatgaacataatgtaaattttatggctgatcaaatgtcattactatgaagatactccctatgagctcacagagtcaggacatcaacaatatttaaactctcactgtaaacatgacacagtggtaggcactgtggaaatatatttggtcctattttccctacctgagcatgtaaaagagcagactattccaacagtgtgatgactctgcagtgaagaaaagaatccactctcccggcacactgatagagcatgtacctgggcatagtattcctcaaaggagaatggtcataaaaatgatactgcagaattcaaatagcattcaagaggtctccactaaatggggacatgtaggctatctgaagttattatagatttccttatttcaagaatcttcaaggcaaaatatacgatgtgata

SEQ ID NO: 216668 - DNA, 581 bp, Homo Sapiens; identical to SEQ ID NO: 60454

SEQ ID NO: 216669 - DNA, 666 bp, Homo Sapiens
gtggcttagttatgggaataaaccttggctttaatagtgaatcaagttgtaaggatgagtcagctttctttgagttttcaaaggctttttagaaagtatttaattttttaaaaaaggatctgtcacccaggctggagtgcagtggtgtgattatagctcactgtagcctttaactcctggccttggagtgatcctccctcttcagcctcctgagtagcttggactacaggcaagtactgccatacctggctaatttattttttgtggagatgggatctcactttgttgtccaatctgttctcaaactcttggcttcaagtgagcctcctgcctctgcctcccaaaatattggaattattggcatgagtcaccatgccagatcaagaaaatatttatgtataattttatcatacctcattggtcctaatgtttttttgcttgtttaggtccctttctagagataggagaagagagagatcgctgtctcgggagagaaatcacaagccgtcccgatccttctctaggtctcgtaggtaagatctttgataacttgtatttaagactttgcatacatagtatgctaaggcctgtcttctaagccataaattttttacccttaaagttctatttcgatatgtcactaaagtgtcaccaagttacagatgt

SEQ ID NO: 216670 - DNA, 555 bp, Homo Sapiens
cgcttcgggagccgcggcttatggtgcagacatggccaagtccaagaaccacaccacacacaaccagtcccgaaaatggcacagaaatggtatcaagaaaccccgatcacaaagatacgaatctcttaagggggtggaccccaagttcctgaggaacatgcgctttgccaagaagcacaacaaaaagggcctaaagaagatgcaggccaacaatgccaaggccatgagtgcacgtgccgaggctatcaaggccctcgtaaagcccaaggaggttaagcccaagatcccaaagggtgtcagccgcaagctcgatcgacttgcctacattgcccaccccaagcttgggaagcgtgctcgtgcccgtattgccaaggggctcaggctgtgccggccaaaggccaaggccaaggatcaaaccaaggcccaggctgcagccccagcttcagttccagctcaggctcccaaacgtacccaggcccctacaaaggcttcagagtagatatctctgccaacatgaggacagaaggactggtgcgaccccccacccccgcccct

SEQ ID NO: 216671 - DNA, 626 bp, Homo Sapiens; identical to SEQ ID NO: 53018

SEQ ID NO: 216672 - DNA, 671 bp, Homo Sapiens
gtccgctctgaccagcaccatggcggttggcaagaacaagcgccttacgaaaggcggcaaaaagggagccaagaagaaagtggttgatccattttctaagaaagattggtatgatgtgaaagcacctgctatgttcaatataagaaatattggaaagacgctcgtcaccaggacccaaggaaccaaaattgcatctgatggtctcaagggtcgtgtgtttgaagtgagtcttgctgatttgcagaatgatgaagttgcatttagaaaattcaagctgattactgaagatgttcagggtaaaaactgcctgactaacttccatggcatggatcttacccgtgacaaaatgtgttccatggtcaaaaaatggcagacaatgattgaagctcacgttgatgtcaagactaccgatggttacttgcttcgtctgttctgtgttggttttactaaaaaacgcaacaatcagatacggaagacctcttatgctcagcaccaacaggtccgccaaatccggaagaagatgatggaaatcatgacccgagaggtgcagacaaatgacttgaaagaagtggtcaataaattgattccagacagcattggaaaagacatagaaaaaggcttgccaatctatttatcctctccatgatgtcttcgttagaaaaagtaaaaaa

SEQ ID NO: 216673 - DNA, 603 bp, Homo Sapiens; identical to SEQ ID NO: 44475

SEQ ID NO: 216674 - DNA, 547 bp, Homo Sapiens; identical to SEQ ID NO: 47831

SEQ ID NO: 216675 - DNA, 461 bp, Homo Sapiens; identical to SEQ ID NO: 50806

SEQ ID NO: 216676 - DNA, 544 bp, Homo Sapiens; identical to SEQ ID NO: 40547

SEQ ID NO: 216677 - DNA, 615 bp, Homo Sapiens; identical to SEQ ID NO: 45783

SEQ ID NO: 216678 - DNA, 761 bp, Homo Sapiens; identical to SEQ ID NO: 52559

SEQ ID NO: 216679 - DNA, 708 bp, Homo Sapiens
gcacgaggaaaaagtgtgccttccgtacccacacgggcaagtactggacgctgacggccaccgggggcgtgcagtccaccgcctccagcaagaatgccagctgctactttgacatcgagtggcgtgaccggcgcatcacactgagggcgtccaatggcaagtttgtgacctccaagaagaatgggcagctggccgcctcggtggagacagcaggggactcagagctcttcctcatgaagctcatcaaccgccccatcatcgtgttccgcggggagcatggcttcatcggctgccgcaaggtcacgggcaccctggacgccaaccgctccagctatgacgtcttccagctggagttcaacgatggcgcctacaacatcaaagactccacaggcaaatactggacggtgggcagtgactccgcggtcaccagcagcggcgacactcctgtggacttcttcttcgagttctgcgactataacaaggtggccatcaaggtgggcgggcgctacctgaagggcgaccacgcaggcgtcctgaaggcctcggcggaaaccgtggaccccgcctcgctctgggagtactagggccggccccgtcccttccccgcccctgcccacatggcggctcctgccaaccccccctgctgccagcctcccccgtccccaacatgcatctcactctgggtgtcttgggtcttttattttttgg

SEQ ID NO: 216680 - DNA, 755 bp, Homo Sapiens
ggggcaaactgatccactcgatggtagcccacctagaagctgttacaagtttagcagttgatcccaatggcctttacttgatgtctggcagtcatgactgttcaatacgtttatggaatctagaaagtaagacgtgtatccaagaattcacagctcatcaaaaaaagtttgaagaatcgattcatgatgtagctttccacccatccaaatgctatatagccagtgctggagctgacgcactggctaaagtctttgtatgacgcaatgcatcatcttcaccttctagctgtttataagtaatcaactgcacacaagagatacagaagacgagggcaagaatcatctcgtcctgcccttttgttctgctgaaggagcacagagaacatttgttgaagtatagttttgcaattcatatactgttttctaaaactaaggtttgttcaggttgctgcaagctcagctgaatctgtgagcctgaggtctgtttcaaatttctccccaataggcgcctttatttctgaggtggttctaattcgctaggcaggcctgagcgaatacaagtttagcttgtccctgttgagtaagtagggcatgctacaatggataatttaaaagcttgatagctgggactgaatagaagaaaacgggaaacttagaccaagttctcccctgagaaatcttgttaaaacacattaagtagtcaaaatagtaatctttatcatatctgccatattaacccctttgtgtataatgac

SEQ ID NO: 216681 - DNA, 650 bp, Homo Sapiens
ttacacatttatctacaaagtaagtacggccagctcatttgtcttggctcatgtgtaatctttaaagcatattgaaaaattactattctcaagtaaggataatgtatatctcaggtcacttacagtctcaaagttttgtcagtatactttaaaacaatcctgcgaacagatctagattgaaggagactaaagaatcatgaactcgaggtggccccggggcaggcgcagagctggcaagcacgtggtggggcccctgaggcgtgcagagggtcacgcacctgggagcctgttgctggcacggtccgggcggaggttctgcggcgggaggcagcctgtcggttgcagggctgaaaaagcagttctacaaggcaagccagctggtcagtgagaaggtcggaggggctgaggggaccaagctggacgatgacttcaaagagatggagatgtcatcagcaaggcggtgacggaaatgctggcaaggaccatcaagtacctgcagcccaacccagcctcacaggctaagctgaccatgctcaacacagtgtgcaagatccagggccaggtgaagaaccccggctacccgcagttggaggggctcctgagcgagtgcctgatccgccaccagaaggagctgggcaacgagtccaact

SEQ ID NO: 216682 - DNA, 799 bp, Homo Sapiens; identical to SEQ ID NO: 46779

SEQ ID NO: 216683 - DNA, 759 bp, Homo Sapiens; identical to SEQ ID NO: 45980

SEQ ID NO: 216684 - DNA, 654 bp, Homo Sapiens; identical to SEQ ID NO: 40473

SEQ ID NO: 216685 - DNA, 489 bp, Homo Sapiens; identical to SEQ ID NO: 55517

SEQ ID NO: 216686 - DNA, 633 bp, Homo Sapiens; identical to SEQ ID NO: 45307

SEQ ID NO: 216687 - DNA, 710 bp, Homo Sapiens
cgcgtccgaaaacaagcaaattttattaaaggaaaattttgcaggtttaaggtttgcaggtgaaattttgtaggtgaaaaggtttacttttcaccagtctgttctggcatgcttctaatgatgtcagagtcacctaaaaaataaaaataaaaaaacagtaattttacaattcatttaatagcaactggtaccataaaatttctctacctttggttatcccttctgtagacaatggtctgcaaattagcactgactttttgcaaaagttatcacattagctgtactgtcatttttcttaaggttgaccaaagataacctagaatcacagccattatataatcacataaaatgatcatataataaaattggtttatcaccagcatttataaaaccagacctagggaaagaactaggtttggggacacatgcatggtcttaatatagcgaatgtttagcctgtcttgactattacaaaatcagaacagcgagaatattcgcagtattctatgaatcaaagattcacaattggaaaacagaatgatgtagattttttggcacttttttttttctcaagctaattttacatgtctgttctcaagaagcaagaattactttcttctgttttgccagattattctctccttataatttcaccttttaccaaatctatgtcattatttcataggtacttcatcaaatgaaattcatta

SEQ ID NO: 216688 - DNA, 542 bp, Homo Sapiens; identical to SEQ ID NO: 48616

SEQ ID NO: 216689 - DNA, 614 bp, Homo Sapiens
cgtccgggagatcagaaatggttctatttcaaggtctctcacagggctgcaatcaagatgttggcatggctggggtctcatctgaaggctggactggagaagaatctacttccaaacttatgtggtagttggaagaatttagttcctcaaggctgctaaactgatggcctgtgttccttgcctctgggatggtagcttgcttcaacaaagtgtgcaagcagagaagacagagagagtccgctagcaagatagaagccacaatctcttgtaatctatcatttttgctgtattctactggttaaaaataactcattaggttagcctactggctctcagggggaagagattatacaaaggcatgaatttctggaggagggaatgagggcaaagaactctgaaaagtttctcttccacaatctgaagaacttctagaaagtagaaggaagcaatattgcttagggatggacaacttggcactggttatgtgttccaagtgaggtaaccttgttcccaggaataaagagaaccagatgactgtaaacatttccctaaactgaaatgcactgttgtatgttcacctgaaatgaatggtgtaagctgaatatgagattttt

SEQ ID NO: 216690 - DNA, 675 bp, Homo Sapiens; identical to SEQ ID NO: 53786

SEQ ID NO: 216691 - DNA, 426 bp, Homo Sapiens; identical to SEQ ID NO: 48393

SEQ ID NO: 216692 - DNA, 748 bp, Homo Sapiens; identical to SEQ ID NO: 52029

SEQ ID NO: 216693 - DNA, 664 bp, Homo Sapiens
gggtgtcggggggcctgttcagcctcaccgtccagagagccgaggtcagcgacagcggcagctactactgccacgtggaggagtggctgctgagccccaactacgcctggtacaagctggcagaggaggtttctgggcgcacagaagtcactgtgaaacagccagacagccgcctgaggctcagccaagcccaggggaacctgtcggttctggagacccggcaggtacagctggagtgtgtggttctcaaccgcaccagcataacctcccagctcatggtggaatggtttgtatggaagcccaaccaccctgagcgggagactgtggcccgcttgagccgtgacgccaccttccactatggagagcaggcagccaagaacaatctgaaggggcggctgcatttggagagtccttcccccggcgtgtaccgtctcttcatccagaacgtggctgtgcaggacagcgggacctacagctgccatgtggaggagtggctgcccagccccagtggcatgtggtataagcgggcagaggacaccgctgggcagacagctctgacagtcatgcgaccagatgcttccctgcaggtggacacagtggtccccaatgccacggtctctgagaaggcagctttccagctggactgtagcatcgtgtcccgctc

SEQ ID NO: 216694 - DNA, 712 bp, Homo Sapiens; identical to SEQ ID NO: 45722

SEQ ID NO: 216695 - DNA, 564 bp, Homo Sapiens
cgcgtccgctcctgtgaggtatggtgctgggtgcagatgcagtgtggctctggatagcaccttatggacagttgtgtccccaaggaaggatgagaatagctactgaagtcctaaagagcaagcctaactcaagccattggcacacaggcattagacagaaagctggaagttgaaatggtggagtccaacttgcctggaccagcttaatggttctgctcctggtaacgtttttatccatggatgacttgcttgggtatggagagtcggcttgactacactgtgtggagcaagttttaaagaagcaaaggactcagaattcatgattgaagaaatgcaggcagacctgttatcctaaactagggtttttaatgaccacaacaagcaagcatgcagcttactgcttgaaagggtcttgcctcacccaagctagagtgcagtggcctttgaagcttactacagcctcaaacttctgggctcaagtgatcctcagcctcccagtggtctttgtagactgcctgatggagtctcatggcacaagaagattaaaacagtgtctccaatttt

SEQ ID NO: 216696 - DNA, 501 bp, Homo Sapiens
ttttttttttggattgcaaaaatttattaaaattggagacactgttttaatcttcttgtgccatgagactccatcaggcagtctacaaagaccactgggaggctgaggatcacttgagcccaaaagtttgaggctgtagtaagcttcaaaggccactgcactctagcttgggtgaggcaagaccctgtctcaaaaaataagacaagacttttagccacatttacagacttcaattaaaatgctacatgggaatgcagaatatcagatattttattgtcatcaagtaatcagtgagagagttcaagttggattgagatcatcatgtattctgcaattataatagtcccaacatttccaatcctcacctttcaagcagtaagctgcatgcttgcttgttgtggtcattaaaaaccctgaaagcgaagccaacatattaatcagggcaaaatacaaatgtgtgatgcttgttagtaaagtaacctcaaaatcaaaatggaacgg

SEQ ID NO: 216697 - DNA, 759 bp, Homo Sapiens; identical to SEQ ID NO: 45554

SEQ ID NO: 216698 - DNA, 646 bp, Homo Sapiens
agtgctcaggaggcagcatctggagttggggcacagcgaggtactgcagcttcctccacagccggctgtggagcagcaggacctggcccttctgcctgggcagcagaatatatattttacctatcagagacatctatttttctgggctccaacccaacatgccaccatgttgacataagttcctacctgactatgctttctctcctaggagctgtcctggtgggcccaggtccttgtatcatgccacggtcccaactacagggtcctagctgggggcctgggtgggccctgggctctgggccctgctgctctagccccagccaccagcctgtccctgttgtaaggaagccaggtcttctctcttcattcctcttaggagagtgccaaactcagggacccagcactgggctgggttgggagtagggtgtcccagtggggttggggtgagcaggctgctgggatcccatggcctgagcagagcatgtgggaactgttcagtggcctgtgaactgtcttccttgttctagccaggctgttcaagactgctctccatagcaaggttctagggctcttcgccttcagtgttgtggccctagctatgggcctaaattgggctctaggtctctgtccctggcgcttgaggctc

SEQ ID NO: 216699 - DNA, 694 bp, Homo Sapiens; identical to SEQ ID NO: 44769

SEQ ID NO: 216700 - DNA, 320 bp, Homo Sapiens
cccacgcgtccgggaaaatgattattttaacttctgggttatcatctgctggcagggtctgatcaggtctagagtatttaaggaaaagtctcctgtcttctatctccactagaagtactgcagcttgagagctgaaaggaacttgaaaaatgttatccagtcttcacttagcccatttttatcggcattaggaaatagggttcagcaatggttattgatttagcagtctggtcttatatgatctgctttctaattatctatctagtattcctatattatactggaacttcaataaattataacctatgtgaatatcaaaa

SEQ ID NO: 216701 - DNA, 678 bp, Homo Sapiens; identical to SEQ ID NO: 45114

SEQ ID NO: 216702 - DNA, 777 bp, Homo Sapiens
aaaactggagcatcaggtccatttctgttctgctggtttggaatcttttccgtaatgctatttattgccaacaatggcctctctttgtgtccatatatgccttacaccgtgctgacctgggtatcatccatgtgctctgaagcatccaactttactttgcaggtgcatcaatgtagtcctgtccctgaactgagtaaccgtgttcctgaaaagtacactagggaaattcacctgcttgcttgtctttgtattggcatggcacttgtgattgcaccatggagcatgctcagagctattaaattggtctcccatctcccaccaggatatgaaaggtccatatgggaggccacgtaatcacttattacagtggttacataatacactggctcactgcagactctcttgttttttgatacagtttcgtgctggcttcatttgccaattgtgttgtttagttcggaagtaagagggtcttgagattgaggggtagggagggctacactgactgatccgtggcttaagacaggagattatctctgtactccagtggcatctccttagccaagatgtgaaattaaaatcatagttcgcctcatttaaaaattctaataaagcactcaaactttgaaaagcttttacttttccctcctactaaaagaaatgtatgtacctcatagccctgtgtcatttagtgttcagcacttttgggaacatcagttggtgaactttaaattttgctgtctactcactgggcacgggggctcacacctgtaatcc

SEQ ID NO: 216703 - DNA, 681 bp, Homo Sapiens; identical to SEQ ID NO: 41605

SEQ ID NO: 216704 - DNA, 604 bp, Homo Sapiens; identical to SEQ ID NO: 52816

SEQ ID NO: 216705 - DNA, 222 bp, Homo Sapiens; identical to SEQ ID NO: 40279

SEQ ID NO: 216706 - DNA, 566 bp, Homo Sapiens; identical to SEQ ID NO: 44673

SEQ ID NO: 216707 - DNA, 461 bp, Homo Sapiens; identical to SEQ ID NO: 55075

SEQ ID NO: 216708 - DNA, 683 bp, Homo Sapiens; identical to SEQ ID NO: 41736

SEQ ID NO: 216709 - DNA, 663 bp, Homo Sapiens
ctagtttagtcccgagcgccgccctttttttttttttttatttgttaaacagtttaattcccaaagctagtaattttagttaaatatacattagagcctttttagatggctgctaataaacactatgtcaaaatgtgtagttttaaactcagactcgaaagccaagataagcacctccttcagttattactctgaccaaggcataagaattcacttagacaaaaagctttcaaaacctacctaaaaataagatagttcataaattttcaaaactgttcttccctgttgcggacagcccttgatctttgtaagacttagcaaattttggcatgctctcatgttagctttttaagttactgaaaactcctataaatttagcatcatttctcaaatctgtatagttttctcattccgaatgcttaaacatttaggtcaaaaattaaaataccagtagaaaaatattcatctttagccaggttgtatagttaacaacatggcaagaaactgatgagaacatttaaacattcagagcataaaaatacttcaaagcattacgaaacttgaacttagcattttcctaaattttagtagttccaactacaggaaaataaaactgccataaggactgagatgatttaagccaactcaaattttttcctgatt

SEQ ID NO: 216710 - DNA, 713 bp, Homo Sapiens; identical to SEQ ID NO: 54979

SEQ ID NO: 216711 - DNA, 655 bp, Homo Sapiens; identical to SEQ ID NO: 43336

SEQ ID NO: 216712 - DNA, 693 bp, Homo Sapiens; identical to SEQ ID NO: 51561

SEQ ID NO: 216713 - DNA, 451 bp, Homo Sapiens
cggctgcagaaggagaagcccatgcaaggcacccacagttgaggaagcagagggtggcaagccacgagcagtgccctcaggcacaggattccagaagcatgggcaagagcctggagggtccacatccccacattggttctggggacatttgcaactccttgtcttgagtgtcaacaacaggcagctctttgttcagggcagggcagggtatttggagatgactggtttgccctgtccaaagctgctgctcacactgttgagaggcttgacgcctggggtgggacatgggctgtgtgcatatcggcgaggctgtctggcctggcggctggacaaagcctcctagtggagatgatatttggcctgtgaactgaatcaggtgaaggataggagaagaaaacagcatatttggagacttagtggccagagcatgtcttggcagagaaactggaag

SEQ ID NO: 216714 - DNA, 524 bp, Homo Sapiens; identical to SEQ ID NO: 55719

SEQ ID NO: 216715 - DNA, 703 bp, Homo Sapiens; identical to SEQ ID NO: 45975

SEQ ID NO: 216716 - DNA, 558 bp, Homo Sapiens; identical to SEQ ID NO: 45080

SEQ ID NO: 216717 - DNA, 557 bp, Homo Sapiens
ccttgtatgagtctataagcaaaacctataagaagtcacatctggctattctatgtactcaaaaaataattggcaagtgaaagaatgaggaaaaggagaaaaaattcagaaggcccctaccccttccaatgggtcaagtcaggaatttcctacctgcatgtgattccctgtgtcctagagggttttatttactcctcagaccttggaaactgttaaccagagtctctgtttggagatcttatctgtgtgcttctccatgggtgttgtttccctgtctctgcagccatgcattcctcagctctttaagtggtggagcctgtctgcctggatagagtgcaaaagctacagtgtaatcttgctttctttcagggccactgaccagaggaaacaaaaactggactgattgggctctcctgatgtagaccagccagtggccctctaagtttccttctatgtttaaaattccttatctgacattgctagctgatcagcaggcccacaggtcagctgagggcttatctccagggctggagcttcaaagagatacatgcacacga

SEQ ID NO: 216718 - DNA, 424 bp, Homo Sapiens; identical to SEQ ID NO: 46016

SEQ ID NO: 216719 - DNA, 419 bp, Homo Sapiens; identical to SEQ ID NO: 40739

SEQ ID NO: 216720 - DNA, 670 bp, Homo Sapiens; identical to SEQ ID NO: 55223

SEQ ID NO: 216721 - DNA, 539 bp, Homo Sapiens
gtctgtgtacacaagtgtgcatgcatatgtacaattaaagactatagttgtaacagtcatgagcttgtgttttgattttactcctattcctgtattgtattaagtgtactatcatgttcttgaggcatatctccaggagatatgtttatttcttttccaggaaaagtgggacatatataagtagggtaaacgctagagctagatactcctttaatctctattacgtcagatctctggctcccttttacaaccaggcaatcttcaattataggtggctaatagggaagaaaatcatcggcagagcaacagcttcatgtaatttcagagtagaaaaatgaattttaatcttctgaaaggtaatattagaattagctggattgctacacttaggaatcataggttccaaataaatatcagtacatacggaaatcagataatgggacagattatttgaaattagggctgcctagaaatctggaatgtgagatcaccctccttctgaccaaatatgcttgaataaacttaatattccaaattat

SEQ ID NO: 216722 - DNA, 706 bp, Homo Sapiens; identical to SEQ ID NO: 46196

SEQ ID NO: 216723 - DNA, 549 bp, Homo Sapiens
cgcgtccggtttgatcccatcaacactattcttgtagcagttaggaatcttgagctatttttttctcatacgattactatagtccagtttaccaaagttttctttagatgtctgataatcttgagatgattgcttaccttaaaaggtatagaaaggatcacttaaatatatggaaaaatgaaataagggtgaagctgaataaagttctacttactgtattaactggcaacagttgagtttcttaagatctgaattgctgtgtatgttacgctgtattcagaaccagtttctaaccagcctgtgagatgggaagttttttccccataattgggatgaaacctttcattcaggtattttgaattgaaggtgtatgtgttgtttgtaaccttgtggagattgcaagtggtgttgacattctggatcttctatgtaacagttgaaatttggaagtgacgtcacttacctgtctaacgtggtgtgggagagaatttacaagtcctttattgaaagaataattgttgcaaaatatattgcttctactttgcctgg

SEQ ID NO: 216724 - DNA, 707 bp, Homo Sapiens; identical to SEQ ID NO: 53878

SEQ ID NO: 216725 - DNA, 674 bp, Homo Sapiens; identical to SEQ ID NO: 41975

SEQ ID NO: 216726 - DNA, 515 bp, Homo Sapiens; identical to SEQ ID NO: 45201

SEQ ID NO: 216727 - DNA, 645 bp, Homo Sapiens; identical to SEQ ID NO: 53824

SEQ ID NO: 216728 - DNA, 523 bp, Homo Sapiens; identical to SEQ ID NO: 44492

SEQ ID NO: 216729 - DNA, 711 bp, Homo Sapiens
ctacctgatattaatcataatgttccattatgttgattgcttgtaataggaagaaaaggggtgtcttcctgtgcaactgacacagctaggctttgacggcaggcctccacaaggtctacccttttgattccctttaactgaattctgttcatcaattgtttttgtttcatgggcggtgggaggggaaaggggaattcaatgcataaaataagtatttctaagggctcagtagaaatttctaccatagggatcatttcatgcatttattttttcatttagtctttgctgttatctgtccctcatcttcataactcagcagtggatttctcaagtttggagatgtaaggcaaaagtataattcttcagaatgtttggattgtagtgatttatcattggctttcagatttgactgtcacttcagatttttgagcaaaaatactaaaaaaaaaaagaaaaaaaattctttgaagagacaggacctctgttgcccaggctggagtgcagtggtgtgattatagctcactgtaacctcaaactcctgggcttaagtgacatttctgcctcaactttctgagtagctagggctacaggtgcgtgtcaccatgcctcgctaacttaccaatttttttatagaagtggggtctccctgtgttgctcaggctgatcttgaactcctggccctcccgccttggcctccccaaaatgttggga

SEQ ID NO: 216730 - DNA, 588 bp, Homo Sapiens
tccgagctgcagctggttgagcagcggatccgcagcttccccgacttccccaccccaggcgtggtattcagggacatctcgcccgtcctgaaggaccccgcctccttccgcgccgccatcggcctcctggcgcgacacctgaaggcgacccacgggggccgcatcgactacatcgcaggcctagactcccgaggcttcctctttggcccctccctggcccaggagcttggactgggctgcgtgctcatccgaaagcgggggaagctgccaggccccactctgtgggcctcctattccctggagtacgggaaggctgagctggagattcagaaagacgccctggagccaggacagagggtggtcgtcgtggatgatctgctggccactggtgtatgagtgaccacagggcctcccagcccaacatctccagctggatcccagggaaatatcagccttgggcaactgcagtgaccaggggcaccggctgcccacagggaacacattcctttgctggggttcagcgcctctcctggggctggaagtgccaaagcctggggcaaagctgtgtttcagccacgctgaacccaa

SEQ ID NO: 216731 - DNA, 617 bp, Homo Sapiens
gggtttattgagactagagaacggcgaagacttttaccaagcatactgcttgtaaacgttttattaacaaggcatgtcctgcacagccctagatcctttaaaccttgattccatacaacacatgtttttgtgagctcaaatttggggcaaagtcacaaattaacagcatctcagccaaccaattgttcaaggtacaggtcaaaatggaatttcttatgtcttccctttctacacagacacagtaacagtctgatctctctttcttttccctacaggattgcaggcatgcagcaccatgcctggctaattttgtatttttagtagagacgggatttctccatgttggccaggctggtctcaaactcctgacctcaggtgatctgcccaccttggcctcccaaaatgctgggattacaggcatgaaccaccgcgcccggccatgctaagtcctttcttggctccattgtgctgtccctcctgcttcctctccaggtccatctgccacagtgctacgtgcaccagcgtgccagcaacagtggctggtctctgccccgtgcctcctccactgggctcacacctgtcttattttgtcctttggtggctctgagaagcagcct

SEQ ID NO: 216732 - DNA, 593 bp, Homo Sapiens; identical to SEQ ID NO: 39946

SEQ ID NO: 216733 - DNA, 632 bp, Homo Sapiens; identical to SEQ ID NO: 45640

SEQ ID NO: 216734 - DNA, 757 bp, Homo Sapiens; identical to SEQ ID NO: 51037

SEQ ID NO: 216735 - DNA, 691 bp, Homo Sapiens; identical to SEQ ID NO: 41909

SEQ ID NO: 216736 - DNA, 654 bp, Homo Sapiens
gggccacataccaacccaccatggagcaaagctgattttaagtggtggtagagatacagtttctcttttaatacttacgtgtttagttgggtgcagtggcttatacctgtaatttcagcacttggggaggccaaggcaggaggcttgcttgaggcaaggagttcaaggctacagtgagctatgattgtgccactgtactccagactggacaacagagtgagaccccatctctaaataataatcattattgttacatatttgttttaacatttttttctcaagtataactagtcctatgatttcatagatgtagcttaggataaggccaaggtagatgttgcctatataaggtttttttaaaaaaggaaaaataggccgggctggtggctcacgcctgtaatcccagcactttggcaggctgaggcgggcagatcacctgagatcaggagttcaagatcagcctgaccaacatggagaagccccatgtctactaaaaataaaaaattaccgaggcgtggtgggcgggcgcctgtaatcccagctacttggggaggctgaggcagaagaatcatttgaacccaggaggcagaggttacagtgagccgagatcgtgctactgcattcccacctgggcaacaagagtgaaactctgtc

SEQ ID NO: 216737 - DNA, 693 bp, Homo Sapiens; identical to SEQ ID NO: 48569

SEQ ID NO: 216738 - DNA, 613 bp, Homo Sapiens; identical to SEQ ID NO: 41424

SEQ ID NO: 216739 - DNA, 525 bp, Homo Sapiens; identical to SEQ ID NO: 42275

SEQ ID NO: 216740 - DNA, 823 bp, Homo Sapiens; identical to SEQ ID NO: 47449

SEQ ID NO: 216741 - DNA, 594 bp, Homo Sapiens
gcgtccgatcaacaatgtggctgctcccagattgccatgccagagggtcttcggattcttccttctatcacctctgctctaagcaaatcttgttagaagggcatgcctttgcttaggcagattgggaataccaattcactacagaataaagattttaaaaatgcaataaggtggcaaatgcattgtatgaagaatttctcagtgtttagtctgagaatttttgcatgttggttaattgtggccattctttaatttaaagttaaaactataatcttaggtagaacaacttttttataagaagtattatttgaccacttcaggtatacattcaatactgggtaaaaatttcagacctatctcaggaacacagaaatatttggtgtcctgataagcactttctagactattgatgtggccaggaatttggaaagacgacacacgcacgcacacacacacacacacacacacacacacacagttttttccttccctgtgatgaaaaaggctgtgaaaaccttaaagtatttgcttgcttcttgttttgtttagttgataatgaaatgtgtacaacctcaaatttgctgccagaatact

SEQ ID NO: 216742 - DNA, 643 bp, Homo Sapiens; identical to SEQ ID NO: 52597

SEQ ID NO: 216743 - DNA, 735 bp, Homo Sapiens; identical to SEQ ID NO: 52167

SEQ ID NO: 216744 - DNA, 745 bp, Homo Sapiens; identical to SEQ ID NO: 54329

SEQ ID NO: 216745 - DNA, 699 bp, Homo Sapiens; identical to SEQ ID NO: 48383

SEQ ID NO: 216746 - DNA, 631 bp, Homo Sapiens; identical to SEQ ID NO: 52095

SEQ ID NO: 216747 - DNA, 772 bp, Homo Sapiens
cgcgtccgatgatgtgtagccgatgccaaggaaagcataggaggtttgaaatggaccgggaacctaagagtgccagatactgtgctgagtgtaataggctgcatcctgctgaggaaggagacttttgggcagagtcaagcatgttgggcctcaagatcacctactttgcactgatggatggaaaggtgtatgacatcacagagtgggctggatgccagcgtgtaggtatctccccagatacccacagagtcccctatcacatctcatttggttctcggattccaggcaccagagggcggcagagagccaccccagatgcccctcctgctgatcttcaggatttcttgagtcggatctttcaagtacccccagggcagatgcccaatgggaacttctttgcagctcctcagcctgcccctggagccgctgcagcctctaagcccaacagcacagtacccaagggagaagccaaacctaagcggcggaagaaagtgaggaggcccttccaacgttgatgccccttctctttcctcaaatcaatgtcagggagtcaaaagggctgtagcacaggatggagtttgatttatccctcctcccccaacacctaggaactgaatctttttctttttattttttgagatggagtcttgctctgttgcccagctggagtgcagtggtgtgatctcagcttactgcaacctctgtctcccgggttcaagcaattctcccatctcagcctcctgagtagctgggattacaggcacacaccacc

SEQ ID NO: 216748 - DNA, 743 bp, Homo Sapiens; identical to SEQ ID NO: 50503

SEQ ID NO: 216749 - DNA, 645 bp, Homo Sapiens
cttgctcttcttctgtggctcagagcttttacttgaggtgctcaccttggctgctttctccagtatggacacgatttgaagtacagaatttcagccagcagcccatcaggctgacaccacacatattgcttctggtactttagccacaccagtgagaattggtggggcaagttgtcctgagaaaggctgtgtggcttttcttcagcacagacatttgggcaagcaactcagcataaggccagtgggtaccatcttctaaaccaggaccatcagcccaagagactcttctacactccagtatagggaggggcaaggttattcccatcctgccccttctcagaaccagtcccctgctgacctcaagttctcctccttgatcaccgtggccagagcatctcgtgtggaccatctaggctccttgggcttcaagcaggacctgagccacatgctccctgtacgagctgtgctatacctgtcccacatgagcacggagagcctcatgttggtgggtttccagagtgatgtgaaagcctctcaccccaatcctcggagactgagttccacaacttttttagtagctcatagtgttatttttctactctcttcatgaaactaactttattttataataaatatatattttct

SEQ ID NO: 216750 - DNA, 627 bp, Homo Sapiens; identical to SEQ ID NO: 49688

SEQ ID NO: 216751 - DNA, 713 bp, Homo Sapiens; identical to SEQ ID NO: 45989

SEQ ID NO: 216752 - DNA, 698 bp, Homo Sapiens; identical to SEQ ID NO: 53608

SEQ ID NO: 216753 - DNA, 733 bp, Homo Sapiens; identical to SEQ ID NO: 49169

SEQ ID NO: 216754 - DNA, 516 bp, Homo Sapiens; identical to SEQ ID NO: 53742

SEQ ID NO: 216755 - DNA, 709 bp, Homo Sapiens; identical to SEQ ID NO: 53807

SEQ ID NO: 216756 - DNA, 615 bp, Homo Sapiens; identical to SEQ ID NO: 49525

SEQ ID NO: 216757 - DNA, 657 bp, Homo Sapiens; identical to SEQ ID NO: 45052

SEQ ID NO: 216758 - DNA, 562 bp, Homo Sapiens; identical to SEQ ID NO: 45818

SEQ ID NO: 216759 - DNA, 560 bp, Homo Sapiens
ttttttttttgccaatactgcactgcctccctattgactcctttcttgcatgtacggtaatttcgatcacctgtttcatatcattacatacccacaacgcggttgttaaggctgaaatatttcactgtatggatgtgcataaattactgaacccattccttacttggccatgaaaaagagtaagtcgatatgacatactgatgtgaaatgatgtgcaatagtaaatgaaaagaagcaagttgcactgatagcgtgtatcatattaacttagtaagacatggaaaaattaaatgtgtgtgtttttagacctggtctaggcatgcaaatatttcagaatgagacatagaggtctattaggagagctgacttttggtcatggaaggaggtggctgtgaatcaggattttcttttttttactttatatatcaaatatgtattttcaccaaatcgtaactagccaagtgctaaaatagccaaagctgatcactgtcgtcataaataaatatttgggatttaagaatacatctaaaagtttattaaagatcagcattttggctggg

SEQ ID NO: 216760 - DNA, 717 bp, Homo Sapiens; identical to SEQ ID NO: 48863

SEQ ID NO: 216761 - DNA, 620 bp, Homo Sapiens; identical to SEQ ID NO: 46895

SEQ ID NO: 216762 - DNA, 400 bp, Homo Sapiens; identical to SEQ ID NO: 45741

SEQ ID NO: 216763 - DNA, 469 bp, Homo Sapiens; identical to SEQ ID NO: 54081

SEQ ID NO: 216764 - DNA, 765 bp, Homo Sapiens; identical to SEQ ID NO: 48762

SEQ ID NO: 216765 - DNA, 654 bp, Homo Sapiens; identical to SEQ ID NO: 51869

SEQ ID NO: 216766 - DNA, 559 bp, Homo Sapiens
cgcgtccgaaactacataaagaactttccaaatttaacagtaataagtaaatacaattagaaaataagcaaaagacagacatttcactgaagtatagatagcaaataagcaaatgaaaagatgttcaacatcattaggcatgagggaaatgcagagtaaaatcgtgagatatcacctatcagaatagcttaactttttttttttaatggtggtaactgctggcaaggatgaagagaaacaggatctcatacattgctgggaatgtaaaatggtacagccactctggaatataatttggcagtttcttgtaaaaccacacatgtatatgtcatgcttcaggaattgcacttctgagcatttatcccagagaaatgaaaacttgcgttcacacaaaaacctgtatacgaatgttcatagcagctttatttgtaatggtcgaaacctgtaggcaacccatatatccttccttaggtggttaaaacaaattgtggtttatgtattaccatggaatacttgttactctgcaataaaattgacttattgatatccataacaactc

SEQ ID NO: 216767 - DNA, 684 bp, Homo Sapiens; identical to SEQ ID NO: 45107

SEQ ID NO: 216768 - DNA, 531 bp, Homo Sapiens; identical to SEQ ID NO: 53352

SEQ ID NO: 216769 - DNA, 627 bp, Homo Sapiens; identical to SEQ ID NO: 55541

SEQ ID NO: 216770 - DNA, 518 bp, Homo Sapiens; identical to SEQ ID NO: 48318

SEQ ID NO: 216771 - DNA, 608 bp, Homo Sapiens
ttataagcggtttattctggtgttgaatgaggggaaaacaaaaatcagaagtttgcataataaattattaaatgcagctcaagaacgagaaaaggacatcaaacaagaaggggaaactgcaatctgttctgaaatgactgctgaccgagatccagtctatgatgagagtactgatgaggaaagtgaaaaccaaactgatctctctgggttggcttcagctgctgtaagtaaagatgattccattatttcaagtcttgatgtcactgatattgcaccaagtagaaaaaggagacagcgaatgcaaagaaatcttgggacagaacctaaaatggctcctcaggagaatcagcttcaagaaaaggaaaattctaggcctgattcttcactacctgagacgtctaaaaaggagcacatctcagctgaaaacatgtctttagaaactctgagaaacagcagcccagaagacctctttgatgagatttaacagtctcaaaaaatactttgatgttcactagactatgttttctattcatttctttaaaatgaaaaaggagaatttcaagtcagcagccgctattaccgtatcttacaatttaattacatacaca

SEQ ID NO: 216772 - DNA, 209 bp, Homo Sapiens; identical to SEQ ID NO: 40119

SEQ ID NO: 216773 - DNA, 695 bp, Homo Sapiens; identical to SEQ ID NO: 42836

SEQ ID NO: 216774 - DNA, 626 bp, Homo Sapiens
cgcgtccgggagccccctcttgactactccttcagaagcatccacgtcattcaagatctggtaaatgaggagccaaggacaggactacgaccactgaagcgttcaaagtcggggaaatcactgacccagtccctgtggctgaataacaatgttctcaatgatctgagagacttcaaccaggtggcttcacagctgttggagcacccagagaacctggcctggatcgacctgtcctttaatgacctgacttccattgaccctgtcctaacaactttcttcaacctgagtgtcctctatcttcacggcaacagcatccagcgcctgggggaggtgaataagctggctgtccttcctcggctccgtagcctgacactccatgggaaccccatggaggaagagaaagggtataggcaatatgtgctgtgcaccctgtcccgtatcaccacgttcgacttcagtggggtcaccaaagcagaccgcaccacagctgaagtctggaaacgcatgaacatcaagcccaagaaggcctggaccaagcagaatacactttgaggctcccacgaccctagtagtcctaaaggcctaagcatagacagcatggtttgacaataaataatttgagctgt

SEQ ID NO: 216775 - DNA, 744 bp, Homo Sapiens; identical to SEQ ID NO: 43965

SEQ ID NO: 216776 - DNA, 695 bp, Homo Sapiens; identical to SEQ ID NO: 40241

SEQ ID NO: 216777 - DNA, 451 bp, Homo Sapiens; identical to SEQ ID NO: 48834

SEQ ID NO: 216778 - DNA, 629 bp, Homo Sapiens; identical to SEQ ID NO: 48019

SEQ ID NO: 216779 - DNA, 713 bp, Homo Sapiens; identical to SEQ ID NO: 53914

SEQ ID NO: 216780 - DNA, 576 bp, Homo Sapiens; identical to SEQ ID NO: 50278

SEQ ID NO: 216781 - DNA, 642 bp, Homo Sapiens; identical to SEQ ID NO: 46229

SEQ ID NO: 216782 - DNA, 640 bp, Homo Sapiens
gtccgccatctgcaagactcacccttctatagaagtaaatttgccttgctggagtgttaacttgttgttggagtgctaactcttctttgtggcaccaaaaagttatttccaacacgaagctgcgggccttggtggagggaacatctgacgaagttcaatgtttggggaaaacaatatctggaaagattgaagagtcagcaggagaaacacctaggaaaattacaaggcctgtgaaagaaacatctgagaaatttgcatggccacaagaaagacctacaaagaccacatgggaggaaaaagaaacatctgtaaagactgaatgcgtggcaggagtaacatctaataaaactgaagttttggaagaaggaacatctaagatgatcacatgtcctacaaaaaaacagctacaaaagcaagtacacatggtgccagatgtgacatccagatgacccagtctccatcctccctgtctgcatctgtaggaggcagagtcaccatcacttgccgggcgagtcagggcattagcaataatttaaattggtatcagcagaaaccaaggaaaactcctaagctcctgatctatgctgcatccagtctgcaaagtgggattccctctcggttcagtgacagtgggatctgg

SEQ ID NO: 216783 - DNA, 593 bp, Homo Sapiens; identical to SEQ ID NO: 52841

SEQ ID NO: 216784 - DNA, 695 bp, Homo Sapiens; identical to SEQ ID NO: 53958

SEQ ID NO: 216785 - DNA, 646 bp, Homo Sapiens; identical to SEQ ID NO: 47669

SEQ ID NO: 216786 - DNA, 532 bp, Homo Sapiens; identical to SEQ ID NO: 50674

SEQ ID NO: 216787 - DNA, 556 bp, Homo Sapiens; identical to SEQ ID NO: 52984

SEQ ID NO: 216788 - DNA, 653 bp, Homo Sapiens; identical to SEQ ID NO: 40036

SEQ ID NO: 216789 - DNA, 645 bp, Homo Sapiens; identical to SEQ ID NO: 46385

SEQ ID NO: 216790 - DNA, 577 bp, Homo Sapiens
ccgtcgacccacgcgtccgcatattcccctgggcctttagttaacatccgagtgacgaagccgggttccccagtacagtgtcttttgggtgcggtcattgtgaggaaggggatgagtgagtgtgggtgtggctggaggaggagctagatgccggtggacagtgggcaggtggatttggggaggagaggatcagcagcagcagcagtactcagtgatagggggctggctgggtcaggaatggtgagatgaacatgcaagtggaagagagaatagttgaaaatgtgaatgaaagtagctctggagcctctcccttaccccaccccacacacacgcaacagctctgtacccctgcccagaacttggaacctcccaggaatgctgccttccttcagcccagcctccagtcctgggttccctcaggaattcgaagaccttggctaggtggtgagcttggaagagctgggctttgttttctgtctcctctaacctctttccttactccttatcccatcccatttgagttcaggggtgaggcttaagatcttaataaataataccttactgcttaaaaaaaaaa

SEQ ID NO: 216791 - DNA, 608 bp, Homo Sapiens; identical to SEQ ID NO: 55829

SEQ ID NO: 216792 - DNA, 537 bp, Homo Sapiens; identical to SEQ ID NO: 43971

SEQ ID NO: 216793 - DNA, 649 bp, Homo Sapiens
gggtcagttcagggtttccggcctacttctgagagatgattctcaacccgatcactgagagttctgaagagctttgtgaacagcagtcagttcagggtattgattcatttgccgaactcaaaccaagtgggatgagtcataaggtgatgataactttcagacctagatggtttcgttaatctcagtgcagaggtgtgctgggggtgggtaatctagcaggtgagctgctagattaacgctgtctccataaagcgtcaaagatttactatagaagattgaaaaagagtgtcagctggtcacagaaattcagcacatgttttgttgaacgttttctgtgcgttagccaagagggagacatggtgaagagaagtaattcaaaatacagtctcatcccttaggaaggcagtttaccattcaaaagaagagttatttgtaagtaaccatattacaaggcagaaggctataggtatcaaaaaaaaaaaaaaaaaaaaaaaaaaaaaaaggcagggacaaaacacaggagccagaaaggatacttctggctacagaaagcaaggaatatttttggaataggtaactttggaactgtgccttgaagtatgaggatattgtaaaagcttatttttaactttccagtttagttataaaa

SEQ ID NO: 216794 - DNA, 683 bp, Homo Sapiens; identical to SEQ ID NO: 40636

SEQ ID NO: 216795 - DNA, 684 bp, Homo Sapiens; identical to SEQ ID NO: 45073

SEQ ID NO: 216796 - DNA, 599 bp, Homo Sapiens
ttactcattgtattcatgtgaaatttgtttttactgcatgtgtgggttggaggactgttttcacttctgattcatctttactcttatctcatcagagctcatacctcttgtagttgggggattgcagtttataattccaataaatggggcaaattcaataataacataatacaaatgagtttgaatgcaggacaggtcttcaaagcatacacaacatgggcctacatatgtacaacaataataatttataagttactgtttggatggaaagtaaaagtacagaaaatttgttaaaggaaattaaaatggagatcatgtctcaataatctctgagcagacaaaattagttaggtctcataagtgatctcaacctcgcttgatttgcaaatacaaacaaaacttacattatttcttgtagctgcatattgaaaaaagagaaatgaagctcaaccagtcagaagtagccaacaaccttatataaatagaaactgtccaacaaggtaaacagacaaacaaaaaacaataaaaaaagttgtgctaccaccaaatgatttctttgtttctacatttttcaaataaatacttgcttcttacactgt

SEQ ID NO: 216797 - DNA, 695 bp, Homo Sapiens; identical to SEQ ID NO: 47326

SEQ ID NO: 216798 - DNA, 703 bp, Homo Sapiens
tctgtcaattttatttatatatcaatctacctcccattaccaccatccgagtccaagttaccatcacctcagacctggacaaccacagaagcctcctcactggtctctctgtttccatcttggccctccttcagtcaattttctatatggtagccagagcaatttggaaaaagcactgtgtctttcactctaaaataaccgatgtcctgtgtatagttgcttaatagtcacgtgagacagttcaaagaaactctcattttgcaaataacgaaacccgaggccaaaacatactgaaacttcaattccagaactgaggtcagaatttggaattcataattgcacagatgagcctcatttcaatgggccatgctgcttctcccaaacaggtatttcattttctgttatcaatgaaagacaaatgaaataatttgaattgatctagagcctgctttcagggctataaaatatgaaaaaaactgatcaccaggggacaaaagggatgacaacctggactgaactgatacatttaagggccactcgcacgtggatcccatgtgtcccaggatctacctcctctagccaactgaaggacaggggcagcattccagatccaggactatgtgatccacatggggagcataggatttcactggttggatgtgcagaatttgtgtcttccatggtttcccatgcacctgctgaa

SEQ ID NO: 216799 - DNA, 744 bp, Homo Sapiens; identical to SEQ ID NO: 40015

SEQ ID NO: 216800 - DNA, 700 bp, Homo Sapiens; identical to SEQ ID NO: 53864

SEQ ID NO: 216801 - DNA, 687 bp, Homo Sapiens
ttttttttttgaaaccatgaaaatacattttttaaaaaaagtttccaggtataatacacaaaagcaaacaagtttatcttaaaaaataccaagtatcacatccatagcctattcctaattataattacttcttaaagcaacatttgtctttgtttacaaatacagcagcaggtgataaaacctagtatctcaaactgattgcttacaatttataatacaaacatatgtatatgtctcaaatcacattttaggcagtttaacttaaaatgcatagacaattacatacattaaatttgtcattactgtcagtgaaaaatcacaatttcaagaagaaaattacaacaaactcatagagcacacataagaagtcaagttcacttaatggcaacaagtcagtatctgctgatcagtgacaggcagtgaaagtgcctttatccaggggtaaagtgaagaggcaaactatcctgttactttgcacacttgaattgttgcgctgatcaacactacaatcttgaaaaacattaaattcttaaaaaaaaaaaaaggcatgccacatgtcaccctttaagatgcccaaaggctggttacaatttccaccagtagtgatcctaacacgtttaggtaaaactaataatgaatgggtatgctaacaaattctgtaatgttacttatagactatgagcctct

SEQ ID NO: 216802 - DNA, 701 bp, Homo Sapiens; identical to SEQ ID NO: 49222

SEQ ID NO: 216803 - DNA, 754 bp, Homo Sapiens
ccacgcgtccgcacagatctaaatatttagattctctttgcctttttctccatggaatacggtggtatcaaattactaatacagtatataaacttcgtttgcattggtggaattcatttagatctctcaagtaatattattttagggctatataaattgtgtttttagtgtaaaatgttatttgataatgtgaagttaaatcccttttagaaagtgactgaaaatggtaaaggaactcatcagaatcttagcgttcttaagttctctgataatttagtatattttattaatgatgtccaacacctctaagattgttgagaaaacatgaagaattgaggttactcttctcaggtgacactttaaatattaaaatcagaggcttcctgaacaaaacaaagtgctggcattacaggcgtgaaccaccgtgcctggccggaagtctttaaaaaataaagtgattctactcttctaagcttacagagaccagaccaggtgaatgtaactggggaaaatcaagatggtacctctctgcattatcccgccagacactgtattttatgcattcatgtctaggatacagtgtgaaaattaaaaagtttagagggcagatgcaattgtggcaagtgacctgccaataaagcaggtgcagctatagaagctggcataggtatatccttaatggtgctttctccctgggcttgtctttttggtggttttttccccctatattcagagctccttgagaagtgataac

SEQ ID NO: 216804 - DNA, 643 bp, Homo Sapiens
ggagaacacgaatctttgggaactagttcaggaaggtaaaaaaaatttttttcttctaaagttatgccattttgttttctttctcctcagctctaaatactctgaagtccaaagaagttgtatgttgggtgggctcccttcaactttaacatggaagtgctttctgtgactttaaaagtaagtgcttccatgttttagtaggagtgaatccaatttacttctccaaaatagaacacgctaacctcatttgaagggatcccctttgctttaacatgggggtacctgctgtgtgaaacaaaagtaagtgcttccatgtttcagtggaggtgtctccaagccagcacaccttttgttacaaaatttttttgttattgtgttttaaggttactaagcttgttacaggttaaaggattctaactttttccaagactgggctccccaccacttaaacgtggatgtacttgctttgaaactaaagaagtaagtgcttccatgttttggtgatggtaagtcttccttttacatttttattatttttttagaaaataactttattgtattgaccgcagctcatatatttaagctttattttgtatttttacatctggtaaggggccccctctactttaacatggaggcactt

SEQ ID NO: 216805 - DNA, 671 bp, Homo Sapiens; identical to SEQ ID NO: 50433

SEQ ID NO: 216806 - DNA, 464 bp, Homo Sapiens
cttcagtcagtgtcaacgcagctagggagcatgtacctaatgcacatatcactgggcatagtctacaggcacctaataactcaggtaccttaacagtcactaatgagtgtctctccaaggactaaacaatggaagactgtaggaagatgctattcattaagatatctccagaatatggaagactattattcacttctcatgggacaggactttatagggcacctgaaaaaactcccatgaaaaatcacttttacaaaatgtcaagttatgatatccaagatgaaaccaatgagtcacaacattcacataatacactgtacaaccctgatctcttgactgtcatcaaatgtttcttacctctaaaccaaagtttcattttataatttaatttttctcattttttccattctcttagcttaagaaaagatcattacaaactttttgtaagtttttcatatatgctt

SEQ ID NO: 216807 - DNA, 620 bp, Homo Sapiens; identical to SEQ ID NO: 52573

SEQ ID NO: 216808 - DNA, 648 bp, Homo Sapiens; identical to SEQ ID NO: 41787

SEQ ID NO: 216809 - DNA, 655 bp, Homo Sapiens
gactgttctgatcgcgagcgccgccctttttttttttttttctttaaaaaaaggctttatttgaaggcaaaacaatgaaatccacaagaaattactaacagcacgtgtttacgttttatcctgaatcatacattttaacaattcacagctacaggaaatctagaacaaaatcaaatattcatcacgttgggttgaaaagttggaagattttgcatcttattgaaaagaatttttcaaaaatgtttctgtacaaatgaatggaattgcaccaggctgcccatggacaccaggtgtggccgattcccaacggtcacccaccagcttctggcaggagcagctcccctcctggcctcccctcccttcgggggtgtgaaatgaaatgatggagtggaaggcgctggctggggtcgggctccatgctctggatgggactgggccgtcgcacacgccagccggtgcagggttcttccaagtgcaaaactcaagcaggggacgcgacgggcacagactccgaggcagcgctcaacctgaagtgtcttaggctggtttcctgttagaatcttgtttcccagataacagcaaatggctacattccagaaaaaaaatatcaacttatacaactaaaaataactgaactaagggccagtacgccttc

SEQ ID NO: 216810 - DNA, 789 bp, Homo Sapiens; identical to SEQ ID NO: 40406

SEQ ID NO: 216811 - DNA, 698 bp, Homo Sapiens
cgcgtccgaaaacttaccaacagatttcattggttcttgggttctcccgaagcctatccatggtttatagattaagaattgatgaggtagctgggcacagtggctcacacctacgatcacagcacttcgggaggctgaagcaagcagatcacttgaggtcaggagtttgagaccagcctggccaacatggtgaaaccctgtctctactaaaaatacaaaaagtagccagccgtgatgacaggcacctgtaatcccagctactcgggaggctgaggcatgagaattgcttgaacccgggaggcggaggttgcagtgagcctagatcatgccactgcactccaacctgggcagcagagcaagactctgtctcaaaaggggaaaaaaaaaattgctgatgtgacccatgaagggaactcattttcctcgtaattttggactgccacacattggtacctttagttctctgaaggcccacgtttttatcattaagacctatttgttagctagtagagctttatgttcgctgtccatgaaaccttctgtaaccacagtgactacaagtagttctttctctattgaattattaggtccagaatagaagatgtcattgtacactttatttccctcacactgtgttacgctctgatgtgctatgcttagctatctgtcagagattagtaaattataaaactcatgtg

SEQ ID NO: 216812 - DNA, 635 bp, Homo Sapiens; identical to SEQ ID NO: 40783

SEQ ID NO: 216813 - DNA, 658 bp, Homo Sapiens
gcgtccgcgccgggaagatgagcacggaaggtggtggccgtcgctgccaggcacaagtgtcccgccgcatctccttcagcgcgagccaccgattgtacagtaaatttctaagtgatgaagaaaacttgaaactgtttgggaaatgcaacaatccaaatggccatgggcacaattataaagttgtggtgacagtacatggagagattgaccctgctacgggaatggttatgaatctggctgatctcaaaaaatatatggaggaggcgattatgcagccccttgatcataagaatctggatatggatgtgccatactttgcagatgtggtgagcacgactgaaaatgtagctgtttatatctgggacaacctccagaaagttcttcctgtaggagttctttataaagtaaaagtatacgaaactgacaataatattgtggtttataaaggagaatagctattggggttagcattgcacaaagcccagtttctttctgtgtttgaaaaagattttgatccccttggaatattaagaggtcaacacgtgattgttgtacgtacacattgtgctctggagtgcctatttattgaaatcattgtaagacctgttataaatttaagtctatttaaaactaaacttgtaatatacatcctgaaaat

SEQ ID NO: 216814 - DNA, 462 bp, Homo Sapiens
cctctaaaagtaaactactgttaggaacagcagtgttctcacagtgtggggcagccgtccttctaatgaagacaatgatattgacactgtccctctttgggagttgcattagtaactttgaaaggtatatgactgagcgtagcatacaggttaacctgcagaaacagtacttaggtaattgtagggcgaggattataaatgaaatttgcaaaatcacttagcagcaactgaagacaattatcaaccacgtggagaaaatcaaaccgagcagggctgtgtgaaacatggttgtaatatgcgactgcgaacactgaactctacgccactccacaaatgatgttttcaggtgtcatggactgttgccaccatgtattcatccagagttcttaaagtttaaagttgcacatgattgtataagcatgctttctttgagttttaaattatgtataaacataagttgca

SEQ ID NO: 216815 - DNA, 779 bp, Homo Sapiens; identical to SEQ ID NO: 44397

SEQ ID NO: 216816 - DNA, 781 bp, Homo Sapiens; identical to SEQ ID NO: 48667

SEQ ID NO: 216817 - DNA, 697 bp, Homo Sapiens; identical to SEQ ID NO: 40064

SEQ ID NO: 216818 - DNA, 405 bp, Homo Sapiens
gataatcgtgtctcctgcctccactcagctgcttctcagtcatgaatgtggccatggccccggggtccccttgctgctgtgggctccctgtccctgggcaggagtgctggtgaggaggtggagccttttgaggggggccttccctcagctgtttccccacactggggggctgggccctgcctccccgttaccctccttccctgcaggcctggagcctgtagggctggactgaggttcaggtctccccccagctgtctcacccccactttgtccccactctagagcagggaggcagtgggggaggagttgtgtctcgtcttctgtctccatgtggtttttgggtgtttttcttgttgtgtcctggattccgataaaattaaagaaattgcttcctcaaaaaaaaaa

SEQ ID NO: 216819 - DNA, 705 bp, Homo Sapiens
cgtccgcgccctcaagatccgggcccaggtggccaggcgcctgggccgagttttctacgtggccagcttccccgtggctctgccactgcagccaccaaccctgcgggccccggagcgagaactcggcacaggagagcagcccttgtcccccacgacggccacgtccccctatggagggggccacgcccttgccggtcaaacttcacccaagcaggagaatgggaccttggctctacttccaggggcccccgacccttcccagcctctgtgttgaggttgccgggggtaggggtggggccacacaaatctccaggagccaccactcaacacaatggccctgcctcccaccgctttatttctttcggtttcggatgcaaaacaaaaaattttaaaagaaaatgtgacttcaaaggaaaagaacaaatttccaaagacttgggggagtgaaggcagagcctggtgcagatggacgaggtctgcagacggagggcagaggtggtggaaggggccaggggcctgcaggcctccccctggaactgggactggtctcggtctgctgacgtcagggtcagctcccccgcggagctgacttcagcagcccacagctgtggggcttcagcagccacaccagcccagcccagcccagctctcgatacgtttggtctttcatgctgaaaaataaataataaagcctgaaaaaaaaaa

SEQ ID NO: 216820 - DNA, 705 bp, Homo Sapiens; identical to SEQ ID NO: 49121

SEQ ID NO: 216821 - DNA, 710 bp, Homo Sapiens; identical to SEQ ID NO: 42242

SEQ ID NO: 216822 - DNA, 693 bp, Homo Sapiens
gtttattagaaagaatgtagacatttaaaaaaatccccactgtcatgaacataaattgaggttttcagcccgggtataagctgaatcaaaaaaaggaaataaaaaatccaatagtgtattaaacatttttcactcatttgccatactgacagtgcaaatacaaatctggactaaatgtacagactctcaagcaacaatgtacagctttcttcgtcctccatgctaagagatgtaaaagcttaagggtcaaacaataccaattgtataggcttcaaaaaccatctaagttagggcattctctagttttagctaagatacacctggaacactgacaagtcatcacttacatagaataatgtgaagtaaattttttgaaaaataaattttagtggaacaatcctgaaggataacaccagaagaatagcaggttaccagtaaggtgtcagccaatttgttccagtcacttttgaatccatgttctataatctaaaatttattctctttccctaagctgagagcttcctatcatgtcagtatctatgttatgaagaaaaggagacttaggtgagatgtttttatttatcgcaactgctgcattaattgcctaggacctcaacagcttcatgaaagtctgggaaatgttcatgcataagggtattgccttagctgacttaaaattgccccatacaatgg

SEQ ID NO: 216823 - DNA, 545 bp, Homo Sapiens
ccccgcgtccggtctgtaataatcttgaaaggcccaagggcctgtccccatcctgacttaaaggcatctgcttccctgtttcatatcacatgacagagaaacctgttctcatggcatgtaacatccctgtgaagagagcgttgtatatgattttgtattttttaattcattttaatctacaggttggaatctaatttttaaattttattggaactcacattttaaaaagaaataaaatttaaaataataataataataataataataataataaacctttgaccagtgtcttccaagtagtttgatcaaagaatttataggtgttttcaaaacacagtccggagtgtaaagattggaaagccccatggccttgcctgtgtgtatgaagtgtaaatctggttttgttttgttgttttggattcttttgggtttttgttttgttttgaagatcagacagtgatcactctgaaagattgaagccaagaatttgtaactatggtatttactgtaagctgtagaacactcaataactattaaaaaaaaaa

SEQ ID NO: 216824 - DNA, 583 bp, Homo Sapiens; identical to SEQ ID NO: 41150

SEQ ID NO: 216825 - DNA, 555 bp, Homo Sapiens
gctatatcatgtggctttattttctgggatacaggtctggcatttctttctttgatgtcctcttccataaggttctctgggagcaagccacgcccacaggctcagtctcccagcacccccatagtttctcctctgcctcagccggcacctctgtcgtctgcgttcacaagtcttccatttttccattatgtgacgcattctttgttttgttttctgttactgagttttgctcttccttcagtttcttcttaatatttttgcttctttttgatataataactgagtggatgaacttttccagctcattttcgttctctggaagtaggtgcgtggactcaccctcgtcctctgagccctcttcttcatctcctaataacggtatcctgaggttcttataaagtgactcgagctgttgtctttcctcagcctgtgccagtcgatatatcatataggagattgccatcccacatatcagggcaatgctgaaggctacgctcgaaattaaaattactttaacaagagcaggtctatgccgaattattgctttattcctca

SEQ ID NO: 216826 - DNA, 605 bp, Homo Sapiens; identical to SEQ ID NO: 52655

SEQ ID NO: 216827 - DNA, 361 bp, Homo Sapiens; identical to SEQ ID NO: 45823

SEQ ID NO: 216828 - DNA, 709 bp, Homo Sapiens; identical to SEQ ID NO: 50791

SEQ ID NO: 216829 - DNA, 719 bp, Homo Sapiens
ggctgattacagctggtcgtatcagacgccaccctcttcccccagcaccaccatgtccagaaagtccagtgtctgcagcctgaacagtgtcaacagcagtgactcccggtccagcggctcccactcgcattcccccagctcacattaccgctaccgcagctccaacctggcccagcaggctcctgtgaggctgtccagcgtgtcctcccatgactcaggattcatatcccaggatgccttccagtccaagtcaccatcccccatgccgccagaggcccccaaccagttgtctaacgggttttctcactatagtttatcaagtgagtcccacgtggggcccacgggtgcaggccttttccctcattgcctgcctgcctcccgcctgctccctcgggtcacctctgtccaccttccagactacgctcattattacaccattgggcccggcatgttcccgtcatctcagatccctagctggaaggactgggctaagcctgggccctatgaccagcctctggtgaacaccctgcagcgccgcaaagagaagcgagaaccggaccccaacgggggaggacccactaccgccagcggcccacctgcagcagctgaggaggctcagagaccacggagcatgactgtatcggctgccaccaggcctggtgaggagatggaggcttgtgaggagctggccctggccctgtctcggggcctgcagctgg

SEQ ID NO: 216830 - DNA, 596 bp, Homo Sapiens; identical to SEQ ID NO: 55584

SEQ ID NO: 216831 - DNA, 626 bp, Homo Sapiens; identical to SEQ ID NO: 53560

SEQ ID NO: 216832 - DNA, 592 bp, Homo Sapiens; identical to SEQ ID NO: 51615

SEQ ID NO: 216833 - DNA, 554 bp, Homo Sapiens
cttttttcatgtttgttgcagactctgtgctggttgtatttttaaaaatagagttcagacatttaatatttaataaggtgtcaacgtttacacagagtgttacaataaaaaaaaaccaacacgttgctatgtggtcgttccaacaccaaatgtgaatatatctcatcaaagtcgcacgtaggctcattcccagcacctctaggatagcaaataaatagttattaccgcgccagtgaaaatagggtctgcttaatgtttcccaagtcagatatacaggctctctcctcatgtaaatcatttcaaaggctagaagcttagtctgatagaacactgcccatacaaaattaaagcataatattacaattatgtggtaattcaatagttctccttgggtttctcatcttttccagcttagcatctaataatgaatactaagtagaatttgcacatgttggtaatttaaagtaatcagttctcacctaagtgaaacaaactgctctaaaattttccatttctgtgacttattaggctcaaaatctatcagtttacacatc

SEQ ID NO: 216834 - DNA, 574 bp, Homo Sapiens
gcgggcggcggcatgggggcggtggggctccgcgggcagcctggttgcgctgcacccggacggggccgaggggacctgaaagctgcggcagagcctgaccgcgccgttctccagaagagccccggccgcggctgagtcgcgctccgggtgtggacggagccggagcctccccggggctcggtgaggacacagggcccaagccccgggccttcaagtcttgaccgagcgcatccccggcccttctgcgcccacacctgagtttttgtctgtaggagtttccgcagtttgctaagaatcgacatctagaggagtactcaccacttaattgatgatcaatacacgttccttgaaagaaccgatagcatgcgatcgatacagagcatctgcactgggattgtccgccccgcctggcagggaggcctcgggggctaatggagctgagggtatagtcggccttggaccctcgcttttttcctttcctgtactatgaagataactgccttatctccccctcaggactgttttggggattaaataggacgtttaaattaccaacgctctttgaaataaacat

SEQ ID NO: 216835 - DNA, 638 bp, Homo Sapiens; identical to SEQ ID NO: 47268

SEQ ID NO: 216836 - DNA, 707 bp, Homo Sapiens; identical to SEQ ID NO: 40042

SEQ ID NO: 216837 - DNA, 757 bp, Homo Sapiens; identical to SEQ ID NO: 50874

SEQ ID NO: 216838 - DNA, 574 bp, Homo Sapiens; identical to SEQ ID NO: 46128

SEQ ID NO: 216839 - DNA, 659 bp, Homo Sapiens
aaaaagaaaaagaagggaaaattgcctaagaattatgacccaaaagttaccccagatccagaaagatggctgccaatgcgagaacgttcttactaccggggaagaaagaagggtaaaaagaaggatcagattggaaaagggacccagggagcaactgcaggagcttcatctgaactggatgccagtaaaactgtgagcagcccacccacctccccaagacctggcagtgctgcaacagtatctgcctctacaagtaacatcatacccccaagacaccagaaacctgcaggggctccagcaacaaaaaagaaacagcaacagaaaaagaagaaaggtggaaaaggtggctggtgatgagaatattcttgttgcaggctgtttttaaactagtgtcagtgacactaggaatataataaaggtaacacagcaagaagcacagaactactccctcttcatctccatattttcataatttcttgtgtttcaaatagggaaacatcttcctcaaagtctgcctagtgagatacggcctactggttgcctcatagctttgtacagattatgaggactgaaaataattgggcatttacccatcttggtatctgttgtatcctttatctgtgggggctgatttgatcttttttcagtttcacatacct

SEQ ID NO: 216840 - DNA, 718 bp, Homo Sapiens; identical to SEQ ID NO: 49099

SEQ ID NO: 216841 - DNA, 744 bp, Homo Sapiens; identical to SEQ ID NO: 49658

SEQ ID NO: 216842 - DNA, 478 bp, Homo Sapiens; identical to SEQ ID NO: 51835

SEQ ID NO: 216843 - DNA, 676 bp, Homo Sapiens; identical to SEQ ID NO: 48655

SEQ ID NO: 216844 - DNA, 522 bp, Homo Sapiens; identical to SEQ ID NO: 41734

SEQ ID NO: 216845 - DNA, 662 bp, Homo Sapiens; identical to SEQ ID NO: 52266

SEQ ID NO: 216846 - DNA, 687 bp, Homo Sapiens
gtcatgagttagtcaacgtaggtttgctttaaaataattatatgttcagacccttgtaaaatcttaaaaaatgtatgtgtgtttggatgttgcaaatacaaatatcagtctgttaggcaaaaattgtggaaaccacaactaaggtttgcgtcacttgtttaatatacaaagtctttcacagataattattttctttttcttaatttgctttagtacacatgattcacaaaacagtaaattgttaatgcaagagaattatgtaaaaccaaaatagtacaaatgcctaatttcaaaaactgcacacagttaaaataatttttccttctttgttttaatgcagtatccagtttcaaaatgggctttctttagatgtggaggaaacactgcagcccaaaataacagtacttcctttcaactgtgttgatatgtaaaatagcaccattgggctgacttaggaaagaaaaaaggttttcatctttcttaattaaagtattatataacaactataataataatgatactaataacttttaagagctgtactctgttctataatattcattttcaaggcaaggaagggtaaactatatggggcagatagaaaaatcttcccacctcagccccaggacccttataatgtcccttaatggtgtcattggtctaatgagctaattttcctgccaaaga

SEQ ID NO: 216847 - DNA, 595 bp, Homo Sapiens; identical to SEQ ID NO: 55280

SEQ ID NO: 216848 - DNA, 687 bp, Homo Sapiens; identical to SEQ ID NO: 43650

SEQ ID NO: 216849 - DNA, 747 bp, Homo Sapiens; identical to SEQ ID NO: 40280

SEQ ID NO: 216850 - DNA, 484 bp, Homo Sapiens
gcttggccctatattcttttacatatttaattttttaaaaaattaacaaagatagagggaaaacccaaaatggaatacgaacaggaacaatcaatctgaactttgtatcaaatgggtaataagactatgtaacaggaacaacacaacaacagttgctgcctagacattagaaatagaggccaggcacaggggtatgtgtatcagttggcctttactgtgtaataaacagccacaaaaattactagctgaaaacagcagctacttaattagcagaagcctcttgaggatggacttgcaaaccaaagttgtgctggtttctactggtcaaagcaaggactggctcacataaaaaggagagagattgcaccttcagagagtaatctcaagacatctgtaatctaccacagggtgtcactgggcctctgtcaaggagcctattctttctgccaccagatctgtctaatagcttgtgtgacaatgcact

SEQ ID NO: 216851 - DNA, 570 bp, Homo Sapiens; identical to SEQ ID NO: 50814

SEQ ID NO: 216852 - DNA, 665 bp, Homo Sapiens; identical to SEQ ID NO: 51364

SEQ ID NO: 216853 - DNA, 555 bp, Homo Sapiens
gcgtccggggtgacagagcgagaccctgtctcaaaaaaaaaatactgaagaattcaaggttaaactagatccctgcaaggccatcacctccattccaagttgttactttatttggtgtttttagcattgtaatagagtaagtaaatatttggtctttgtcccagttcttggcacagagctctccaaaaacactcggagtttgcagagtgctaggagtgtctttgtcgttcctagtgatccactttggaccacacctgagtttgttctactgtgaggtgattttggtggggcccctagatagcctcatagttggtttagtcagaaaggccaatcacttgatttgagggttaaaacttgtcagcccacttgccaaccttggggttgcagggccagagattgaactctataaaaactcctaatttgatgtgcttctggattggtgaacaactcgacatactgggtgggtagcatgcccagagacttgatggaaactctgcagccccctccccacccttgccgtatgcatctcttccatgggggttcctcagttgtatc

SEQ ID NO: 216854 - DNA, 652 bp, Homo Sapiens; identical to SEQ ID NO: 50432

SEQ ID NO: 216855 - DNA, 599 bp, Homo Sapiens; identical to SEQ ID NO: 54930

SEQ ID NO: 216856 - DNA, 560 bp, Homo Sapiens; identical to SEQ ID NO: 42244

SEQ ID NO: 216857 - DNA, 693 bp, Homo Sapiens; identical to SEQ ID NO: 43563

SEQ ID NO: 216858 - DNA, 560 bp, Homo Sapiens
ccccgcgtccgcaacaatctggactacaccagtacaagcccaagggagattacagggaactcttgcagcagacaagaatgagattttgttttctgaattcaacatcaactataataatgagctgccgatgtataggaaagggactgtgttgatatggcagaaggtggatgaagtgatgacaaaagaaattaagctgccaacagaaatggaaggaaaaaagatggcagtgacccggaccaggacaaagccagtgcccttgcactgcgatatcatcggggatgctttctggaaggaacatccagagattctagatgaagacagctgacccttttgcgcttcagttctggtgtgcttaaccatgcaagccctcccacctcccagggctccttgccttaggtggctgtagcatccctaccacccaggacactggtgcgaatgacacaactcaagttgggaggggaacagggaaggaagggatggatgggggtggtgtatcttactctgtttaagcagaacaccttgtttgcggtgttggaacatggttcctttggcagaagtgc

SEQ ID NO: 216859 - DNA, 625 bp, Homo Sapiens; identical to SEQ ID NO: 43562

SEQ ID NO: 216860 - DNA, 609 bp, Homo Sapiens; identical to SEQ ID NO: 42632

SEQ ID NO: 216861 - DNA, 551 bp, Homo Sapiens; identical to SEQ ID NO: 46836

SEQ ID NO: 216862 - DNA, 799 bp, Homo Sapiens
cgcgtccggagggaatggatatgaactacattatccaaaggaagaaagaatttcggaaccctagcatctacgagaagctgatccagttctgtgccattgacgagctaggcaccaactacccaaaggatatgtttgatccccatggctggtctgaggactcctactatgaggcattagccaaggcccagaaaattgagatggacaaattggaaaaggccaaaaaggagcgaacaaaaattgagtttgtgacgggcaccaaaaaaggcaccacgaccaacgccacgtccaccaccactaccactgccagcacagctgttgcagatgctcagaagagaaagagcaagtgggattcggctatcccagtgacaacgatagcccagcccaccatcctcaccaccacagccaccctgccagctgttgtcacggtcaccaccagcgccagcggctccaagaccaccgtcatctctgctgtgggcaccattgtgaagaaggccaagcagtgacctgaggggccaccctaggacttgaaaggaccgtgcagcccagtgaccactgcccagtgggaggcgccactttgtatatttcaggactgggacctactccccagatgccacctgagaggagcttctgtttggcattccagatggaaggacaggcagcacgggagccaggcgctgtggacagggtctgtccacgcaccacctggggtctgccgcctattaaaagtgccgtattcttacctcttggcatctcagatgcactggcctctcctgcattctggttgcaggcaaatgcttca

SEQ ID NO: 216863 - DNA, 609 bp, Homo Sapiens; identical to SEQ ID NO: 45122

SEQ ID NO: 216864 - DNA, 741 bp, Homo Sapiens; identical to SEQ ID NO: 44656

SEQ ID NO: 216865 - DNA, 747 bp, Homo Sapiens; identical to SEQ ID NO: 46737

SEQ ID NO: 216866 - DNA, 610 bp, Homo Sapiens; identical to SEQ ID NO: 55328

SEQ ID NO: 216867 - DNA, 755 bp, Homo Sapiens; identical to SEQ ID NO: 42550

SEQ ID NO: 216868 - DNA, 675 bp, Homo Sapiens
acatcccctgctcctgattcttctttctcagtgactctttttcataggcttctcttcattcatctgccacttaagagttggtattccccgagggttgtatcatggctctcttctcgctcaacatgttctacctgggccttcctaatcactcccatgctttagcgattccctgtgagtcagccaatgaaagatgagattggcttttgaagcacattaattctttaagacctctggtaaggtgacccagagaatgtcacattcagagttagccagtcttcccttggagaaggcacacaagaagcaaggaggtgacaagcagtgattattttaatgttctcttcctactctatagggccatccccctccctttagaaatgtaaagcggggaaataaagatggatctaccaatccataccagtatgctttccttttattggtgtgggtgtgccccttgaagagacgaccatcactgtgtcaagacaggccaataccacttccatgactccactcccctgagaccttccactatactttctgtgtcatcctgacacctgtagataatcaaatggtaggataggatattaatcactgtagcttaaagctaagtttctcccaaggctgacattcattccctgttctacttaccacctcagctcatagcgagacacttttgtc

SEQ ID NO: 216869 - DNA, 686 bp, Homo Sapiens; identical to SEQ ID NO: 45181

SEQ ID NO: 216870 - DNA, 605 bp, Homo Sapiens; identical to SEQ ID NO: 45589

SEQ ID NO: 216871 - DNA, 633 bp, Homo Sapiens; identical to SEQ ID NO: 42540

SEQ ID NO: 216872 - DNA, 693 bp, Homo Sapiens; identical to SEQ ID NO: 53169

SEQ ID NO: 216873 - DNA, 636 bp, Homo Sapiens; identical to SEQ ID NO: 52922

SEQ ID NO: 216874 - DNA, 587 bp, Homo Sapiens; identical to SEQ ID NO: 49659

SEQ ID NO: 216875 - DNA, 605 bp, Homo Sapiens
cccacgcgtccgggtgggctggtaccagcgctggcttcggtggaggaccaggcaccagcactggttttggtggtggactgggcaccagtgctggcttcagtggcggactgggcaccagtgctggctttggtggtggactggtcactagtgatggctttggtggtggactgggcaccaatgctagtttcggcagcacacttggcaccagtgctggctttagtggtggcctcagcaccagcgatggctttggcagtaggcctaatgccagcttcgacagaggactgagtaccatcattggctttggcagtggttccaacaccagcactggctttactggcgaacccagcaccagcacgggcttcagtagtggacccagttctattgttggcttcagcggtggaccaagcactggtgttggcttctgcagtggaccaagcaccagtggcttcagcggtggaccgagcacaggagctggcttcggcggtggaccaaacactggtgctggctttggtggtggaccgagcaccagtgctggctttggcagtggagccgccagtcttggtgcctgtggcttctcgtatggctagtgagggtttcagttaact

SEQ ID NO: 216876 - DNA, 617 bp, Homo Sapiens; identical to SEQ ID NO: 49711

SEQ ID NO: 216877 - DNA, 329 bp, Homo Sapiens
atgagaattcagaaggatctggaactggaacagtacaaaagaagttcttccaagtcttggaaacaaatcgagcttgattcttgaacctatttcaattattgtatatttatttcttcttttccaaatacaaataagattatactgtgaattaactattgtggcaatatgtgaagaaagttaaactgtataatttgttaaaggacaagctggatttcttggactagtgcatctccctgtatatcttgaagctttttaaaaggaaaaattattgtagaaccacgtgtaattttttttaaaataaaagaatcttctactacctaaaaaaaaaa

SEQ ID NO: 216878 - DNA, 615 bp, Homo Sapiens
cgtccgaggccatcaagacggagctgacacagatcaagtccaatatcgatgccctgctgagccgcttggagcagatcgctgcggtggcggtggcagcagccggccaccagccccccaagagaacacaacttctgaggcaggcctgccccagggggaagcacggacccgagacgacggcgatgaggaagggctcctgacacacagcgaggaagagctggaacacagccaggacacagacgcggatgatggggccttgcagtaagcagcctgacaggagcaatggccaccagcaggtgaagggcatcgctgccccaggcctcaagccgggcacccaaccctggatgccaccccccagcgggtaccagaggaaagctggcagcaggcgcctcctcccccaacgcatcccagccagtgccatgtcctctgcaggtggagttactggcctactccttccccatgagccctccctgtctgcactgcccaggccagagggtagagcacaggggtttccccatactacctcccctccccaggacactcccaggcttgggttttttctataggtttggcggggggccacagggaggggaccctgacaataaagagattggatcc

SEQ ID NO: 216879 - DNA, 721 bp, Homo Sapiens; identical to SEQ ID NO: 44703

SEQ ID NO: 216880 - DNA, 440 bp, Homo Sapiens; identical to SEQ ID NO: 53038

SEQ ID NO: 216881 - DNA, 504 bp, Homo Sapiens
cggacgcgtgggtcagagaatcagggccagctgatacttcaccctcttatcccaacgccaacccttgatagatgcgaaccagtcgtatttcctttgtgggaaaggagtcgctttttaaagacgtgcactggccatctagggaggagcttttacttcaactcaaaataggactggagctgactggtgacctggcgctcgatggacggaaacgctgttcttgccgcttcggcagctcccatactggtgggagaggcaaacttgcagtctgctcatcttaagatggtgaatgttgagatagggttgctcccgaaaagccgagaagaggagccgtttgacccaacttgagggtgatccgatagacactctttagggcgtctgcagagtgggtgcgcgtggagacagtcaataagagaaaatcgtaaatacagatggtattctaaatctagcatgcatgtaaagttgtgtgacattttaaagattacattttacactttaaaaaaaaaa

SEQ ID NO: 216882 - DNA, 619 bp, Homo Sapiens; identical to SEQ ID NO: 41005

SEQ ID NO: 216883 - DNA, 704 bp, Homo Sapiens
tgaggtggcagatagtgagcgctggtggcggagttaaagtcaagcaggagagtaattatgaatagcgcagcgggattctcacacctagaccgtcgcgagcgggttctcaagttaggggagagtttcgagaagcagccgcgctgcgccttccacactgtgcgctatgacttcaaacctgcttctattgacacttcttctgaaggataccttgaggttggcgaaggtgaacaggtgaccataactctgccaaatatagaaagttgaaggaagcagtaaaattcagtatcgtaaagaacaacagcaacaacaaatgtggaattcagccaggactcccaatcttgtaaaacattctccatctgaagataagatgtccccagcatctccaatagatgatatcgaaagagaactgaaggcagaagctagtctaatggaccagatgagtagttgtgatagttcatcagattccaaaagttcatcatcttcaagtagtgaggatagttctagtgactcagaagatgaagattgcaaatcctctacttctgatacagggaattgtgtctcaggacatcctaccatgacacagtacaggattcctgatatagatgccagtcataatagatttcgagacaacagtggccttctgatgaatactttaagaaatgatttgcagctgagtgaatcaggaagtgacagtgatgactgaa

SEQ ID NO: 216884 - DNA, 593 bp, Homo Sapiens; identical to SEQ ID NO: 52104

SEQ ID NO: 216885 - DNA, 783 bp, Homo Sapiens; identical to SEQ ID NO: 49064

SEQ ID NO: 216886 - DNA, 556 bp, Homo Sapiens; identical to SEQ ID NO: 44400

SEQ ID NO: 216887 - DNA, 642 bp, Homo Sapiens; identical to SEQ ID NO: 51431

SEQ ID NO: 216888 - DNA, 657 bp, Homo Sapiens; identical to SEQ ID NO: 55511

SEQ ID NO: 216889 - DNA, 736 bp, Homo Sapiens
tttgagatttttgattttttaatggcagcactctcataactacattcacggaccaaccaaagccatctccaagcctagaaaggatacatactacacgcagcgaaaatgccaaccactgatccagaattttcaagatggcacctttccccaaacttctataccattcattaaacatagactgcaaactgctagcctgtagaccaaattcaacctctaagtattatttgcttaggtgcctaagcatctttaaaaatttgatttagttggcaatacactgggaggtttcacataaatatctaggtttccagcttctctgaagaaatgagaaaatccattcccacatggcaacaaccagctggagctaacagctgttagacagcatgctgctccccgctactgccttacacccagccagcttcatgtgtgcatgttatctgcctgccattcacatcggttctccttgctcagcaaatgtcccacctcaacctcacactcaatacccttatacaggttccctaatcagagttcagtagggcacccacactatagctgggcaatccctggatgctgtgatatttgttaaccattatgttctttccaaccacgggaaccttcctaagagctcaagagcttcactgctggataaaaacagttcctgatcccggattctgacctttagttttccttttccagtcactgccccagtctgcctggccctgggctctggttccatatt

SEQ ID NO: 216890 - DNA, 494 bp, Homo Sapiens
cccccgtctgcgaatggaccactggaggggttcaaaggttcgcgtcccagtacgggaatgagcctctttgatctcttccggggctttttcggctttcctggacctcggaggtgagagtaggtccggctcggacaagggtgggggtcgtctgaggggagcttgacccctacgtcttatttttggaaaaacatcctctgtcccactccttcaactcctgcagagaggacagaagtcgcaacattgaacactcaccccgccacagtaaccaaggcggtcattaagaggagaaacagcaaactaagcctttctccaacctggggtgatgcaacagggacccgggcggggaagaccgtgagggtctggggaataagacagtgagcaagtgagcaggaccttgggagagagaggagggactggggcacactgaagaaaaactgggggaaggtgtatgaagggagctgcgagctgaggtctgactttgattaaaaaaaaaa

SEQ ID NO: 216891 - DNA, 453 bp, Homo Sapiens; identical to SEQ ID NO: 53883

SEQ ID NO: 216892 - DNA, 659 bp, Homo Sapiens; identical to SEQ ID NO: 43105

SEQ ID NO: 216893 - DNA, 733 bp, Homo Sapiens
ggttcctgccggctgtattcgggccttggactggactgaggagctacgtccaataatcttaaaggaattgtagtcgttgaaaaaacccggatgagtgaacaatacttcccagccctacagaagtttactgtgctggaccttggaatggtgctgcttccagtggccagccagatggaagcatcctgcctcgtcatccagttggttcaagagcaaaccaaagagcccagtaagaaccctcttctcgggaagaaacgggccctgctgctgtctgagccttcgctccttcgaaccgtgcagcagatcccaggagttggaaaagttaaagctccccttctcctccagaagtttccaagcatccagcaactgagtaatgcttccattggggaactggagcaggtggtcggacaagcagtggcacagcagatccatgccttcttcacgcagcccaggtgagggctggcctcagggccacggcatcttctcccgagaccacaaacaccaggatcttgttttcagctttaaaaaccaagagaatgggccaggtgcactggctcacgcctctaatctcagcactttgggaggccgaagacagcggatcatctgaggtcaggagttcaagaccagcctggccaacatggagaaacccctaaaaataggaacaattagccaggcatggtgacaggtgcctgtaatcccagctacttgggaggccgaggcatgagaatcacttgaa

SEQ ID NO: 216894 - DNA, 742 bp, Homo Sapiens
gcgtccgctggagcaatcagagcaccgcagccagggagatgctggcgagacgacagcgagatcctctccaggccctgcggcgccgcaatcaggagctgaagcaacaggttgatagtttgctttctgagagccaactgaaagaagctctagaacccaataaaagacaacatatttatcaaagatgtatccagttaaagcaggcaatagatgaaaataaaaatgctcttcaaaaattaagcaaagctgatgaatctgcacctgttgcaaactataatcagagaaaagaagaggagcatactcttttggacaagcttacccaacaactgcagggccttgctgtgacaataagcagagaaaatataactgagtatgcttcctttctacctttcttttttcttttttaaagatatatcaccaatagctttaatgtttaactcaaagacatatagcagtatagatataaacaaatgacactaacaatagaatcagtcaacatttacttattgtgtataatagaaggtgttagatcccatgagagatggaaagaagtgtaagtcatagtctctgccctcaggcaatttataatttagttgaaacaaaacagagatctgaaaagctaaatgaacaaatgttagaaaataaagatgatatatttaatgtcaatgttgatgtgtaaaagggaaatgattttggaatgtctacttgcattgttctcccctttcataaacattctttaaaaatt

SEQ ID NO: 216895 - DNA, 615 bp, Homo Sapiens; identical to SEQ ID NO: 43595

SEQ ID NO: 216896 - DNA, 648 bp, Homo Sapiens; identical to SEQ ID NO: 44379

SEQ ID NO: 216897 - DNA, 624 bp, Homo Sapiens
ttttttttttcaggttctagttcttgactttaatgcccttggagtgtactgaggctcaatacaccaaagcactcacagacaggtacatgaactcacacaggaagtgttatagtgtgtacataaacccaacaccatacagaaggaagacgacggacccaggtgacctcccacactcgaggtgactgcctgttcccatactcactgtttgttcccacctccctcaacccctgccaacccccatccttccccactcagtatgtatatacacagatatgattctttcagaattccaaaaagtgcctctcccaccccagttcccaacactacagctttggatgaaaaaagcctctctcttttaaggatcatgagacaggtaccaccttcacgcaagagccccagcaaaatagtacccaagaaagcttaataatgtatattggaatcaaatatggatagaacatatgcagaaggacaatatttgaaatattactaggatcaaaacgctcagcatcagtagtttttgttttgttattgctgtttgctttaacctgttcaagagctggtttaaaccaagaccacacatggatgctcacaccgcctgtgtcttataaatgtcacttcctattc

SEQ ID NO: 216898 - DNA, 626 bp, Homo Sapiens; identical to SEQ ID NO: 42901

SEQ ID NO: 216899 - DNA, 599 bp, Homo Sapiens
ggcagaactaaagagagttaaagaaaaccagaagaacatcagcaatctccagtataaagagcaaaactacaaggccactccggtaagcatgaccccggagatagagagagtgaggcgaaaccaggagcagctgagtgcggtaaaatataagggagaacttcaacggggaactgcaatttctgatccaccagagctgaagagggcaaaagaaaaccagaaaaacatcagcaatgtttattacagaggtcagctgggaagagctaccactttaagtgtaactcctgaaatggaaagagtgaagaagaatcaagaaaatattagctcggtaaaatatacccaggaccataaacagatgaaaggtagaccaagtctgattttagatacacctgctatgagacatgttaaagaagcacaaaatcatatttcaatggtaaaataccatgaagattttgaaaaaacaaaggggagaggctttactcccgtcgtggacgatcctgtgacagagagagtgaggaagaacacccaggtggtcagcgatgctgcctataaaggggtccaccctcacatcgtggagatggacaggagacctggaatcattg

SEQ ID NO: 216900 - DNA, 582 bp, Homo Sapiens
ggggataaaagaaactttttttttacaagtaaaataaagttatcaatttaaatcttggtacactttataaaaacaagaggtaatgttgtaataaaacagcagtagcctcagctggcaacatactgtttgttaaccctgtgcaataaaatactttgttcatactacacttattcaaacatgactaacagttactacagacatttcaggaatcttcacgggactcctatagacttactgttaaaaatgagagacatttacaatcataatgtgccatgaaaacttgaaaacgttacttctagtaggagataatgttcatattatttgaatttgttttaggtactgaacagctgagttacaaggactaaaagtgaaaagcattctaaaagcccatgaacactgttgttcacacccttcttcagaacacactaaacttgtctgacacatttctcttcatacatagcaagcaacagcacccaataaaagcctgagaagaaatgctgctgtgtaaatactgcaactattcctgaaaaaagaattatgggatatatactccaaagctgcccattcccataatttgtattg

SEQ ID NO: 216901 - DNA, 521 bp, Homo Sapiens; identical to SEQ ID NO: 43896

SEQ ID NO: 216902 - DNA, 592 bp, Homo Sapiens; identical to SEQ ID NO: 46641

SEQ ID NO: 216903 - DNA, 779 bp, Homo Sapiens; identical to SEQ ID NO: 40353

SEQ ID NO: 216904 - DNA, 546 bp, Homo Sapiens
  misc_feature (538)..(538): n is a, c, g, or t
agcttttcttgatactttaatccaatgattaaaaatgtgatataaagaaatacgtaacatagactacaagctatcgtaggtctggatcatgagccttatattatattacatattctaatcctacatgtaactatcagtaaacatctttttttaaaacattactacacaaagaattccacaaagcatacattcaaacaagaggcatctaaagattaaaaaaattacccgctgtatttttgtataaaaataatcaacattctctaatgtacacaaagccaaaagataaatatagtatctgtgatgtcttcagtgacatctttagtcttctaccagctcaacacaatctttttgaaaagagcagtgaaaatgactgaaactcacggactctttttttcccctccttactcgacttctgccaaatatctgtgtatgttccttcaattactaaaatatctcaattgtggtaatataagaaaagatgaaaacaaaacattcatcatctcaaataaaatttttgatgtccaggactataaagctntcagggct

SEQ ID NO: 216905 - DNA, 496 bp, Homo Sapiens; identical to SEQ ID NO: 43343

SEQ ID NO: 216906 - DNA, 437 bp, Homo Sapiens
ggcaatggaaatttattataaaataccctcagctggcaacacagcaggcccaagccaacgtctcctgcaggcctcggacggccagggctctggctggcccccagagtcaccgtcctgtgatgaggcactccacaaaaggaaataccaacctcatgaagacagcggggactccatggtccttgggccatgacttgctggtcctcagaggcccttgacgggctcctcatggcaggcgatgcggctgcacaccttctgctcagagacgtcccacaggaccaccgatccatcctcatagccggccagaaggagtgggcgggagctgcagtcggcctgccacagccgcaggcacatgggcatgcccagcttggcatctgccttcggcttcagggcgcacacctgcgtcttggagggcatctccagaatctgaaactcgtcgc

SEQ ID NO: 216907 - DNA, 522 bp, Homo Sapiens
gcgtccggaaagtaccatcggattcaaacttcccagttaccgagcagctaagaaattatggaaagtctgtgtagaacatcacacgtttttcagattgacatctacagacaccattcccaaaagcaaatttcttgcgctaggatccaaatttcgatacagtggccggactcaagctcagaccaggcaagctagtgctctaattgacaggcctgccccacacttcgagcgtacagcaagtaaacgggcgtcccggagcctcgatggagcagcagctgtcgattcggcagaccgaagtcctcggcccacttctgcacctgccattactcagggtcaggttgcagaaggtggcgtcctagatgcctctgctaaaaaaacagtggtccctaaagcacagaaggaaacagtgaaggctgaagtgaaaaaggaagacgagccacctgagcaagctgagccagagcccacagaagcatggaaggtggaaaaaacccacatcgaggtgacagtacccacctcaaatggtga

SEQ ID NO: 216908 - DNA, 608 bp, Homo Sapiens; identical to SEQ ID NO: 43436

SEQ ID NO: 216909 - DNA, 477 bp, Homo Sapiens; identical to SEQ ID NO: 48429

SEQ ID NO: 216910 - DNA, 665 bp, Homo Sapiens; identical to SEQ ID NO: 46434

SEQ ID NO: 216911 - DNA, 658 bp, Homo Sapiens; identical to SEQ ID NO: 52901

SEQ ID NO: 216912 - DNA, 519 bp, Homo Sapiens
caatttcaatggctatttttatttctttgactaattcttctgccacacacttccagtgctacattaaaatagaaccagacaatgggcataatatagttttgtactggtgtctgaatttgatggagcaaacaccttttcaagttttcataaactgatgttagaaggtaaagatctttcgttgggcccttagggtgatgagatgccctctgaatttgtagtgatgaggggttttagcctggtcacaaggttgctgggtctgcactatagtccacctttagctggcttgttagagggggttggggagttgaaatcttcattttagttttggacagactaaatatccttcaggacttcactctgtacggcagacactagggcatgttttggcagtcaggtctgcatatggtgggccttgtatcaggatgtggatgagtgtggctttcagtgagtaccagagagcatttcctcaggttaactgtgtggtttctatataggcagaactgaccttaagctgtggct

SEQ ID NO: 216913 - DNA, 631 bp, Homo Sapiens; identical to SEQ ID NO: 41997

SEQ ID NO: 216914 - DNA, 747 bp, Homo Sapiens; identical to SEQ ID NO: 40682

SEQ ID NO: 216915 - DNA, 639 bp, Homo Sapiens
cgtggaacggtctgtccgccggtctgtcccgcttgccgggcttctgttgcaagtcttggcttaaggagacttcctgtgggttgccatgtcgcacgtccgttagatcttgattttacaggtgagggtggttgccaaaggtgataagaaaagcagccaacaggctccctctcacttaagagagttctaattaataacactaaattcttcctgagaaatgactcctcttggtttggtttgaagtttttcagtgaaggaaaaggcctgagataggaagcagtgccctcgcttcatgaggtggcacatcttcggtggccgttggcctggtcgagctttggtcagctgcgtgggtgcctgtctcctgtctccagcggcagggcatggttcttggcagcctggtgtccacacggtgcattcctgtccccctcggccccaggctggctcagctctccagtgctgcggcgctgtctttgcagcattgccatgtcaccgtagcccccttcactcttggaagtttggggcttcaaggtttattctggcaagaacacctcggagccactgcattgttttgccaaaaacttactgcagattaagtaaagaacttaaatgctaaattacatctaattttggatggttttttaa

SEQ ID NO: 216916 - DNA, 538 bp, Homo Sapiens
taaagattaattaaatttgccactcacgaaaggcctgtattccatagctatcatctgtaaacatgaacaacatttactgctggatggggaatcaccagcgcatggaagaactcttggtggatgcgttgtctggagcctgctcactccgccacgttactcagcaatgctttccctgtttctggataccacgctcccttctgaacgatgaagcatgaagcaccacgctccataaaagaccctccctctccccgtgggagggctcaggaaggtgagggatttggcccccatttttgggaaggctactcattagctccttgttattcaaagtgtgaccctgaggagttgcatccacacgccctgggagtgggtgagacgcataggcacccaggcccacccaggcctgctggagcccagactgccagggccctcccgagcacattccaatctgggcagcaggggagccttacattatgctgggatgatggtgacttttcatttttcctttgttttacaagctatgagacctgagtatgtactg

SEQ ID NO: 216917 - DNA, 792 bp, Homo Sapiens; identical to SEQ ID NO: 43291

SEQ ID NO: 216918 - DNA, 669 bp, Homo Sapiens
ccacgcgtccgctttttggtctggagacgatgccgcaggagagagaagttcaccagtaagtgtgccctggcctgcccagccctgtcagcactcgaccttttctctgctgctgacgaccccacctcttatcttgcagcccccatagaggagaccggcggagagggctgcccagctgtggcgctgatccagtgacaatgtgccccctgccagccggggctcgcccactcatcattcattcatccattctagagccagtctctgcctcccagacgcggcgggagccaagctcctccaaccacaaggggggtggggggcggtgaatcacctctgaggcctgggcccagggttcaggggaaccttccaaggtgtctggttgccctgcctctggctccagaacagaaagggagcctcacgctggctcacacaaaacagctgacactgactaaggaactgcagcatttgcacaggggaggggggtgccctccttcctagaggccctgggggccaggctgacttggggggcagacttgacactaggccccactcactcagatgtcctgaaattccaccacgggggtcaccctggggggttagggacctatttttaacactagggggctggcccactaggagggctggccctaagatacagacccccccaactcccca

SEQ ID NO: 216919 - DNA, 709 bp, Homo Sapiens
ccccgcgtccgaagaactataataaaaaagaatcatagagaaagttattcatcgactcacacactatgatcatgttctaattgagctcacccaggctggattgaaaggctccacagagggaagtgagagctatgaagaagatccctacttggtagttaaccctaactacttgctcgaagattgagatagtgaaagtaactgaccagagctgaggaactgtggcacagcacctcgtggcctggagcctggctggagctctgctagggacagaagtgtttctggaagtgatgcttccaggatttgttttcagaaacaagaattgagttgatggtcctatgtgtcacattcatcacaggtttcataccaacacaggcttcagcacttcctttggtgtgtttcctgtcccagtgaagttggaaccaaataatgtgtagtctctataaccaatacctttgttttcatgtgtaagaaaaggcccattacttttaaggtatgtgctgtcctattgagcaaataactttttttcaattgccagctactgcttttattcatcaaaataaaataacttgttctgaagttgtctattggatttctttctactgtaccctgattattacttccatctacttctgaatgtgagactttccctttttgcttaacctggagtgaagaggtagaactgtggtattatgggatgaggtttctatga

SEQ ID NO: 216920 - DNA, 585 bp, Homo Sapiens; identical to SEQ ID NO: 45945

SEQ ID NO: 216921 - DNA, 734 bp, Homo Sapiens; identical to SEQ ID NO: 42646

SEQ ID NO: 216922 - DNA, 595 bp, Homo Sapiens
cgcgtccggcctgcaaggcaggctgcctggacgagccagtggagctgacctcggcgcccacgggccacaccttctcggtcatggtgacacagcccatcacgccactgctctacatctccaccgacctcacacacctgcaggacctgcggcacacgctgcacctcaaggccatcctggcccatgatgagcacatggcccagcaggaccccgggctgcccttcctcttctggttcagcgtggcctccctaatcaccctcttccacctcttcctcttcaagctcatctacaacgagtactgtgggcctggagccaagcccctcttcaggagtaaggaagatcccagtgtctgagtgaactaacagtcctgctttcagccaccatttgcacaagacacccagcactgaaagtcccgctgccaggagcaagggatcctttggaagcacccgccctttgtgccttgttgggggaaaccggtgacgcagaagtgagtgtggatacaccagagtttgcattggaaggaatgagtgtcacgtggggagggaaggggccagtggaccttttgtaagctttccactcaataaaatgaacctgtatg

SEQ ID NO: 216923 - DNA, 493 bp, Homo Sapiens
ggtctctccttgctgtgctcctgtggcactaaactccttttgattggttctttctttccttcccagctagactaagcccctcatgggcaggtaatgaagattgaaaacttttttctgttctccagtgtgagcacattcctcctacatggtagatgtgcaatagatgtttttaaaattggagaatgaaaataaaagaagaaaatcacaatttcttatcaagttgtagcttggtatcatacacaattgcattctgaggaattaaggtggtacaacttagggagatttggtgtgtctgctgtgatagaaaagatttctttttcctagctttccctgaggaaaggaaagatggaaagagggaagccatacagatatccctctgttttgcagtgtagaaactgaatgtgtttctacagggtcaagagacatcagagaaattttttttttttagaacagaagatcatttcttacatcttcattaagtaaaagaataaat

SEQ ID NO: 216924 - DNA, 638 bp, Homo Sapiens; identical to SEQ ID NO: 52227

SEQ ID NO: 216925 - DNA, 651 bp, Homo Sapiens; identical to SEQ ID NO: 50897

SEQ ID NO: 216926 - DNA, 541 bp, Homo Sapiens
agttctcctgagagaccggctttggggaggggaggggggaaggaagagtagctccttcttcttcttcttttttttttcttccactcttaaaaagcttctttctcttcacccaagcctcactgtccctctccggctctagctctctccatataaaccctcaagattatgtcaattggttagagccagccgggaatttcgtgcgggtgctgaaggagctgcgggagccggagaagaatgaaactgcgtggagtcagcctggctgccggcttgttcttactggccctgagtctttgggggcagcctgcagaggctgcggcttgctatgggtgttctccaggatcaaagtgtgactgcagtggcataaaaggggaaaagggagagagagggtttccaggtttggaaggacacccaggattgcctggatttccaggtccagaagggcctccggggcctcggggacaaaagggtgatgatggaattccagggccaccaggaccaaaaggaatcagaggtcctcctggacttcctggatttccaggga

SEQ ID NO: 216927 - DNA, 519 bp, Homo Sapiens
ttttttgatattttaaaaattatttatttaacaactggtatgtacaaaatactatctatatgggaaagaaatacatacctgacctcaaagagcctacaataagttggtataaaagtatacagacacgcaaaatttacaaggcaattaaccacagttacatattgtagcaccagtgaattcaaagcactgaggtcaaatcaagagaagttgaagaaaaataaaaaagtacttgaagaagaaagtatttcagtgatgagatggatttcaaaaattgtgagggacaaagattagcaaacagaagaaaatgttttctagatagggaacaaaactgatgaaaagttatagattaaagtttaaagagtagatggggagggccatagccaagaggcaggaaggcatgaatcagcctttttgaatgactttgtataaatggtgaaatggaggaagtagaatagaatagagaagatattatctctgtctttaaaaagcatggagtctgattatgagatgcataactaa

SEQ ID NO: 216928 - DNA, 732 bp, Homo Sapiens
gggaggacttgcctgtgacatgacccagggatctgctgctggcttctggagacagggccttgggctgacttctcaggttgattgaggcctcctgactagcggtgttcccaggctagaggtgattggctgcaacaaagatgcttctattagtctattagcagtgccttcgggaccctgggattttgctctctctagaaaggtgttttttatttttttattttttatctcccccttttttcctggctttgctccagggtttgtgtatttgcctgtttattgtcctgctctttttttttttggatgaaaactccagcctttcctgactcacctccatcttcggttcttcagttttctgagaagagttgggatatgtgggaaggggcatgggagctcggcagcctccgcctgccaggaaggcagtttcgcctctgcaggaaagagcagagcccgtgggaagccctgggtgagggtggcgcagccggcccagcacgcatggtattgccagccacggggggcctgcgtgtagtctctgctccctgcatttcaccttctttgttgactttccttctctgttttcccccatctgtttgccagaggggtgggactggcaacagaacagccgtggctgctttatctctcctctccacggtgtactcaggcctgagtggtgactcacgggagcctggccacctcgcagctgttcgccccctcaacctttgaactggaactgct

SEQ ID NO: 216929 - DNA, 507 bp, Homo Sapiens; identical to SEQ ID NO: 43104

SEQ ID NO: 216930 - DNA, 755 bp, Homo Sapiens; identical to SEQ ID NO: 46522

SEQ ID NO: 216931 - DNA, 562 bp, Homo Sapiens; identical to SEQ ID NO: 49087

SEQ ID NO: 216932 - DNA, 675 bp, Homo Sapiens
gtccgattcagacttcagacgctgaaactgctgcctttcaggaaagcaccaccaacgctggaggaggagccggccctcacgcccgccccgcgccacgctgtggaacggggctccggcaagtgaaacccagagggtgtttccgaggtgctcgacagtaggtatttttggaagctcagatttcaccatttgattgtataatcttttacctataaaatatttatttgaagtagagggtaaatcagcggtaagaacagtgaacacagtggttgggataaaataaggtgacaaacatcacaccaaagatgagggtagcgagcaactggcttgagcagacagaacggggaagactccactctgtcccgaggggccagccgcaggcgtccccagggccaccctgccctgaggtccttgtgtggccgccctggcttggcagccctgcccacgctgcccccgcaaacaatggtgtgtgcgtttttacagccctttttaggaacccaatatgggcataaatgtaacacctgtagcgggggcagattctctgtatgttcagttaacaaattatttgtaatgtattttttttagaaatcttaaatattgcctttgcactgaagtattttcatagctggttatatctcttttattcatttatttaacatactggctaattttaaaata

SEQ ID NO: 216933 - DNA, 688 bp, Homo Sapiens; identical to SEQ ID NO: 40109

SEQ ID NO: 216934 - DNA, 522 bp, Homo Sapiens; identical to SEQ ID NO: 43753

SEQ ID NO: 216935 - DNA, 539 bp, Homo Sapiens
tccgcggctttgtcatcttcttcgctgttgccgacaaggtccacctgatgtataagttcagggtggactttactgaggctttgtacccggctttctgggtattttctgctggtgccacactctccatctgctcccccaagtaggcaggctgtaggcacttgggctgactgcctgcagaagtcccaagaccctagtgaaaatacagcaggcagaactctccttggataattccccaagaggtcccaaggattgggagcatgggaggggagctggcgggagggtgggaggtgggatttacccaggaaaggggtgagagtgattgtgttgtgggcgaggaggcgtttccaccccctggtgcctatcagggcagggtgacctactccccattgttctggaaatctccaggctgctgggcagctgggcagagctctgggaagtgaagtcatgagtgcccgattcctcttaaaaggtttgaatgcaataaagcggtgtttggcgttctcctgcattgtagtgcgggtacaaaatgctatttgttc

SEQ ID NO: 216936 - DNA, 676 bp, Homo Sapiens
ccggccctgcaacccggggggacgcgggggccgaagggctgaaccactgggcccggatggggctcacagagcggaacgctccacgagaatcgtgggggcgagggaaagggtcaagattaccagccattgaccaccctcccgggaagggccttagcctgggaagcacagcttctccgtcaagtttttcccgagctcccctcgcaatacaccaggaagctccgccccgtcggagactcaatcttcgcatctgcaaaatgggcgcaggggtgcaaatgggtggccgtggttgccggggctggggagatggcccacttgttccagccacggtcacctctcttctcagagtgaagttcccagaccctacgccccgctgtcaggcagcccgccgatcagatggaggagaacgaggtggagagcagcagcgacgcggcccctgggcctggccggcccgaggagccctctgagagcggcctggggtgtgggcacctcagaagccgtgtccgccgacagcagcgacgccgcggccgccccggggcaggcagaggccgatgactctggcgtggggcaaagctcggaccgcggcagccgttctcaggaggaggtatctgagagcagctcgagcgcagaccccctgcctaatagctacctccctgattcatcgtctgtgtctcatggg

SEQ ID NO: 216937 - DNA, 644 bp, Homo Sapiens; identical to SEQ ID NO: 48462

SEQ ID NO: 216938 - DNA, 672 bp, Homo Sapiens
agaaagttatggagatgattccccagatttccagtttttgcctggtaagagacaggaaccacatacaaagtgcaaacttggatgaggaggcacaggctggtaccatgttcactacaggtaatgttggatcaccatcctgttgctattacagtggaggtgaagcaagaagaagacattaaaccacctcctccactggttttaaattctcaacagagtgatactttagagcaaagagaagaacatgaattagtacatgttatggaaagatccttgtcgccttcactttcctctgttgatatgagaatgacatcgtctccatcttctattccaaggagagatgatttttttcggcatgagagtggtgaacactttaggtcactattagggtatgatcctcagatcctgcaaatgttgaaagaggagcatcagataattttagaaaatcaaaaaaattttggattgtatgttcaggagaagagggatggattgaaaagaaggcagcagctagaggaagagctactaagagcaaaaattgaagtggagaagctgaaagcaattcgcttacggcatgatctacctgaatataacagtctctaagttttttttttcaatcttgcaatttgataattttgattttggccaaattactttaatttgggaatatcctgaaac

SEQ ID NO: 216939 - DNA, 508 bp, Homo Sapiens; identical to SEQ ID NO: 41224

SEQ ID NO: 216940 - DNA, 733 bp, Homo Sapiens; identical to SEQ ID NO: 46726

SEQ ID NO: 216941 - DNA, 702 bp, Homo Sapiens; identical to SEQ ID NO: 47299

SEQ ID NO: 216942 - DNA, 709 bp, Homo Sapiens; identical to SEQ ID NO: 41246

SEQ ID NO: 216943 - DNA, 739 bp, Homo Sapiens; identical to SEQ ID NO: 50870

SEQ ID NO: 216944 - DNA, 603 bp, Homo Sapiens; identical to SEQ ID NO: 44244

SEQ ID NO: 216945 - DNA, 681 bp, Homo Sapiens; identical to SEQ ID NO: 55493

SEQ ID NO: 216946 - DNA, 641 bp, Homo Sapiens
gggatgagatggaggagtccgacgtggaggaggacctccgcagactgacccccctcaagcctgtgaagaaaaagaagcaccgctttgggctacccgtatgacacattcccatgctgggggtgacgggagggccccgccagccgctggtgtgcagaggtcatcccacagcatcgttccttaccctctctctgcccttcctttctacctctgctcctcttgctgtctctgcccgctctcgcctgcccccagactactgtgacttaaaaagagggaagaggagccagcgcccgagggggccactggcggctggaggtccccattcagttgcactacaaacactgaccaaatatgcaaggaaggagctgtgtttgtttgttgtcgtcccagacagtgttgtgagggacctgaggccctgccccgtgtccgaccaccgagtggcaaggtggaaggaagcacaggcacacagaccgtgggtgggtctcctcaccgtggctgtgggcagtgcgaacacgtaacaccctcgggctaaaagtgactcgttgaccaagttggaaccggaatgctttcttactcaaaatggcttttgtaactattgatttctgaagctggttttatgagttgtgacagtgttaccaggttgg

SEQ ID NO: 216947 - DNA, 411 bp, Homo Sapiens
ttttttttttatgtttttgagatggggcctcaacacactgcccaggctggaatgcagtggctgttcacaggcaccatcatagctcactgcagccccaaactcctgaattcaagggatcctcccgcctcagcctcctcagtagctgggactacaggtgtgccacaatgccctgtaaaggactcagatcccaaaaagttttaagacttatacactgtttcacggaaaagaaatatggaacagtttcaacatctcagtgctgctcaggtttaagaaaagcaacattcagggcattgtggctgacgcctgtaatcccagcactttggcaggtcaaggcaggcaggaggtcaggagttccagaccagcctgtccaacacggtgaaaccccatctctactaaaaacacaaaattagc

SEQ ID NO: 216948 - DNA, 667 bp, Homo Sapiens
ggtttccacagagaccttttaatcaaagtgaagtttggggaaagcattgaggacttgcacacctgccgtctcttaattaaacaggacattcctgcaggactttatgtggatccgtatgagttggcttcattacgagagagaaacataacagaggcagtgatggtttcagaaaattttgatatagaggcccctaactatttgtccaaggagtctgaagttctcatttatgccagacgagattcacagtgcattgactgttttcaagcctttttgcctgtgcactgccgctatcatcggccgcacagtgaagatggagaagcctcgattgtggtcaataacccagatttgttgatgttttgtgaccaagagttcccgattttgaaatgctgggctcactcagaagtggcagccccttgtgctttggagaatgaggatatctgccaatggaacaagatgaagtataaatcagtatataagaatgtgattctacaagttccagtgggactgactgtacatacctctctagtatgttctgtgactctgctcattacaatcctgtgctctacattgatccttgtagcagttttcaaatatggccatttttccctataagttttatgtagttaaatgcttcctagaaacctaaataagatctattaatttctga

SEQ ID NO: 216949 - DNA, 778 bp, Homo Sapiens; identical to SEQ ID NO: 47993

SEQ ID NO: 216950 - DNA, 215 bp, Homo Sapiens; identical to SEQ ID NO: 46035

SEQ ID NO: 216951 - DNA, 684 bp, Homo Sapiens
aagacatcaagtttctgccagccccatttacatctccaacagaaattatgcctgatgttcaagatccaaaatttgctaaatgttttcacacatctttttccaagtgtacaaaattacgtcgctctattagtgccagtgatcttactttcaaaattcatggtgatgaagatctttctgaagaattactacaggacttaaagaaaatgcaattagaacagccttcaacattagaagaaagccataagaatctgacttacacccagccagactcatttaaacctctcacatataacctagaagctgatagttctgagaataatgactttaacacgcttagtgggatgctaagatacataaacaaagaagtaagactattaaaaaagtcttctatgcaaacaggtgctggtttaaatcaggtatgtattttatacactgtaaactgtaataatttgtttccaaagaatatcattttattacttggaagaaaattcatatatttaaatgaaaaactactaatatttgaagaaggaagattttacattttatacattaagtaaaatcaataccaaaagacattttctctattgcatggtgtgagacaatacggggaaagagagaggcagagggagacagaacaggaagtagaacgaaaaataggaagatagacatgaaagtgcttaaaat

SEQ ID NO: 216952 - DNA, 655 bp, Homo Sapiens; identical to SEQ ID NO: 51461

SEQ ID NO: 216953 - DNA, 633 bp, Homo Sapiens; identical to SEQ ID NO: 42183

SEQ ID NO: 216954 - DNA, 509 bp, Homo Sapiens
tctcttcctgctcctaacaaacaggctttggtctgcagcaaggcctaggcatgactattcaaacagagggagaggagacagacagctgaatggctcagcttctctctggtggtggtttctggctggatagaataagcctgacgaaacctagctattgtaagctagtttcttcagttattcttttccctatccctgtctaagctagatatatacagagaggtccagttttatgaatgcttattagatggaattttataagtctaatgcagtatcagaatagcaaatatgtgtattgcccagtttaatttactgaggtcaaattatcatgggcacttggctatcccctcctacccatgcacttatctgtaggtgtgttatcaactgatgattttctggagtttttgacccattaccatttaagatatacagagaattttatggtagtttagcccactattctgagctaaacaggtctaactcagaacttctatattttaaaaaaaaaaaaa

SEQ ID NO: 216955 - DNA, 767 bp, Homo Sapiens
ccttttatctacttctttctctaatcctggtttctgtggggttcgtggtcacagtgttcggagtaatcatattcaaagtttacaagtggaagcagtctagagacctataccgagccccggtgagctcactgtaccgaacaccagggccctccttgcacgcggacgccgtgcggggaggcctgatgtcgccgcacctttaccatcaggtgtatctcaccacggactcccgccgcagcgacccgctgctgaagaaacctggtgcagccagtccactggccagccgccagaacacgctgcggagctgtgatccggtgttctataggcaggtgttgggtgcagagagcgcccctcccggacagcaagccccgcccaacacggactggcgtttctctcaggcccagagacccggcaccagcggctcccaaaatagcgatgacaccggcacctggcccaacaaccagtttgacacagagatgctgcaagccatgatcttggcgtccgccagtgaagctgctgatgggagctccaccctgggagggggtgccggcaccatgggattgagcgcccgctacggaccccagttcaccctgcagcacgtgcccgactaccgccagaatgtctacatcccaggcagcaatgccacactgaccaacgcagctggcaagcgggatggcaaggccccagcaggtggcaatggcaacaagaagaagtcgggcaagaaggaaaagaagtaacatggagggcaggccaagagccacagggcgggc

SEQ ID NO: 216956 - DNA, 524 bp, Homo Sapiens; identical to SEQ ID NO: 59917

SEQ ID NO: 216957 - DNA, 517 bp, Homo Sapiens
cgcgtccggaaatccctggagaatttttggtgacatgcactgagccaaggtgatggactgtatatttgaggaaagacaaacaaagaaacaaaattaaaatggaattggaggccgaacgctgcacagctgccctctctctcacccagtaaatgcagaaagctcttaggacagacagaaaacctgccatggggctgcttccctccctcgcagggctggcggaggctccgcatcgcctctctcctaggatacagaaaccatggcaacgaaagtagaatgtaaaactcgcagcagatatcagtgggaagggctgggggagggggcacccagctgcctttcctccctcacaggagccaccaccagccacctctcaggagaagccagaggccctggccaaagataggaggaagaaagagaactctccatagaatgtaatttatagatgcgtgtatatgtatatatatctatttatatgtaaataggcatatatgaagatatatatatatagtctactttttaa

SEQ ID NO: 216958 - DNA, 781 bp, Homo Sapiens
cgcgtccgggactgaatctttaagtggacatgagggacaaagtacctcctgttggtaaacatctcaccaccaacccactgtggtggctaaaatcccacctttagtcccagcaacatatgagcatgtcaccaggaggtcttcacaggcctgtctgccacctgagtgtagacatcttttggccctggagcccagagaggctgaatgtggagagggtggagagaggtctgtagtcctcagagaagacttgcagctttttcagagccaccaacccataaaaaaaaaaatccccaaacagaaaaatcctaactgtggtgaccaggtacctcctgagacatgaagcctccacttacctggaccctggaggcctctccgggcacagctgccaatgttgatcttagataagaccaccagcaagtaaacatccactgtgcaaagctgtgttatctttggggaactgaaatgtcccctgggagttggaaactcccctagccacataccacagagttgaggaaggaagagctgatggacggaagaaccatggcgggaggagtcatccggaagctacctcgctgccctgtcagttacggaacagaggagagatgccggctggaggacacagcaaatttgaaccaagaggagcttggaggaagcccgagcgacctggaggggactggctgaccttcctcattcttttcaagtgtgaataataaccaagcccagtttggcaactccttgagggtgaggacgaagccccattctcctttttggaacttggtggggc

SEQ ID NO: 216959 - DNA, 594 bp, Homo Sapiens
ccccgcgtccgattaatttacaaagactatttacagttttaattacaaaccttgtgggggtgttgggcagagagttctcttttaaaaagcaacctaaaagtgaaatggtttcgatcgttttttatttaaaaaaataaaatacggagtctgtaggggccccaccccgggcggaggaaagcgccgcgcggttccggcctgggggcgtccctcacacggtggtctcaccgtgtcggctgttggtgaggcgagtgtagaacttcctccacgagtgcagcgtcttgcccgaccagatccagaagcccgacgtgatgcccacgatgagcgtcatgaggtatttgatcatgtagaccgtgaagtcgggcgacatgcgcggcgtgtagtgcgccgggcacgggatggccaggctcttgcagtgctggctcacccacgagcgctcccagtgctcgcggaaggcctgctcgtagaagtagcaagcgatgacgatggtggcgggcactgtgtagagcacggagaagacgccgatgcgcaccatgagccgctccagcttttcggtcttggtgccgtcgtgcttcatgatggtgcggatgcggaaga

SEQ ID NO: 216960 - DNA, 618 bp, Homo Sapiens; identical to SEQ ID NO: 52703

SEQ ID NO: 216961 - DNA, 641 bp, Homo Sapiens; identical to SEQ ID NO: 51455

SEQ ID NO: 216962 - DNA, 712 bp, Homo Sapiens; identical to SEQ ID NO: 44554

SEQ ID NO: 216963 - DNA, 511 bp, Homo Sapiens
cagtaattccttattgtttattctcctcttacaaaaagacacttgggacaaataaatacaaaatggcatatatcatatttagcaatgggcaaatacacattttcttggtattctccacaagaataaactaataaaattttcagaggcatactcttctacccatctcttaccctctaaaaaaaaaaaaaggcaattattttaattccctgtaatttttaacaatgaattctcaaaataagtaatctaggactattcagggaccaagacatctgaatcaacaagttaaaaaaaaaatgtctgtatacacacacacacacacacacacacacacacacacacgatgttgcccagaagctccaattaatgaagagtcttaaaagtttttcatttcatatagtttgcatgaatagagcctgttctattctaatctcaatggcaaataatataaaacagaaagctgaacacaacatgtgtgtgtgtgtgtgtgtgtctacttttctgtcctaagaga

SEQ ID NO: 216964 - DNA, 593 bp, Homo Sapiens
gggccgtccagcctgcagcatgagcgcccccagcgcgacccccatcttcgcgcccggcgagaactgcagccccgcgtggggggcggcgcccgcggcctacgacgcagcggacacgcacctgcgcatcctgggcaagccggtgatggagcgctgggagaccccctatatgcacgcgctggccgccgccgcctcctccaaagggggccgggtcctggaggtgggctttggcatggccatcgcagcgtcaaaggtgcaggaggcgcccattgatgagcattggatcatcgagtgcaatgacggcgtcttccagcggctccgggactgggccccacggcagacacacaaggtcatccccttgaaaggcctgtgggaggatgtggcacccaccctgcctgacggtcactttgatgggatcctgtacgacacgtacccactctcggaggagacctggcacacacaccagttcaacttcatcaagaaccacgcctttcgcctgctgaagccggggggcgtcctcacctactgcaacctcacctcctggggggagctgatgaagtccaagtactcagacatcaccatcatgtttgaggaga

SEQ ID NO: 216965 - DNA, 722 bp, Homo Sapiens
agagtgtgcccgctgcgccgccgctgtccgtacctgccgccgccgccaccgccaccatgcccaacttcgccggcacctggaagatgcgcagcagcgagaatttcgacgagctgctcaaggcactgggtgtgaacgccatgctgaggaaagtggccgtagcggctgcgtccaagccgcacgtggagatccgccaggacggggatcagttctacatcaagacatccaccacggtgcgcaccactgagatcaacttcaaggtcggagaaggctttgaggaggagaccgtggacggacgcaagtgcaggagtttagccacttgggagaatgagaacaagatccactgcacgcaaactcttcttgaaggggacggccccaaaacctactggacccgtgagctggccaacgatgaacttatcctgacgtttggcgccgatgacgtggtctgcaccagaatttatgtccgagagtgaaggcagctggcttgctcctactttcaggaagggatgcaggctcccctgaggaatatgtcatagttctgagctgccagtggaccgcccttttcccctaccaatattaggtgatcccgttttccccatgacaatgttgtagtgtcccccacccccaccccccaggccttggtgcctcttgtatccctagtgctccatagtttggcatttgcacggtttcgaagtcattaaactggttagacgtgaaaaaaaaaa

SEQ ID NO: 216966 - DNA, 767 bp, Homo Sapiens; identical to SEQ ID NO: 43265

SEQ ID NO: 216967 - DNA, 518 bp, Homo Sapiens; identical to SEQ ID NO: 44698

SEQ ID NO: 216968 - DNA, 734 bp, Homo Sapiens; identical to SEQ ID NO: 46820

SEQ ID NO: 216969 - DNA, 728 bp, Homo Sapiens; identical to SEQ ID NO: 56009

SEQ ID NO: 216970 - DNA, 545 bp, Homo Sapiens
cgaggtggaagccctaggcctatgttcatgtatttccttcgaggcagcctcccctggcaaggactcaaggctgacacattaaaagagagatatcaaaaaattggtgacaccaaaaggaatactcccattgaagctctctgtgagaactttccagaggagatggcaacctaccttcgatatgtcaggcgactggacttctttgaaaaacctgattatgagtatttacggaccctcttcacagacctctttgaaaagaaaggctacacctttgactatgcctatgattgggttgggagacctattcctactccagtagggtcagttcacgtagattctggtgcatctgcaataactcgagaaagccacacacatagggatcggccatcacaacagcagcctcttcgaaatcaggtggttagctcaaccaatggagagctgaatgttgatgatcccacgggagcccactccaatgcaccaatcacagctcatgccgaggtggaggtagtggaggaagctaagtgctgctgtttctttaagaggaaaag

SEQ ID NO: 216971 - DNA, 610 bp, Homo Sapiens; identical to SEQ ID NO: 46864

SEQ ID NO: 216972 - DNA, 480 bp, Homo Sapiens
tttcaccttttatcaatttattcgcgagaacaaatgtgagaacgtgagaccattgtgcaaaaagtagtgaggaatgcagtccaaagaaaatttgacgattaacatcctcagaactgagaaaaacaaaaatgaaaaaagactgaattcttgggcaggtagtcttatatcttgcttaatgtttttactgttaatagaaatagaactgataggtataaagattatggcttgctggtgctgtgataacagtatttatatttttatggctttcctaaattccacttcaactttcaaatgcttcattgaaaagttctgggttctaattttttttaagattaagtaataattaagtggataatttaaagtttgcttggatacaggattgtgcagaagttgcctttcatgttcaaaaatgttaatttgtttgtcacagtttattcattcaaaagattaatagctgaaagataaatggtgatttttatc

SEQ ID NO: 216973 - DNA, 649 bp, Homo Sapiens
aaaaaaaaaaaaaggtgaggacatctgggtctcatttgcttctgctaggttaaacttttacttgacaacaaggattcctgctgaagtctgaaccttactgtgtaaccctcagtttccactattaaagagtatcttttgacgtctgcttggaaaatgaatagtatactggtaactcagtctccagtcacctctgtgtctcttaagcaagagattctaaaagattgggaaaacatatcctccaacacctgcctttgcctaaccattatttttcaccagattacttcttaagagagggaggtgattctgaagaaggcttctatctcaaaaagcactgggcttccttattcatctgttcttgttgtttttgacggagttaaaaaagtttgtgtgcaatacaatataaatgatgtgaaggacactcttcagcttagtgaaacgctgttttcatttttttttttttttgtaggtcaaaaaaaaacaacaaaatcagttcaagcatttttttttctttgtccttgccttgatgttatgagtattaaaaccaggaggattgctgccattgtgcagtttgcttaaacaaacctggagatgcaacccagctcacatcattgctactgatgagctttctgtgcctttatcaaaagttgat

SEQ ID NO: 216974 - DNA, 750 bp, Homo Sapiens; identical to SEQ ID NO: 40561

SEQ ID NO: 216975 - DNA, 721 bp, Homo Sapiens
ctaggtaacattttaattctaatatattcatttaatatgtaaatctatagatatctcttgatgtagatatttagaatcctttaaagttatttgtacaacagatgtttttattataacagtaatttacatttaactttaaagttagtgaagcatactaccataaatgcacaattatgaaaaattagaagctaaattacagattcattgatggagtcaattatgcaaagtggtcagtggttgttgaagcatgcattgcttcaacaggatttgcgtgcatttcccatgatcctgcattcttgtgttcttgatagcatacagacttactcagaatcaacagttgctgcttaatttgtctattttgtaagcttaggctactattttattaaaactggacatagatacttggctgaatacaaatagttttgcagattgcaatataataaaggaaacagtaaaaactagtgggctatgcttaggtttttcttgaaacctaacattgctttaggctgggtgccgtggctcgtgcctgtagtcccagtgctttgggaggctgaggtgggaggatcacttgagaccaggagtttgagaccaatttgggcaacacagtgagaccccatctctaaaaaaattttaaaaattaggcaggcatggggggtgcatacctgtaatctcaaatacttgggaggttgaggtggtaggattgcttgagctcaggagtttg

SEQ ID NO: 216976 - DNA, 511 bp, Homo Sapiens
gccaggtctggtggtgcgtgcctgtaatcccacttactcgggaggctgaggcaggagaatcacttgaacccaggaggcagaggttacagtgagccgagaatcgcgccactgcactccaccctgggcaacaagagcgaaaactgtctcaaaaaaaaaaaatttttcatttgaggtattcttccagtagaaggttagtaagtttttaatgaaaccattaaaaattacacttcccagaaaatagatgacatcagtgccccttgctactttctcagtcctcactattgctttgagggcccaggtactgaaactggttgtcttgagttttgtgtcagctttttctccagtccattatccccctcccttgcttctgaagcagtctaggttaaactagccaggcaggtagttgtggactggtgattttcaaaagccccactttagagatcaggccacagctttttatatcgcacaggacacatcagcctgagctgctgcctcatgcctgtttccccag

SEQ ID NO: 216977 - DNA, 568 bp, Homo Sapiens
ccccgcgtccgggcagaatgaactgcaagcgccaaggcccagaggccaaaggtttattgatctcctaggtgtcaggccccatgctggcggattctgtggtttctgcagtgaaccatactcctgtactcacggcaccccagtcgaaggagatacgcacctaattagacaactactacccagaaggtcagacctggagtgaggaacacagggggctgtgggagcctaagaggcgcttgccccggcctctggttctagaaagacttccaggaggtggtgatccttaagccaagtacgaataggagccaactagaatgggaatgggtctggcagaatgaactgcaagcgccaaggcccagaggccaaaaaaaaaaaaaaaaaaatagaagcgcatgttttgattgaggaagcaagagcagcttagtatgcctagaacctaactggagacgggaaatggtcctatagacgatgttagagttcaactatggctacattccagtcttcctgtaagtgactttgtcacattctggcttaaaactcccccaaagggatcccattaggaaaaaaaaaa

SEQ ID NO: 216978 - DNA, 679 bp, Homo Sapiens; identical to SEQ ID NO: 44694

SEQ ID NO: 216979 - DNA, 677 bp, Homo Sapiens; identical to SEQ ID NO: 40721

SEQ ID NO: 216980 - DNA, 805 bp, Homo Sapiens
cccacgcgtccgaaaaaagtgctttttaatttttagccgaatggtcaagttgatgtagattttttttactggaatactcataataatgtctgtctatatgccttaagcaagattattatttaataaaagatggcaggaagttgtaatttatggaaaatttacaattattctttaaaatacttttataaaattataaattgataataatccccccaaactgaagtgaaatacttttaatactacttgaaattaaagtacagttgtttatacaacaatgaataaggacaagatatcaaactgaaaattcaaaaataaacagaagaaatgtaaacagttctaaaatatcagtatttataaatgttgcttagaggaaggctattcaaagcatggtccattaactatttgtgagctgtccagaatgaaagaggcttgtgccagaatgaaaatcaattacatcactaatcatactggctcagttgactttttttaaataacaagacttctttgataaaggaagcaatgtgttgatttatattctggcacaagtaccttattactgactagagcaggggtccccagtccccaggccacgaccgggctgcatagaaggtggggggcggtgccaagcattactgcctgagctcagtttcctgttagatcagccatggcattagattctcaaaggagctcgaatcctgctgtgaaccgcacgtgcaagagatctaggttgcatgctccttatgagaatctaatgataaatgtaatgtacttgaatcatcctgaaaccatccccctaacccccagt

SEQ ID NO: 216981 - DNA, 667 bp, Homo Sapiens; identical to SEQ ID NO: 41636

SEQ ID NO: 216982 - DNA, 475 bp, Homo Sapiens
aaatttttaaatgtttaatcacaagtcagtagcatgacatcattagtagagtagagtctgctgacattacaatctattgatctccccagagttaccaaaagtagttcacaatagttaggcttccttctgtccatagttcagggcatattcaaagtctctaaagctgacgtgaccatctgaatctcgatctacttccctgaatacctcaagaacagtcctttccggtaatttgggagccacctgcctaaatgcttttttgaaatcttccaaagttaaaaatccacgatagtaggtgtcaaaggctgtgaagatgtgtcttacttcgttccgatatcgttgagcttccttctttttcctgacaatatttaaaaacccctcgagtaatataccagaagtatttggatttattgaagacatcacagaatccacttctatcttggagggcttgtacccaaacagcattacaacagcagtt

SEQ ID NO: 216983 - DNA, 512 bp, Homo Sapiens; identical to SEQ ID NO: 60926

SEQ ID NO: 216984 - DNA, 639 bp, Homo Sapiens; identical to SEQ ID NO: 50571

SEQ ID NO: 216985 - DNA, 556 bp, Homo Sapiens; identical to SEQ ID NO: 48885

SEQ ID NO: 216986 - DNA, 689 bp, Homo Sapiens; identical to SEQ ID NO: 43112

SEQ ID NO: 216987 - DNA, 654 bp, Homo Sapiens; identical to SEQ ID NO: 55503

SEQ ID NO: 216988 - DNA, 654 bp, Homo Sapiens; identical to SEQ ID NO: 40045

SEQ ID NO: 216989 - DNA, 674 bp, Homo Sapiens; identical to SEQ ID NO: 41077

SEQ ID NO: 216990 - DNA, 692 bp, Homo Sapiens; identical to SEQ ID NO: 54374

SEQ ID NO: 216991 - DNA, 669 bp, Homo Sapiens; identical to SEQ ID NO: 43261

SEQ ID NO: 216992 - DNA, 530 bp, Homo Sapiens; identical to SEQ ID NO: 41661

SEQ ID NO: 216993 - DNA, 751 bp, Homo Sapiens
cccacgcgtccgcggacgcgtgggcggacgcgtgggcggacgcgtgggcggacgcgtgggcggacgcgtgggcggacgcgtgggcgcgctttgaagcagatctgaaggacaagatggagggcagtgattttgaaagctccggagggcgagggttaaaaaaaggccggggtcagaaagaaaaaagagggtcccggggccgaggcaggaggacatcagaggaagacacaccaaagaaaaagaagcacaaaggagggtctgagttcactgacaccatcctgtccgtgcacccctctgatgtgctggacatgcccgtggacccaaacgaacccacgtactgcctgtgccaccaggtctcctatggggagatgattggctgtgacaatccagactgtccaattgagtggtttcactttgcctgcgtggaccttaccacgaaacccaaaggaaaatggttctgtccacggtgtgtccaggaaaagaggaagaagaagtaggaggagctgtgtgcccggatccgaggagcaagttaatctgtcccttcattcgtgtcgcaatatttcccttccttttaaaactaccttgttcggttgatacttagtaactccgtggccagttgaagcgctggatgtttcctagaacaagaaccaccaaagcctgttcgcacagaagggcgaccttgcagggactcgccgccgcgacctcagtgtggcttttacaggactccccccgagcatcagcagggaccccggcg

SEQ ID NO: 216994 - DNA, 720 bp, Homo Sapiens
cccacatgctcctcagaaagatgatgccctggtgatcacacactacaaccggacccgacagcaggaagagatgctggggcttcaagaagaagcaccagcagagaagccagaagaggaagatctcagaagtgaagtgctccagttcagcacaaactgcccagaatgcaatgcccccgctcagaccaacatgaagctagtacaaatccctcactttaaggaggttatcatcatggctaccaactgcgagaactgtgggcatcggaccaatgaggtgaaatctggaggagcagtagaacccttgggcaccaggatcaccctccacatcacagatgcctcagatatgaccagagacctcctcaagtctgagacttgcagtgtggaaatcccagagctagaatttgaactgggaatggcagtcctcgggggcaagttcaccacactggaagggctgctgaaagacatccgggaactggtgaccaaaaatcctttcacactgggcgacagttccaatcctggacagacggagagactacaggagtttagccagaagatggaccagatcatcgaaggtaacatgaaggcccactttattatggatgatccagcaggaaacagttacttgcagaatgtgtatgcgcctgaagatgatcctgagatgaaggtggagcgttacaagcgcacctttgaccaaaatgaggagctagggctcaatgacatgaa

SEQ ID NO: 216995 - DNA, 692 bp, Homo Sapiens; identical to SEQ ID NO: 47220

SEQ ID NO: 216996 - DNA, 616 bp, Homo Sapiens; identical to SEQ ID NO: 41118

SEQ ID NO: 216997 - DNA, 705 bp, Homo Sapiens; identical to SEQ ID NO: 43560

SEQ ID NO: 216998 - DNA, 353 bp, Homo Sapiens
ccggaagaggagttggaaggtctctggttttcttttctttttttttttttttgccaaaggtttacttccagcatctgagctctggctctcacccctgaagctcagttatagtgcactgatgaactgagaggatgcgtgtggatgtgtgtgcatgcctgagtgcgttttttggggaggggtgtttatttttagtaccccattctggggttctctgatgcagtgtggatgtgaagatatggtaccttctcaagtgtagctctttcaaatatagtcaatgctgggaaatgtgattgcagtgatctctatctctccacttcttttgggaaagaggagcacaggagcggaggaaaaac

SEQ ID NO: 216999 - DNA, 742 bp, Homo Sapiens; identical to SEQ ID NO: 53026

SEQ ID NO: 217000 - DNA, 603 bp, Homo Sapiens
cctccagtcgcgcacaagtgttatctctgtaccgggcgatgctgagagagagcaagcgtttcagcgcctacaattacagaacatatgctgtcaggaggataagagatgccttcagagaaaataaaaatgtaaaggatcctgtagaaattcaaaccctagtgaataaagccaagagagaccttggagtaattcgtcgacaggtccacattggccaactgtattcaactgacaagctgatcattgagaatcgagacatgcccaggacctagcaagccggggaccagccaccagtggcggccagggaccaccttcagcatccactctctgtttgagatgggggctcccaaaaccagcttacaatagccttttgcgctgcctgtcctgtgggagctgataaaccaagtcacatttgcattctgttgcaggcttagtgaaaaaggactgctgtctttccttggttcaagtgttagaatggagagctggagttcgttcagaatagtgctgtgtgttaccacgtctcccctgcaccccattcctaccttgtagctcatgaccattgtgtatagcatttctacactttgtttcttgggtcccttggcaata

SEQ ID NO: 217001 - DNA, 682 bp, Homo Sapiens
cgcgtccgcaagtagctgggattacaggcatgcaccaccttgtccgggtaatttttgtatttttggtggagacagggttttaccattttggccagactggtctggaactcctgacctcaggtcatccacctgcctcggcctcccagagtgctgggattacaggcatgagccactgctcccagccttccagaggaattttaagcccatgtccaaacattctgtttgtataaatatattctaatttttaaataaatagtttctacttttctgaactttatattttttcttgctataatggattttcataatcagaaaagattaaattagtaatcatgaattgcctttaatatttggcagtaagtcaatgaaataataaggcacttatataccatctttgacatcattaaaagtatcaaatcccattaatctaaaacttctttaagcattttgaaagcagaaaatgtttacatggttctttcagttcctcaggctttttgtctaatgatgcgtgacttaggataagatttgaattaagtgcccagcttgaaacataataatttttctgtataagccacagatcctctacctcctttgtgttaaagcctttatatgaaacaattaagtagaagcattcaatagtgtggcattaactgttcatactaataaatggatacagcacatt

SEQ ID NO: 217002 - DNA, 576 bp, Homo Sapiens; identical to SEQ ID NO: 42791

SEQ ID NO: 217003 - DNA, 587 bp, Homo Sapiens
tgtgcactgtgtatggtccgtgtagattgatgcagattttctgaaatgaaatgtttgtttagacgagatcataccggtaaagcaggaatgacaaagcttgcttttctggtatgttctaggtgtattgtgacttttactgttatattaattgccaatataagtaaatatagattatatatgtatagtgtttcacaaagcttagacctttaccttccagccaccccacagtgcttgatatttcagagtcagtcattggttatacatgtgtagttccaaagcacataagctagaagaagaaatatttctaggagcactaccatctgttttcaacatgaaatgccacacacatagaactccaacatcaatttcattgcacagactgactgtagttaattttgtcacagaatctatggactgaatctaatgcttccaaaaatgttgtttgtttgcaaatatcaaacattgttatgcaagaaattattaattacaaaatgaagatttataccattgtggtttaagctgtactgaactaaatctgtggaatgcattgtgaactgtaaaagcaaagtatcaataaagcttataga

SEQ ID NO: 217004 - DNA, 594 bp, Homo Sapiens; identical to SEQ ID NO: 53264

SEQ ID NO: 217005 - DNA, 643 bp, Homo Sapiens; identical to SEQ ID NO: 44942

SEQ ID NO: 217006 - DNA, 611 bp, Homo Sapiens; identical to SEQ ID NO: 53043

SEQ ID NO: 217007 - DNA, 631 bp, Homo Sapiens
gcctcggaaccgggctgcatccgagctgccacgcggcgtgtgaaccttgaagcgcggccggggaatccgcaaggcgccgactctcttcctccttgcaagcccttcgaaagtgagatttctcaccccacccttgcagggtggagagaacacgtttcaaaaaggggatgcctagaactcagccgtgggaagtgcctgtctaaagccttgtgctggtgccagtagcaaacccgtgcgcgtgctcggctttgagcgatcatggagctctgcaaatagctcaactgcagagcgtgccccttagagctcctgtgctgctgggaggcctcataaaggtgccaaaaccaggtgtccccagcggttggcctctttaaaaagaaaaaaaaaaaaaggcggagtgggatgtccttgacgtgctgaaagacggagtagaatgagacgttggttttcattggctggccattaagcacgcactgcgcaactgttttccagatacgggtttatagcccattatttatatcggagccataaacttgaacaatagattggaatatcttatttttgcctgttgagaatatctcccatttaacttcttttgaaagttcagatgagtatataaataatacattgacccaaa

SEQ ID NO: 217008 - DNA, 686 bp, Homo Sapiens; identical to SEQ ID NO: 53121

SEQ ID NO: 217009 - DNA, 721 bp, Homo Sapiens; identical to SEQ ID NO: 45607

SEQ ID NO: 217010 - DNA, 592 bp, Homo Sapiens; identical to SEQ ID NO: 46374

SEQ ID NO: 217011 - DNA, 581 bp, Homo Sapiens
ggctggcatttagaaacctttcactttgcttcaaaacgtagttatattttggagttttcatttgatatataattatttattttgcccttttatttcccaaagacattgtaagggttaattagatcattatattttattattacagattaaagttgggcagtaatcttaattatgatggaattatcattatgctaagtaattaactttacctagtttgttttacaactagaacctgccctaaatgttgaatatcttcctagcaagaaacagtctgtcattttacttacacgatgtctaaccaaaccataactttacataaactagtcgtttcggtcaaatagaaaaatgtgtgaatgccataaaaacaaaaattctcagttaaatgatactgggaaatagggaagacagcaaagtgagacttgggctcaggatggttcaggaagaaaaaaaaagaaagacccctgagtaccattaatattcctcagaaattattatttcaaaaggaaatatttctgtattataaatttttcatgagcagccattatgaaatctcacaagaatcataggaattcaataaaaaa

SEQ ID NO: 217012 - DNA, 510 bp, Homo Sapiens
ggagaccactactactcctgcctttggtgataccctaaaccaaaggggccagtcccacagtaagaaggagaccactactactcctgctgccctcctccccccaccttgcctagtttacaagacaggaggaaagagagaaagcaaaaagttagaaaacaaaacaaaacagaagtaagataaatagccagaagaccttggcgacaccacccggccctggtagttaaaaaaaagtaacaataataataatatcaacccctgacctaaactacttgtgttatctgtaaattccagacattgtatgaaaaagcattgcaaaactttctgctctgttagctgatgcgtgtagcccccagtcacgttccccgcttgcttgagatatcatgaccctttcacgtggaccccttagagttgtaagcctttaaaaaggccaagaatttctttttcagggatctcagctattaagatgcaagtctgccaatgctcctggccaaataaacctcttccttcttt

SEQ ID NO: 217013 - DNA, 622 bp, Homo Sapiens; identical to SEQ ID NO: 55418

SEQ ID NO: 217014 - DNA, 676 bp, Homo Sapiens; identical to SEQ ID NO: 42831

SEQ ID NO: 217015 - DNA, 640 bp, Homo Sapiens
aaaaaattcaatcgggcagctcccttttccacaagcctctttgtgactgtagaactattgtagaaaaaaaaagttcttttctatattataaaagaaattatccaacacagtaatattggtacctgtcattttttcacttctgtttaaaaaaaatgtatttttagcaagataacttgggtaatcttctaaaaaagaaatttaaaaactcactgttagtgactttgatgccttttaaaataagagctttttcatttcattccatctttaaaattttttatctttgttgtagaatattaaaaactattttaagaaagataaattctctttaaagagatctctagcgtgtgtgaatagagctccagatgcctctaaaagccgcatgtacaaaggaagccacgtctatcctgtctgtttatatttgcttttcctgttttgtaacctctttgtactttgttcatggtgacttgtaagctaaggggaaggggtgcctagatgcctttgtatctctccatgtcacgcgctcctgggccagccggcctcccttcctctccttgtatgtaatacctttttttcccctttctagcaagtactttcaaaagaactctgtacattttaacataaaaaataaattatgttgagc

SEQ ID NO: 217016 - DNA, 691 bp, Homo Sapiens; identical to SEQ ID NO: 50208

SEQ ID NO: 217017 - DNA, 513 bp, Homo Sapiens
ccccgcgtccgcccacgcgtccgcccgaagtgtacgccacttcctggatctcttcatggaaactcagatgtttgcaggattcatccaggaccgagagcttcgaaaaagtggagttaaaggtttgtttgagatccgggccatccagtatttggaaacaattcctgagtcggagcccagtgggatgaatagaattttgcggagtcttggaagcaaaatgaaatttctgcaaaagaaatgaaatctctgattgtctccatcctgaatatacaacagaaagtgccaaagaaaatatttttctaagggtcaggatcccatgaagtattctacaaaattcttgaaattttaaaaggttaaagagcgagtcaggctgtcagaggaggattctcctgttgctgctgtagtaatcactggagaattgttgggaatggtctggcaccatgccatctttactctgtctccattttttttttatagcagccttttctatgtgattcttgggctcattctctgttt

SEQ ID NO: 217018 - DNA, 740 bp, Homo Sapiens; identical to SEQ ID NO: 42517

SEQ ID NO: 217019 - DNA, 683 bp, Homo Sapiens; identical to SEQ ID NO: 41239

SEQ ID NO: 217020 - DNA, 640 bp, Homo Sapiens
ttcaaggtgtcagtgtggtcctgattgtcccaataggattgtacaaaaaggcacacagtattcgctttgcatctttcgaactagcaatggacgtggctggggtgtaaagacccttgtgaagattaaaagaatgagttttgtcatggaatatgttggagaggtatgtttcatttgccacgtagtaaatgatggacatgcaaggtttatacttttggaaaattacctttttatctctttaagagatacttggtacattttgatattttcatttgcagatatgtagaaatttattcagatttaggagaagagttcactggcatatttagaaataaaaaacttttatatgaataaaaaatatacgttaaaacaaattgatatagtcatctttcaacaaatacacattcctactagtcaaacctaggatttgtaaaatttaaaatatgacaactgtttttacccaaaagtcctaagaagaaactcagatgtaacacatgctgctttgaaacttgaaagttttaatttacttcatctatttgaccaaatatgattaaatgtagttggcagaactctattttggatcaacatgaaagatactatatttatgagttttgtaaaatatacacaagcatttattgcatcc

SEQ ID NO: 217021 - DNA, 498 bp, Homo Sapiens; identical to SEQ ID NO: 61000

SEQ ID NO: 217022 - DNA, 420 bp, Homo Sapiens
ggtagagacaaggtctcactgtatttcccaggctggtctcaaatacttggcctcaagtgatcctcctgtcttggcctcccaaagtgctgggattacaggtgtgagccactgcacctagcctggtaggcatttctttctagcactgtgctcaatgatgagtcttcagggctagatatcaaatcttatactttcccacttaaatgagttataacaatcaaaacgtcaaggaaaattttatgtttggggaatgaactgttacatccactaattccctttccaggtagaaaacattccaaagaagtgattattaatgcaggttgcatgtgctatacatgagtaaatttgagaccaacagggctgcaaaggccctctggctctgctgtggtcattcattctgctgtcacacagacgagtcatcat

SEQ ID NO: 217023 - DNA, 541 bp, Homo Sapiens
  misc_feature (302)..(302): n is a, c, g, or t
ttttaatcttattaatatgtttattgagattataaaatataataagttatatatatacagaattagacaaaaataatattgacaattaagacttcactgtctaagggccacagacctaccctggggtgttttctaaatgttttaaagtattgcagaattatgaatatctccacacaaaaatggcaggatggagtcccagctttggtcagtgagaattattatgatctcattgttctgaatcccataacataggctaaagcttgtcagagtaaatcccatgtttccaaataagtaaatgacanaggaatttgtaactatataaggaatagctccctaaaaatggcaggtggagagccaatggaacatgagctgacactggctggccttacagccccagaattctaatagtgtgaaatgaggccaaagcaccaggagcagagaacagccaccccactctttcgctgaaaacattctgaggagggtgcaagctgttatcctggaatggcacactcatcacaagtgacatttgcagtctaattaa

SEQ ID NO: 217024 - DNA, 573 bp, Homo Sapiens
ccttccatcccactccacctctgttaaccatctgtggtagattagattattattcagccaatattcactccctcccccagcctggccaagggaggaatacacctctctccagtgatgttataggcttggctctgtagtttgcttggctgcatggtggttgcagtctactacccactcctaagtctttgggcatgatcatgtgacttgctttggtcaatgcaatcttagcagatgtggcataaccagacatttgaactatgcttatgcagttggccttgacttcttgtacttctgctggtgccttgagaaaagcttatcatggatagccactgccccttcagcctgggccccagaataaggcatacaaataagaactgccctcaccgatccacacatctacctacaaggaagcagagccctgagtgagaatacatgctctgaactgctgagtttgggggaggtctgtaatgtagagttactatagcaacttgtttttaaataatggttatgttggctcagaaaatgcaatagaaacgaacaaagacttagaatcgcaagtccagaatcccttat

SEQ ID NO: 217025 - DNA, 520 bp, Homo Sapiens
  misc_feature (479)..(479): n is a, c, g, or t
aaaactacagttcttttattcatcctaacacctagcagacagccctccacatagtaagcacttaagtatttggtgactggagatatgaaaaggcctacagtaaaagagaaaaatcatgcaatcactagataaaaaactacctagatttgtgtatctgactccaaaattgggctggaattgttagtagacaaattttcttctggcaaacaaacaaaaatgcaacaaaacttcaagataaacaatctatgtagtaaggcagtgtcaaacacatccgttttacccaaacgacagaacaaataccaataagatgacagacatcaaaatcaaactttgcagcaataaacaaattttcatatctgactgtaaattaaaatcttgtgtgcttagaaacatgttcatttagacagtattaaaaagtaggatgttagtctcaaaatccaagagttaaattattaattcaatttcaatacttataattntagtatttttactgtatagataagaggaccaaggcacagtc

SEQ ID NO: 217026 - DNA, 460 bp, Homo Sapiens
aatattttcgagccttggttggttgaatccatggatgcagaaaccttggatacagagggctgactgtatatagaaacaaagctatccaagacctcatcccacagtcactctggttgttctcctgaccacatcacactgctgacttctaatgcattttttgccaacttgaaatccattctttttggatttttccagtgtgttactgctaagcagtccattcagcatatatactgctggccttgtggactcacaagtcataccctactaaacacccatcagatggacttgtctactttattgagaaacaacagaagatagacctgcaagtccagctgttcatctacctccaccccacagcccaagccacattcccaccctttgtggatgaagctcagggatgcagatcccattccaagatccccactcctgttctcagatcctgccagacctaaaactgtct

SEQ ID NO: 217027 - DNA, 384 bp, Homo Sapiens
ggcaggagggaaagtgggtcagcgcggggccgcggcagggctgctgttgtgcttggaaaggggcccggggtgccggaggcctctcccaggcgcggcggcaggagcgcccgcgcgtgacactccaggcacaaaggggccgggccgccgcctgcactggggctcgggcgtgcggggagaggctgtcgggcgccgcacgcatggactgtgttccccttcccggccacggctcggggcggcgggggcccggggctctcctgtccccgagcgatgtccccaaggcctaacaccgcgagccggagctagcaggcgcccaccacgcccgctcttcgttcgccccacccgggctaggtctggcggctccctcctccggacgctgtccccgcc

SEQ ID NO: 217028 - DNA, 1000 bp, Homo Sapiens
tgacatcaactagcttcagaataaataaaataaaagatattgagttaaagtttaaatttttaagataagctgtatttatatttgtatataaattacaaaatatagaaatgtttgctcattttacagaacttgcctttgattttattttaaaatatttgtggcagatttaagtgacttaagatttggggtattaaaacgacaaacatccagcattctattccttttataatgacagaggaaatagaagttatttgctaactttaattcttgaatacctgcagtcacatttttaagtaatcgctaacttcgatacattggcacatatatattttgctctcaaagattcgaaataatttatgatacccctgtaatcccagcactgtgggaggccgaggcaggtggaccatgaggtcaggagttcgagaccagcctgcccaacatagtgaaatcccgtctctactaaaaatctaaaaaaatagccaggtgtagtggtgggagcctgtaattccagctactcaggagactgaggcagaagaatcgctggaacctgggaggcagaagtttcagtgagctgaaatcgtgccattgcactccagcctgggcaacaagagtgaaactccatctctaataataataataataacaataataataataataatttatgatagacaaataccataaaataaatctttcccattgtaaaaggtataaagttgaggacccctattttatcttcactaattcatacttacggaaccacattcttccagaacataagttactgtctaggactaagaagagtttccttgaaatctacatgagcttttccttagcatgagggtactattaaataactgtacgtttctaagcagaaatgaacagtaaattatctaaggtcaaaaccaaaacatgatcaaacagtagctacaacacttttaactcctaatcaaatagctctggcttctggctgaattgtactgaccaacaggtaatgatc

SEQ ID NO: 217029 - DNA, 883 bp, Homo Sapiens
gattcctttcgtggaacatccatctcttcccaaggtgtctatgtgactctgagatttttccttttctcacagcacttcaattgctgcagtaccctcaaagaggcttgctttagcttgctgtttcctagaattaagataaatgagtgaccccagggatagatggctgtggttgtcattccaaacataagcagcagtttgttttctcgcacagtaaaacatgatatttctatggccatgcctataaaatacaagataaagaggatgatgaaagatatcaaaactttcattgccttcacatgagcttctgtgttggagtctctcaatcctgtcacattcgattgcatctgcctgttgtgtccccaaagggaaatgattaaaaaaatacatgtaattagggatagtgtaaggaagaaaatgactcccagatttagcaaaatctgtttaataaagtattcacttttatacatgttgagatcccagactgtgtcattcttcattttataatcattaagaatcttcgcaatgtatgcaaaattaagtaacgatgaaataagtaagaatactatcatgaagggaagaaccatatttgttctgctcttcaaccagagaaatatgtagttggaaaaatttgctatcttcaggaaatagaagatgctgaggctggtggcaaaccacatacttgattgattaccaattacccaaaagtaactaatatattcaattacgttaccggaagcatatatatttggagagaatatctgtataaatccatctgtaattactatccatatcagaaaaattcttgaaatagcttaagccggtgcagaaaaaagccaactcctaaataacttatttcttggcaccagtcaatggctttttacac

SEQ ID NO: 217030 - DNA, 336 bp, Homo Sapiens
gaggcaggagaattgcttgaatccaagaggcagaggttccattaatggagatcattccattacactccagcctgggcaccaggaacgaaactcgttctcaaaaaacaaaacaaaacaaaaaaaacgttggctgggcatggtggctcacgcctgtaatcccaacaatttgggaggctgatgcaggtggattacttaaggtcaagagttcaagaccagactggccaacatggtgaaaccctgtctctactaaaaatgcaaaaacattagctgggtgtggtggtgcatgcctgtaaatcccagctacttgggaggctgaggcaggagaatggcttgaac

SEQ ID NO: 217031 - DNA, 296 bp, Homo Sapiens; identical to SEQ ID NO: 48272

SEQ ID NO: 217032 - DNA, 330 bp, Homo Sapiens; identical to SEQ ID NO: 55936

SEQ ID NO: 217033 - DNA, 563 bp, Homo Sapiens; identical to SEQ ID NO: 60420

SEQ ID NO: 217034 - DNA, 532 bp, Homo Sapiens
cccagtctgagctttatttcctcatctaaaggagagtgaatgccatgttcagaggattacaaattagattagataatgtaactcaggacagtcactagcacacattaatagtgatgatggtaatagctaacgttcactgaacacttactatgtgccagatgctgttcctaagctaaaccaatgtttaactcaatctttcaataatcctatgaggaaggcctatattcgttttgaggcttgtgaaaaaggtactatatatgcatttttacacaggtaaaaaacagatcctgggatgttaaataacttgtccaaagtcacaaagctagtcagtggcgtaactaggatgtgaaggtagcacatcattgggattgagagcaggctctggaaccagattgtctcagttaaatgcccaataaattttaacactttttattattagttacgtatgtttcattccctcatttatttggcttatgacatatgaattatccccatttatctgagggaacaggcttggatggcaagagtcctc

SEQ ID NO: 217035 - DNA, 427 bp, Homo Sapiens
agtgagggaaaagtgtatttcacagtcattacaaaagtacatatatctaataatggtgacataaatatagtccttacttatgaccaaatcatacaattaaaatggacatttcctcctagacttcacacaatgacagtccagtcaatttctgtcagtaactacagggtgactgggatcacaggcacagactgaggaagacagtcacggtcgaacagacaacatgcttcggacttaccaaagggagagtcgagctttccatataaatataataaaataataaagaatctaacatttctcctttcactcggtttcatagatttgtcaggtgctcacacacacacacacacaaatacagctgatcccctttcatcactccccctcacctctcactgggtttagaataaacctgagttcagagtccaggtcg

SEQ ID NO: 217036 - DNA, 588 bp, Homo Sapiens
tttgagtactgaaacctttattcccattttactggaaacatagaacatgaacaatttactagtcagaaaaaaagtgttttataacccaaaacaaatatttgccaagagctgtaaattgcttaaatcgcttaaactggagatttcagtgagatttttagcagtagattactaagctccttagttatagaacattcaatgcataggaaagtgtttttcctacaaagcataactgaaatgtagtttaactaatggtttacaattcagtcaaataccaaagctgcaaaccatttagggagtcatcaattacatattttgtacactttcaaaaagcttacagctgggatgggttgtttattttcaaagcatgactgctttaaaatgatcatattctttagcctgccacctaggaagcattaagcatttacttgcagaatgaacaaacgagcacgttgtcttgtgttatgaagtatataatatagttcgttttagtttcttcattcgcagactatcaggctcatttcacgtgactgcttgcacttagaactgagttatcacggagtaggaactctccaacatcgtcgtcataga

SEQ ID NO: 217037 - DNA, 514 bp, Homo Sapiens
ttggtttttttttttttttttttttttttttgaaaaagtcatggaggccatggggttgttgaaagggaaattctcttttataggatttttttctttattctcgtttgaagcagggtctttgtcttccaatgcccgagcaagcatgtagctaacttttctttgatgagccaaagcttcttctttatcattaagcaaatctatgagcatcttaagggacctcttgaggactgtcctggtcttccatcctcttagaactgttttctgaagggagcatacccaacagtctctgcccgaaggtcttcttactccttggtgatggaaatccatcctctttaaggtgcttccaattcatccattttgttgcttttttatgcattttatccatttgtgtcaattgtagggcctggtcattttttctcattaattgttgctcaaatgcaattctgaaagcatctgccatcacgtaagcttcttctttactcttctgcaaaatttccaactgattttgaaagac

SEQ ID NO: 217038 - DNA, 618 bp, Homo Sapiens
tttttcatttaccaatcaccagaaacaaggatatcaatcaacccaatctggcctaaataaatcaatggtgaaatttcctttgtggagttcctttagatttactggttaatttgcaacataaatttgtcatatttaatctactttggagttgaaggttttttgtagagatagggtctcattctgttgcccacaatggaatgcagttgagtgatcatagctctcatggctcactatagcctcgaactcctgggctcaaccaatcctcccgccttagcctcccaaatagctgggattacagaaaaggagtacaagttttgaaaactagtatatatatatgccaaaaataaacttcttaatttagatttttaaaaatatttctaaaaatcttgaaaaattattgaataaaatgaagaaatgcatttcaacatactgtggagtttttttttgttgtcaaaattatgataaactcacaataacctacaagtaaatctgccagaattccacttatcccttatcaaaccctgttctcaaatttatgaacagtaaacactgaggcacttacatttctaatatcccatttgacattggaactctattcttacatagaatatgagaatt

SEQ ID NO: 217039 - DNA, 595 bp, Homo Sapiens
  misc_feature (492)..(492): n is a, c, g, or t
aatttgctgttaacaattgtactctaaagccctggatttatagataaaagggcctatccatcttttgttactatcactcattttaaaatattactatttataactgattctggttttaacagaatacaaactggaatgctcaaagaattaaactttttttcgtattatgtattttattagaaagacaattgaaaaatttatttcttaaagacccaccttcaagaattgtcgtaaaacagatgcagacaattctttatattctctacatatattatacagtgattatgatattaataatgataatttagacataaaaaaactggaagtttctactgaaacaaagtagagtacaagggtaaagcagggtgttttttgcttaatttttaaagctatttttccttatatggtattcatagtaactctatgattcagaatattcaggtttctttagcagggtgctactcagccaagctggacattggaatcacctgncggtggggcacatatcagaccacttaaattaaatcagagttggggggatggcaaagccctgaccttatattttttaaagccctcagataactctcatgtacag

SEQ ID NO: 217040 - DNA, 593 bp, Homo Sapiens
  misc_feature (502)..(502): n is a, c, g, or t
tttttttaataacaagactaactgtaccagtgactgataacatcctgaataaagattgcaatacccacattctaaggtacccaaaagccctaatataaacttcagcacacacctgaggataggctatactctacgtttgtaagagatgtcaagaaatagactatgttaggatgttgcttacctgacttcatatcttcaaagactaaaaatacaacatgcagactatgcgtacgccaaccatcttatctaaacatctgacaaagatgccacaattaatgctttaccgaagttcaatgataataactgattgtgcacaaggtcatccactcactcaaaagactgtgtgccaagtgctattctgggcaccgaaatataggagggaataagaccaagttcctgttctaatagaactgacactcaccttctagtatggaataatgtaaagtactgacaaatgctgtgaagagaaataaagaagggtaagaggagagtgatggaaggnggggcaccatttgggtggggagggtcaaggaataagcatgacataaatgtagtaagctagcaagctgtgtacattaactatgggtacagaa

SEQ ID NO: 217041 - DNA, 555 bp, Homo Sapiens
ttttttggtaaataggcattacctatttaataagtacaatatatacatagaatcctcttgaaaagtttcattttatacagaaacatatttacaagaaacagtgtaatcaaattaaaggtatctgtacaatacacacacacacacatatatatatgtcctctggaagataaacaagtttcatcattgcagtcaaaatggatagcgatttgcattttagaaaaagaattccattccagaagaaaaatacatctctaatatacaattatatttttcatttattttcctaaaaattctccatgtttagattaccttttcaatttttctttgttcatctttgaaaaatttcaggtttctagtgccaccaactggtgttaattaaaaatcaacaatcttggtgtcaaaaaaaattgcttttaaaaaaaggttattgaaaaataggctacataaagcataaatgacaacatgatttataaaaatattttcaccagggtagcatatataacaacatttacattattaaggattctatttttttcttttactgataaatcttgg

SEQ ID NO: 217042 - DNA, 518 bp, Homo Sapiens
ttttgttagacagactctcgctctcgcccaggctggagtgaagtggtgcgatctcagctcactctaggggcaccgtgtgcctcccagtgatcgagtttcatgcctgctgcttcagcgagagatgcctggccacactgagcctgcacccgtcccttccagacgccatccacagcctttcacattactcctggaagaacaaatcacgttcacaaaacacagaccatgtgcccaatattccacacgagtctgctttgcattttgctatgagaagcatttcctcgtgacagccaatggctgatgacagaaggatgaccagcgagtaactgcgttcctgagtaaaagtgtctgtgtccagctttcagaaggactcagtcagcaacagagagagacctcagctcctcacatgccaacttcctttatcaattccacaagggctggccgtcaaggtgtgggaagcagccactgcagtgaagacatggatcatggccagcttgcagaggtcagcagcggagcctatg

SEQ ID NO: 217043 - DNA, 500 bp, Homo Sapiens
tttttactctagaaattgggttttaatttccaggttctaagcaagctgttttgtcactataattgttaaagtttaacatatccattgtcaaaggtatgaccaaaatgaataaaaatatttaagcccaaaaagtttaagggaactctgagacataattgatgttcaagtaccatttttcaaatgttaagggctattggcatctgccaacattcaaaacaaacatatatatcttgagagtcatcaaaataaactttacttttttggtacttcccttgtaagatcccattttaaatgtaaggacattgaaataaaagccttcaatttaagatagtattgcaattcctttttagtcatgtaactagataattcttatatatattccatgtcttatgttggttcctacacattaatcctgcaagcctttgacattagtgtattctgcaaagtattcaatgacaatatcaccagcgtccacctctagacatacgtacgactacatt

SEQ ID NO: 217044 - DNA, 555 bp, Homo Sapiens; identical to SEQ ID NO: 60246

SEQ ID NO: 217045 - DNA, 454 bp, Homo Sapiens
  misc_feature (419)..(419): n is a, c, g, or t
  misc_feature (422)..(422): n is a, c, g, or t
gagacagggtttttccatgtttcctaaacttgtctcccactcctgagctcgagcaatctgcctgccccaacctcctaaagtgtagagctgtgtttttagtctttttttgagctgttttacaatccagtgttgaattgataagtttggattcactctgatatttgcagacttaacatcctacttcacaagatgttcatagccttgatccattacagccgctgcctcatccatctctgctcatatccttgatccaatacagcagccacctcttccatctatgctcatagcctaaactaatagaagccagagggaagaaatggaagccaacgtgagtccagaacacatgttttataagagcataagaaatttaaaaatagcaaagtataaaatgaagtttgtaatagatgtgcatggctaanatntattcttatattaaccaatatattctataaat

SEQ ID NO: 217046 - DNA, 315 bp, Homo Sapiens
ttttttatagttgaaaatattttaatgatacttttgaaacccaatatatctaaaatattatttcaacacataatcaatataaaaattaaggtatttaaagttgttgtcctcttccatgcttcatacctggtgtttcagagtcatgacacacttggtttggctacatctcagtagccacacatggctgggtggctgctgctgtggacagcatggacctaaagtccactcttgtaggtgatgttaagaatgcaaatatatttttctctacataatcctatttttttttttttgagacagggtctcactttattgcct

SEQ ID NO: 217047 - DNA, 1000 bp, Homo Sapiens
gtttcatatcatctgagggcatggttgtatgtcactctgaaacctctatcctctgtctcatcagaacacatggactcgattccaaattcacggccagtaacctgggcgaccagtcggtaccagaagaaaaactaggaggttgattggtttgtttttgagatggggtctcgccctgtcacccaggctggagtgcagtggtacaatcacagctcacagcagcctcgacctgctggactgaagcgatcaccccgcctccgcctcccgagtagctgggactacacgaatgcaccagcatgcctggctgattttttaaaattttttggtggagccgaggtcttgctatgttgtccagccgggtctccggttcctagccccaagcgatcctcctgctgtggcctcccaaagtgttgggattatgatttgtgcatttataaagatgagaggtttgatttgtcctgtatacaaatgcatcaggccattcttcatgctgagacatgcagatggtctcagcctccgtaggagagtagcttagtatttcagagggcatgtgtgctcttcagacctctaggaagctcctcgcagcttcatcagtgaaactcagtaccccctacaatgtatacccctcctagggagcaaatgaacgtggctattacctctcttcccaccccagttgtctcaagatcaatgggtgttacaaaaaagagctatcggctgggagtggtggctcatgcctgtaatcccaacactttgggaggctgagggggaggatcatgtgaggttaggagttcaagaccagcctgaccaacatggagaaacccagtctctgctaagaatacagaaattagccaggcgtggtggcagtcacctgtaatcccagctactcgggaggctgaggcgggagaatcgcttgaacccgggggcggaaattgtggtgagcccagatcatgccactgcactccagcctggacgacaagagcgaaactccatctcaaaaaaaaaa

SEQ ID NO: 217048 - DNA, 1000 bp, Homo Sapiens
gggtagggcaaggacttaaaattgaccaaaaatacgtaacaatacgtatttctggggcctgaaggacaaaccctcactggttgtatttcttggctggcaggcttataacaagaagttttcaagggagactacatgttagttttttattttgcttgaagagagagatcatttccaagttgacttttgtcttctcagtgtaacatttggcacttcttttcctaaaattatcacttgtggctgagatacaagctgttgaattcagactataagctaaattgttggctctcgattattcttgagattgaaaatctttctggcatcaacaatttagatctatcaaaatgtgtcaatagcagtaaatcttcaacttagagacctagaatatactgcaatatttcaattctgatgctaaccactcaaaagttagcatagaccccacaagttagaggcacagttcccaaaaagactgccctcacttcagatgcctgttgcaagttggggttgggggtcccaggccatcttcatttctgaccaactggctataaattggagggatcccttaagcctccttcaggctctataattagaacaactcacagaactcaggaaagtactatacatttgacccttgaacaacacgggtttgaactgcacaggtccacttactagtgattttttcccaacaaaaagtaaatcagaaatatagttggctgggtgcagttgctcacgcttgtaatctcagtactttgagaggccgaggaaagagggtcgcttgaggtcaggagtttgaggccagcttgcacaacatagcgagaccctgtcaccaaaaaaaatatttaaaaattagccaggcatggtgatgctttcctgtaatcccagttactgtggaggctgatcacttgagctcaggagtttgaggcttcagtgagctatgatcatgccactgcaacctagcctgaatgacagagcaagaccctgtctccaaaaaaaaaaaaaaaaa

SEQ ID NO: 217049 - DNA, 1000 bp, Homo Sapiens
ccgaaaagataagagggtagagaaaccctaatggaaggacagatagtgtgaataaaggtagattctgaaaagaatgagctagcacattgtgtaaagatgaggagagaattagggctctggaggagagatctgaggaaaccacacagaatatagcacagagagatacaaagaagaagaatttggatgagtcatgaaaagcttggaggacaggctgagaaggtcccgcagtgtctaactgaattctagaaggaaaggctagggagactggaatagaggccatatgtggaggaatgtgggtgagaacttgctaaactgaggaaaaacactcttccccaggtggaagaggcacactgagttcagagtagtgatggtaaataacaaccacatccaccactagacactctttggtgaactatagggtattaaagacaaagagaaaaattctaaaagcagactgggacaacaaatctgtatttgtagcaggaaaaagcatgaggttcaggttttgactgtactgcttgctgcctgtgtcatcttaagtaggtcacctacctgcttcgagcctcagaggacatctgtcattggctaatgggagtagaagtggctaataacaagaacaatgactaccacacgaggttttgtgagccctgaaatatttccagagaataaatgtaaaagcattttaagtcattaaacaaatgggccgggcatggtggctcacacctgtaatcccagcactttgggaggccaaggcgggtggatcacctgaggtcgggagttcgagaccagtctgaccaacatggagaaaccctgtctctactaaaaatgcaaaattagccgggcatggtggctcatgcctgtaatcccagccactcaggaggctgaggcaggagaatcacctgaatgggaggcagaggttgcagtgagccgagatcgcgccattgcactccaacctgggcaacaaaagcgaaacttcatctcaaaaaaaaaaaaaaaaaaa

SEQ ID NO: 217050 - DNA, 1000 bp, Homo Sapiens
aggaaaggggtggagatttcccggaactgagagttcctcccctttttagaccatatagggtaacttccggacattgccttgggatttctaaactgtcatggcgctggcaggagcgccttttagcatgctaatatattataattagtgtataatgagcagcggggacgaccagaggtctctttcattgccatcttggttttggtgagttttggccggcttctttatggcatcctgtgttatcagcagggtctttgtgacctgtatcctgtgccgacctcctatctcatcctgtgactaagaaaatattcttttaatttgacaaatcaagttggatctcattgtgctaaaaaaggtttttaaaaatattatccaatacagtgccatctagtgacaaatcatttacttgctggttattgaaaatagttgactacaagttttatgtcctgataagtcaggaacttcacttctaattgtgcaaattcttaagatattttaagcgactatttctaaataaataaaatatttgtaaatagagagctggaaaatattttctaaccctcaggttttatacatatgtatcacaatgtgtcttatttaatgccacgtggacccaggagtaaaatcaaaatcagtgttttgtctaataaggtggtaataggattattttagaaatgtgatgtaaaggaatgagcatggctttaaaatcaaacagacacgagtttgtctatttggacttatttttcttatgacttagcaggtaattactacctgcttggaagtgcaccaagcactatataggtactgcctcattacatattcacaaaactctataggtattttacaaatgaggaaaccggccaggcgcggtggctcacgcctgtaatcccagcactttgggaggccgaggcgggggaatcacgaggtctggagatccagaccatcctggctaacacagtgaaaccccgtctctactaaaaatacaaaaaaaaaaaaaaaaaaa

SEQ ID NO: 217051 - DNA, 1000 bp, Homo Sapiens
ttatctgcaatatataaagaactgttggaactcaataggaagattgacttctggcataacagcatgaggagttctgctgacacattccccggtgaaactagtgaaagttattattttttctgtctctgctgcttgaaggagaaaaacattgttaaaatctccagccatttagagtctctggaaatggtcctcaggacaaagagcaaatgaagaaacatctcttttagaaaatttagtaagaaaggtgagattctgtgatatttgaaccaagacttcttccaccctccccactcccagctcagcaaggtagtgactccactctagataactgcagccaacaacacaaggctctttccctccttggttcccaatcaaaggctttttttttttttccagtagagatagcacttaacaactctcatcctgccccttcttgcctgttgctgaggttaaatcccaggtgaatgtgactgagaggtggaagctcctctcttctaccgaactcttactcttggaatggaggttctaccttaggtgtagcaaacagaaaatattgggtccttataacccttctcccatgcagagaatattgagcccttattaaggtggtaggtccatgccagaagaggcaagctgagagggccagactgcagctactccccattcccactgaattctcagctcctagtatgtgagaatcacttggagagaagcttgccattgtccttactctccagctccaaagtcagggaaagatggaaaggagccctaccagtaccactgtcatccccaggtgactgtaggcatacccaaagctgtaccatcctgaagagcaacatcagaggctggacactgtaggggagaaatagacttcactaaaataattcaaccagtcactagaccagcagacaagcaacaacaaagctcagagtggggtattcattatccagtgttcctacaatatattatctaaaatattcagtttccaataaaaaaaaaa

SEQ ID NO: 217052 - DNA, 1000 bp, Homo Sapiens
tatctcctggcaaccaccaatttccttcctgtctctgaatttacccgttctggatatttcgtataaatggcatcatagaatgtgtgaccttttgtgtcaggcttttttcacttagcataatgttttacaggttcatctatattgtagcatgtgtcagtagttcattcatttgtggctgagtaatattctgttatatgtatttaccacattttgcttagccattcatctgttgatgatatacatataacagaatattactgtggattgattccaccttttggctattgtaaatagcactccttcaacatttgtgtacaagtatttgttggagtacctgtttttaattctttaggggtgtatatttaggagtggaatttctgagtcatcttgtaattctatgtgtaactttggaggaatttccaaactgttttctgcaatggctgcaccattttacattcctgtcagcaatgtacaggattccagtttctccatatccctgccaacacttggtattttcctttttttcagttagttactctagtgggtatgtggtggttgtcccattgctgtttgttttgattttcattgtccctaatgactaatgatattgagcatctaatatccagttgtcccagcaacatttgtttgaagagactattctttcctgtgtaaatggtcttggcatctttgttgaaaatcgattggcagccaggtgcagtagctcacacctgtaatcccagcactttgggaggctgcgctgggcagatcgcttaagctcaggagtttgagtccagcctgggcaacgtggcaaaaccatgtctctactaaaaatacacaaattagccaggcatgatggcacgtgcctgtagtcccagctacttgggggactgaggccggaggatcacttgagcctgggaggcagcggttgcagtgagccaagattgcaccattgcactccagcatgggcgaacacagtgagaccctgtctccaaaaaaaaaa

SEQ ID NO: 217053 - DNA, 1000 bp, Homo Sapiens
aggtggaggttgcagtgagccgggatcacaccactgcactccagcctgggtgacagagtgagactccctctcaaaaaaaaaaaaaaaaaaaaaaaaaaaaaaagaaaaaggaaaaagaaaaaaaagcaaccatgagacgagcaagaagctaagtttacaaataaatgtgatccacacttctcaacatcaggactggtccttcatgcttagattccaggtctcttcttgcgaatgggaacagtcatcacttatccaatgatgcatttaagagcaccaagttttaaaaagagacaaatgtcgaaaagaaatgccatttatcatcaaacaccattattaaacactagcttgttggcatatctgtaagtctggttgtcattttgctaggtggagagggcagaattttggaaagtatctaggccacacccatgtttcagaatagtaagtacaaaagccacaatgtattgatcacttagactcatcatatgtttgtccttttattttaaataccccaaggatggaggtctttctagcctaattttccagctaagaaaatcaaggataaaaaattttcttgtgttgttactttatccttagtacccccctgggaagtaggtataattagcctcatcttagagatgagaaaactgaggctcagagaggactgtcctgtaaccagaaagaggatgtgttaggatctgaacccatctgacgaaaggctatgctcttaattagtaacatttccctgccttgcaaggacacatgtaggtcacagggtacccagggaaggtaaatgctctgtccttttctcaccagtactacaacttagtaacagcctctggcccaaaatgagactggacattgactttaatgcatggaagtacacattcctaacatggattcattcagaagcacccagatttcacaagaggaaatgatgaggcgtttttctgaggtgttgaaattgtgccctttgtcagtcacaaacaaaccaaaaaaaaaa

SEQ ID NO: 217054 - DNA, 1000 bp, Homo Sapiens
gctctctggttaaataaagttgggaaaacctgaactaaaaaaaaattaagcaagatttctttctttactgtaggattatttagtctttaatatgaggtatgaatttttaagagggatcttaaatcacatgaaaccgacttaaccatgggaatctttttgacatgggtatcttacagagctaatgagccttttctttttgagcatactaaatatccttaggctcttatattactttgttttcatcaggggtgagttcatttggggtggttgattttattaactgtctgttttagcattaggtttagaactcaggatgtttttaagaggacacacttcaaagtagaatattagttacaacatctgttctcttgtttaatattatgcagtctcagattggcctacatttgacaactactttacatctttgtggaaagattgctcaagtggtaattacagggtagatttcaatgcattgcacctatcctttaatctcacattcattctaataaaatatttgtagaatgaatattttgttattctgtggtctacatatgcctatgaaagtacgtaagcctctctaaaaacgaacaattctactgggctattattctgacagcaactctggctaatgcagttcccatttagtgagattttagcagtgccatgtctttgaagtataattttgaagcactctccgataactataatgctagaatcatttgatgatatatgtggcccaatttggtgtgaaacagaatgaaccttctaaaagaattactgctttcaattcacacctagttttaaattgcattcaagtaaaaaaactagcattttttttcttgtctttcaaggagaagtatgttttctctccacagattccttacttatatagtagtaatacagagaaattctaaaaatatttgaaataaaaatatagccctggtagggaatatttggatttttagaacccaagctttaatgaaaaaaaaaaaaaaaaagg

SEQ ID NO: 217055 - DNA, 1000 bp, Homo Sapiens
gtttcttactagtaattatttcaacccttctagactgcaagcttcatgaaggcagaaacttttattctcttgttcatagcatcatccacaaaaaatctaacactgtacctagaacacacttggtgtttggtgactagttgttgaatggacatgtggcattggagtttaaggtgtagactggaaccagtaggtttgggaattgtcttcattgtcttcatagaggctatgaaaatggatgagacccatctagtgggatgagttacaaaaagaaaaggcaaacagttgaaggtctatatttaggggacagaacaaggacggtaagcagagagaaaaaaggaacagttggagaaatggtaggaaagtgggagaaagtctgtatcaatgggcattgggaaagcatatatttaaaacggactccttagtcaagaagggcatggttgaaaagtgctgaactggacactggaagacattggttcaagttttgcttctaccttgatttgttgtgtgaccttgggcaaattagtctctgaaaatcagtttcttcacgtgtggaatgagaatcactgtatctatctgcattgtctacctcgtagggtatatgagcttcaagagataatagtgttaactcaaatctagaaacttcttagtgctttagaaatgtaaggttaaggctgggcacggtggctcacgcctgtaatcccagcactttgggaggccgaggtgggtggatcacctgaggtcaggagttcgagaccagcctcaatatggagaaaccccatctctactaaaaatacaaaattagccgggcatggtggtgcatgcctgtaatcccagctactcaggaggctgaggcaggagaattgcttgaacctgggaggcggaggttgtggtgagccaaggtcgcgccattgcactccagcctgggcaacaagggcaaaactctgtcacaaaaaaaaaaaaaaaaaaaaaaaaaaaaaaaagaaaaaaaaaaaaaaaaagg

SEQ ID NO: 217056 - DNA, 1000 bp, Homo Sapiens
gggtggtccctgtttgtcatcacaagtgtcctcgtaagagagggacagatttaatgtagacagaagaggacttgaaggctgcatgaccccagtgggcagagattagggtgatgcagccacaagccagggagtgcctgagcctgcagcaggtgaagaggccaggaaaggtcctcccctagagcccccaaaaggagggagcctgctaacacttggatttcagacttctggcccccagtccgtgagagaaccagtttccattgttttaagccacaagtttatgctcagttgttgcaaggaccacgggaaactcatcttatgtgattccattgataagactttctggaaaggcaaaaccatagggacaaaaaaacagatccaggattgctgagggtgcggggagggtcagtctccaagtggggatgcaggaaattgggcagaaaggaaggtggcctgctcagcgtgctgtcctgggaaaagcaagcaaggtgcgtggagcgtgtagaggccacagttttgggcaatctgcatatttttgtctacaagatttctgaaaaacccttttccataagctttctatgcaccttcgtgaatgcagatagaaatatctgctgtgggctgggtgcggtggctcacacctgtaatcctggcactttgggaggctgagtctgtcgagttgcttgaacctaggagttcaagtccagcctgggcaacatggcaaaaccctatctctacagaaaatagaaaaattagccaggtgtgttggtgtgtgcctgtggtcccagctactcgggagctgaggcaggaggatcacctgagcctagaaggtcgaagctgcagtgagctgagatcacaccactgcacttcagcctaggtgacagggcgagaccctgtttaaaaaaaaaaaaaaaaaaaaaaggaatgaaaagacaagccatggactaggagtaaaatgtaaaatttatcgtgataaagctcttgtatataaaaaaaaaaaaaaaaa

SEQ ID NO: 217057 - DNA, 1000 bp, Homo Sapiens
tagtcagtcggaagtggggagatggtataccctgcaagttgctcagtacctccatgcatgtctgactggccagaacttaatctaagcttcaagggaggttgggaagtgtagtcttcattctggggagccatataccagctaaaagtcccagtatcttagaaggggaccagtatggggaccatgaatactttctgtgacagacttaatactttattaataccacttataaccagataatactttactatttataaaacatttgctttgcaagccaggtctacactgccttcataaaaagtatttctaatactataaaactttgttcataaatcattttgcttttgaattaactaagcaaaccaaactaagaaaccaaatttgattcttttgacaacattaatcatgaatgttcagtaactttacaaccctccacttggacaggggaattattagaaacaaattattattgtaactctacagcattttagactttgccttacaaaatactttcagggatgtttaaaagtgtatagctgccagtttatttaaaaacgactagaataataggtccaacttcacaagggtcattgtacgaggaccaaattagataaaccatgcttagtatatcagaagacacatagtaagcacatgataaatattagttagcatgatgattagttcaatttttttttttttaatctcatttacgggccaggcatgatggctcatgccggtaatcccagcactttgggaggccaaggtgggtggatcacttgaggtcaagagttcgagactaacctggctaacatggtgaaatcctgctctactaaaaacacgaatattagtcgagtgtgggggcatgaacctgtattcccagctactcaggggactgaggcacgagaatcacttgaacccaggaggaagaggtttcagtgagcctagtttgcaccactgcactccagcctgggcaacagagtgagatactgtttcaaaaaaaaaa

SEQ ID NO: 217058 - DNA, 609 bp, Homo Sapiens; identical to SEQ ID NO: 45753
  misc_feature (595)..(595): n is a, c, g, or t

SEQ ID NO: 217059 - DNA, 525 bp, Homo Sapiens
  misc_feature (510)..(510): n is a, c, g, or t
ttgtttaaaatgctgaactttgtaatgaatgattaaagccaagaactccaaacccacccagcagtcttaacattaccaatagagaggcaccagcattatctgcctcctgacaggatgcaacaagaagtacccagcaccacctaggaagtatttttgccacaaaatcagacctccagatctaactaccattttataggaaagataagttcagagaaccatgtcaaatgacacctcgggatttcaaccagcaacgttcaaatgtgctaaactctgtagatggaaagagacttacagacatttcaaataaatgcaatatatgggccttgcttgaatcctaatacaaacaatccaactacaaaaacagccaaacatttgtgggacaatgggagatgcttgaattccgattgtatatttaaggatgttagaaatatttatggacaaaatgatgtaatgctcggaatttgcttcagaatgatccaggtacagcatgtggagctggagagagagtgngcagcagtgagataa

SEQ ID NO: 217060 - DNA, 332 bp, Homo Sapiens
tttttttatactgagtaatatttaataaggtaaccaataagactgttaagcaaaaaataaattcattttaggataaaattcttcagaagaagaagaatggagttcagggagcaaaaggaatcaaacaatatttccaactgttacaaagcgtgttaaagtatttttaaaaatggaaaatggtagctatcaaaactctattgtaccaacatttcactggatacatttaaaagaccgaataacattttaaaatgccaatatttacaatacataataaaatgcttcttttgaggctatttaaacataatgattttagatattcttttaaaaaatca

SEQ ID NO: 217061 - DNA, 557 bp, Homo Sapiens
ttttaagggagctatctacccaccacatttttacagttactaaggtggtatgtgttaacatcacatatagcagtatcattcaaacatttatgtgaaccacataaaaattttacattgcaacacagtatacacctacctatacataattgaaatagaagtttactcctattttataaataggaatactatttataaaataaatatggatttttccattgggggtttttgtttttttgtaacatgacccattaaatggatttcatgacccaccccagggtcaaacattctgaaaacactaatatgtagtaaaatggtggtagcagaaaaaaaagttccacaatcaggcttttggccttgtagcaggaaatcctgatgcacaagttctaccatcatcactgccaaaataattaccaggtcaccataatgtgaccatacagaaataaagctaccctagcaacttggaacaggtcaacaaaactctcctaacttacacattggtctcaaccatgaaagcagttcagaaatgccagctcgtttctacgtcagatactgactat

SEQ ID NO: 217062 - DNA, 520 bp, Homo Sapiens
ggcaggagacttcgtttattggaggggaaatagtacgcttcattttgaacatgtgaaatatgaacatctgagaggaaataagacagtggaaataagatgagtgttaggaaaaggggttttacctgaaatttaaagaataaccaagttgttttcgaagtacattactcttaagtttggaaataagtcagtagaaccacaaacaagtatgaggaagtacaagtttatcagtaacataccaagagggagccttctctaccaatgctcattctgttctgcctggtggcaaataaaacattgtcttttcaagaaacactctctctagtttattgcttctatttaaatacatatagtgatatttaaaaagactaaaagaaaataatctcatctgaaacttttcacaatagattgacttctcagaaactaattcactctcttcaataagaaaagctcagcgcactacttgtgaaaggcttcaatcgattgtatactctatattaaatgaaaatatgcataaaaataa

SEQ ID NO: 217063 - DNA, 385 bp, Homo Sapiens
aatatgtgcgtatgccaaattatgttacaccaaacatacttaagaacacagaaaatacttagcacatttatcaatcactctttggtcttggatcaaaacaagcagcaacaacaagctgttctgatttacactaacttagagtgtgcagagacacacacaccattggttcagttcaaacattttctgagtgcctaacacacgccaggcatttttttataattggaagtgcaaagctgaacaagatatagttcctatgtcttaaaagctagtggggaaaaaagattcagaaatgatttcaataaaaaatgcaagggtcatcccgaagtagccagcctgggaatctttctgatgggctagggaactaactcttagtaaggaaaatata

SEQ ID NO: 217064 - DNA, 683 bp, Homo Sapiens
  misc_feature (484)..(484): n is a, c, g, or t
  misc_feature (624)..(624): n is a, c, g, or t
gtactctaaggcttttatttggtgacatctttccacagataaatgtaatgtgtatcattacacttacattgcttttatctagcacaaaacctctgatgagtaagttcatagtagttattaaatgctttgccacattctttaaaatcagaatttttctcagcatgaattttcttctgtgcaataagctgtcagcaatggttgaagactttccccacattcttcacatttgtagtgtttctctccagtatgaattatcttgtgatttcaatgccttgagcaagatttatggaatttgccacattctttacatttgtaggatttctctttagtaaaaattcttacgtagtaaggtttgagcagtgattaaaagcttccccacattttttatacttgcaggatttctctcctctttgaactctcttatgttcattaagatgtgagcaccgtttaaaagctttgccacattcttcacatttatagcgtntgacggcagtatgaattttcttatgtctagtaaggtgtgagcaccgattaaaggctttgcacattcttcacagttgtaggggttctctccagtatgaattctcttatgttcagtaaggattgaggaccagttaaaagctntgccacattcttcacatttgtagggtttctctccagtgtgatttctctggtgtttagta

SEQ ID NO: 217065 - DNA, 436 bp, Homo Sapiens
gcctgggggggaaaaaacccacaaatgtctttccccagtttcctccagtaacacagatggaaatagtagtttatacttgggatggtgctcggggaaatagtgtctcagaaccaattactgaaatgaccagaatggatataaaatgtggctgcataatttcctaagtcccatttctcagggtaaaaatggttcagaccatccaaatgcttctccgaagaaattacacaagcgagatggaaaaagaaagtattggtttctcagcgctggtaataattaggacttgaatgagtggtgataaacccatttacagacaggaagtgtgaaggcctgaatggccaggagatttgctaagtgatgacaagatcaagatcaggcctctggcctctgagcccagctccctaagcctagtgaactttgaatgacacctgattttttg

SEQ ID NO: 217066 - DNA, 535 bp, Homo Sapiens
tttgcagctccagctcaaaggaaaacaaaaactgggtttgaatcctcgctctaccactaggctgcgtgactagcactaggctgcgtgactaggggaatgtcacttagcacctaggagccttggtttcatcacattgcaagggtggtgtgagaatcaagtgataaaatgttaagtgccaaccaggcacaatgtctgggtgcaaatggttgcatgacaatagaggtttctttacattatgatgactactcagccttttaagtgacaaagcatcttttaggtggagaccatgtatttctagtgatcaattcaaattagtacgactttccctagaagagtcctttcctgatatttgcagggttaggccagtcccctggcctaatccagtgctgtgcaaaagaaccgtgccagacggggaaaatggttaacaatatttggcttctcaatcagcaccattcttttcaacaaataaagaaaatgggagaaggaaatagaataaacttattcaaagagaagtacgtccactgttagtatcgat

SEQ ID NO: 217067 - DNA, 558 bp, Homo Sapiens; identical to SEQ ID NO: 58943

SEQ ID NO: 217068 - DNA, 616 bp, Homo Sapiens
aatctaagtacaatttcatatcctacacccaaagctctatacatttggtttttattctgaatcaaaatgaatttccgatagtgaggagagtagagtgagggaatggatattccctcacaaacagattagtgcagctgccacactgtgaagaactagtcccactctgggcaccttgggacttgactaatcccaggtggttcacaggcagatcctctgtcacactctctctgcatccacactggagccaggatgtggtgagacacggccgatactccaaatccaaccaaccttgcagtcacctccaggacatgcggctctaacttttatctgagtgcttgtctgtgagggctgatccagccagcctttggcaaagaatggtgtaactttcctccaccttctttaagtgttcaaggtcagcctctatcttatgaatgtactccatgatctggctctgtgaatctgcacaagaggagggactctggatctcaaaacaggaatactccatagctccccagcgctgcttgaccagaaattccggggtgaatggtgaaattgccccatccgagtgagtattctgagggagatgttggttgttggtggtggattccacagcagg

SEQ ID NO: 217069 - DNA, 531 bp, Homo Sapiens
  misc_feature (530)..(530): n is a, c, g, or t
tttccttaaatgtttggtattattcactttgtgaaaacatctgagtcttgtgctttccgttttggaagagtattaattacggattccatttcttttaattgatgtaggcccacccagattatatttctccttgtttgagttttggtagatagcgtttttcaagaaactggccaatgttatctaagttaccaagtttatgggtgtagggctgttcatgatattccttttaatctttttattagccatgttaccagtagtgatgcccctcctttatttctgatgtttggaatttggggctcttttcttttcccttctgttaagcctggctaaagttttattgattttattgatttttttttttcaaagaaccagcttttgatgtttaaaattttctctgatttcctgttttcaatttcattaatttctgttctaatgttgattattaattttttgttaagtttcctaatgttgaagcttgtagattttggatctttcttcttttctaatctatgtagtcaatactataaatnt

SEQ ID NO: 217070 - DNA, 572 bp, Homo Sapiens; identical to SEQ ID NO: 126540
  misc_feature (529)..(529): n is a, c, g, or t
  misc_feature (540)..(540): n is a, c, g, or t

SEQ ID NO: 217071 - DNA, 569 bp, Homo Sapiens; identical to SEQ ID NO: 60996

SEQ ID NO: 217072 - DNA, 276 bp, Homo Sapiens
tttttttctgctattacttcttttattcacaattgtgaaagaggtcccagtcaatgcaaacacatacatatatccatataagatacaggattagaaggagataaaactctcctttttcacaaatgacaagattgtgtacacagaaaatccaagttaatttactgatgtactattagaattaatggatgaatatagcaaagtacagttgactcttgaatacaggcttgaattgtgcaagtctgcttatatacattattttctttcacctctgccacc

SEQ ID NO: 217073 - DNA, 523 bp, Homo Sapiens
atgtaagaaagttgatattcagacctatcctatctcagagagaacttaaacagctaacagataaatgttaattctgtaatatcctactaaaggaggactttcctatctttagaataatgccatacatgcatttgtctcaggtacagaagtttaatgcaagaaaaaaatgttcatacctacagtaagttttgcaaattcatttggaaaattcttctctaaccattgtctacatttagcaacatcaggcatatattcacagtactaggagaaaaaaaaagaactgagtcacaacaaaacattttcagtcaaacaatatgtcgtaattaaaaatcaccccctatacttgttaatacaaagaataaaacaaaccactcccatctgacttcttatccacaggaaatctgtattcaaccacgatatgtcccataaaaaattagatattaagaaggattaggtacctcttcacagtaccaatttatttcttctccctctatttcttgctttgagcacataagtgcctcat

SEQ ID NO: 217074 - DNA, 624 bp, Homo Sapiens
  misc_feature (538)..(538): n is a, c, g, or t
  misc_feature (604)..(604): n is a, c, g, or t
  misc_feature (612)..(612): n is a, c, g, or t
  misc_feature (614)..(614): n is a, c, g, or t
ttgaagtagtaaaaatattaattttattaaatctcaaccttgagtacaagtcttgtccttgactgtacttacaagttttgtcctccccaaagcatatggcgtcaaggctgggcctaacccagtctcatgaccttgtgaatccagtccacaaacacagagacacgcgtgaagacggctggccagcgcgaccttgcgcatactcggttggggattctaattcctttcaggacccagcagttgtgggtaaagcaggcaagtgggcccccgtagtcaccctcacaggcccccacaggggccaacagtccctcagtgcacatctcgctctcccgcacatgtcctcggtgcttgatgttacactcctggttggagatgacgttcagcaaggccacatttaggactgtgtcattacccgtacctttggtctcaccccagcctgcaatctcacacttggtccctggaggcaccacataccattcaggcggcaggcagatcagggccacacgctggttcagggtcaagatctcttcagcttgagcangacaaagctggagcctgaggcccacacagcatcttggctactgggacccgctgtaagcctggctcnttccatgntngtggttctgg

SEQ ID NO: 217075 - DNA, 512 bp, Homo Sapiens
tcattttgcaaatttaatgtaactctgataccaaaatatgacagcacacagaaagcaaacaataaagcaggaacagcaaacagatttttccatcacatgacaccctcagctgattggccataactgccttgactgctgtgtggacaaagattccaaggatgtactttggctccatgggaaggactactgcaatttattagcggtatctgtaaacatggggaataaatctcagccctggcttcagcctcagccacagccacagctgcagcttggacttccatctccactgcctcgcggtactgcacagcccagtccttggggtctttcttctgcaccctgcatgcaaacttgaggactttcatcttgctagtctcgtggtaggagcgcaagccccagaagaactcatattcaggtggtctgctgttagggaccctcttgtactccaggtacttctgcttcacaaactcgtctgtgatgagcttcctcacttccccaaagagtgaatgcctcac

SEQ ID NO: 217076 - DNA, 482 bp, Homo Sapiens
ttttttttggagatggaatctcactctgtcgcccaggctggagtgcagacagaacaagagacccggagaccccgtctgggggtgggagtggcgggcgggaaacggcgacaaaagagggagcgagaatgggagaaaacgcaaaaagagacaataggaggtgccacacagcatcccccgcctcgcgccaagactaaaattaaaaagccaccccgagaaaacccaagagccgtcaccgctgaaacaggaggcgaaaacctttctcgctacattgccaagcaggagcgaacagcccagaaacgccccggagtttacgagctagtctctgtcattgagccatcaagaaggaaaaaccactcagaccgcgttctctccctctcaatccccaatacggagagaagaacgatcatcaatggctgacggcagttgcagccaagcaacgccagaaagccggcttcacgctcaggagaaaacgctacctctct

SEQ ID NO: 217077 - DNA, 585 bp, Homo Sapiens
  misc_feature (561)..(561): n is a, c, g, or t
tttttcattaaaaatattattttattaacataccttaaaaatgtaataggacaatgcctcaaagaacaatttcaaaataaaaacacagaaaacaaatgaccagcaaaattgctctgaagtcttaaaaacagaaataaatacttcaataatcataggtaatatggaaatccaatgtatgacttacctatagaaaacccttctggaatttcatttaaatctaacgtcaatatgagctatgtaggaagtccattaataaataagaatattatataggtacacatgtatatattaattttaagccatatgcagccctatttgaaaatgttaaaaaaaatcatcaggattagtccatactgattattaaaaaataaaattgtcactgctcattgtagaagataaatgtcagctgtgcagcagatgtgtttatagccacccagtaatcctatcgcctcaataatgcatttccctttttttagttaaaaacttaattacattaagaaactgtatgtgtttaggaatatgaatatagaaggagtaatcatcgtttagtaaaataagttntacttgcatattaaaatttactgt

SEQ ID NO: 217078 - DNA, 565 bp, Homo Sapiens
  misc_feature (451)..(451): n is a, c, g, or t
  misc_feature (531)..(531): n is a, c, g, or t
taatgcttccattaaggaaaaacaggcattatcacttacaatctagatacaacgaatcttttcaatcttttatatttaagtcatcttagcaaaactttgcagaggaataattaaattgtaaaaaaacttcactctaaattttcattttaatgataacccaaaactattcctggacttgaaggcatctatacctgaaatgggtaacatcttttggatgcaactaactgctcatctactgcttttggtgaacttggaacatatttatcttataaatattgatttcagatttcaaaaaatatttctaacaggcgctagcttattaatctagttcttctttcttgcatttgttctgtcaaattgcaacacttctaaaaccactgatggctcccaattgtgttgaaaagagaacagttatcttctttggtccatgactgcaaaacattttcaattntagatttataaacaccaattacaatgatgaatccaatgaatttttctacttctgcataatctatttccttttaatcactnttatattcataccagccttcagcatttctccact

SEQ ID NO: 217079 - DNA, 493 bp, Homo Sapiens; identical to SEQ ID NO: 60591

SEQ ID NO: 217080 - DNA, 509 bp, Homo Sapiens
tttctactagctggctcttttaagaaaaagtttgctaactcctgatctaggctaagaatataaatttgagaactagagatggaacctgaggccgtggcagtggataagactacataaagatcacatggacaatgagaaaagggctgaaacttaacttggagaaaatgtatgttaacatttaagaagtgggcaaaggaaatttttaaaaagatatgcatggtcatggaaactaggtcctggataggtgttagcagccatcgttccctgcatggaactgtcctgtttaacctcacttattcatacaaatggctgccaattaagtgttaagctttgggaatggagcttccaacaaaatgtttgccttcatggagcttatatccagataatttcacctgcttcttagcaacctgacattaacatctcttgggacatcactttctatctttccttgggaatgattgccctatccttctccaacatctagcccagtgcttaaaaagagagggcac

SEQ ID NO: 217081 - DNA, 463 bp, Homo Sapiens
tttcatggtcggtaacatttattgcgcaactctgaggccggggcggacccagctggggagatttactgtgggaacgtctggcccggccccttcctcccctccgggcgccgctggccgcctccgttcccggtccgggccgcgttcagcccctgaaggggccccgtggggcctgcgctagacccggagggatcgggggctccgaagggggccgcctggtgggtgtcaggacgagtctaggacctccgagagcgacggtgcttcttgtgactttcgattaatttctgggaacggatcttgagtgatgcgcgggtcactacctcgttgtcctcctcctcactctcttcgtcaaaaaacttgtccttggaagtggcaaggggcagggcgatgcgggtgttgtattcgggcagccttccctctaagctggcgaggaactcgcggttagcgatgtggcacagcatctcct

SEQ ID NO: 217082 - DNA, 510 bp, Homo Sapiens
  misc_feature (489)..(489): n is a, c, g, or t
ccggatgttacaatcctaatttactgttttcaaaagctggatcttctctggttttattgcatcgttaccgtttaaaggaattatatttctctttcaaataaaaaaaattctaagtacgccaatacacaattgaacaaaaggcccaagaacccttctgaaccatcagggtacagaattctttaatataaatacgaacggatggggataaataatatttaaaacttagattattcaatgcttgcaaaaaaatataaataaatctgactgttcaccagcatacacacacggaaagacgtacacttagtcatccttgcacagagagcccctgtttcaaagcgcctttgattttttttctcactctttacaagaagtgcaattaaaaaaaaaaatttaaaattaaaaaaagtaatcgcttcccctcgggagccataatgtaagaacaaattcacattgaaaactcgactagaaaatttgttcatataccctgtntctgatcaaagagtggagaag

SEQ ID NO: 217083 - DNA, 753 bp, Homo Sapiens
  misc_feature (436)..(436): n is a, c, g, or t
  misc_feature (526)..(526): n is a, c, g, or t
  misc_feature (537)..(537): n is a, c, g, or t
  misc_feature (557)..(557): n is a, c, g, or t
  misc_feature (584)..(584): n is a, c, g, or t
  misc_feature (609)..(609): n is a, c, g, or t
  misc_feature (629)..(629): n is a, c, g, or t
  misc_feature (648)..(648): n is a, c, g, or t
  misc_feature (663)..(663): n is a, c, g, or t
  misc_feature (670)..(670): n is a, c, g, or t
  misc_feature (678)..(678): n is a, c, g, or t
  misc_feature (747)..(747): n is a, c, g, or t
ataattacacacatatatttttatacaaatgcacaaaggtaatcacatcttatctggatttctgtgtgcaccttttcttaaaaatgttaacaatcacatataacctcgtagaaattgttttcgtttgcagatgcctcctttttcataaaattatgtccttgttttataatgctgtcttttccaatatagctgggatcacgccactgcactccagcctgggtgacagagcaaaactccatcttggaaaaaaaaaaaaaaagaaagaaatataattggtgatgcttctgaagagaaaatcctttgtggttcttcatattcctaacttgcatgacactcttgctcaaagaaggatacctgctcctaaaacccgtctaccagcgggtctggctactgttgctgtggattcctgggcaataccaatcctgctcaacgcttntgatgtcccactctgcctcaactccaatcggcctctatcattggcaacagttggctgagccttttcctaatggtcagtcatttggagcangacaagaaatntgtggtctcctgatggctcngaagcttaaacttgaatgaagccttcncacatcgcacaagcaaagggccttngggcccttgatgggctgtcntaaacatggtccttttttnccgaggctgaactcnaaggagnaaaggctnttcccctgtgcagcccttatgctgacagtgcccttcagcggaaatttgtcacttggacattaaaagttngcttcc

SEQ ID NO: 217084 - DNA, 551 bp, Homo Sapiens
ttttttttttttactgacaggaaaacattttaattcaaacctctaccactacccagcctgaagcaaagtttaaaaaaagaaagaaagaaagaaagacacaaaaatacaagcacaactcacattttcaaataaaggaaactcttgctaaataagtagcaattatgctgaagaatttatatgctaaagcacgaatgaatataaaaacaccagagcagtcaaccatagctttagcactttgagtatgattaacagaatgaacttccaaaggtcaattaaatgtcgacacactttaaagagatattcttaagcctggtcaatgtataacagcacctcttaattcaggggtatccgtcttagtttaggcataacatgcatgggataaatgtacatatatatacagaattacaacatgtctccaaccagattactacagaaactcatgtatcacctaccctagagttttgactatgttagtattttccaagttatgaaatgattaaaagaaaacataaatatattactatgtaacactatccaatgaagatgaaatg

SEQ ID NO: 217085 - DNA, 369 bp, Homo Sapiens
tttttttttatacttcaaaagcaattttcctttattaaaagaatgcttataaaaagttcatttcacttctgcgtcatttcttctggtcactcccagctcacttgcagcacttggccttccctctgtaacaggtgccttgaattttggtaaagatcgggcaggcagaatagagacattgccctccactgctgacgcaattgtaatgatcagatctgtggccaaggcctgtgagaaagttaccacctgaggccatctcagacaaaagtaagcagagagtaaacagcagaaggtaggaagttctcatggcgactggcaggcaacactcaggatttcaggaactggggagaggctggctcctttggaggctga

SEQ ID NO: 217086 - DNA, 475 bp, Homo Sapiens
acaagattacaagaacatatttcctattataccattgttagtactagggattacttgttatttcacctcttagggaccttatttcaaattctaactcgaagcactaggtgaaaataacttattgtcaccctgactctcaaactctcatctccaccaacaatgtcttactgtttgtaatcaccaaaattatctgttttttccggggttgaaattgtagaaagcactcaaaattaggatcatatttcaatgtgtgtaggtgaactaactgccccaaagacctacttaattaaactacatgcccttgttttttaacaaagcatctttaagtctcctggttgggttaagtgaatttgataaccttaaaaaagtcctgtggattgtgtaatttttttctccactgtagaagggttatttcactttcacagatgtactagatgtatcatgttacgctataataaacaatagaaacagatct

SEQ ID NO: 217087 - DNA, 514 bp, Homo Sapiens
  misc_feature (397)..(397): n is a, c, g, or t
  misc_feature (482)..(482): n is a, c, g, or t
  misc_feature (511)..(511): n is a, c, g, or t
ataagacacaccagtgtcctcattgtgaccataagagcaccaattcaagtgaccttaagcggcacatcatatctgtccatactaaggattttcctcacaaatgtgaggtctgtgataaaggttttcatcgtccttctgagctcaaaaagcatagtgatatccataagggtaggaagattcatcagtgcaggcactgtgactttaaaacatccgatccatttattcttagtggccatatcctttcagttcatactaaagatcagccattgaaatgtaaaaggtgcaagagaggattcagacaacaaaatgagctaaaaaaacatatgaagacccatactggaaggaagatttaccaatgtgagtattgtgaatacagcactacagatgcatctggctntaaacgacatgtgatatcaatacatacaaaagactatccacacaggtgtgaattctgcaagaagggattccgaagaccatcaganaaaaatcagcatattatgaggcaccacanaga

SEQ ID NO: 217088 - DNA, 481 bp, Homo Sapiens; identical to SEQ ID NO: 58794

SEQ ID NO: 217089 - DNA, 1000 bp, Homo Sapiens
tagtctcttgattttgtatccactttcaacattttaatatgaaaccttgacagagactttgctgtaattttggtcttgaggggcggggggactcatccaactcacagtacccagcagtctgagttcttcagataggcataaagaaacgagaagttacataatttttgttgaatgggtatggtgatgttggcaaatgattaagcctaagaaaaactgtttgtgtaccaggcacctgtaatcccagctactcgggagggtgaggcaggagaatcacttcaacccaggaggcagaggctacagtgagctgagatcgtaccacagcactgcatcctgggcgacagagtgagtgagactctgtctcaaaaaaaaaaaaaaaaaaaaacagaaaagctacaaaacattcacacattttgttgttttctatgtctctgtataaatgatgagctttaaagttaatcctcaattttaaatatacaaaatttttaatttgtacttttgataccatgcacttttggaaattttttattttttgagagcatgatacttatttcttacgctcatgtttgaaaaggtttagaaatgtggttgctaaattagttttaaaacaacaactgtgactgttttacctgtgtccaacatgttgagaactcaaaaagtagtaaatcgggctgtcttaatagtgcgcctgttactaatggaatttacttaaaaagtaagtttgccatatgaaagggtattaatatccttttcaagcataacatacaaatgaattttcatcttaaatatattaacttctgataagaaaacagatgctaggcctaaagatatttgctacataggaaaaatgatttttaaaaaatttgtctggggtgcctgtagtcccagctactcgggaggctgaggcaggggaatggcgtgaatccgggaggcgggtcttgcagtgagcagagatcgcgccaccgcactccagcctcgccgacaaagcgagactctgtgtcaa

SEQ ID NO: 217090 - DNA, 847 bp, Homo Sapiens
  misc_feature (721)..(721): n is a, c, g, or t
cacgaggagatcaagcagataaagatgttcaaagggcctgagaagtatatagagtttatctacacggccccctcctcggcagtgtgtggggtctcgctggacgttggaggaaagaaggaatatctcattgcaggaaaggccgagggggacggcaagatgcacatcaccctctgtgacttcatcgtgccctgggacaccctgagcaccacccagaagaagagcctgaaccacaggtaccagatgggctgcgagtgcaagatcacgcgctgccccatgatcccgtgctacatctcctccccggacgagtgcctctggatggactgggtcacagagaagaacatcaacgggcaccaggccaagttcttcgcctgcatcaagagaagtgacggctcctgtgcgtggtaccgcggcgcggcgccccccaagcaggagtttctcgacatcgaggacccataagcaggcctccaacgcccctgtggccaactgcaaaaaaagcctccaagggtttcgactggtccagctctgacatcccttcctggaaacagcatgaataaaacactcatcccatgggtccaaattaatatgattctgctccccccttctccttttagacatggttgtgggtctggagggagacgtgggtccaaggtcctcatcccatcctccctctccaggcactatgtgtctggggctcgatcttgggtgcagcaggctgggaccncgctccctcccatcctgcttggacgtccagatcagcagcgcactatgattccgctgttaggaggctgaaggctttgcaaattgagtctgcaatggtcagcccatcctattgaagatgcttgtccct

SEQ ID NO: 217091 - DNA, 565 bp, Homo Sapiens; identical to SEQ ID NO: 55291

SEQ ID NO: 217092 - DNA, 746 bp, Homo Sapiens; identical to SEQ ID NO: 53900
  misc_feature (746)..(746): n is a, c, g, or t

SEQ ID NO: 217093 - DNA, 828 bp, Homo Sapiens; identical to SEQ ID NO: 43038

SEQ ID NO: 217094 - DNA, 798 bp, Homo Sapiens; identical to SEQ ID NO: 52742
  misc_feature (625)..(625): n is a, c, g, or t

SEQ ID NO: 217095 - DNA, 795 bp, Homo Sapiens; identical to SEQ ID NO: 55268
  misc_feature (631)..(631): n is a, c, g, or t

SEQ ID NO: 217096 - DNA, 503 bp, Homo Sapiens
tggaattcaggacaacaactacagcgttgtgtactgtgggaaggggagttgggcactcttggaggactcctgctgaaggtggtcagcctgcctgacaatggaagacatacttgaatggggagcagggtatgtgctttcatatgaaaaaagagctgatgttaaaactcatttggtgaggtcaacgttgtcacataccttcacataagggatagtatattttgggttgcagtcaaacttgtgctcagactggtgaaactgagagtcaggcttttacattttaaagaaaatacagttttcattctaattcaggtgtctacttattttatgtaagaataattttagatttcccccccaccatgaagtttcttcctatttttttatgctgtaacttacccccaatctttatctctggatttttactctttaaattttgaagttgactagcattttcaaacctttattttatacccttgtcttttatattaactttttcttattattct

SEQ ID NO: 217097 - DNA, 332 bp, Homo Sapiens; identical to SEQ ID NO: 46404

SEQ ID NO: 217098 - DNA, 432 bp, Homo Sapiens
  misc_feature (23)..(23): n is a, c, g, or t
  misc_feature (29)..(29): n is a, c, g, or t
ggcgcgtgtggtggattcggggngaccgnggctcatgcgcggtgcacagaggcttgtttcacatctgtaacaacaggaggaggcccagcctcgtgatgaggaatagcaaggagagaattcagctccagttcaaaagcctacaaaatctgagactgtcattgcttttataaggattccagctttccctcctggccagaaatgttcagcctggactcattcagaaaagcatccctggatgtgaatgaggaccctccttaaacaggaatggagaggttgagctggtcatttccaaccttagcttcaaggcagaactggaattagtttcaaaataaaccttgatcctaggcacttagttctagaagatcctacaagcacgtctgctgtaactctatgtatgttttctgtaaaatcacatacctataaaataaaaag

SEQ ID NO: 217099 - DNA, 447 bp, Homo Sapiens; identical to SEQ ID NO: 41848
  misc_feature (7)..(7): n is a, c, g, or t

SEQ ID NO: 217100 - DNA, 529 bp, Homo Sapiens
tgtggccagcgcttcagccagcgcctcaagctcacgcgtcatcagaggacacacaccggcgaaaagccctaccactgcggtgagtgcggcctgggcttcacgcaggtctcgcggctcaccgagcaccagcgcatccacacgggcgaacggcccttcgcctgccccgagtgcggccagagctttcggcagcacgccaacctcacccagcaccggcgcatccacacgggtgaacggccctacgcatgccctgagtgtggcaaggccttccgccagcggcccacgctcacgcagcatctgcgcacccaccgacgagagaagcccttcgcctgccaggactgtggccgccgcttccaccagagcaccaagctcattcagcaccagcgcgtccacagcgccgagtagctccagccgggacgcactgtgtccgccatggtcagaacacctacctcccctggttattgtgaggctggcgattacataagtataagcaggtccgcccagggcttggctactgtaggtgtccaataaa

SEQ ID NO: 217101 - DNA, 469 bp, Homo Sapiens; identical to SEQ ID NO: 42356
  misc_feature (10)..(10): n is a, c, g, or t
  misc_feature (13)..(13): n is a, c, g, or t
  misc_feature (17)..(17): n is a, c, g, or t

SEQ ID NO: 217102 - DNA, 382 bp, Homo Sapiens; identical to SEQ ID NO: 45177

SEQ ID NO: 217103 - DNA, 394 bp, Homo Sapiens
gtggtggattaatgaagatggaactttggtggagcaggacatggggggaccatatggtggaggaaactatggtccaggaggcagtggaggaagtgggggttatggtgggaggagccgatactgagcttcttcctatttgccatggcattgatatgaaccatggacaagtatattctgctgccacaaagactgtaaagtgcttcatttcaacagctgaggcaagccaagtgatcattaataaagcttttcttggttccttcagtggtgttggtagtaaaatggaaggtgtcttgctgcaggtaactaatgaagaagtggtcaaccacagagtcttcaagaaataagaaattctgtaccatctgaaagtagttcttgttggtgccttcatttaaaa

SEQ ID NO: 217104 - DNA, 480 bp, Homo Sapiens; identical to SEQ ID NO: 40912

SEQ ID NO: 217105 - DNA, 544 bp, Homo Sapiens
tgctggcattccgggccctgggccagaaccctaccaatgccgaggtgctgcgtgtgctgggcaagcccaagcctgaagagatgaatgtcaagatgctggactttgagacgttcttgcccatcctgcagcacatttcccgcaacaaggagcagggcacctatgaggacttcgtggagggcctgcgtgtctttgacaaggagagcaatggcacggtcatgggtgctgagcttcggcacgtccttgccaccctgggagagaagatgactgaggctgaagtggagcagctgttagctgggcaagaggatgccaatggctgcatcaattatgaagcctttgtcaagcacatcatgtcagggtgaagcagagtcttccaggtgcctggcccttggctttagccataccagggtgagttaaagagaggccccggctgggtgagctgagatggagtcctcgacttatcaccacaccactgccccaaggaccttacaggccctccctgttaataaacagctctaacacggccaggctgggctctgggattcta

SEQ ID NO: 217106 - DNA, 510 bp, Homo Sapiens; identical to SEQ ID NO: 41385

SEQ ID NO: 217107 - DNA, 517 bp, Homo Sapiens; identical to SEQ ID NO: 52208

SEQ ID NO: 217108 - DNA, 448 bp, Homo Sapiens
aatgaactcctccaaggcaagaaatctgttttgaagcttctctgcgttcacacacagcagcctggtttcctggaagggcattttccacattgtgcgttatggatgatcatcccaggcatcaggtgtgaagccctgcatccacatccaggggctatcaaatctctctgcaaaaggagaagctggactcaggcacgtttacagtgatgtgtatgcagggtatgcacagatgtggaaacaggaactgatgtgtccattacaccactaggacagaggccagaacaatgaagaaaccaaatacttggaagagggtagagataatgaatggagtccaagagccctgattgtgccataaatgtccagataattccatacctgaggattatgtggtttgtaaacttggcacttagaagaaccaataaaatcatgttatagtttcaaaaaaaaaaaa

SEQ ID NO: 217109 - DNA, 514 bp, Homo Sapiens
ttcgctttatcaagaactatcctgtggtctccatcgaagacccctttgaccaggatgactgggccacttggacctccttcctctcgggggtgaacatccagattgtgggggatgacttgacagtcaccaaccccaagaggattgcccaggccgttgagaagaaggcctgcaactgtctgctgctgaaggtcaaccagatcggctcggtgaccgaatcgatccaggcgtgcaaactggctcagtctaatggctggggggtgatggtgagccaccgctctggggagactgaggacacattcattgctgaccttgtggtggggctctgcacaggacagatcaagactggcgccccctgccgctcggagcgtctggccaaatacaaccaactcatgaggatcgaggaggctcttggggacaaggcaatctttgctggacgcaagttccgtaacccgaaggccaagtgagaagctggaggctccaggactccactggacagacccaggtcttccagacc

SEQ ID NO: 217110 - DNA, 532 bp, Homo Sapiens; identical to SEQ ID NO: 53987

SEQ ID NO: 217111 - DNA, 535 bp, Homo Sapiens
aacaagtaaaaacctgcaaactctttattaaattctcccatttcatctgtacagaaaaaaatgcacattatgttcagaacatatctcagtaacatctcaaaattacacagcatgaacatgtaaaaacaagggaccaccacgattttatacatagaaaggaaacccatttacaaaagaggcttgttaattgtatttttttctttctttcaaaaacaaaacaaaacaaaaaaagtgaaaagcctaagatctcacacagcatttgctgtacagactgttttccggatggactggtttgggaacactgtgctgggggaagctgcccaggaagcgctcccgctgccggctttccggaggtctctgcccagtgcactgcagggggacctggagggcccatttctaccaccctagcatgtctgacagaaagccctgctgggctctggggtccagatgtcaactctacattggaggaggcaaaacacaatctagaggcactgtctgaactttcccctggcccagggagatttctccactgcac

SEQ ID NO: 217112 - DNA, 551 bp, Homo Sapiens
gcgccgtgtgcctggattctttatatcctgcatttatttaagcaaaccaaatgtgtagagataggaaattaatgtgttataatgttttacaaatacagagagaaaacacagaatattaagaccctgaagagagtgcatttgagaacgcagttctatcataggagaccacttgcagggaacacattaaagccattgctgacacagccatctgtcattcctggtttgccgtcatttaagtagtttcaatagataaatcggtgatttgcttttaaacaaatattaatgttaatgattagggtagccttgaagggtttgtgagtgactgtactatacaatgtgatgctaggcttaatgtgtcatttcaatgctgttgtacattatgcaggggaaataatgtcttattacacattaactgcgacatccactaaaatgtgaactagtttgcataggttagtcctttgggcagcacgatgttgctctagtccaccaaggcttaaagattcacagtgtagaggaaaaaaatatgaattaaagccgagcggccgctcgag

SEQ ID NO: 217113 - DNA, 424 bp, Homo Sapiens
  misc_feature (24)..(24): n is a, c, g, or t
gcgccgtgtggctggattcccagnatgaacaaaggcagaccagctccgaggggcggggtagggtggggcgggagctccctggctgacatctctttgttctccagctgtctcaaattcacacctctgtacagggcaaagttttcccacaggagcccccctactgatgctgggagccaaatgctggtgctttgagagtcccggaggccccggggttcccgccccgctggtgtgtatatgtgtgtctgtgtgagtgtgtgtgtgagtacagatgtgagaaggtggtcacacacagatgggtaagcccactgatctacttgtagtcactcagtgtaatcattaggctatcttcaaggaatcattgtgcagtcaaaaagaggattcaattatttatgaatagggtgtgtaaataaaatagtcatttaat

SEQ ID NO: 217114 - DNA, 533 bp, Homo Sapiens
gcattaagaaagctttatgttaaagtatgaacagcatttccaataaaacatgaaaagattcatattgtatctacaaaatttaagtctttgctacaataaatgctatatttcttttaaacaagcctaagaaggtaaggaatgtcatgatcaatccgtacattctctttgcagcataagcctggagactttgatgtttaaattggacaatcatagatgtgaatttcctggtcatctccaacagacacaatttttgaaccatttccattgtattttactccccagacctgatcctggtgatcaaagaaggtgtgaacacaagtcctcgttccaacatcccaaacttttacacttttgtcagacgaactggaaacaaagtgagtgtcatcaggacagaatgcaacgttcagcacccaggaggcatggccgctcagcgtgccagccaaattggcatgttgtacatcatagatcttgatgtagccatcatctgaagcagtgacaaggagctgggagtccggggaaaaggtcaaggagcg

SEQ ID NO: 217115 - DNA, 513 bp, Homo Sapiens
gatctagaggcctcctagattaaggcctgcctggaatggattgggggtgggtctttggaaaaggaggggacccacctctagcccagtctctcaactgcccctcctttacagtgagtgagatcattggccgagacctgagtggcttccctgcacctcctggagaagagcctcctgcctgaaccacgtgaactgtcatcacctggcaaccccagccccagcctcagccctgccccctttccctccttcctggagtggtggctacagaagcttggggccaaccctggctcctctttccccagcttctgtctgtctcactgtcttccctcccctcccccagctgaggtgtggccctcaggcctggtgctgccttggagggctgggggaaggagtgtgtggaggagggaggagggtgaagactgaggctaggtgccagaatggactggagtgaaggcgtgtctagagtgtgggctggctgttgtgctggaaagctggggacaggttgatggtaataaa

SEQ ID NO: 217116 - DNA, 341 bp, Homo Sapiens; identical to SEQ ID NO: 53913

SEQ ID NO: 217117 - DNA, 552 bp, Homo Sapiens
gccgtagtgtgctcggattctttttttgcagacttttcagcttttattacaaaacaggacgtgatcccagcccaattttccaacaaaagtcaccacctcaatttgatttggtcaagccctctctggctggggagtgggctggccgacaagagcaaggccccgtcccagccatccaacactctgtccttccctgccccaggatggacacccaacatgtggagaagttgctcttgaagctgctcactgggcctcgttgaagcgggtcaccattgtcttgtgcagtgtctccttgtaggactcggttgaggtgaccccgtaggagctgccccgtgcacccaggccggagccccgcacccgtgtttgggcctcgataggcgttacaatgccctgcttcttgcggcccaggccgctgccctctttccagcccatggcctgcagcatccgactgccaatgttgtcactgcccagcccgtcccgagtaggctgctcgaagtctacagaggctgtggatatgccgccgtacttcctcctcttgggctctggcggctcggg

SEQ ID NO: 217118 - DNA, 553 bp, Homo Sapiens
gccgccgtgtgcctggattcgtctgtgcagggtattatcatctaccgagccgcctacttcggtatctatgacactgcaaagggaatgcttccggatcccaagaacactcacatcgtcatcagctggatgatcgcacagactgtcactgctgttgccgggttgacttcctatccatttgacaccgttcgccgccgcatgatgatgcagtcagggcgcaaaggaactgacatcatgtacacaggcacgcttgactgctggcggaagattgctcgtgatgaaggaggcaaagcttttttcaagggtgcatggtccaatgttctcagaggcatgggtggtgcttttgtgcttgtcttgtatgatgaaatcaagaagtacacataagttatttcctaggatttttccccctgtgaacaggcatgttgtattatataacatatcttgagcattcttgacagactcctggctgtcagtttctcagtggcaactatttactggttgaaaatgggaagcaataatattcatctgaccagttttctcttaaagccatttccat

SEQ ID NO: 217119 - DNA, 530 bp, Homo Sapiens; identical to SEQ ID NO: 42130

SEQ ID NO: 217120 - DNA, 553 bp, Homo Sapiens; identical to SEQ ID NO: 45977

SEQ ID NO: 217121 - DNA, 548 bp, Homo Sapiens
gccgtgtgctggattccatgaaccacattgtgcaaaccttctctcctgtcaacagcggccagcctcccaactacgagatgctcaaggaggagcaggaagtggctatgctgggggcgccccacaaccctgctcccccgacgtccaccgtgatccacatccgcagcgagacctccgtgcctgaccatgtcgtctggtccctgttcaacaccctcttcatgaacacctgctgcctgggcttcatagcattcgcctactccgtgaagtctagggacaggaagatggttggcgacgtgaccggggcccaggcctatgcctccaccgccaagtgcctgaacatctgggccctgattttgggcatcttcatgaccattctgctcgtcatcatcccagtgttggtcgtccaggcccagcgatagatcaggaggcatcattgaggccaggagctctgcccgtgacctgtatcccacgtactctatcttccattcctcgccctgcccccagaggccaggagctctgcccttgacctgtattccacttactccaccttc

SEQ ID NO: 217122 - DNA, 515 bp, Homo Sapiens; identical to SEQ ID NO: 52100

SEQ ID NO: 217123 - DNA, 533 bp, Homo Sapiens
gaaagttaattttgcattttattcattcattccatcagctgggaattgctctattgtacaaatacagttttgtacaaaaaaatcacaaaatgttacaaaataaaaaaagtacaaactgcattacttaataaatatgactaaaagtagttaaagtggcaatgagattgattttaagttggaaacattgtttgacccagcaaaccatacaagctctgtttacagacatttctacatcaatacagggcaatcctattttgccttttgaaagaatgtaaagaaatattaagacagtgttctcctgctataactgccaaggttggctccagacatttatgccattagtttataaatctcttagctggattcaagaagttatataaagcaggaggcttatcttgtcacagagttttataccatgttaacattctcttacaacaacgtgacaaatgtaaataaaaacaactgagagcaccagacaatctactctacacatcaaccagggtacagaataatccccggtcgagcggccgctc

SEQ ID NO: 217124 - DNA, 515 bp, Homo Sapiens
gccgtcgtgtgctggattcgaaagccatctttgcattgttcctcatccgcctccttgctcgccgcagccgcctccgccgcgcgcctcctccgccgccgcggactccggcagctttatcgccagagtccctgaactctcgctttctttttaatcccctgcatcggatcaccggcgtgccccaccatgtcagacgcagccgtagacaccagctccgaaatcaccaccaaggacttaaaggagaagaaggaagttgtggaagaggcagaaaatggaagagacgcccctgctaacgggaatgctaatgaggaaaatggggagcaggaggctgacaatgaggtagacgaagaagaggaggaggaagaagaaggtgatggtgaggaagaggatggagatgaagatgaggaagctgagtcagctacgggcaagcgggcagctgaagatgatgaggatgacgatgtcgataccaagaagcagaagaccgacgaggatgactagacagcaaaaaaaaaaaaaaa

SEQ ID NO: 217125 - DNA, 550 bp, Homo Sapiens
gcgccgtgtgcgtggattcatttaattttaaggaccagattttaatcttaagtactttttagaggtgttagtagtcaatacctgtcaatgtaatgtttatttacaatgggaaaaattaaaagttggcatcattacatcaattcctcatatctgagtcctgaaattttaaagcactctaaatcaccaatttacacttggcttttgttctcaagtcaaatatctgtttttacaccttatttcggaaggcgttcctcctgtgtatttcatgatgtcgactaagtgaagagttatagctgaaggcttttccacattcgttacattcgtaaggtttttctccagtgtgatgtctctgatgttttttaaaggatgaatcatgcctataggcttttccacagcggttgcattcatatgctttcactcctgtatgaacagttttatggttgctaaggtgtatcctctgcctaaaggcttttccacattctttacatttgtagggtctctccccagtatggattctctggtgatgtgttagatacgctctatgactaaa

SEQ ID NO: 217126 - DNA, 555 bp, Homo Sapiens
gccgccgtgtgcctggattctttagatttttaaattgggagaaaagcacttaaagttttttatatatgaatattacatgtaaagctgttaaaatacataacttcagtgcaagagactttgtcacttatttccttatgtgtgtaggaggggttaataagtctctagctctccatctattgatagtttcatttacaatttcaaaagaacattcttatattttatcaaggaagtcttcaaatttgattctaaatagcgattataatctccaactttattttgaatgtacctctattagtttcaattgagtaattctagacataactggtttgactctgtccaactctgtatttaggccatttgttacagtttcttcatgcattacttactgttaaaactgtaccttttgcgatttcacagttggcacttctgccatgagcagagaactgatgcgacttgttttgctgcttggtagcactttaaaaaattttttgattaatgaagaaagtaaaaccataaacatttgcccccggctcaagcggccgctcgagcatgcat

SEQ ID NO: 217127 - DNA, 532 bp, Homo Sapiens
gtgctgtacttttaattttattaaaaaagaagcaagtatcttcaacataccaaatgctttcacatttctgcctgcaggcactgaccacaaaaatacagacccaacacaacaaaagcaattaacacaagataattaagtggtagttacaagtggtgggcaggggaaagtgcaagaggccagctggctgagcaagtggagtcatcacatgtgtcctcaacattgtgggtttagggatccagtgcaatcagttcacttctaagaggactggggttgaggactcgagctaggctgctctaaacttgtacaaacagaattacaaatcagagtgccaatttatctgtagggtttgtttaagcagttcaaatctgaaagactgctggcagagccctgaactggactgagaacaaacgtttttatgagccatcatcatccacctccacaaagtgcctgccttactctagggtttttctcagccaaatctactcatctgatcaggatgccctcttgcctggacaatgtcagaggaacaagg

SEQ ID NO: 217128 - DNA, 494 bp, Homo Sapiens
ggcgccgtgtggctggattcccttcattcagcaggaggccctattaccctctccagctgccactgccagagctggattcctgtaaaggagtccaggctagagccacagagactgttgtggaggtgagttcggctgtagttagagtgattggacccttcctattggtctgtcctgggccaactggtgggtgatctctgctgcatccaacatgggagcagagactggcagcaggaggggggaacatggtgagaagtggtgctcacttttcccattcctcctaacatagttctactatgctagaagtggcatccagcggccacagctagaaaacagtctgcagtgtgacttaacttgtgtattgcattccagcagaccactgaaccagacagcgaagccaagatcattgttctactttgtatttactactgtgtgaatcagttgattctacttcaggtccttgcttaaattcctgtcactaaatggaaaaaaatcga

SEQ ID NO: 217129 - DNA, 415 bp, Homo Sapiens
ccagacaccattgtagtcgtttgtgtatgtgtgacttctttactgtgttcatgcagagacaagctttgtaatacctttgtaactactgtacaggtgcgtggttagattccgttttgactgcttggtatctcattgtaagcatttcccagggacactacacagtctttataattatgatcactacatcttttggataacttaggcttttgcactattttgtcacgatgcctcaaacttttctatcattgtctgtaattactcctataatcttttattataaaatattgaaacaaagtcacatcactaaaaacactgtgagtataatttattagtaagtgtagactgtgtatcattagcaaaacttgtaaatgcaacgagtcaataaaacagtagaacaatgtaaaaaaaaaaaaaa

SEQ ID NO: 217130 - DNA, 524 bp, Homo Sapiens; identical to SEQ ID NO: 52337

SEQ ID NO: 217131 - DNA, 549 bp, Homo Sapiens; identical to SEQ ID NO: 44477

SEQ ID NO: 217132 - DNA, 353 bp, Homo Sapiens; identical to SEQ ID NO: 54748

SEQ ID NO: 217133 - DNA, 530 bp, Homo Sapiens
attctcggatagttgctatttttgtaaagtttccgtgcgtggcactcgctgtatgaaaggagagagcaaagggtgtctgcgtcgtcaccaaatcgtagcgtttgttaccagaggttgtgcactgtttacagaatcttccttttattcctcactcgggtttctctgtggctccaggccaaagtgccggtgagacccatggctgtgttggtgtggcccatggctgttggtgggacccgtggctgatggtgtggcctgtggctgtcggtgggactcgtggctgtcaatgggacctgtggctgtcggtgggacctacggtggtcggtgggaccctggttattgatgtggccctggctgccggcacggcccgtggctgttgacgcacctgtggttgttagtggggcctgaggtcatcggcgtggcccaaggctggcaggtcaacctcgcgcttgctggccagtccaccctgcctgccgtctgtgcttcctcctgcccagaacgcccgctccagcgatctctccactgtgctttca

SEQ ID NO: 217134 - DNA, 857 bp, Homo Sapiens
cacgaggtgtccttgagtttggagcctgagctctggtgaaatgctgatacatctgatctatcatgggaattgcagttagagagagtaaggaataccatttagtcatctatccgttcttcacttagcaggaatatgaaagaaaggcacatgtttaagaggaatacctaaaggtttttctaaattccaacatttaaaaggcaattgtgggctatttttattttttaatattttgaaataaagtttagtgtctagggctgggagccaggactgatcttccatttctttttctttgttcccagccatgcttttgtaacttgccaggtggacttgaccaactacattaccatgctgtgcctcagtttacccatttgtaaaatgggattaataatacttacctacctcacaggggtgttgtgaggctctattcatttgctcctttattctttcctgtattctctgtatgtccagcactttgtagccatgggaggaaagggactataaaagtgtacaatgttaatggaatgatacggtacctgaaagccttgttttctagtaagaaaatgctaccttgctgtacatacttataaccttgtatttggaaatgagaaataggtttatattttcagatctctcaaaatcacatcatttgaccaaagaataatttaagaacatagaacagattttttatttaattttcatctgacagcttagttctatattttagtgtgagtgataaaacttggatcattttggtcacatgcacttgtatcgatgacagcagatttggttagagccttagcacatgtatcctgcttaatgacatggatatcatcagccatcgatgatgagtatcgtct

SEQ ID NO: 217135 - DNA, 798 bp, Homo Sapiens
  misc_feature (2)..(3): n is a, c, g, or t
  misc_feature (7)..(7): n is a, c, g, or t
gnnagantcgcatgcacgcgtacgtaagcttggatcctctagagcggccgccctttttttttttttttttttttttttaaaaaaaaggccctcaaatatatacagacaaaaaattactgtgaagattttttcgggaaaagctaccaaattcagtgttgtgagaaaaactggtaaccatgcagaaattttaacatctatgaattttttttccaaaatacacacatatttttttaaaaaaggaattctgtgtcaagtataactcaaaataaatacaaattcacaagtagaactattgaatacttcatatggggtaaacaccattatctcccaactagatcgctagatctaccaactgcaagcgattgtcccttttgaacgtactaaaaccacacactttcccatcccctgggctcctggccctctgagcacttaattctcaatggcacctggcctgcatggcaggggctttgctgaccacaagagagttccccagttcagccagagccgagtcaaggggagtatggaaggtgggcctcaaagcgggaaccccagcccccaaggtggctggctctgcacagatggcagggcagtggctacctgctgaacagctcactggcaaggtcactttggggtgatatcccaactccccttagcccgtgcagggaagccctggcctccagtggtctggggcctgggttagttttagggtgtgggccccccacctttgcagcacagctggcaggccccaagcatccttgggccaaggtcccccaagggccgggtccctggaagggttgg

SEQ ID NO: 217136 - DNA, 498 bp, Homo Sapiens
ttttctattttgaaatggagtctcactgccccgcgggctggatcaagccctcagctcaaaaacaaacaaacaaacaaacaaacaaacaaaaaaccttcaaatgaatgtaagaattattattttttaaagtacagctttaaaaatgccccttacaaatacatcagtgttatattaaggcaaacccacttcagaagcacaaagtttaattctttataattccaagaaatatgtgaatgttaaaaaaaacccaaacacccgaaaagggatcaaactcaagatagtttgtaacattttattgcaaaaagaagggcagagaacagtctttttcttcgtacctgttcaccgcagtaatttttagcagctctcctgtgcaaagaagtctaatcaatgaatcagcgtataggccacaaataccttctcagtgcggtttcacctagaatacaagcactcagaagcacaaatttaactgaagtgagaaaccaggccattttgtagctt

SEQ ID NO: 217137 - DNA, 501 bp, Homo Sapiens; identical to SEQ ID NO: 61228

SEQ ID NO: 217138 - DNA, 531 bp, Homo Sapiens
tggcaatagtactaacatagggttttatcttgggatacatatgtattggtctgtttgttgaccttgacatctgatcactgatgtcaatgacctactggcctcattcaggacacctgcagagagtatgcaaagtccgagagaggaaaacagaaatctgtatgtgagatggtcattgtacagaaagaagtggcccctctgcaacatgtcctcacagaaacgaaatggtgtgtagcaatcaacactagaaagtagaccttttgcaaattaatatgtccttgaccttttttgcccttttgtgggggtgaggtggggataaaaagactgtcatatcaagaactgtgacttttctttccctcaaacaataaaactcctttattatcttaatgctcccatgttaacatgtttgctgctaaattacaatgtagaattgataatggtttatagtgaactgtgctcttccctcattaaaatcccagggtgccctgtaaagatgcagatgtttcttcctgaaaacttctttttttacaaaga

SEQ ID NO: 217139 - DNA, 569 bp, Homo Sapiens; identical to SEQ ID NO: 57796

SEQ ID NO: 217140 - DNA, 491 bp, Homo Sapiens
tttattgtctaattcacaatgatttatttaaaatatcttatgaatatttgagaatatttgtgtgataacacacaaagcatataagaaaagcagaagttgtgatttttattttataatgccaaaataaaatgattattgcacagttaaaaagcaaatcttaactaaaatgctgaaaagcagtgtctcagctgtcagggtggcaaataacatgaaagtgacaattagtccttcacacattcacagtgttggccgactatagactcttcagaaccagaggtacagtggatatttctcattccagggtcatggaactcagccttgggaatactgaactatttaaatcaaagttccaaaatgtgacatctcaaatgctccctgaattcagcagacaaatgaacatttcaggtatagaaattaactcagctttataatttcaggtttctctttaaatactagaactataaatatttcaaaaagctattcaggtctat

SEQ ID NO: 217141 - DNA, 616 bp, Homo Sapiens
  misc_feature (529)..(529): n is a, c, g, or t
cagacagtgtctcactctgtcacctatactggagtatggtggcacaatctcagcctgggggacaagagtgaaactccgtgtcaaaaaaaaaaggtctctcagcttagtgctcgggccaccagatcctggcatcatcacttattaccagtatgatcttgggaaagttactcaacttctttaagttttagtttcatcatttataaagtgacaataacagtaagacctattttgtggggttgtggttggggttgtatgagatgcacatgtaaaaagcttggtatgcagcatttactaaatgttagttcttattaattatcttgcctagcttgacagacggttatctgtaactgcctacatacagtccaatataagtgtcaaatctcctaagcaggacatggatgttacttagtatctagggcacagacaaatatcaatgtccacaaacatgaatccatctcaactcacactggcagccaatctgatgagtggcgttgagcaggcgaacacagggagctgttttatttaaggngatatatatcttcctctccactgagtttcccctgcacaaacctgctagtaggacgcagaaagacagaaggcgaaagagaccccgact

SEQ ID NO: 217142 - DNA, 534 bp, Homo Sapiens
cctttgggttcatctcctgtttcttgtctaacaccaggatgaccccagttttgacttctttccatttggccttccaccattgtccctggtaaggtgaagtgaggtctttccagttggaaggcattagctacaggtcgcggcggggggagaggaggtctgctgctcatgagtggctcttgtgaattattttctggatcagcaccaggaatgaacacatacaagtcatcatactggtcttcagaactctcactgccaacctctagtgggctgtgtttggtctccatgcctgatccattctgttttccttccccttccatttcatttgcctcagctccatctgcactctgcccgtatgtcttcctgctttcatgatgaaatgctgggttctgtgtggaaggaatatatgtggaaaatgaggcaatatcctcttcataatcattttcttgctcattatttatgtcaatttcttggattgaaaagtcttcgaagattttcttgagttctttgtgaccatgcctttcagcaatatgtgtg

SEQ ID NO: 217143 - DNA, 563 bp, Homo Sapiens; identical to SEQ ID NO: 154265

SEQ ID NO: 217144 - DNA, 479 bp, Homo Sapiens
tttcctgttatgatggggtctcactatgttgcccaggctggtcttgatctcctgggctcaagccatcttcctgactcggcctcccaaagtgctgggattacagaaatgagccactgtgccctgctctccttgtgaattttaggagcataggttcaagagactctgggtgaaagtatgttttacaaagaggaaaggcagtgaagaaacaggggaagcaggcttacatcaactgttctggaatgaagagctgtgcataggcagaggggagagagctgctatacaggagagaggatcaatgaagcagcgatatgtctgaagacccaaaaaggtggattagctgggcatgaagagagattgaggcaacaggagtggaggatggcatgttaggagaggcagagaagctttacagccgctacttgcaaggaggatgtaacagcgaggagggagagaccaaagcgcagcctcaactctccctgacg

SEQ ID NO: 217145 - DNA, 642 bp, Homo Sapiens; identical to SEQ ID NO: 96445

SEQ ID NO: 217146 - DNA, 500 bp, Homo Sapiens
tttttttaaatatttaagagtttatttgagcagtgatccatgaattgggcagcttcaagccagaagtggctagggagctccccagagagaacatgaggaggaggctttttaggacaaatagataaaagcaaagataatatttcattggttacagttatacagttacacagttatacagttgccttatttggtctatcccatgaggaagtcctagttactaattacgtttttgttggctgcttctgattggttgagcttaagttctgtgtttctttaacataggcatttacaagaaataccacaaataaagtttcagacatgcttgcaaatcaagcaaggttaaggtcacttaggaggcccaactggctctgtctgctcaaggattcttctggcctcgtctccattttacatgaactgttgcataaataaacacagagtacctgaaacaacggaggtgatcattctgcctaccgagtgttggccacgccaagcttggagtg

SEQ ID NO: 217147 - DNA, 542 bp, Homo Sapiens
  misc_feature (528)..(528): n is a, c, g, or t
aggaaatcaaatatttttattagcccttaacataagaaaaacccaaatggcaaataaatacatgaaaatgaacatactgtccaccagattggctaattggagaaggtatgcataaatgagctcccatatattgctggtaaaaaccactatggaaaactttggcattagttagtgcaactgacaatatacatattcctatatccagccattctaaatcttaaacataaatagacaagttgacagcagtatattcataaaaagaaatacaaggagaaaagatacctttatatggaaaaaacattggtaaaaacattaaagaatcagacaaaaggatatgtaacatacgtttctgtttatagttcccaaacaggcaagattattatattttgtttagggatgtatacataactgttaaagtataaagcaaagcaaagacatcattgcccacaaagttaaaataatggtcagctttgggaagggagggcgagggatatcagtgatttggtaagcagggaacttactaagttntacaaatgttctgt

SEQ ID NO: 217148 - DNA, 566 bp, Homo Sapiens
tttttttgttgttcaaagagcatttctgccttgtttattctgcataacaaaaacaaaaaaaatgaaacattttcaggattttgaattattactgctggtaatatatgccctttcactatgcattgttatttttactttgcccataaaatactgaggaaagtactgaataaatatatattttattaaacacacacaaatacaactctgttaaaattcatataaatcagttatgtctcactcccatccaaattttggcttatacatctttaaattaaaaaaacaacagcatagcggtttaggctaccaaaagcctggttgataaggatgattaagtgctgaagttcagaactgaaccagaaatagctataaaccaaaatagaaaacaaaataataaaaaaaagtgataattcacgtcaaagcctggcttaattttaatatactccatcctgaaaaaagaactttcctaaaatgttggtttttcaagaggacctttctaggttaaactgaacacaaaagagaatttccccaaatgagttttctgagccaaaggaaaatcaaattatgct

SEQ ID NO: 217149 - DNA, 559 bp, Homo Sapiens; identical to SEQ ID NO: 58796

SEQ ID NO: 217150 - DNA, 421 bp, Homo Sapiens
atttcttcctttggggttgttcacttcagaatttgcccaacattcaacacaactatcaccatcatcctctttgtcttcacagtgatgaacacaagagtcatcacctgcagaaatcaataatccttcttatttatgttcttaagtcagccatgtagtagaaataactgggaaacttaatgtgagcctaccgtgttcatcatgattacaaatgccttcagtgcaggcaacatccgaaccctcccgagaacctgtttcactcccttccatgctagatgaatatccacaatcactaccattacagtgtggagataagcctgagaataaatcaagtgagagttactattaacataccaataagtatattaggacaaagagtgaactctttggggaccacagaaaaatctcataattaatggcttat

SEQ ID NO: 217151 - DNA, 542 bp, Homo Sapiens
tttaatttgttcaataaacgtttattaatggcccaatgtacaccagccctatggtgagcacaggaaccaggaagatggaggagacctgctgggtgctctccatcagctcactcccaagtggtggtcattccacctgtagaccatgggctcttgggggccttccagatgacacaagtcattattagcaaggaacaagctgctaattcttgcacagacctgtattactccgtgtttcaaatgtatgcagatgctacagtgattaatatgcacatttctttgaaagcaatactgaattcctattagctattggtcactgtgtattttctcaatcaggagataccgattgaggggattttaaacaacatttatacattaaaatatttatacatgcttgaaaacactggaaatacctgatgtgagagttttaaaaaaaaaaaaagtttaataaaaaccaagaaagcattttggaaaaaaagatcattttcagaatcttcaaggaattactagcacctctaatctgtacctcaggtacaaatatattt

SEQ ID NO: 217152 - DNA, 561 bp, Homo Sapiens
tttaatactgtgaaaagtttatttgcatcgattaattcctttttttcaccatcataagagatattgacatttgtttgctctttgtgatcagagaaaagacattttggaatggataatctgtttctaccattctttaaagaaaaaagctttaaaaacaaaattcaagtgcaaaaatttccagtagtcttcctacctccagtgtaccccagcaaaatattcatagctgtgctgttaggaaattaatcaaccataagcttcaattacccactttttttcttccctaaggtgtctgtacttatgaaaacatatatagcatattcctgaaagtataccatattcctacaaagtaagggagcctagaagcaacagtgatcactgcctttcagtgtctccaaccccatgtaaccactgataggataattcagtctctaagtcatttgatctacccatttcctaaataacagcgatcaacttctattcaacaaagctagtctgggtttactaacacgttcccccaaaattcaataggtccatgtaacgtagtaattaggtctttcaatt

SEQ ID NO: 217153 - DNA, 555 bp, Homo Sapiens
  misc_feature (446)..(446): n is a, c, g, or t
tggtatttacttgggaaaaaaagatgctacaaaaaagagacatgaattaagaaaatatttcgcatgtaagacaagtgcagataaaaatgaaaaatgtgccgggtggtgatctgacagttcctgggatatcagtaacactgaaaatgcctagaaaacaaccttttcccagtgttgggggaagggttctattcctgtagagtccaaaaacaatttttccacattttgaaaacatctggttgtattttggcaaactatggtagctatcagctttgaatccatatgtatttaattttgctggaggctggataattaaaaccaatataactgaaaataaaacaacaaaaagcttttttcaccctctaagagcaaagaaatctacacctgggttatctgtatttccagttgatatggaccagccagatactccagaaatactcacaaatatntttgtttctatttaaacattatctcattattggtttaaaatactcttgtagacaataacgtccttattttgaataggaaatattgggggtcataccaatactaataact

SEQ ID NO: 217154 - DNA, 245 bp, Homo Sapiens
ctagagatggggtttcgccatgttgtccaggctggactcaagctcctggcctcaagtcatctatgctcctgttggcctcccaaagtgctgggattacaggcatgagccaccgtgcccagctgaaagcctaagtctttagttccatacaaggtctggaagtctcatgggcaatacaaaaagaggtttgcctcacctctgaaggcgagaaagcagccataggactgcacccagttctctccccgaga

SEQ ID NO: 217155 - DNA, 509 bp, Homo Sapiens
acaatttctccgtagactttattcaagttcatttttggtctgctttcaggaatctttagttaaccagctatgtttaatctacatattgcagggccaattgtacattaaggggcgctcaagtagttttgtacagaaatattactccacaacattccacctccaacctcaaaggagatgtctgctgatgagtttaactataattctctcaactctcccctcttcgcaagtattctccgtgaatgcatctcattcctaatgtgtgaaatctctccgagagacaagtattaaagtttcaggccaaatcggagagcaccgtaatcctaaaccaagtaagtgtcacaactggggaacataattcccgacagaaaagaggccaaagagaaaggatttagaaacatcgtgattcggaaaccacgaagccaacgtaaactgctcagactccggcactactgtcaaacactactgtcaaaccaagacccctcccaaacgccatctgaggtaaacctgag

SEQ ID NO: 217156 - DNA, 412 bp, Homo Sapiens
agacagtcgtgctgtgtcgccaggcggaggttgcggtgggcggagatcgcgccactgcgctccagcctgggtgacagagcgagactccatctcaaaaaaaaaaaagttcttccagctaaaacctttattttttgactacatctccacaaaatggagctatactgttagccagtatcctaatagtatagtgcagtttgcataatgattaccaagcttgaaactggaaatgtcatatgcactttcgtgtgtatcaggcagatactaaacattttccccttgagtcagcttaaaatttttccttcttttgaaatctcacgcagttgttttctggagaaaaatagagactgttttagtattttgttcttattagcgtatcatcagaactcagcacagtctgccttataagaaaaca

SEQ ID NO: 217157 - DNA, 569 bp, Homo Sapiens
tcctaaaggttgttttattgtaaaaccataaatacaacactgacatgaaatcatttaagcaactgatcctctctaactgttaaaagttatctttttgccttggcatcaaccaactgggaaatagtgctgcaagaattcggggggcaggggaggtactgaatcccgggctggggcttttggcgacttaaagaaccgagtggaaccttcctcttctccctgggaatgttccacttttggacaagaacagacaggtaaaaacagcaacattaaacagctcagttttaaattttattactttgtaaaaatctttttttctgttcctttcctccatttgacatcagtaaatgttttgaacatcatgaaactgatttggctgtaaatggagaaacggcaccaaaacaaagtgaaacaaaaacccaaaggacaaacagaaaaccctaaataaaccctcaagtttggtctcgggggtttacatatcacaagaaccgtcaactcaacccccatgcaatgtgactccctggagagctgttggatccacaccgatacaggagaccgcacacaacatcttt

SEQ ID NO: 217158 - DNA, 684 bp, Homo Sapiens; identical to SEQ ID NO: 60673
  misc_feature (389)..(389): n is a, c, g, or t
  misc_feature (476)..(476): n is a, c, g, or t
  misc_feature (522)..(522): n is a, c, g, or t

SEQ ID NO: 217159 - DNA, 399 bp, Homo Sapiens
  misc_feature (360)..(360): n is a, c, g, or t
tttcagattttcctatgtatttttattttttccagatcgttaaaaaaaaaaattaatgtgttagcattctggttggaaatgtattatatttacagattaatctaggggaacatctatttaaaatgtcaaatcatctcgttcaagaacaaggtatagtatagtccctcggtacctgagggagattggttctaggacccccatagatactcaaatcccaggatgctcaagtacctgatataaaatggtgtagtatttgcatataacctatgcacatcttcccgtataaatcatctctatattatttataatacttaaaagtgtgaatactatataattatattaacttatattttctatggntatttttattggttcccccaagtattttttttttttttt

SEQ ID NO: 217160 - DNA, 463 bp, Homo Sapiens; identical to SEQ ID NO: 58877

SEQ ID NO: 217161 - DNA, 425 bp, Homo Sapiens; identical to SEQ ID NO: 60520

SEQ ID NO: 217162 - DNA, 460 bp, Homo Sapiens
  misc_feature (444)..(444): n is a, c, g, or t
tgggtagagattggtttttggtctctaacttttgggctcaagtgatccgcctgcctcagccttccaaagtgttaagattacaggtgtgagccactgtgtctggccccggtcactatctttaatgaagaggcagatttaacaaacagactagaaggaccaaagtatacatcttacaccagcagctctcagcaatgccggtacaaaaggatgtgatcacttcctgatgttaaccaaacccaaatcaaaatgactcaagttccattctaggagccagtaggacatgacattcctgcacttcagaccccctgggttgttgtgccctcaatttaagacaggcatttttccaaggctcattgacaagctctctctcctgatgatgtcggcccctctccagctggccttactctgctttgagggatctgggtaggcagcgctggccagttntttcagggcaggggta

SEQ ID NO: 217163 - DNA, 1000 bp, Homo Sapiens
tctactaaacttacattaagactttctcgtgtaaggtcttcagacatggaccagcaagaggatatgatttctggtgtggaaaatagcaatgtttcagaaaatgatattccttttaatgtgcagtacccaggacagacttcaaaaacacccattactccacaagatataaaccgcccactaaatgctgctcaatgtttgtcgcagcaagaacaaacagcattccttccagcaaatcaagtgcctgttttacaacagaacacttcagttgctgcaaaacaaccccagacttctgtggtacagaatcaacaacagatatcacaacagggacctatatatgatgaagtggaattggatgcattggctgaaattgagcgaatagagagagaatcagctattgaaagggagcgcttctcaaaagaagttcaagataaagataagcctttgaaaaaaagaaaacaagattcttacccacaggaggctgggggtgctacaggaggtaatagaccagcttctcaggagacgggttctacgggaaatgggtcaaggccagcattaatggttagcattgatcttcatcaggcaggaagagtggactctcaggcttctataactcaggattcagactccataaaaaagcctgaagaaatcaaacaatgtaatgatgcacctgtttctgttcttcaggaagatattgttggaagtcttaaatctacaccagaaaaccatcctgagacacctaaaaaaaagtctgatcctgagctttcaaagagtgaaatgaaacaaagtgaaagtagattagcagaatctaaaccaaatgaaaaccgattggtggagacaaaatcaagtgaaaataagttagaaactaaagttgagacccaaacagaagaacttaaacagaatgagagcagaacaactgaatgcaaacaaaacgagagcaccatagttgagcctaaacaaaatgaaaatagactgtctgacacaaaaccaaatgacaacaaac

SEQ ID NO: 217164 - DNA, 506 bp, Homo Sapiens
attacaaagacaatctttattattaaaatgaatattataagttatagccataaataaattccaagtgcaacattttcacagtatcttgggagtaaaatcaaaaggtgacataaaatgtaagttgcgcaagagttccacagatgcaccctctcagaccaaggcagcttggtctgttgctcctggggcagatggcttctctttgtggaattaccagctaacagaattggctgcttaactgagtgacaatgaaaacatataaaccatttgaatataataataataacaatatttttacatagaaatcactacatacaaagtttttcttattggaatacttacgcatttttgaatcaaaattcaacaactttatataggaaatgtggaattatttatcttgaagtatacattactatggttgagggtgtttactctttgcaccacaatttcatagaacccagagagtgataaatgagaagtctggataagccatggaatggagaagctca

SEQ ID NO: 217165 - DNA, 313 bp, Homo Sapiens
tttaaagaattggttgtcttgctatgttgccaggtggaactcaaacttctgggctcacgcggtcttgctgccttggcctgctaactcctgcgctcaggtgatcttcctgcttgggccccctaagtaagctgggattctaggtgtgagccactgtgcccagctctgactgtaacttttgccctagataataacctgtatactgcagtgctgtcataaggatgcatggtactaagaggaaggtgtcgaatggcaggcacttagtcaggccatataattagcaccattattactgctttggaaggagtagtataag

SEQ ID NO: 217166 - DNA, 440 bp, Homo Sapiens
ggaggacttaaaatacccagactttaattcctctaagattatagttattaatcatgtttttatataatattatcatttaacatttaatttctaaatataatgttcatgaggaaaagagaaaatagcttggtttctttccttaccgaactgttgtccttagtatcttctagacgttccagaactgatgtcagatttggctcatcagagtccacaaaccatatcggtgaagaagatgaataggattcctgctgcatccagggtacaatgcgcctttccagaacacagcagcgacccggggtagagggatcgctcaaacagcaccagaggctgcattccaacttttcctccatcaacgagtccgttttcattgttagtttctccttaaacacgattggctgaacatgcgggaacaaggaaaaccgtgatgttgcagtggagcc

SEQ ID NO: 217167 - DNA, 450 bp, Homo Sapiens
tttggctgaatgaaccaatgagattcatgacagcatcattttgcactatggtcttttaaagaattcgttttctgaaggtagctgaattttgtaaagtttttctttataattaaggcaaaggtgaatttattaaagtcaaagtctcattatcatcaactttaatagagtccaatcttttgaggttgcattataatagttttatagaactaaacactagaaaattacaagagaaatggcaaaacagaaggaagggaaaataagtccataaacaccaaaattgaacatcagttgtctttgggcttaaaaatttagttgtacatacatgtgaggaaaaagactggcataatggaagttcatgcaaaaaataaaaaagagcaatttttgttttgcctgccaatacaacttttggcatcattaataagaatttagtgctcagatgggaagacagta

SEQ ID NO: 217168 - DNA, 506 bp, Homo Sapiens; identical to SEQ ID NO: 50179

SEQ ID NO: 217169 - DNA, 524 bp, Homo Sapiens
tttgttcagtaagctttcatgtccaccttctggtaatggtcttatcccctggccactagggtgggcaagtaacattctttaaaacttttattgtgaaatataagatatgtatatttcacaatatatgcataaataaaatgtataaaacatgaatattcaatttaatggtggcctgggcctcttaggataggagcctacacaagttttggtttggggcttgacactgtcagctccgtactctatttcacctacaagagcaatcactgaaaaaagcgtaaggctttctgtaatatttattatctggttattggctttggattcctcagacaagaactatttggaccaaactatatggctcaaaagagacccaaggttcttcttgctcttttaggtcctttataccctgtcataaagagaatacaagcaggcaggaagagcaaagctgatttcaaagtgagtaaaagcaggcagggttgttgaactcctcctttgtaatcagacctgaacatttagtgctgcttttg

SEQ ID NO: 217170 - DNA, 533 bp, Homo Sapiens
  misc_feature (493)..(493): n is a, c, g, or t
tgcgtttgagtccactctgttgcccaggctggagtgcagtgtcacagtcttggctcactccaacccctgcctcccagtttcaagcgattctcttgcctcagcctcccaagtagctgggattacaggtacacaccaccatgcccggctaatttttttgtatgagaacacttttttgtactattttggaaagaaccactagatgtactattaaaagaaaaatgcatatacacctactatgtacccacaacacttaaaatttaaaattaaaaaaaagaaaaatgcaaagttccaaacagtatgtataatatgctatctgctaattaaaatgctaaaagaagaagaaacagtggacagcaagaatacacacattcatgtttgcttatatatgggtaaagaaactcaggaaagttacaggaggagctaataacagtggttaattacaatggtagaggagaggcttggcagataagggactcgtttgcagatatgactntcctttgtgtacatttctatatattattttacttcttctg

SEQ ID NO: 217171 - DNA, 486 bp, Homo Sapiens
tttatcggaatggcttcagtgagtcctttcaaagcatttaatccaatccatagaaatggcaatgctttcttttctttctttctttttttttttttttgagatagagtctcactctgtcacccaggctggagtgtagtggcactatctaggctcactgcaaccccccacctcccaggttcaagcaattatgctgcctcagcctcccaagaagctgggacttcaggcatgagccaccacacctggataattttttgtatttttttagtagagacggggtttcaccatgttggccaggctggtctagaactcctgagctcaagtgattctccgcccaccttggcctcccaaagtgctgggattacaggcatgagccaccacgcccagcctgcaacgctttctttttgccctcttgtttatcagtttgtgtcatatttacacagcaaagcctagtggctaaaagcacgagccacggagcaggctgcctag

SEQ ID NO: 217172 - DNA, 570 bp, Homo Sapiens
ttttttttttaaaattttttagtttttattgtttttaatggagagaagatgtcagggaagaatgcaaggcctcttgggataggacacttcaatgcctgccttgattcaggctaagttgccaccatttcaccccccgtcgtatttgtgccatcattgcagatgccaatgcagtgggaagggcaaatgacagcttagtgttactatgaaggtgggtttggtcaggtgtgccagttgagatgatactacacatgtgacatagtgaccacaggagtaacctagcagccggtagtgcccacaaagtatttttcctatattaaaattccaaacttctaaaatctgactactaaaatgcaatacaattactatcgtgaaaaatgtttaataaaatttgagatttacttttgtatcccagaatttacattttatgatggtgatatttagcttggggacctcaatgatctgaacacttaaccatttgactttgggttcaaattcatatacagtggacttctaaaaaaggaacagtatgaagtatacacaaaaacactgaaaatgaaaaatcaaactcag

SEQ ID NO: 217173 - DNA, 532 bp, Homo Sapiens; identical to SEQ ID NO: 57821

SEQ ID NO: 217174 - DNA, 498 bp, Homo Sapiens
ggtatttgttgctctgtcttggaaaagcagcacagataacacagctttcagaataaaatcctcgcatataaagggcaaaaatgtatgggtgtttgagcaatgaactggatcctagcagaggcattacaaaggactctgtgggaaaggttccatagtatccacagtcccactgaacacattctcaatgtgccatgatgcaaatccaacatgatgatcgtttggtgtgggttctcccacccccacagagtgtggtgggagaagacaccctctatatagtgtcccattttccccagtggcaacacatgtgcagaatagcagcgatgacggccacgcagagatgtagaagtgacttaacacccctgctgactctgcctcctgcccacctgagccatggagggaaggtctgccaactgtcccaggatgtcaggtggacgtgggaaaggcgagtagaagactgaggccaagcgagccagcgatccctaaataaaaggtgccact

SEQ ID NO: 217175 - DNA, 496 bp, Homo Sapiens
  misc_feature (11)..(11): n is a, c, g, or t
tgaagaactcngtttaatgacatatatctgacatgttctgtggagccagaattcaaaacccagatacgcaggaggacacattcttgatcggtattttattctattatttttattagttccaatccttatgactctgtttaaaatgagtatctgcattattgtgcaaacacttctgagatctcatcacatacctgatcccatttaacttcagtctatccctccattactttttgtggaaagtgctatctaagttggaggttctgcttgagtattcttaatttttcttctttttaatgcatacggtggtcaaagtaaatagctaacatattggcatcaaaccattgcctattgaagcaagctttgaatgaaattggtttgtcattgaccactgtgagaaactcatttgtaaagataatactgaaaaacatcctgactcttatgtatgcttgcctgtctctgaactccacctctatcagcatactcaatacattgcctc

SEQ ID NO: 217176 - DNA, 459 bp, Homo Sapiens
tgagacatattctcactctgttgcccaggctggagtgctggagtgctggagtgcagtggtgccatctcagctcactatagcctccgccttccgggctcaagcgaccctcctgcctcagcctcctgagcagctggggctacaggcgtgagccaccccgcccggacgatttttgtatttatagtagagacggggtttcaccgtgttggccagggtggtctcgaactcctgacctcaggttatccacccaccttggcctcccaaagtgctggaattacaggcgtgagccaccacatccggcctcagaatatcttttctagcacaaactctaaaattgttaacttaattttaccaacattggtttcactagctaataaaacagaaaaatcacttggcataaaatgaaaaactattccctatgtcctcttttcattaacagtctaaattattctgaatcactct

SEQ ID NO: 217177 - DNA, 509 bp, Homo Sapiens
tttttttttttttttttggtggagatggagttttgccatgttgcccaggctggtctcaaattcctgagctcaagcaaccctctggccttggcctcccaaagtgctaggattacaggtgtgagccatggtgcccagcctctcgcagactttcaaaagccaattcagaattacttaattgattcacttaatataaattcattatcaattcacctaacacattattagctcaatatgaatttattacctttcaagcagtgggtttgcaatgtaccttctggttgcatcctaatgtatttacattattggctgggttccgcctgcttgtgcgcctttcagggggaagtttttccctggcatccatgaccttgtggacttgtaagatccaggttgacaattgagctggaggcggttcacagtcagcctggcaggttttaccctcccctaactcagttaatggtcatttggctcagcaagattgtgccctcccggctgagtagaatctcatctcg

SEQ ID NO: 217178 - DNA, 531 bp, Homo Sapiens; identical to SEQ ID NO: 47331

SEQ ID NO: 217179 - DNA, 518 bp, Homo Sapiens; identical to SEQ ID NO: 84641

SEQ ID NO: 217180 - DNA, 553 bp, Homo Sapiens; identical to SEQ ID NO: 60830

SEQ ID NO: 217181 - DNA, 613 bp, Homo Sapiens; identical to SEQ ID NO: 60219

SEQ ID NO: 217182 - DNA, 467 bp, Homo Sapiens
ttgccattttaacagtgtttattataggaatgcaaagataattcaaaattaggaaaatttcatcaggcaattcacaaattatatttctacatataattgaaggcacaatcatgaaaaacaaagtagctctatatgcattaagtccatgatctattcagtgaaaaacacaagttgcacatgtcttacagaaggaaaacttaacactgaacacagattctcaccatctgctctttgtcctgaggctccaatagaaatacagtgaagaataaacattgtataagcacacaattacaaaaaaggaatggggttaccaacagaagagaattcatcttcattagacaatgacagtacatggaaaatggttaactaatggagcaaagcaaacaaaggtggaggtcagggggatactgagaacaaggaggctaatctgtcccacagcaacctgggaaggttctagactcagacac

SEQ ID NO: 217183 - DNA, 473 bp, Homo Sapiens; identical to SEQ ID NO: 60658

SEQ ID NO: 217184 - DNA, 360 bp, Homo Sapiens
ctactactactaaattcgcggccgcgtcgacttttttttttttttcaaaataaataagctagttggagattattggaaaataccaatattcaatgcagatgttaaaccagatacagaggagacccaggcatgctatttaaggttatggtttctgaattggcaacaagatcttttcttaggttatatcaatttacttaacatagaacagcatatttcaggccttttccacttaataacaaaagtcatctgtacacaaagcccaaacacaaccatatagcattatatgtaaaatgtgcaaatgtactttaaaatgcaagttattctaaagcactggcaggatagaatgtcgacgcggccgcg

SEQ ID NO: 217185 - DNA, 464 bp, Homo Sapiens
catttcttatatattccagtcactgctgttattgtctgagggtaggcagcttggaaaaatgtaggcaacaccaagttttaatctttatacccccaacaatttgactgactatatcatggtccaggttactttacatttctctggacctcggtttcctcatcataaaatgaagatactgtagactaccatcttcctaaagggatattggtatttgaaagagaattaagtgctcctttctacaaacatgatgtgccaaaattgttttattataagggctctttgaaacatcctaacttccttgtgtggaggactggctggaagcccatttggtacctactgtttgcaatgcatgttattaagtttacatgtctcctctgtcctgctctgccccttttttaaattactggcattgaatattgagttcatatggtaatagcagggtttttaaatgaataaaaattatg

SEQ ID NO: 217186 - DNA, 471 bp, Homo Sapiens; identical to SEQ ID NO: 55931

SEQ ID NO: 217187 - DNA, 583 bp, Homo Sapiens; identical to SEQ ID NO: 50675

SEQ ID NO: 217188 - DNA, 518 bp, Homo Sapiens
atttccgggaagaggcggcgcacaagtcaggtccggcacatgtttccgcggagcggacccagcaatgacgaggcagggtttcactacgttgcccacactggtctggaactcctgggctcaagtgattcttctaccttggccttccaaagtgctgggattacaaatgtgaaccactgtgcctggccgctttattctttttatgagagagggtcttgctatactgcccaggctggactcaagcaatcccgcctcagcctcccatgtagctgggactacaggtgtgtgccactgcacccaactagcagagaattcttaacaagcagtcaggatggaactgatggctgtttgggcactttctactttcttcttaaaaggatgatatcacctcttcttctctggtgagagtctgaggatagagacttttttctcaccatgaatgtcaccccagaggtcaagagtcgtgggatgaagtttgctgaggagcagctactaaagcatggatggactcgaggccacat

SEQ ID NO: 217189 - DNA, 582 bp, Homo Sapiens
  misc_feature (561)..(561): n is a, c, g, or t
  misc_feature (579)..(579): n is a, c, g, or t
gatgttggctctctatgctgaatagtgaagctgtggataggcggttgctgggttgagggactgttgatttcatgttcgaaaatatcttcaggtggtccatgtaggcctggtgtctgctgcctccatctttgaaggaacatggaggagccctttctctgtaggagccctaagtctgggttttatcttaaaagaacacaccagtcattctgggtctccccttattgccattgccaggggagggtcgtctagtccttaagcataaacactggctgtcttcctactggtgtccccgccccctctgtatcccccaccccaacactttgccagacagttctttatgatgaacaaactttggctttagagctttaccacttacccatggctccctccttactgggcaggtggtgtacctgcctcttcccagcccagaaggcagcttagtcaggtcatcccagtagtagctcctacagctcttctgaccagcccatttccatctttggagggccttagcagactctggggtattgtcctcagagaagagacaaggagatgatggatggngtgcatgtgtatatgtgnggg

SEQ ID NO: 217190 - DNA, 581 bp, Homo Sapiens
ttgttacttgctccctgttggtcatgtttttcggaaggcaactccatacacttttcctggtggcactggtcatgtcatcaacaagaacaacaggagactggcagaagtttggatggatgaatttaaagatttcttctacatcatatccccaggtgttgtcaaagtggattatggagatgtgtcagtcagaaaaacactaagagaaaatctgaagtgtaagcccttttcttggtacctagaaaacatctatccggactcccagatcccaagacgttattactcacttggtgagataagaaatgttgaaaccaatcagtgtttagacaacatgggccgcaaggaaaatgaaaaagtgggtatattcaactgtcatggtgtgggaggaaatcaggtattttcttacactgctgacaaagaaatccgaaccgatgacttgtgcttggatgtttctagactcaatggacctgtaatcatgttaaaatgccaccatatgagaggaaatcagttatgggaatatgatgctgagagactcacgttgcgacatgttaacagtaaccaatgtctcgatgaaccttctgaag

SEQ ID NO: 217191 - DNA, 593 bp, Homo Sapiens; identical to SEQ ID NO: 48881
  misc_feature (485)..(485): n is a, c, g, or t

SEQ ID NO: 217192 - DNA, 652 bp, Homo Sapiens
gcgatgttactttaaacccttaagccaacaccaccaacctgggaatactgtctcatgtgaattaatattggtcaatataaaacacgaagacacaaacccctaggaccttacatgttcaaatgattactgaattaggcctagcaatttctcctctccaatattaagagttataaaaaaaatatatttacactttcatcgaaagaacaaacagaaagggaagaaatgatttgcaatttgaagggactgagcccaaatatttctttatctctttatgtgtatgtgatgaaaaagttgctcaacaattatttcttgacatgtcaacaaaaatttaccaaaggctttggttgcaacgaaacttgatttacagacagtgaaatttgaatttcatagaattttcatgtcatgatttttttcccagtcatttaaaaaagttaaagcccttcttagctccaaggcagtacaaaaacaggagattggttggatttggcctatggggcatagtttgctgactcctgttcttcccaaggcagcaaattagaatcatgtaacagctttaaaaaattatatgtctctcccacacacccagatgcttaggcctatctgttagaaatcaatttccctggctaaattaaaggtgaaggtgaaggggaat

SEQ ID NO: 217193 - DNA, 603 bp, Homo Sapiens
  misc_feature (451)..(451): n is a, c, g, or t
  misc_feature (486)..(486): n is a, c, g, or t
  misc_feature (518)..(518): n is a, c, g, or t
  misc_feature (525)..(525): n is a, c, g, or t
  misc_feature (531)..(531): n is a, c, g, or t
  misc_feature (533)..(534): n is a, c, g, or t
  misc_feature (537)..(537): n is a, c, g, or t
  misc_feature (547)..(547): n is a, c, g, or t
  misc_feature (570)..(571): n is a, c, g, or t
  misc_feature (583)..(583): n is a, c, g, or t
  misc_feature (587)..(587): n is a, c, g, or t
  misc_feature (597)..(597): n is a, c, g, or t
ccaagaggtgggaacaatctaaatgtccaacagatgaatgaatttttaaaaagtggtatatatacatacattgagatattattcagccttaaaaaagaagaaaaatcatggccgggcgcggtggctcacgcctgtaatcccagcactttgggaggccgagacgagcgaatcacgaggtcaggagatggagaccatcctcattaacatggtgaaactctgtctctactaaaaatacaaaaaaattagccgggtttagtggtgggcgcctgtagtcccagctactcaggaggctgaggcaggagaatggcatgaacccgggaggcggagcttgcagtgagccgagatcgcgccactgcactccagcctgggcgacagagcgagactccgtctgaaaaaaaaaaaaagggaaaaatcctgccacatgatatggtatgggtcaaacttgaagacnttaagctaaataaaatgtcagtcacaaaaagacanatattatatgattccctcacatgaagtatccngtaatcnaactcncnnaanaagaaaagtnaaattgtggttgccaatggttcnnggtgaaaaaaanggantttgtgtttnatgggt

SEQ ID NO: 217194 - DNA, 860 bp, Homo Sapiens
  misc_feature (599)..(599): n is a, c, g, or t
  misc_feature (636)..(636): n is a, c, g, or t
tttcagaagttttgaggaggctgccttgtctccattgcggccttctgtggaggatgcaggattaccttcttatgaacaggcagtggcgctgaccagaaaacacagtgtttcaccaccaccaccatatcctgggcacacaaaaggatttagggtatttaaaaaatctatgtctctcccatctcactgactaccttgtcattttggtataagaaaattgtgttatttgataagccggccatggtggctcatgcctgtaatcccagcactttgggaggccaggagttcgagaccagcctggccaacatggtgaaacccggtctctactaaaaattcaaaaattacctatgcgtcatgggggcatgcctgtagtcccaccctacttgggagggctgaagcaggagaattgctcgaaccttggaggcagagggtgccagttacctgagatcacgccacttgctttccagcgtgggcgacagagcaagactcccttctccaatattaattaaaaaaagaaagaaagaaacgaggaagaaaagagattaaggagaagtagatgaagcacgaggagcagcagaaggagaagaagaataagaagaagnccacaaaagacatgactatccacctttttatgacaanctgcaaggaataaaggaagaataagtccatgtactgtaccacagaagttctgtctgcatcttggacctgaacttgatcatcatcagcttgataagagactttttgactctatatccttgcagttaagaagaaagcacttttttgtaatgtttgttttaatggttcaaaaaaaatctttcttataaagagcataggtagaatcagtgaactctttggatcctttg

SEQ ID NO: 217195 - DNA, 506 bp, Homo Sapiens; identical to SEQ ID NO: 58613

SEQ ID NO: 217196 - DNA, 466 bp, Homo Sapiens
acttttttgcccttattgttcttgctttgtcccaagtagatgcaaatgttgtgcaaaccaacttgatcttaagatgttgttgagaacactggagtcacgtgtccatgggtccttcaggctggcttttgatgggagctgggatgcagatgatttacggagggttataatctgtgatgctggtctgaagtctgaatattccaagttgctgactgcaggcagagcctcatgtccggatcggacatggtgaagtaagcacctgagaaacgggtgcgattattcttttcttcctgcacctgcagggcgggctgcacgaaggcggcggccaggccgtgtgcattccccggaagctttcttaatgcaaagtgacagagcgcggcggtctggggctggagccgctgccccctccacgtgctccccaattccggcgcctggtggttctccccgcactccggcgccgcaccccgct

SEQ ID NO: 217197 - DNA, 566 bp, Homo Sapiens; identical to SEQ ID NO: 60503

SEQ ID NO: 217198 - DNA, 462 bp, Homo Sapiens
ttttttttttttttttttttttgagacagagtctcgttctgttgcccagcctgattttcggtatgatttaaatatattctacacaacaaatacattcaataaataaaggcaggtaactcttgctgatactatcctttcaggacttaaaaaataataataatcctcatatcatctgtactttatccaatgacaatctcatctcagatcacaagttcctgtcctactttaaactttcagtaataaaacatttccctttctaaaaaatcaccttcagttctaaatccaagtttaaaatctcctgacaataccatccctctaacttacacaaatactcattacagctttaagcaaattaaaaaaatttattggctacaaaaccagtcaggcaaattaagagcctatgctgtagttatctcaatatttggcaggatatgtagactgaatcccagctggctggcaaga

SEQ ID NO: 217199 - DNA, 470 bp, Homo Sapiens
tttttttatttttattgtattttaattaaatggggaggttgaagattttttaaatatcaaattctgtagataaaaagtatgatttacagtctgaagtggaagaaggcagtggattaaacattgcagaagagaagattattgaactagaaggaatagaagttgaaactaacataaatgaaacacacagtaacaaatgacttgaaaacataaaaagaccattggcatcaaaactttaaaccccccagtatagggctaaatggaatccctgaagggcgtgtagtggagaagagagacaaagatatttaaaacatactggatgaaagatttagaagctccatggaaaccataaacttcaaatattacagaaatatgattattctaagaacaagaaacatgaagaaaacttcaccaaggaacgccttaatcaaatccatcaaaaccagtgataaaaaggaaatcctttcctgctg

SEQ ID NO: 217200 - DNA, 500 bp, Homo Sapiens; identical to SEQ ID NO: 62036

SEQ ID NO: 217201 - DNA, 558 bp, Homo Sapiens
tttttttttgcatttacattttatttctgaccaataaaaaaaaaatgggtctaaagcaagtgatgccattcatgaagatttgaatgtacacacgtaaaaatggtttcttgaatcttgtctgtgaataggaaagagaaacattgtgctatatggacacaaggtggcagtgctctcctagctacctgacaaaaaatcctcatctccagaaagcatgcaggagaaatcagaaaataaaacacaagctgaccctctggcctgcctgctagcagctctagtgcgcactcagcttcggcttcctatgaccccccttccccaccccacccccaccaagtaaccacttccacaaaggaacatgatgagccttgcccagtatgctcggctccctgatcccaaaggcagccctattcaagagcaggtctctgcagccaggccccagctgagactccctcctctcaaggagcccaccatatgcccacaatgggacaaaagagacaaatgaggagccctttcggtatctagtttggtgatccaggttcattcttcaatctgaaaactaca

SEQ ID NO: 217202 - DNA, 508 bp, Homo Sapiens
tcaatttattgctatttttttatttggttgttagaaaatctgtaagggtgtatatatattaaaaaaaggtgtggggtgagagtggatggaaggcagtcagaagggtgagagttattttcaagttacctaaagtgccaggctaatttgttttaacctttccaagaaagtgaaactgagcataagctataatgagataaggggacacattcatgggaaaagacttcatcttgctttaactaaattttaatacttctggaaaaaaaatttaagtttggttaataccaagctgaacatcatgtaaagaaaaaaaaaaacagcccttaaatgtttaagggtaccggactgtatccatggtgaagggcaacctgaacaaagttaaaaaggaaatgatctccactaaagaagtctgtggcatgacagctttctctactttctccctgacttggcctataccaaagttaagtttttgtagtttttttttcccctttcaagttgttgcccaaagact

SEQ ID NO: 217203 - DNA, 450 bp, Homo Sapiens
taaattgacctgatatttgagataaataatattcttctgtttgttttatgttgtagtataatacctatctgatcaaactggataatgtaaatatatttactgaagatcagcttctaatctaaatggttccagtggtaacataatggacatctgagacttatactcatgaggtctacctacagtccattcccatttaggggaagagaaaggagaggaaatggccaagaagtccataagaagtggacagtgctttaactttttcaagttttgctaacatattttatgtaagttattcaatacccccatattaaagagcagcagctattaaacaccaacatttattagctgctggaaagtaataaataacttcagctagtccccttcagtttccataaaattataaaaccaacaccatttgacgtgaaaaagcagtttttgaccctggtggag

SEQ ID NO: 217204 - DNA, 520 bp, Homo Sapiens
tttttttttttgtatttttagtagagatggggtttcaccatgttggccagggtggtctcaaactcctacctcatgatccgcctgcctcggcctcccaaagtgctaggattacaggcatgagccaccgtgccaggccttaaagtgtattatttatcatacctttatcgtaggtatggataggaaaaaaaacagtatccatagggttcagtactatccatggtttcaagcgtccactggggttcttggaatgtattccctgcagataaaaggggactactataactgtgaacacagtcagaatatctattaacgactaagtaagttgtagaaacttgcaatggtgtgttagaaaatcatcattcacaaaatatggttatcgaaaaggagaagatctatgagacagaaggcctgaatgggcacatgagtcacatgtttttaactcttaaactactggagcactccgtcagcactaggtatgtcaggtctgtgggacgtgaattgaacagctggccctcgtgcc

SEQ ID NO: 217205 - DNA, 591 bp, Homo Sapiens
ttttttttagagaataaaattttaatggtatcaaaaacaaaactttttttggccgatttagtacttgctggaataaagttgcaaaatgttactcagtaactgacttagcttctaatcaagccagaatgacacacagtctgtatattaattaagtatatacaaatacatccaatgttaacatgcacagacatagaaacaaggatactacaaaaccgaaatcaccatctctactgatgaaaaatgaactgaaaacaaaacatccatccagtagtccagaatatcttatttttgaaaaggttttgaatattgctctttccaagaattcaaataaactccaaatggttaaatttgactgttttctcaacatgaaaaaaaggaagcagacatattcctatggctataggaacataccttttactcagtgatatcaaattaaaaggtctgacataatttcactcttctcaggtaaaaagggctcttcatattctagtggttaagaataaatcccttcaagttcttatgcatttgagtgtcataccacctacagcaacatacgctcaagtacctttaacgatacagtcatatagcatg

SEQ ID NO: 217206 - DNA, 492 bp, Homo Sapiens; identical to SEQ ID NO: 59426

SEQ ID NO: 217207 - DNA, 594 bp, Homo Sapiens
ttttttctttttgtagagatagagtcttgctatgtttcccaggatggtcttgagctcctggtttcaaacaatcctccttcctaagcctcctaaagtgccaggattataggtgtgagtcacaggcctggccatgattttgttttattattctcacttatttgattataaatgaataccaccatcttttcaaatatttattgacatctgtttttctccttctatacattcctggtaatgtcctttatttgtatttctttggattttcttccctggtctgggcataagattcttattttggattgtatcttgttttagatatccaaatggtaaatattttcaccttagactgttacattttctggtttgtgtaaggcatcttttcccataatgaattttaaaatgttctataacaattgtggtaattgccgtccttgggtgcctgaagtgctgggggccatggaagaggtaccacgacaggaagagaagatgcccccctcccaaggtaggtccagggaggagcgatgccacctgtggacatcatcactcaacaggacactccagacacccacaccacagggcacagttccctcaatg

SEQ ID NO: 217208 - DNA, 577 bp, Homo Sapiens; identical to SEQ ID NO: 59604
  misc_feature (570)..(570): n is a, c, g, or t

SEQ ID NO: 217209 - DNA, 488 bp, Homo Sapiens
tttttttttatgataattgcggagtttaatgaacaccttgcttcacttcggggtctcatctgggatttcggagtgaactgtgtccagaggctgccagtggcaattcatgagggagtcgtagagttcttcacttttcaccataaactcttggtttgattcctcaatattcaaatgaagatgtggatcttctagtgggtcttcatcttggttttcagctagaggtgtggtttccttaggcataaccagagttccagctgtgtgttcaggggtctcatgcgcagaaaaacagtcctttccatttccatccactgcacagccatagctgtagccagaaagaaggtaagagccgtgctgtcgcgcataccagttgccatagcggtaactctggctgggctggaactcctgcttcactctaatagcagaggggagactttgccagtagcagtaatagttatttttgtgatctatgccaaaatctgcagaactct

SEQ ID NO: 217210 - DNA, 474 bp, Homo Sapiens
gctatacagggactctccagaaaaagtttaagaaacactgaaatagaaaaaaactaagaaaactagaaagtggtcatcctccttttcaagagcatagttggtgagaggaggtacacagagggcaaaggacagagtactagtaacgaaagcagtgggctgattcagtaatcttggtagaaaaaggtattcgagcagaagcttggggttggaagttcatagtttttgtttttgtttttgtttttgtttttaggagaggagagatctgagtacattcctaagttggagtgaaggaagagttaaatatgaagaaaacaactgacaaggcaaagtctcagaggccaggcatggagggctcacacctgcaaccctagcactttgggaggccaaggcaggaagatcacttgaggtcaggagttcgagaccagcctgggcaacaaagcgaggccttgcctctacaaaaataatttgaaaata

SEQ ID NO: 217211 - DNA, 576 bp, Homo Sapiens
tttttttttttttttattagttgtatactgtattaataacaatgggaatgagacaactcttgatcaaagaaagatttctgtgaagctgatttttttttaagtttttaaataatgtcacactgaacaacacatttaacagctgaataatttgtaatgaagactaagcaatagttaaaatataacattattaacagttgtggaaaatacagaaatttatcatatcattaaaccagtttttattaaaaaacaaaatgtgatgttaggtcagttcagggataaattaagccatacattatattgacttccacttacatgagattcctagcaatcatatttgctgcaatgattacccactgacttgcattcattataacaaggtacaaataaaccaaatggccaaacagcaaccaaaatatactgttttaagagttaaacacattcttaaaattaaaatgctaaaaagtacctaagagacttaattgggactctcatatttcaaaagattttgggttatgatgacctagattagttccaggagcagtagcttgtttaccaaatctaagatcttggaaagaa

SEQ ID NO: 217212 - DNA, 587 bp, Homo Sapiens
actatttataggttatgcgatttttctgttttttcagtgttgcaaatctccaaacattttccgatatatttattttttaaaattcatgtataatgtcgccacccagttaaaacctatgttgttcaagggtcaactgtattattatagtcatcacgtttcacaattgatctttagaacttattctatccagctgaaactgtatcctctgaccaacaacctccaccccaccacacctaccccaccccctaatctacaatctagttctacgagatcaacttttttagattccacatataagtgagatcatgtggttatgtgcctttctgtgcctgccttattcacttagcctaatgtcctccaggttcatccacgttggcacaaacaagatttccttctttttgtggcagaataatattccattgtgtgtgtatatagatatatggagagactatgtatctatctatctatatatacatacactctagttgaagcaattctaaagttaagtcattgtccaaatatttatagacgtatttacaagttactatgccttactttacagcttttctaagtcatcaaacacacat

SEQ ID NO: 217213 - DNA, 504 bp, Homo Sapiens
ttttttgatcaatacatttagccctttattgaaacctaagtttgttataagtgtaattatgtaacagtcatatttccaacctggttcccatggctgacttaacccaatccataatctggagcaagccttggctagtgtattttgagatgtccgttgtgtttcagctgccgttcctcactccgcctgcttctccaagcatggtacttcttgatgctcttcctccatgcaaagcgccagatgcagcccaaggtcgaaaatgaagtagcccaaggtgagacacaggacatgaacttggagaggtgtattgggtgagcctgggtgggtaaaaggccatgggccatcaatgaagccagtataagcggagaggcctatagagaggactccatgggtgaaggtgaccaggcggcagctccactcatagcttcggtgcttattcaggtggcagaaagaaatatagagcgagagccagccacacaggctgcacagcacctggcggagcgcacc

SEQ ID NO: 217214 - DNA, 600 bp, Homo Sapiens
tttttttttgctggttattcaaaatgcactttttattcactttaacacagatgattttttacagttgaaagaaaatatttgatacacaattttgagttttttttagcagcacctgcaacaagaggattgtggaatacctcagaataaagtagagatggctggggcaggcacaaattaacctgatattcatcaatccactgaagacatatggaatctgaggcccctgaaagttagccaatacatgacaataaaactaaataaatattctgtatgatgttttaacagaccattgaaaaacagtatagtcctaattagaaatatattattccaaaaatctagtgttctttaaaaaaacacctattgaaaatattacactgcacattctagggtacacagtcaatttctaaacctatatgcacagttcttggtactcacagatttcagcctttggtgttttttaatcttacccaaactgtatgtcagcaccccactgagtgttgcttacccaaatgccactgtttatgtcacttaatgttgagtgctttcattaagatattgaatggtaatttggtagaaaacaatggtatggctaagaggaaa

SEQ ID NO: 217215 - DNA, 448 bp, Homo Sapiens
tttttttttttttttttgatttaaaaaatactttattgctaaaaaatgctgacacagagacatgaagtgagtacatgctgttagaaaaatggcaccaatagacttatcccacacaaggttgccaaaaactttcaatttgtaagaaatgcaatatatgtgaagtgcaataaagtgaaatgcaataaaacgagcagtgcttgtacaaatgagcaagatgaagcaaagtaaggttaaacatacccaaggccacatagctagaaaatggccaagctagattcaaacctgggtaagatagctccagtgctatagcacacggcttagcctctatactttactgccttaatccttacactgcacatcccattttaagatgaagatactcagttttagagagctgaatggtgcatccaatatttaaatccagttgtcttgattacaaaccttatgt

SEQ ID NO: 217216 - DNA, 709 bp, Homo Sapiens
tatttttttttttttttttttttttgtgctacctttaaagagaccaagctataagcaaacacacatacaacatttcatcattcaattcaggttgcgttttaagaaagtcttccgtgctggtaccctgttttgttcaatttttttctgcataaactaaattggtatctgaaaggcttcatagaaaatagaaactttcaacttttttttcctacaaagaaaaacaaatagtatccaaaatattaagcattaattgtttgccaattttttcttaaatattttacaaacataggaaggtggttttcataatgttcataacaaagaattgcatttctgctcttagcactgactacgtcaatgacatcttttgtccttgtcccaagagggtcagtttgcgtagccaccatcagagctataggaggacgtgggaccaagtaagatgctggctccttgcagacccaagggtgtccatcatgttcatgtgggggcaccactacacccccaaaagagctcctagtgctatcttcattattggtccatcagagtaagtagtattgtgccataagaaagcagttcttcgttacatcggcggtacaacaagtccgttcatggctctgaatccatctccattgccgctggagcatgcatgtgactgagagcctcgtcgcctgacgacagcggcaaaggcactcttctgttgacagcagctaaa

SEQ ID NO: 217217 - DNA, 486 bp, Homo Sapiens; identical to SEQ ID NO: 40298

SEQ ID NO: 217218 - DNA, 635 bp, Homo Sapiens
  misc_feature (17)..(17): n is a, c, g, or t
  misc_feature (571)..(572): n is a, c, g, or t
  misc_feature (591)..(591): n is a, c, g, or t
  misc_feature (613)..(613): n is a, c, g, or t
  misc_feature (619)..(619): n is a, c, g, or t
ggcctcattagtgacanagaaagggccctctagatgcatgctcgagcggccgccagtgtgatggatgtcaccactctatcttcctcagtgttgttggtctgcttgttcagtgccactcaacaatgtggggatcccattgcccatcagactggctttggaaactatttgccacactgatgcaactcctgcgaccgaggttcgaaattggcatctcttccggcctttgtgtttttgagtgtcctggctgcttgggtttcagactgcagattttgagcttgttgtaaaatttgggaaaggaggggcttgaaaaataatacaccaggggatccagcatgctgttcatgtaggtgaagctgaaggttatgtgcagggccccatggacagaaggatcgcaagcactccagggcaccgtccaaaagaaatagaatctagcagacacgctgggcaggtagcatgtgatgaacacaattgccaccaccatgatgaacccggtcgccttcttcatccgaacctgtctggccaactgcctgcttcgccctaagatccaaaaaatcttgaaagagacaaaaannaagatgccaagggcataangaaattcactgtgaaataggtnagtgcnggcttgggccaacgcg

SEQ ID NO: 217219 - DNA, 431 bp, Homo Sapiens
agagacagagtctccctatgttgcctaggcttgtctcaaactcctggactcaagtgatctgtccaccttggtctctcaaagtgctgggattataggtgtgagccattgcacctggccaccaaatggatttttcaattcagttctggctaaatgaaaattcttcctataattttgataattatttcactgccagtcttagttttttaatgctggatgttttgaggggccagtaggtatcactttaaactaaaagctcccaatattttaaattaaattttgattgagggtttacagaggtaaatgcaaaaataagctgttaatatgcaatctgtaaaaaaggtactaggttagagaaaaaaatgaaacatgtctaagttcagtgctgtttttaatcagggctgtatgccacctaacagagtgcctttgaaaac

SEQ ID NO: 217220 - DNA, 465 bp, Homo Sapiens
ggcacgagattttacacatttttatttttaataataggagtaaataccttcccacaacaatataatgaacattacaggaaaattaaggcaacttattatttacagaatgcctttctgtgcaaaacaggacactatactcttcctacacattaaagcattaaagattaaaataactctaaaaggtacttattatcagtgtctttactgaggcaattaccagtgttcagataaataaatgtcagagctaatccaaatatgaaacttgaaattttcccaccattctatacaaattcccacagcaaacagaggaggttattattttagataagtcagggaaagactttgcagaggaagtaacatttctgagatggagaaaactaggagaggaacaggttggagaacaggaatcaaaagctgtttttggtcaagagatgcctactagacattcaagtggaaatgtaaagc

SEQ ID NO: 217221 - DNA, 496 bp, Homo Sapiens
ttttttttttttttttttaagtttgcaaaacagcctcacatttattataccaaaatcaatgtattggggagatcaaaatatcttctcataggggaaaaatagcaaatacaacttggagaaaagtgactttgttttatacataaagtacagtaaatagctaaaaaaaaaaagtagaaatacaaatatgctatagttcatcgtgttggtatacattgtattccttgggagaaatgaagccatcaccatcatggtcattcttcttaaaaatatcttctaaaactgcatcctgatatgacttgtcacgtggcttctcatctttttcaaattccctttgcaagtagaggtttatctcggctttagagagctgcctgtcattgtccatgtctatttgtttaaatgtctcaatgctccgtggtcctttggtcacagcataaagttcaatctcaaaaatcaatgtagcatccggtggaatcttgccttctgcatagccttcctt

SEQ ID NO: 217222 - DNA, 788 bp, Homo Sapiens
  misc_feature (679)..(679): n is a, c, g, or t
cggctctaatcgagtcagttcatgctgtccttatggctgctccggtctgtgttgtggttgttttgatcgtggttcttccactggatgcttgttccgttcatggggaccgaggtcatcagacttttggactggtaacagcagcagcagaggcatgactggaaacaatttttaaatttcttgctcacaaaatacagagctatggggtttatacatgaattcatggttgccaagttaataccgatgtaatccatgagcagtaagaaactaagtaattcacatcggttcttgtccatctcgttatacacagttttcttcaatatacggcttaaatgaagagggaaccagcaaagagcaaaaattacaaccaagcagaaaactgtttttgccacttctcgacgctgcttaagatgttcactgagggcaattctcaagctgccattccttctgttcaacatctcacaagtcatgagggtgtagaagatcgcagtgcacaccaagggcatacagaaatagaacccgaagagccaccagtcctttacatcttggtagaactccatgaattttgatgtggcattgagcatacaggttttatgctgttcacccctatattcaaagggtaccatgacgaagccaatcgcttcaggaatggccaggataaggacaggatccagatggaganatttcaatggcagttaccaaggaatccaattcctgacacgactcaggaagcactgctctgtactgtcacactaaacgcaagttgagacgtgatccacgagactcgcaaa

SEQ ID NO: 217223 - DNA, 779 bp, Homo Sapiens
  misc_feature (632)..(632): n is a, c, g, or t
  misc_feature (723)..(723): n is a, c, g, or t
tttggggagcttgggcccagaccgagttagagtgcttttttgcagactgcaccttggctaaactatcctctatgtactggctgcctgtgtcactcctgctgaggactgtggaggggatgcgagagggacgcctctctgggttctcctgagagaagcagcagatcatcttcttcatggtgccatacatgtcctcgtccttgtaggagtagatgatggggttcacgacggagttgagcagcgccagcagcaggaaccaccttttcacatgctgcacgccacactgcctgcagttcaggccgtcgaggagcagaaccaccaggcccggggtccagcataccacaaacgcccctaagacagtcatcaccgtcttcattagcttcatgggtgtcctccggcggctgatggacccacttgtatgcggagacaagacgttggttttcctcttgacgtacacgtagatccgcaggtacaccacaaccatgatgaggaaggccatgaggttggacactgtccagaaaacaaggtaactcctgctgtaaatgggggccagggaagagcaggcagagatgttgcagaggcaattccagcccagtgtggggaccgcccccataaaaatggcgatggcccagacnagcaaaatgagcagtgtcaccctcttttttgtcaggttgctatgggaccgcatcctcatgattgacatgtgcctctccacggcgataacancaagttggtgaaggaagcgtcaagctactgtccagaacccctgacggagaaccacg

SEQ ID NO: 217224 - DNA, 805 bp, Homo Sapiens
  misc_feature (743)..(743): n is a, c, g, or t
ggggtaaggcctcaactgagctaactaactaacttgctcttcagttttgtcaccttcattttcagtgaggagaagcgtatctagtagaatgattgatgaagactgaatggttgaacttcggagcctcattggactctggtacatggcagggttaatcccatttcgaattccatgtttcttgaaaaacttagagttctctgccattggattccggaagtagatcttactggagcgttttctgagagtttttactgactttgtggcccggtaattgcaggtgatatatcggccaaatgcatcccgaaatgtcttattgaagagggtgtagaccaaaggattcactcctgaggaaacatagcctatccacacaaatatctccaggagcatttggagagtagtttggttacaggaatcacataaaactaaagttatatttgtaataaagaagggacaccacataagcaaaaagaggaaaaacacaatccctaggacctttgaggctctctgttcgttggaaatggtctgcactgactttttcccaattgtggatgttcttcgcataagtgtttcatcacctgagttgggcagagccttgtcctttcgagaaccatccagcattgccaccttttccggtgacgagcaaggtgtttcatccctttggaaaactgtagacacagtcaaccatgttaggcgttgaggtggcttgtttttgactaagtaagccttctctgtaagcatggaantgagaaataggtgacatcatattgcaagagtgtgagaaggcagcagtgagccaaaacatgaa

SEQ ID NO: 217225 - DNA, 784 bp, Homo Sapiens
ggcgggtagggccttaaccgagtctactggttcatcatcccatcgatgtccctcaggtaagcaggatcctgaactgtatttcggactctgctagtgctctgccgctccatcctcatcttcagtggaaagcagaagtcccggaaacaccgcttgaagtcttcatccagaaaggcgtaaaaaatgggatttcggctactgttggtatagcctaaggcgatgcagaagtaatagctggagagagcagctgtgctgtgggaggtgctccccagagcctccaccaggatgaatatgtgaatgggagtccagcagacgacgaagactgccaccaccaccaggaccagtctggtgatcctacgcaggttgcgatctttctctcgggagccagaaaggagccggacgctcttgagacgcaggatcatcagggtgtagcagacgatgatgatgaggacagggatcacgaaggcaaagatgaagacgcagatcttcatgaagaggtcccaccaggagtagtcatcatctgggaactgcaaggagcactcaatgacatcgacgtcttcctgactttggtgcctcaaggactttgcagaatgccacagatgacgacgcaccagatcgatttgatatcttgcttcagggtgcggatcaagcttcacggtgccacgcatgtacgtcaccctctgtcagtgaaatctggactgtgatatcatgatattctgcacctcccagcagatccataacgtcgaggctgtgtacactcgcacagtaaaagtgtcttcctgtacat

SEQ ID NO: 217226 - DNA, 574 bp, Homo Sapiens
tttttttttttttttttttcacattaaattatttattgaacaaattgaagataatgacatatgtttttattacaaagtcttccatcatcttatatcattgacacatattatgagacctgcatttgaagagtgaatagaaataagaaaatgttttcccaaccccacaaaaacagaaaaaaatatataattttataattatcttataaagccaaaagttttatgaattatactttttttattagttaaaaatgacagcataactaaggttaatttttatttctggaaacacaaaattaaggtagcacaacttcttgtagaactaacaagtctgaaagttcatggtatttcaatgcagtaaaataatatttctattgttagttttcagtttacctaatcaagtgacaaatataaaattcactacactgtatttttgttgacaaaagcatttcaccttacctagatttatataataaaaacaaattgtatccatcttccctttaaatatatgtacttcaaagtgatacaaagaattcacatgaaaacctttccctatgttttatctcctgaaaaaaaa

SEQ ID NO: 217227 - DNA, 1000 bp, Homo Sapiens
atgcaaatactataccattttatataagggacttcagtgtcctcggattttagtgccacagaggtcttgaaagcaatgcccttcagatgctgtgggacaactgtatatgttatttgattttctagctattacagtgaaaaaagagtacttttttacttcttaaatctgaattattagtacctactagtgtatgaaagcagccctttagagaactgctgaatctgagaaatctgagttggatatatataaatttgcagtttgacacatcaagagtgtgtaacacgtgtgttaagtggttgatctttctcagtaatctaatttggccaatttatttttagcttgattaagataaatagtaaaatacttggtgaattttagggtgattagtataagctggattcagatgattttttatttttaacttctttttaaattgttttcctgtcttattcaggccctgaatattttcctcctctttatattagcaattaccaacttgtattccttctaatcagtgttttttcttgtattttactgctccctcttatctaaatccaccatcaattagtgtcttaaaagattttgctgctttagccactgtaatggggtttggagactggcagaagaataaaaccaaataagtatgttttagataaatgttaatatgtatatattgagtcacaaggtattaatctgatattagcaaatcatgacttcataccatgccattatattaatatagtaatcttaggtttagcattgacttctgatttctagaacctcactctatctgtaaattgttcattccagttataaaagtaatgaagtatatgaaaatgtttctgttgtcatttgtctatatcagaatgcataagttatgagaaaagcgtgctttttgttttttagtgtgtatcatttaacctcttgacagtcattaggttgacagtgttcacatctgagagaacctgatttaggttcttgaaagaattttgtgaaggcc

SEQ ID NO: 217228 - DNA, 1000 bp, Homo Sapiens
tttcgtggagctgaggtgactctcatgaacagagaatacctgtccttcatacagagaagcacccaaatgcaaacatctactttttctggtgttcaaccaggtaaacctctgtttagcaagaaacatcatccccagagtggggactgtcttgtcctttcagaagctagtaccctaagcaagactcataaggaaggtcgggcctccataggtctctgtttcttctgaacagtgatgagctaggtgcagagagagttaaaggtcctatgcagcttgacaagtgtgacccagttcccagtaaattccacttggctggggtttcagaggtgagcaagcaggctttttactcattacacaagaatctagacatccctttaattgggtggcattctgggtgctaaaaggaaggggctttgagaggcaaagatgatgggatatcataaatttttttgttccttttaatgtagcgcagctcctatacttcagatttaactttgaaatgtagcatagctaagatctggtccaaaaagatttctgatatctccatgaatcctagttagggattgataggaaaaaaaaatcttgtgccacagcttcatgctatttttaggaacctttctgaaaccagtggcagcccaagttagagcccagcattaagtccgcctctgcacatctacagttgccagcttatggtaaaagctttctgcaaagcttttctgctcctgggttaaggccttccagcatcagtcacatgtaattaacagctacattgtgtgcttactttttgctagatgtttcataaacattatctcatataaacctcacaataactaggtattattatcccgtatccctgttttacagctgtggaaagtgaagtgaaggatttttgtcatacagccagtaagtgccagaactgacttgaacctagctctctgtcttgattcaggaactactgctctttccattggtggctcctggctaatcaatgtgatagtctttg

SEQ ID NO: 217229 - DNA, 1000 bp, Homo Sapiens
agagctactggttaacctgctcactggtactgtctcaaaattgagacacattaccgggtaggctacaatgttcctggactctttcaaagtgaagcacttcttgagctctttagcatgtgagtgtcaaaagcaattcacatgggaaagaccaattcttatatgtgcctttgtgacttgcccaggagtatggcctacacctgggttgtcctgggagacctagtgctgtttcttccacatattcacgtgtgtgtgtgtgtgtgtgtgtgtatttttttattattttttcattttaagggttagtatggaatcagctgcctactagaatgcaaagaacttccaatgacaagaaaggaggaaaaaaatgccattttcataagctgagtgatgtagcataataaacaaaatcatggagctaaggaggtgctttgtaaacgtgaaggggcataaaaaggaaagagatacttgtgtcaataaagagagcctggtcctagacgtagttcagccacaaagtagttgtgcctttgtggacaagtttcccaaactccctgagcctctgctttcccatactgttaaataaggggatagaatatggttgatttccagcattcagtggtcctgtcaagcagccttaacaggctagctcctaattcccattgggtagatgaggggatgacaacgaacaatttgtgagctatataggaaacattgttattggtgttgcccctatcaggatttcagttgaattcatgttaaaattacagccgtcctttattgtacacttattgggttaagcctattataccatattacctcattttaatttttactgacctgcactttatacatgaagcaacaaggctccaggacattaaaactcacacaaagttatgctcatgttatattattttcttacttaaagaaggatttattagtgacaagtttgtattaatatgtagcaaaggcttttccaatgggtgaataaaaacacattccattatag

SEQ ID NO: 217230 - DNA, 1000 bp, Homo Sapiens
tcggtcagtactaacatagcatttcgttacctcttaagggttgagtttacaactccaaattcaagcatttcatctcaagagttgtagaagtttattaccacctcacttcagtatacttttcaaagtaatgaagtagcatcatcacattataaattagagtacctatacaaggctttttttttttccccagcatttccaaaactacctagtcccattgctttaaatcgtatctgtaccaagtgttggcaaactatgaaccacaggccaattccagcctaccacctttatttgtaaatcaagtattactggaacacaaccaggctcatttgctgacatattgtttgtggatggcagagttgagtggttgaaacagactgtatggtgtgcaaagtcagaatgtgtgctgtacggactgctgtgaaaaacatctgccaaagtctgatctgtatacccataactccctcctgcttgatatttcccataaatgtataaagggcatttcacatttaacaaggccaagacagaactcttgatttctaactccttgtctgaatcctgcttctccagcctttctcccatttcagtaagcatcatcattatcccctaatttctcaagcaaaatctctgaggattgttcttaatcttttttccttaccactcttcatctccctcgtagttaatccttaagtcctgtcaactctgcctataaaatatatccctgtctacttttctaatctgtactgtagccaccctactctaagtcaccaccatcttttgccttgactactgcaataaccttcaaagtagcctctgattgcattcttcccctaatccattttccatgtagcagccaaaatcatcttttcttttttaattaagtcagattatgtcactgttttaagctatagattcttaacattctttattcatacctaaaatctataggccttgctatgccttctaaagccctacacgatatgacttctgcctaatccgtcac

SEQ ID NO: 217231 - DNA, 1000 bp, Homo Sapiens
atagtatctgcattaaaccagtgatgaagaaatgaagacaaattagaagtggaaacagaatagtgagattttattttttattttcaattataagcaaaacagctactggtaactatatgaccttgcaggccaagagtgggtatcgctgtgatcatctctgtcacagcagttgtttctcatttcattctatattgtgtggtgttgtgtcaccaaaaacaatgattgttttgtgcaagtaaatttcagagatagagcaataagactattttggtagaggaaaaatatttttaaatgagcttggactcagttttagttattgacatgttggtgtgaaatttcttcttaagtattgcagtaatccaacagaaataatagaatttcgttatatttaggaagttacaaattatgtagtcataattttaaacttgtttttccagtagtacttattaactttaaaaaaaaaaaaacccagctgtgctgttcagagaatgtttgtaagtgttgtacagaagaggaggaaaaactacttgtgctcttccaactgtgacttttatcacatagctggaatttagtgttttaaaagatcgaatgagtcgagtgtgtattgttgtttggaggaggtagaagatgaatctccgcatctttctaaattgccacggaaataaatcctacattctccacttctggaatgtattgccatcatggtgcagctatatttaacggagatcctgatgaagttcgagcactaatatttaagaaagaagatgttaactttcggcagtacttctggaatagaaattctaaacattagcctgccgaacaactggattgcatttgatgattacaattgtccagtcacagatggcatccacctctactttttattattaatattagttttaattgccaaatcataattgtatatatttgtagagtacaatgtaatattttggtatatgtatacaatgtgggatgattaaatcaagctaatatatccagc

SEQ ID NO: 217232 - DNA, 527 bp, Homo Sapiens; identical to SEQ ID NO: 53247

SEQ ID NO: 217233 - DNA, 783 bp, Homo Sapiens; identical to SEQ ID NO: 53830

SEQ ID NO: 217234 - DNA, 338 bp, Homo Sapiens; identical to SEQ ID NO: 40553

SEQ ID NO: 217235 - DNA, 865 bp, Homo Sapiens; identical to SEQ ID NO: 46942

SEQ ID NO: 217236 - DNA, 651 bp, Homo Sapiens
  misc_feature (619)..(619): n is a, c, g, or t
  misc_feature (634)..(634): n is a, c, g, or t
atggcatcagctggagacacccaggcaggcccacgggatgcagcagatcagaacttcgactatatgttcaaactgctactgataggcaacagcagtgtgggcaagacttccttcctgttccgatacgcggacgactccttcactcccgccttcgtcagtactgtgggcatcgatttcaaggtcaagaccgtctaccgccatgacaagaggatcaagctgcagatctgggacacagcgggccaggagcgctaccgcaccatcaccacggcctactaccggggagccatgggcttcctgctcatgtatgacatcgccaatcaggaatcctttgccgctgtgcaggactgggccacgcaaatcaagacctactcctgggacaacgcccaggtcatcctggtggggaacaagtgtgacctggaggacgaacgtgttgtgcctgctgaggatggccggaggctcgccgacgaccttggtttcgagttctttgaagccagtgccaaggagaacatcaatgtgaagcaggtcttcgagcgcctggtggatgtcatctgcgagaagatgaacgagtccctggaacccagctccagctcaggcagcaacgggaaaggcccggccgtgngggatgctccagctnccagccagcactgcagc

SEQ ID NO: 217237 - DNA, 699 bp, Homo Sapiens; identical to SEQ ID NO: 52574
  misc_feature (632)..(632): n is a, c, g, or t
  misc_feature (652)..(653): n is a, c, g, or t
  misc_feature (664)..(664): n is a, c, g, or t

SEQ ID NO: 217238 - DNA, 617 bp, Homo Sapiens
atggagagcaaagaaccccagctaaaagggattgtgacaaggttattcagccagcagggatacttcctgcagatgcacccagatggtaccattgatgggaccaaggacgaaaacagcgactacactctcttcaatctaattcccgtgggcctgcgtgtagtggccatccaaggagtgaaggctagcctctatgtggccatgaatggtgaaggctatctctacagttcagatgttttcactccagaatgcaaattcaaggaatctgtgtttgaaaactactatgtgatctattcttccacactgtaccgccagcaagaatcaggccgagcttggtttctgggactcaataaagaaggtcaaattatgaaggggaacagagtgaagaaaaccaagccctcatcacattttgtaccgaaacctattgaagtgtgtatgtacagagaacaatcgctacatgaaattggagaaaaacaagggcgttcaaggaaaagttctggaacaccaaccatgaatggaggcaaagttgtgaatcaagattcaacatacccaactttcttgtacaaagttggcattataagaaagcattgcttatcaatttgttgcaacgaacaggtcac

SEQ ID NO: 217239 - DNA, 651 bp, Homo Sapiens; identical to SEQ ID NO: 44124

SEQ ID NO: 217240 - DNA, 654 bp, Homo Sapiens
  misc_feature (604)..(604): n is a, c, g, or t
  misc_feature (617)..(617): n is a, c, g, or t
  misc_feature (640)..(640): n is a, c, g, or t
atgggattgctagacagactttcagtcttgcttggcctgaagaagaaggaggttcatgttttgtgccttgggctagataatagtggcaaaacgacgatcattaacaaacttaaaccttcaaatgctcaatctcaaaatatccttccaacaataggattcagcatagagaaattcaaatcatccagtttgtcatttacagtgtttgacatgtcaggtcaaggaagatacagaaatctctgggaacactattataaagaaggccaagctattatttttgtcattgatagtagtgatagattaagaatggttgtggccaaagaagaactcgatactcttctgaatcatccagatattaaacaccgtcgaattccaatcttattctttgcaaataaaatggatcttagagatgcagtgacatctgtaaaagtgtctcagttgctgtgtttagagaacatcaaagataaaccctggcatatttgtgctagtgatgccataaaaggagaaggcttgcaagaaggtgtagactggcttcaagatcagatccagactgtgaagacatgcccaactttcttgtacaaagttggcattataagaaagcattgcnttatcatttgttngcacgaacaggtcactatcagtncaaataaatcatta

SEQ ID NO: 217241 - DNA, 632 bp, Homo Sapiens; identical to SEQ ID NO: 49160

SEQ ID NO: 217242 - DNA, 644 bp, Homo Sapiens
  misc_feature (596)..(596): n is a, c, g, or t
  misc_feature (603)..(603): n is a, c, g, or t
atggcggcgaccgcggtggcggcggctgtggcgggaaccgagtcggcccagggtcccccgggcccggcagcgtcgctggagctgtggctgaacaaagccacagacccaagcatgtcggaacaggattggtcagctatccagaatttctgtgagcaggtgaacactgaccccaatggccccacacatgcgccctggctactggcccacaagatccagtctccgcaagagaaggaagctctttatgccttaacggtgctggagatgtgcatgaaccactgtggggagaagttccacagcgaggtggccaaatttcgtttcctgaacgaactgatcaaagtgttgtccccaaagtacctggggtcctgggccacaggaaaagttaaaggaagagtcattgaaatactcttcagttggacagtctggtttccggaagacatcaagattcgagacgcttatcagatgctgaagaaacaaggaattataaaacaagaccctaaactaccagtggataaaatcttacccccaccatctccctggcccaagagctccatctttgatgctgatgaagaaaagtccaagcttctgacaaggcttcntaagagncaccaccccgaggaccttcaggctgcaaaccggttaaatca

SEQ ID NO: 217243 - DNA, 604 bp, Homo Sapiens
atgccccaggctttcctgctggggtccatccatgagcctgcaggtgccctcatggagccccagccctgccctggaagcttggctgagagcttcctggaggaggagcttcggctcaatgctgagctgagccagctgcagttttcggagcctgtgggcatcatctacaatcccgtggagtatgcatgggagccacatcgcaactacgtgactcgctactgccagggccccaaggaagtactcttcctgggcatgaaccctggaccttttggcatggcccagactggggtgccctttggggaagtaagcatggtccgggactggttgggcattgtggggcctgtgctgacccctccccaagagcatcctaaacgaccagtgctgggactggagtgcccacagtcagaaggaccaagacaaagcatgggacatgaaattaagagtgaacttcttatgggaggctgcagctggatcagaggaaaaatccagtgtgacagagtgcaagtcagaagacctggcttttcatcccagctttgcccaactttcttgtacaaagatggcattataagaaagcattgcttatcatttgttgcacgaacagtcctat

SEQ ID NO: 217244 - DNA, 626 bp, Homo Sapiens
  misc_feature (599)..(599): n is a, c, g, or t
  misc_feature (609)..(609): n is a, c, g, or t
atggctcggcttatactggagaggtttctacaggaacacgaggaaactccaccctccaagtctattataaatagtatgctacgggacccttctcagattccagatggagttctagcaaatcaggtctatcagtgcattgtgaacgactgctgttacggaccactagtggactgcatcaagcatgccattggtcatgagcatgaggtcctgctgagagacttgcttctagagaaaaacctgtccttcctagatgaagatcagcttcgtgcaaagggttatgacaaaacaccagacttcattttacaagtaccagttgctgtagaagggcacataattcactggattgaaagcaaagcctcatttggtgatgaatgtagccaccacgcctacctgcatgaccagttctggagctactggaatagatttgggccaggcttagtcatctattggtatggatttatccaggagctggactgcaaccgggaaaggggcatcctgctcaaagcctgtttccccacgaacattgtcaccttatgccacagcatagcttgcccaactttcttgtacaaagttggcattataagaaagcattgcttatncatttgttgncacgaacaggtcactat

SEQ ID NO: 217245 - DNA, 627 bp, Homo Sapiens; identical to SEQ ID NO: 40342

SEQ ID NO: 217246 - DNA, 439 bp, Homo Sapiens; identical to SEQ ID NO: 42315

SEQ ID NO: 217247 - DNA, 612 bp, Homo Sapiens; identical to SEQ ID NO: 41649

SEQ ID NO: 217248 - DNA, 602 bp, Homo Sapiens
atcccccggacaccccccatcctgactctcatcacatggtgataacggtcccgtggccactctgggccgagtcacacaccctctgaggttgcagccccagggcagagggtcaccatctcctgcactgggagcagctccaacatcggggcaggttatgatgtacactggtaccagcagcttccaggaacagcccccaaactcctcatctatggtaacagcaatcggccctcaggggtccctgaccgattctctggctccaagtctggcacctcagcctccctggccatcactgggctccaggctgaggatgaggctgattattactgccagtcctatgacagcagcctgagtggttttgtggtattcggcggagggaccaagctgaccgtcctaggtcagcccaaggctgccccctcggtcactctgttcccgccctcctctgaggagcttcaagccaacaaggccacactggtgtgtctcataagtgacttctacccgggagccgtgacagtggcctggaaggcagatagcagccccgtcaaggcgggagtggagaccaccacaccctccaaacaaagcaacaacaagtacgcggccagcag

SEQ ID NO: 217249 - DNA, 570 bp, Homo Sapiens; identical to SEQ ID NO: 54322

SEQ ID NO: 217250 - DNA, 665 bp, Homo Sapiens
atggatgactacatggtcctgagaatgattggggagggctccttcggcagagctcttttggttcagcatgatagcagtaatcagatgtttgccatgagagaaataagggttcccaagtctttctctaatacgcggaattctaggaaggaggctgttcttttagccaaaatgaaacaccctaatattgttgccttcaaagaatcatttgaagctgaaggacacttgtatattgtgatggaatactgtgatggaggggatctaatgcaaaagattaaacagcagaaaggaaagttatttcctgaagacatgatacttaattggtttacccaaatgtgccttggagtaaatcacattcacaagaaacgtgtgctacacagagatatcaagtccaagaatatcttcctcactcagaatggaaaagtgaaattgggagactttggatctgcccgtcttctctccaatccgatggcatttgcttgtacctatgtgggaactccttattatgtgcctccagaaatttgggaaaacctgccttataacaataaaagtgacatctggtccttgggttgcatcctgtatgaactctgtacccttaagcatccatttcaggcaaatagttgggaaaatcttatcctcaaatatgtcagggtgctcagtcactgcgt

SEQ ID NO: 217251 - DNA, 571 bp, Homo Sapiens
atggcttggagagagaaatcaaaaaagcgtcttaatatgacatccttcaacattgcccagggcattcatgcttttgattatcactctcggctcaatttaattgcaactgctggcattaacaataaagtttgcctttggaatccctatgttgtctctaaaccagtgggtgtcctttggggccactcagccagtgtaatagccgtccaattctttgtggaaagaaaacaacttttcagcttctccaaggataaagttttgagactctgggatattcaacaccagctgtccatccagaggatagcttgttctttccccaaaagtcaggacttcagatgtctcttccactttgatgaagcccatggacgacttttcatctcgtttaataaccagctagcattgttggcaatgaaaagtgaagccagcaagagggtgaaaagccatgagaaagcagtcacttgtgttctttacaattctatcttgaagcaggtaatcagctctgatacagggtctactgtttccttctggatgatagacactgggcagaaaatcaaacagtttactggttgccacg

SEQ ID NO: 217252 - DNA, 653 bp, Homo Sapiens
  misc_feature (525)..(525): n is a, c, g, or t
  misc_feature (556)..(556): n is a, c, g, or t
atgtgtgcagcttctgcttctccagataatctggtattccatatgaaaaatgagatgagaaacatcaagtacaaaccagtagactatcaacaattgcgtgcattaactgaagcaaagaaattggcttctgcctctgcaaagctaaagatcagaaaagcaatgttgacttcaaagttatccaaagaacaaacactaataaaacaacacaagcaagtgtggtggcaggaataccagaggctgaatgaagtcagatgtaaaatggaatctgaaataaaatcccttctcaatgaagagaacattggaaatgaatgtctttgtgaccttacaaattttgagcaagagctatcagaacaacagtgcacatatcttaaaaatgtaataaatcctattcagcagctgagagcagatctaaaatacagacagcatcacactttgcagcattcacacccacatattgagtttaactccgtgaaagtattggaagaggttgactttgtgaagaaacaattgaaaactgtctttganagacttaggctggagcaacagagaatagaanatgatctttcagactggagtataaagattctagatcattctttggaagaaagactacccgcttagtgactgccccatgatagaagttggatgccata

SEQ ID NO: 217253 - DNA, 601 bp, Homo Sapiens; identical to SEQ ID NO: 40192

SEQ ID NO: 217254 - DNA, 607 bp, Homo Sapiens; identical to SEQ ID NO: 41034
  misc_feature (573)..(573): n is a, c, g, or t
  misc_feature (586)..(586): n is a, c, g, or t
  misc_feature (601)..(602): n is a, c, g, or t

SEQ ID NO: 217255 - DNA, 591 bp, Homo Sapiens; identical to SEQ ID NO: 40168

SEQ ID NO: 217256 - DNA, 520 bp, Homo Sapiens; identical to SEQ ID NO: 61230

SEQ ID NO: 217257 - DNA, 393 bp, Homo Sapiens
gagcccaccagactcagagacggaaccagagacaggccagagcatccccctcctccaccatgaaactcgctgtcaccctcaccctggtcacactggctctctgctgcagctccgcttctgcagagatctgcccgagctttcagcgtgtcatcgaaaccctcctcatggacacaccctccagttatgaggctgccatggaacttttcagccctgatcaagacatgagggaggcaggggctcagctgaagaagctggtggacaccctcccccaaaagcccagagaaagcatcattaagctcatggaaaaaatagcccaaagctcactgtgtaattagcatttagaagctgaagatccccaactgctccagcctctgccgctgccatgctttgagt

SEQ ID NO: 217258 - DNA, 599 bp, Homo Sapiens; identical to SEQ ID NO: 41845

SEQ ID NO: 217259 - DNA, 726 bp, Homo Sapiens; identical to SEQ ID NO: 50320
  misc_feature (172)..(172): n is a, c, g, or t

SEQ ID NO: 217260 - DNA, 682 bp, Homo Sapiens
  misc_feature (20)..(20): n is a, c, g, or t
ttttttttttttttctcggngcaataggctttattgtatagtctaggtgagtggtatgctataccacctaggtttgtgtaagtacacccaatatggttctcacaatgacaaaatcacctgatgcattccacagaacatgtacccatcattaagtgacacacaactgtatttagaacatcccaattactgtcatccttctttagtcatcaagaactctatgtatgggaggtacaggtaaataagtggtgggttttatctttttggttttatgttagacaatatttctactctaattaaagtcattttcaccgcaaaacatgatgaaaaccaagaatgattaacaagcacctttcttagaagttcttaagattttgcttcaatatttttcagtgtgtggaaaaagcaaaattgtaattctatgtaccataggtaccattatgactgaaagtattactcttctaaaatgaactgtaacaattaaaaagctcatcacaaggtaagctcactctgtaaggatggtttgcatgatgtaaaaaatgtgattcttaacatgttatgaaatttttaggtggcaaccagagttagttactattgccccagatttctgacataaaatgctttgcaagagtagttttggctaatttatagtatacaaacaatcatgggcttttaccaagcttag

SEQ ID NO: 217261 - DNA, 724 bp, Homo Sapiens
atcgtctataaataagtttgctaacacaaagaactgagtcttactcagcatataacttggaggaaagtgtgtgggtgttctagaggacaacctaccggtcttgagcatttgtccttaccttagataataacagtataacttttggagacagtgatgctcgccagtattccaaagctcctgtacatttctcagtcttttctgctgttaggttggggacatttgactaacagtaaccaatggaacttgcaagtaggtgcatggtggtgtatgagatgctggaaactccataatctgagtcatttgaataactgtggaattaagtctccttattgagttaagccactgagatctactttttactgtgggttaagatctactttttactgtgggttaagatcttattgcaacataaccttgcccttcctgattatcatgaaatgtttaacttaaggaagaagagagtccttaagttaatagggtgaatcaactgagttaatggaagttaagagatgagtttttaaaacaattaaaaaaataaaaagaaaactttatttgaacaagaaaaagttaaggatgttacacttcaaaagaattttgaactcattaattatttttaattgacaaatcactgtggatttacagggtactgtatgatttttttgatacatgtgattaaaccaggctaattaacatatccatcacttcactttttggtggtatgaat

SEQ ID NO: 217262 - DNA, 495 bp, Homo Sapiens; identical to SEQ ID NO: 52964

SEQ ID NO: 217263 - DNA, 567 bp, Homo Sapiens
caaaaacaaccaacttttgtgttgtgattttgtatcccacaactttactaaattcatttattaattctagtagtttttttgcagattctttgagattttttataataggattatgtcatccatgaatagagagagttttacttctgtcttttcaatctagatgcctttactttttttttttcctgccccattaccctggctagaacctccagtaaaaggttgaatagaagtacaaaagcagacatctttgttttgtttctgatcttaggagaaaagcttttagtctttcaccattaagtatgatgttagctgtgggtttttcctagatggcttttgtcaggctgaagaagcttccatttcttcctaatcaccactcactttaagcttcagacactcttagtttcttgctattttaaaacacactaggtccttttatacctgtgcctttacgttcgttttcctgattgcaaatgaagactaccttcccccaggacagaggctctgtattttgtattcttagcagtttgcatggtgtctggcacataaagatgctcggtaaatagcaaa

SEQ ID NO: 217264 - DNA, 672 bp, Homo Sapiens; identical to SEQ ID NO: 55812

SEQ ID NO: 217265 - DNA, 749 bp, Homo Sapiens
  misc_feature (679)..(679): n is a, c, g, or t
  misc_feature (725)..(725): n is a, c, g, or t
ttcttgagtgaaccactcaaaaaactattttacttttatttgaaatacaaagaccccacattttcccaggccacagatcaaaaggagggagattactagagcagacaaaagcaaagcaaatatagaaatctagagaccacacagcataggggcaaacatgcccatatttccacattgacctttggtattggtgcatttcctagagcacaggaagttaactgtttttagagataaatgaaaatggaagagttactttaagaagctagtgaaatatacaatctattttatagctttgattaaaatcagaagtagcccacttcatgtagaaaattcacttatgtacatgttgctttccccatagaagccagattagattacacagtataaataatatgttcatcctccttatgtcaaagactaaaccattcattgtagccttcagaatacccatgtgtatccatactgaagatttttttcacctggtacatctgtctcagttgtgtcttgcttgcttatgggtgcctctgttgatattattccctgttaatatgtggtaacccacaggttttttaccccttaagatacaccttctccaagtagcctttctgaattaagatcagtactttgttgtcacatgattcagctcttcaagtctgaatttttcccatttattttgggntttctaatggttcacataggcacgttcctgcttttaagaattcagnttccattttggcagcaacctcagt

SEQ ID NO: 217266 - DNA, 476 bp, Homo Sapiens
tgaactataaacctattatttattgcagaactaataaaaaatccaaagccttgtatttgtacatctttattatttctaaagcactttcctcaacctaatttcagtttttacaattggtactcaagaaaatagagacagaaatcatttgattttgcccagaaaccatctgcttatatttataaggccacctaatttgaaatcacatatagaccaggcgcggtggctcacgcctgtaattccaacactttggaaggccaaggcaggtggatcacaaggtcaagagattgagaccatcttggccaacatggtgaaaccccgtctctactaaaaacacaaaaatcagctgggcgtcgtggcatgcacctgtagtcccagctactcgggaggctgaggcaggagaattgcttgaacccaggaggtggaggttgcagtgagccgaaattgcgccactgcactccagcctgatgacagagcaa

SEQ ID NO: 217267 - DNA, 498 bp, Homo Sapiens
ttttttttttttttctttatacttacggaaatttattttttcacaatgatccaaagtattagatgaaggttttttgttttattttgcttttaattgacaaataataaatatacatatttatgtggtacagtgtgatgttttgatacatgtatacattgcgtaataaccgaaccagggtaattagcatatccatcacctcaaatatgtgtcatttctttgtgttgagaactttcaaaatcctctcttctagctatttcaaaatatatgcaataggttattgttaactctagtcaccctactatgcaataaaacattagcacttatttaatgtgaagtttttaatacaaaaattattttaagaaaataagcacaggctgggcgccgtggctcacgcctgtaatcccagcactttgggaggccgaggcgggtggatcacctgaggtcagaggttctagacgagcctaaccaacatggggaaacccccgtctctactgaaaa

SEQ ID NO: 217268 - DNA, 703 bp, Homo Sapiens
ttttttttttttttaactggggaagggtcatgggtggggactgggatgtgacactaactcagctctataaagaaattaaaggcctttcattaggaaacatctccatcttgtgggcttttaagatactgccactaaggcccattcttggaataaaaggccaattaactgtcccttgaattagggtctttcttcacttcctccaagatacctgattaactgaggtgttactgatcttactatcctaccacagtcttgttttacttctagtgacaaagcaaactttcagtgcagagtaagtcttaggtatatactgcgcttcccacttcaggttagcttttcaacttacatgtattctagagctgggccatttatatgcttaatgttcaggacttcctcaaagtttccaggcttgaagtagcatttataaaacaactttggcattttataatcaaatgaacaaaaatacccataatgttttgtgtatttgaaatgtttacttcttgccaatttcatggaagaaatttgagttattttctcaatatacattttctttaatttgaatagtgtgtaccttctaatatacaatctttatttacataatttgctataaacaccttatttttaacttacaggtccagaatacttccttcacagacagaagttatttaccaacattcaccctgtaaaggtgagtacactatat

SEQ ID NO: 217269 - DNA, 690 bp, Homo Sapiens; identical to SEQ ID NO: 40471

SEQ ID NO: 217270 - DNA, 378 bp, Homo Sapiens; identical to SEQ ID NO: 51897

SEQ ID NO: 217271 - DNA, 838 bp, Homo Sapiens
  misc_feature (736)..(736): n is a, c, g, or t
  misc_feature (773)..(773): n is a, c, g, or t
  misc_feature (794)..(794): n is a, c, g, or t
cattgagctttctcagtcttgttgctgtcatttgaaatgactccctcaaaacctagttttattagccagctgcctctgctgtagtacatggccaacttcaacataccctggaccaaaacatttttgaggtgcatacccccaacataagttacacagtcccacatccaggtgcacagagtgcgagtgcactccgcgagtgcggggggaggggcggccccctctggtgctcccagcccttcctcctgcagagctgcaggcaagagcagagcaataggcttctcccctgagcagagaccgcagcacagaaatgcaaggtctaaagttgctttttgcctaagaatcagcgagcgatttggcctacttcctcattggcttctattctgatatcagggatgctttttgtagtggtattgtttgctccctcttcgcgttttgactacccgtcattcaggggtaactcatcactcttcacacggggatttaaattaagaaactaattggctcatgtgaacattccaaattttcttggtttcaatacccttttttttcttttgaggggaaaagaggggagaaaaacaggagtgatgtcatttctttttcatgtattccaattaaagaaacaagggcaggtcgtataatggcatattaatacattagacttaatctagaacccctgtagctttttgatgggttttatttcttatctctttgaattcctggttggttacttggcttncaatggaggtgaacttaacaaccatacttgaatattncgtcttgactttgtaaactgnggctacttgaaatgaagtttatctgggggttgatggatgaatgg

SEQ ID NO: 217272 - DNA, 759 bp, Homo Sapiens; identical to SEQ ID NO: 42547
  misc_feature (2)..(2): n is a, c, g, or t
  misc_feature (15)..(15): n is a, c, g, or t

SEQ ID NO: 217273 - DNA, 649 bp, Homo Sapiens; identical to SEQ ID NO: 49701
  misc_feature (16)..(16): n is a, c, g, or t

SEQ ID NO: 217274 - DNA, 597 bp, Homo Sapiens; identical to SEQ ID NO: 53546

SEQ ID NO: 217275 - DNA, 455 bp, Homo Sapiens
ctacaggggacaccaaacaatgagttttataagatttatctcaaagacacctgatgagttcaccaggaaggagatgctagcaaaaccccattgtgcatgttgcagggctggggaggccccaaaacaccagaaaacttctctagggtcacagaactggtaagatcaaggaggtttggcccagcactgtctcctcaaacctagggccttagttgcctccaggtcttcccagggtgacgagggggcactttttttgcataatttggaacagtatgaaaatgaggagacttacagggtgcgaacattccagataggtacaggggagaaactggtgaaggccctggttcccagcctttctgggtagaaccatctcctcctatgccacctgtttgggcccctcctgggactttatcacccgtgccagacttcatggagggaactggttaccagtttatcaa

SEQ ID NO: 217276 - DNA, 443 bp, Homo Sapiens
  misc_feature (13)..(13): n is a, c, g, or t
caatgtttttgtnagtattatatttgactcaggaactaattattaagggagctttgacacctgcagatggagggctgatcttgtgtcaagttaacaggaagactgcccacagatgacactgcatttgtatccctgtggatgtagagtattgggaaggcatttgtttagtttcatgcctccaaaccatgcattgtctgtgatgtatctgcccagccttctcagaactcaatgttgtacatttttccctctaggacctgaattggtcttggaggcagcttttagaaatcctctgtgtagttcctgtccacatgcactatatatttgtttcttttttctcctctcatgaatctgctcgtttctctacttctgtctacgtagaagcactcagcaactagtttctgctcattaaatgtgttctatatactaggaaaaaaaaaaaaaaa

SEQ ID NO: 217277 - DNA, 673 bp, Homo Sapiens
  misc_feature (594)..(594): n is a, c, g, or t
ccgaaggggacgccgggaacaggaatttcttcacatggctcctggagaagtgaccctcacagttcgcctcatccgttcctttgaacatcgcaatttcaaacctgtagtgtatcacggagtgaatttggaccaaactgtaaaggaatttatcgtatttctaaagcaagatgtccctttaaggaccaacctgccaccaccattcagaaattataaatatgatgcactaaagattattcatcaagcacataaatcaaagacaaatgaacttgtgttgagtttggaagatgacgaaagactcctgctgaaagaagacagcactctgaaagcagctggaatcgccagtgaaactgaaattgcattcttctgtgaagaagattataggaactacaaagctaatcccatttcatcctggtgaaaacatctcgagggcttcctttttgcatacctgtattaagctctttattccactgctgagtttttgaaattgacaaacaaatcttaaaaaattaatcccaggctatactctttgagctaaaatctggttatttctttctcttcaggtctttctttccttctctctttctttttctttgntgttgtaaaataatatattatgagaaaaacatttgatctttttaaagggaaataaattgttattaaaaaaaaaaaaaaa

SEQ ID NO: 217278 - DNA, 709 bp, Homo Sapiens; identical to SEQ ID NO: 45492

SEQ ID NO: 217279 - DNA, 512 bp, Homo Sapiens; identical to SEQ ID NO: 46149
  misc_feature (15)..(15): n is a, c, g, or t

SEQ ID NO: 217280 - DNA, 624 bp, Homo Sapiens; identical to SEQ ID NO: 54837
  misc_feature (1)..(1): n is a, c, g, or t
  misc_feature (12)..(12): n is a, c, g, or t
  misc_feature (20)..(20): n is a, c, g, or t
  misc_feature (58)..(58): n is a, c, g, or t

SEQ ID NO: 217281 - DNA, 557 bp, Homo Sapiens
ttttttttttttttgcaagagaagaagagtttttattctcgaacaagaggctgggtccagctcagaacacactctttccctcctcctcccgctcagaccctgccaccaggtagacgaacagtgtagacgcccctgcaggtgtgaagagtaccagagaccccagctaggggaagctggcaggagttgggggggttcctcccagatggaatgaatggaaagaataaatcagggacttaaaggcgcaggcaggagatggagaggggtccatgggtggctcaagggtggcgtggcctctctgagccttagtttcctcatctgcaaaatggaagcagtcacgtcatcaatcatggccaaacaggtgaggccttgcaagtccccgacaaaggcgcctaacacggggcacctgcacctcccaagccgtgactggttccaggtgcccgtcgtttttctcggttttgcttttctgtcttgatgacttcatcttgggctgtggccaccctctcaggggtgtctctgtgagtgttctggctccagggacagttggagggaggaacatt

SEQ ID NO: 217282 - DNA, 545 bp, Homo Sapiens
  misc_feature (20)..(20): n is a, c, g, or t
ttttttttttttttctatgnggacccatttggaaagcagtgttaatttaatccatacataatatcaaaggatgctttggtgtgtgctcatcttcaaaggaagcattcaggaaaacatgacacaataagccaagactctaataacctcacattctggaacttcagtaaaaacagaccagtacaatacttttattctatctttacagcaactttttctgtaaccttctgattaggctaaattaaacatatgttcaagtttggttctataaattaaatctttttttataaatgcaaaatctatatattatttttaaaacctgttttacacattagaaataagacagaactaaatatttatcgagataagttagggtagtttcttggccatgaagaaataagttagaagccgttctaagttttgttgtaagaagaaaaaattgtactattcaaactaaaatctcctggaacactaaaaagacatgtcaatgtgaatatccctgacatccgaaagaatctggatcaaaggcaaactttcaaccaaacaga

SEQ ID NO: 217283 - DNA, 442 bp, Homo Sapiens; identical to SEQ ID NO: 49197

SEQ ID NO: 217284 - DNA, 546 bp, Homo Sapiens
aaaaaaaactttcataataaagtttattacctaaactgactttaaaaaatataaaataggattctgcacagcagaaaaataaagccagagaccctcccccaacccctggtttgtgcaaagatactgggtatatgtaaacatgaagaggtaggaggtgcgagttcaggtcctggctccagatacagttaagctgctacaacaaccagggggacccagagggagcaccaggagggggaggaccccctcaagaggtgagaaggggtctgcggcctcgtctccagccgagggcgggaggcgcctcgcccctacacccatccgctccctccaacccaggccggggagggtacccacatggttccaggcaagtaataacaaaataacacggcatcccagttaatgctgcgtgcacggcgggcgctgccggtcaaatctggaaggggaaggagctcaggtagtcgcggaggacggggttgagggggatgcgagccaggttctcgcggcccacggtggccacgatgcgctggcggcacagctcctgcagcggcc

SEQ ID NO: 217285 - DNA, 755 bp, Homo Sapiens; identical to SEQ ID NO: 55351
  misc_feature (24)..(24): n is a, c, g, or t
  misc_feature (716)..(716): n is a, c, g, or t

SEQ ID NO: 217286 - DNA, 527 bp, Homo Sapiens
tgttcatctcaatccttgacatactcatctgccagacacaaaaaatagtggtctatttaagaggccttaatgaatgacaacatttttgaaatatgctatatgagtacaaatatttccagagcaaagagggaaaactgttgattgggtagacaatcaaattccaagcatttatctgatttacagaagtacatctactttttgtttttcactaaatgaatacaaccacttttaatatatatgtgggtgtggctgtgtgcgtatttcaaaacacacacgcacacacaataaagaaacatttcatagtggcaaaattttagtgcactgccaaagtgctacaataactgtcatccacagacatccacatgcaaacactactggactagtacactagagcaaataagagagtatttagcaaaactctctggcaaaaacttttaaaacggaagtaatgaaacagaaatccacttctaatttgaaggctttagaaaataatcttcattttaatcacatataaaaaaaaaaaaaaa

SEQ ID NO: 217287 - DNA, 654 bp, Homo Sapiens; identical to SEQ ID NO: 54725

SEQ ID NO: 217288 - DNA, 650 bp, Homo Sapiens; identical to SEQ ID NO: 48214

SEQ ID NO: 217289 - DNA, 473 bp, Homo Sapiens
caatcttgcacatgtatgcttcaaaaacaaataacagttagggaagaaagagagagagagagaaagagagagagacaagtaaaataaagcaccacctccttgacctgactcagggcgtttggggtcttctggggaaatgttctgaaacaatggagtattttggtctgttctttcttgtgtctttttttttttttttttaagacggactctcgctcagccacccaggctggaatgcagtggtgcactgggttcactgcagcaaatatctcccgggttgaagcgattctccagtctcatcctcctgagtggccgggattacagtcacgcgccataatgccctgcttatttttgaacattagtagagaaggggtattgccatgcttgcgacgctggacttgaaggcaaaatgaaaatgaaaatgaaacgcaacaaaataattaaaaagtgagtttctggggaaaaaaaaaaaaaaa

SEQ ID NO: 217290 - DNA, 748 bp, Homo Sapiens; identical to SEQ ID NO: 53613

SEQ ID NO: 217291 - DNA, 614 bp, Homo Sapiens; identical to SEQ ID NO: 41462

SEQ ID NO: 217292 - DNA, 578 bp, Homo Sapiens
  misc_feature (509)..(509): n is a, c, g, or t
ttttttttttttttacagatataacttttcctttattgcacattaagctgtacaagagtcacaaaagagaggtacttcaatcatacttccagcattggctgaggttctcccagttggatcagtacaaaaaaaggggacaacgtcaggaaagaaataggtacaaaacacctgaatggcaatcctatactgtgacacagatgtcccccaggccacagagttgtccctaagcatgctgcctgagggcacataacagtcaggttatgctatctgcttgcatttggcagtgggagccctaaccaatttctcccccacctgaaagaccttgactgacaccaccctgtagcctgactgaattcaaatggcaactttgcatttgtggctcacaaatgacacatgaaaagcaccagatgtacacactgataacatgcagagaagcaataccaccgtcagctcatcgcttggacaaaaatatacgataaaataatgtattcctccattctgggaaatgntactttattctatcgtttcatcagattggggaggtatttaaggacctgattcttatgcaacccatctgg

SEQ ID NO: 217293 - DNA, 655 bp, Homo Sapiens
  misc_feature (650)..(650): n is a, c, g, or t
  misc_feature (653)..(653): n is a, c, g, or t
  misc_feature (655)..(655): n is a, c, g, or t
ttttttttttttttaatttaaataagtttatttgtgaaagaaaaacatctgaacatcaggtacagtctgatccacaatgtcataactcattctcgggagtactcttatgcagtttgcaagagaaattccacgtggagcatcagctgaacatttatcagaattcagaaagccttcaaacctgagtattacacaatacataacgacaacgatacagtaataaaaatacaatatcaaatattactttgtgagttacaaactacaatataaacaatttaggcccttttttaaaaaatgaaaaaatatttctattacaggcttatttcaagcattttcagttagaaacagctttatatacttttactcacgatagcgaaagaatgtcttcataagtatctgtaggtaaaatatattacttgcttaatgtttgcactctgaagtatactttgacacatacaagttccgataagagaatgaaattgctgtggcaaaatcctggctgatgatcaagacttggagagttttcatattaagttaaaaaaatttacatcaatgaaaaaagaagcaaggacatacaaagaaacaacatcattcttttgcaatgaagcagtctaattccaggggaatgggtttttccattttgaattcaaagnggngn

SEQ ID NO: 217294 - DNA, 503 bp, Homo Sapiens; identical to SEQ ID NO: 43751

SEQ ID NO: 217295 - DNA, 773 bp, Homo Sapiens; identical to SEQ ID NO: 52462
  misc_feature (765)..(765): n is a, c, g, or t

SEQ ID NO: 217296 - DNA, 589 bp, Homo Sapiens
  misc_feature (47)..(47): n is a, c, g, or t
catttccctgtgctgttgtatacctgaaaacataattttatgtatgngtatacatattatagtgccactatatggatgcaccagaatttttttttgagatggagcctcattgtcgctcaggcagaggttgcaatgagctgagattgtgccactgcactccactgggcaacagggagagactccatctcaacaacaaaaacaacaacaacaacaaaaaggcaaaaacaaacccctggaaattaactggtaataaagagggggaaaggaactggttggaaactttccttaaaaaaaaaagtcaaaaccctgatttgccaacatgtagacctcagcttaatgtagacttgcagaaagccattaatttagggtagtattgatttatatttgactggtaattaagagcatacatgctgcttctttattatctgggtgacacaaattcatgtggcctgaggaagggtggaaatagtaggggggaaatgtttgtaagctttgagaaagattttttttctgtctgcaagactgcattgaaagcactgtacctaatcaccaccacaccaccaccaccactcctaaaaaaaaaaaaaaa

SEQ ID NO: 217297 - DNA, 489 bp, Homo Sapiens
catgcctggcacctgaggtacccagcagcctcctgtctcccctttcagccttcacagcagtgagctgcaatgttggagggcttcatctcgggctgcaaggaccctgggaaagttccagaactccacgtccttgtctcaattgtgccatcaactttcagagctatcatgagccaacctcaccccacagggcctcagtcgccaccatgtgggcctctccagtgcaaaccaccgagcattccaccatgaccggtcacagctacaaatccagagaccatcaatcctgctagagtgcagggtggcaagcacccaagggtggctgaccaagactgcagagtctcctccatcttcaggtccattcagcctcctggcatttaactaccagcatccagtggtccccaaggaatcccttcctagcctcctgacatgagtctgctggaaagagcatccaaacaaacaagtaataaataaataaataaaaaaaaaaaaaaa

SEQ ID NO: 217298 - DNA, 768 bp, Homo Sapiens; identical to SEQ ID NO: 50706

SEQ ID NO: 217299 - DNA, 765 bp, Homo Sapiens; identical to SEQ ID NO: 48746
  misc_feature (725)..(725): n is a, c, g, or t
  misc_feature (746)..(746): n is a, c, g, or t

SEQ ID NO: 217300 - DNA, 660 bp, Homo Sapiens
ttttttttttttttaaaggttacaggttatagctttaactccttctgagacagcatccatttctcaagaggcctgagcaggaagctccgggagaaccaagcatgcggagctgctcagggacgtccactgggaagcctggtgtccactcccacctgcttgggccctgcaactggggtccctggagctggccaggctgtggggcgccagagagcacagcaccctagtgaccagcatggagcttctggaccgggtgagctgtcttgagcctcaaccacccaggtcaggaggtctgggaggccacatgcctccggccctccctacccggacaagttcagggcaaagtctcagccggggggtggccccgcaggacgtcgaggtccagcatcacggaacccagcagcccacggcggaaagtctgcaggaagtcacgggctgccgcaggatagttaggctgaataacgttcacgttacccgtgcccgtgagcaccttcaccttctgcgtcttccccagcttcacagccacactcttcagcacgcgctctacgttgtcacaggcactgcccaggccgtagtgctgcacgtacccaaagcgctggtgtttgttgagggtgtacagcaggtagtcagccatggtctcctccccgaccaggtggtccagca

SEQ ID NO: 217301 - DNA, 657 bp, Homo Sapiens; identical to SEQ ID NO: 45197

SEQ ID NO: 217302 - DNA, 697 bp, Homo Sapiens; identical to SEQ ID NO: 55901

SEQ ID NO: 217303 - DNA, 522 bp, Homo Sapiens
  misc_feature (18)..(18): n is a, c, g, or t
  misc_feature (481)..(481): n is a, c, g, or t
ttttttttttttttaggnaaaagatttttattcttatttaaccatgctgcatgtatacatacaataccaatatatacaacttgaacaaatacaatttatacataaaatacaatgaaagcatggcttttgaaactgatgcaacaaactgtaatttgtaattttggccagcatacagtattatagtaatgctactgaagttattcattaaattagtcagactacagtataagttcaaaggcactagaaacatctatgttttcttctagtatttttaagaacaaaaaataatttaaaataaaacaaatgtatacattaggaaattgggcagacattggtgtacttaaatgtaaacgctacccattccttaattcacagccctgtaggaaagaagactttccttaagagttaaggggaaggatattaaaaacagactaaaaggaaacaaacaaaacaaaaaacaaccaaaaaccataatcatagntttaaaaacatgttacagaggaagtagccccacccccctcc

SEQ ID NO: 217304 - DNA, 470 bp, Homo Sapiens
cttctctccatgtagtcactacttggggaaggggaatgggtggtatcagcaattcaagactgatttcttttccatcttcagcgcccctttccttgatatgatgttaaaaccagatgactgccttttcacttaactgtgtcctcatatggaagagaggagaaaagaggagaggaggggagaggtaaatcagggatttcctcttggtttggatcctttgctgaactaagagtatttttaatacagtgctgaagagccagctgaactggctttgtagatcatcctcaggaaactgacggtcaggcctcctgtatgacaccagggagctgaggctttatggattggatcactgcacccaatgagacacacctgctgcctgtcgaaccaaccctcttcctagctcctccataattcctttttttcctgcacgtgattacagtgagatgctagatccctcattcagctacctgctg

SEQ ID NO: 217305 - DNA, 727 bp, Homo Sapiens
tttttttttttttgaaaacacgggtcacagcaccttttattcgtcatcatacaacctgatgtgacaggaaatacagccaacatctccaaacagtcttaatgcctttcacaatccaatgggaaagcccaagacgccgcctctagtggggaagccatgagccttccgcctttggatgccacaaatgggaacgatagaggtacaggaggtctgccttccacgccggaccctccagcgcagtcccatgccggacacagcgaggcggcacttggcacagaacgttttcctgtggcctccccgcaagactcacaccagtggatggcactcgagtccacagctgcacggagccacgggtccaaaacgaattctccactgagatgggtccacagagcctggtggccacaatgtctggatctaatgtcttcctttatgaatacatctgtgcacctttggaattgaagtttaaacagaaggaaaatatgaattttcccccgtttcttccactcgggattctggctgggcttcagccagaatggatacatttggattgcagagaatcctgagacaacccggaggagcccctgggggcagcagggaggctcactcctcacacacagccgcgcgaccctctgcatctgggcagctgtgaagggtggacagggacagatggtcctacagtgcacatgactttatcatgttaacataaaactaaaacacaatattggccata

SEQ ID NO: 217306 - DNA, 442 bp, Homo Sapiens
ttttttttttttttgagatggagtctccctctgttgcccaggctggagtgtagtggcgccatcttggtgtgagccaccgcacccggcctcaactgcatttcagtaggttaaaggcacagtgataagggacataaaatagtgacagaaaaaaaaggcataactctgcgataactcacccactgtccaacaaacataaaacagattctcctatatgagatctgttggcctggctaatggggcatattccatccccatactagctgtacctgtaagcactttcagtgaccgctgaagcttttttccccagctcatagttgaatatttttgttttttttttttgagacagtctcgctctgtcacccaggctgggtgtggtggctcatgcctgtaatcccagcagtctgtgaggctgaggcaggaagatctcttgagcccaggagtt

SEQ ID NO: 217307 - DNA, 743 bp, Homo Sapiens
ttttttttggctgttgttaactctttccaagagacagaatttattaaaaaacatggttccaggatatttccaccccagaattctaaatcagtcacagaatcataccttcttaggtcttgattagaatgaaacaatctatagacacacgtaacagaatcaaaatattatgtaatgttttttgccttctcttgctcaatacacttccctcttttcccccaaagagtttgttactcaaagatagatagatatgtaagtaagtacagtcagccctccatatccatgggttctgcatccatggcttcaaccaactgccaatcaaaaatattcagaaaaagaaaaattccacaaagttccaaaaaagcaaaacttgaatttactgaacaccaagcactatgttgaatccatgcaaatgaagtgatgtgtaggtattttattaggtataagtaatcatcttcagatgatttaaagtacacaggaggatgtatgtaggttatatgcaaataccatataacccattctctataatgggacttgagcacccatggattctgatatcaagttgggttcctggaaccaatcccccatggataccaagggatgactgtattgcccttttcaagaaagcatctatcagctctcattcgtgactcactcagaataaggaattccttattcaaaaaacaatgtaagtattccgagctaactgttctcagccatgaacaaattaaacttggccaggtgtg

SEQ ID NO: 217308 - DNA, 368 bp, Homo Sapiens
ctaatacagcttaacagcaacaagtgccaaaatttgaggtcttactatgtgcactttacctgaatcgatcctcacatcctatgaggtattattatccctgcttttcagatgaagaaactgaggtttacaaagctagtaagtggcagagccacgagatttaaaccaggtttgacaccagtgcccactctcttcaccactaccatttgggagtactgtccttccaggacaaggaaggatagtcctctgcttttcccagaattagcaaaggttctgattgacttgataaggtagtctcaattgatacggatgataggactttgaggagggaaaggtaataaagcttacacttggtcaaaaaaaaaaaaaaa

SEQ ID NO: 217309 - DNA, 400 bp, Homo Sapiens; identical to SEQ ID NO: 48268

SEQ ID NO: 217310 - DNA, 468 bp, Homo Sapiens
ttttttttttttttaaacacacacataaatctaaagcaaagggtatgccaagattcagctggggccaggtctgacccccactctgagcatctcattagcttcccatcagtggaatacaatggagacatattccacttggtctggcaatgtcctcctggggtgatgaaaagggggcatgttggtgtagacagcaaagtcgtcctccttctggggagccaggttgatcacgttggaatatatggcatcagcatggcaggaaagatccgaggacttgtggggaaagttggtctgatgcctcagttgtttcttaaatagtcctagaaaaatggataaactcagagtcagtctgagttgggttaataaccatctttacttggttgtttgctgggtttagggcttaactttgaaatgcaaaatccaccacactcagcccattgggcctctgagactaagttaaattcccaggaa

SEQ ID NO: 217311 - DNA, 469 bp, Homo Sapiens
  misc_feature (15)..(15): n is a, c, g, or t
ttttttttttaaatntttatttgtaaagggacatatttctcaagtgtgctagttttccttgattttaatggattaaaatgtgtcgtaggtgagccattttcttccaaatgacgaagagtttttgttcctttgaaagtctggcccaggattttgtttgtttttgtttttttaaagttcttattttacttacagagttaagaaagttgaataactatacaaccagtctctaaatagaagttctaataaatcctaagatgttgcagggcactgaaagaggacaaaatttgatccctaaagccctctccaatctcatactcggtgaaaataacaaacaaaaggcttcagtgttagtggaaaactgagttcttaaaaagcaggtaaaggtcctgtttggtccttctcaagagctgaggagaaagggttttcagattataaataacagaggtgcccttgtatggcacagaattgc

SEQ ID NO: 217312 - DNA, 433 bp, Homo Sapiens
  misc_feature (389)..(390): n is a, c, g, or t
  misc_feature (410)..(410): n is a, c, g, or t
  misc_feature (416)..(416): n is a, c, g, or t
  misc_feature (418)..(419): n is a, c, g, or t
  misc_feature (422)..(422): n is a, c, g, or t
  misc_feature (424)..(424): n is a, c, g, or t
  misc_feature (427)..(427): n is a, c, g, or t
  misc_feature (432)..(432): n is a, c, g, or t
cctacagttcttgctggccagagccaggagggggtgtaaaggaatttcctgggtttaaaaaaagcaggcagcattgatgaatcatgaagttccccctacctcctttaatggttttgtaacaaagagatgcattcaggtgaaagtttcaagtctttttgtaactatagaataactgttctttttgtaattgtagaattctttaacttttttttaggctgaagtagagaacatgaatcatttggtctgaaacttttgagaccctatttggtttgcttacatatgtgaaaatagttatccaaataattgcgattgctatcaaataatttcaataatatcagttacttcttttggtctagagtcttctcctccttaacctctttctttttggnngagacagggtctcactctgntacccngnntgnantgnaatgna

SEQ ID NO: 217313 - DNA, 452 bp, Homo Sapiens
agcgctggagagtttttttttttttttgcatattatcttttattcatctctccaattttaaaattacagttttcttacttgataagaaaaaaaattaaagctaaacatattataaaatatcaacagtgccagtttattcccacaggattccaataaataatatacttgaaatcacttattaggactattatactaacattgttagttaataatataggctaatgtcaattttataatgtgaagcatttttaaaaatagtcctgataaaaacagaacacttaagtttcaaaaaatgatttggaaaaacaaattaggggacaatcaatcttttatatcacacatgatttcatacctaaatacaaacaaatccttgatttaagctgactccaaatactatattcaaaggacaacaatgcaatacatgcacacgaagaaactataatacagtgcat

SEQ ID NO: 217314 - DNA, 523 bp, Homo Sapiens; identical to SEQ ID NO: 52601

SEQ ID NO: 217315 - DNA, 486 bp, Homo Sapiens; identical to SEQ ID NO: 52780

SEQ ID NO: 217316 - DNA, 464 bp, Homo Sapiens
agcgctggagagttttttttttttttttggattgaataatttattccctgtattattatagtaacaggagcaaatacataaatttttattaataaaacaaaaaagatgaaaaacagaagcaacaaatgaagacatccatactgcccataacacatcagccatatgatcagaaaacccatttctaaagagcaatggttgctggtgtcacagagttttattgcattcatcgggggaaagggagatggttggaatgaaaaagatccatcagtcttctgacaggaagatgttatatgggggctccaacccctaactgggtactcctcttgctaccacctttggagcagaagatgaaggggagagggagcttctccctatggcctcatggcttcttgtgagacagatcagtccagccagatacagagcaaagcagctttgcatcaccacaggccagttgctgatgccca

SEQ ID NO: 217317 - DNA, 541 bp, Homo Sapiens; identical to SEQ ID NO: 53795

SEQ ID NO: 217318 - DNA, 591 bp, Homo Sapiens; identical to SEQ ID NO: 41875

SEQ ID NO: 217319 - DNA, 631 bp, Homo Sapiens; identical to SEQ ID NO: 49609

SEQ ID NO: 217320 - DNA, 721 bp, Homo Sapiens; identical to SEQ ID NO: 49946
  misc_feature (699)..(699): n is a, c, g, or t

SEQ ID NO: 217321 - DNA, 611 bp, Homo Sapiens
  misc_feature (321)..(321): n is a, c, g, or t
  misc_feature (470)..(470): n is a, c, g, or t
  misc_feature (607)..(607): n is a, c, g, or t
ttttttttttttttaattatcttaaacattttattcaagcattttaaatccataaacagcaatgattttaaagaatgagttttacagtaccataaacagcactcactccaaagtccggccactctccggacggcagccgcaattacctagtcaaccttctttgcctactttgattaattacagcaatactatggaggaagttgaaatgagagtaaaggaggatgggagacaggcaaaaaagttacccaaagtttctggaatgttccttctctctctagttacatctgagagcctaataattgttccttctttcctttcagntttgaaacgtaatcgtccagattcttcatcatcttcttcttcttcatctgattcttctttgatgtccttttgaagttccaatgtttccatacctcctgtaaattcatctaaaggttcattgatctcgatgtctaacacttcatcagtgnaaagctgctcctcctctggctcttccacatattctatttggtcttctgtcaactcagcttcgtggccttcatactgtccttcttctgggtactcttgagtatacaattctgatccatcagatttgtgataaaccagntcat

SEQ ID NO: 217322 - DNA, 608 bp, Homo Sapiens; identical to SEQ ID NO: 50225

SEQ ID NO: 217323 - DNA, 760 bp, Homo Sapiens; identical to SEQ ID NO: 43589

SEQ ID NO: 217324 - DNA, 764 bp, Homo Sapiens; identical to SEQ ID NO: 54935
  misc_feature (689)..(689): n is a, c, g, or t

SEQ ID NO: 217325 - DNA, 784 bp, Homo Sapiens
  misc_feature (13)..(13): n is a, c, g, or t
  misc_feature (24)..(24): n is a, c, g, or t
  misc_feature (770)..(770): n is a, c, g, or t
tgagggccgaggnagaggcagggnactccccggaggaggtttgggaggaagcgactccaagtctgagggaagagctccagtgcgccagggccagcccactagcgaggaggaggaagcctcctcggtgggagttggctgaggggtaaacggcaccgacgtggatgcagcacctactgtgctccctcgcggttgctgtgtggctggggcgggcaaggaccccggtttcttcgtcggaggtccgcgcagggctcttgtcctgggagttcttggctcagggcatgactgtcgagtggacagggaagggccactcagggactttaggtttacaatggggaaaagtaaacttgtgggttgtaagcggtaatgaaaggagggggtcctcgtgtgtaccaaccactcttagatagaaatgagatggaagaggtcccaacagcctggcaaaagcaatacagtatttttaaaatggtgtggccttaagaaacgcagcggttcgggggaggagacttttagaattatctttcaaacacttaagggaggagctgggtggttgggttggagtgacagaaggaaagcttttgtgcggaagaggaaactctggaaaaggcttttctggcttagtgtctatccctggtcggcttagtaaagggcaattagtgttgaaggttgtgcgtccacacctacttagtggctcagtggaaagcacgtcgcattatttaaatcctcttttaaagtaaaataactggaacaacgtttgacggtgtttggggggntgctgtacattggc

SEQ ID NO: 217326 - DNA, 602 bp, Homo Sapiens; identical to SEQ ID NO: 55542
  misc_feature (586)..(586): n is a, c, g, or t

SEQ ID NO: 217327 - DNA, 733 bp, Homo Sapiens
  misc_feature (712)..(712): n is a, c, g, or t
cgactgtttgcagggaatcagaaagggattacaacatggattttttgactttgagacaattgatgtggatgaatatgaacattatgagcgagttgaaaatggtgacttcaactgtattgttccaggaaaatttttagcatttagtggaccacatcctaaaagcaaaattgagaatggttatcctcttcacgcccctgaagcctactttccttatttcaaaaagcataatgtgactgcagttgtgaggctaaacaaaaagatttatgaggcaaagcgcttcacagacgctggcttcgagcactatgacctcttcttcatagatggcagcacacccagtgacaacatcgtgcgaaggttcctgaacatctgtgagaacaccgaaggggccatcgccgttcactgcaaagctggtcttggaagaacagggacattgatagcctgttatgtaatgaaacactacaggtttacacatgctgaaataattgcttggattagaatatgccggccaggctctattataggaccccagcagcacttcctggaagaaaaacaagcatcgttgtgggtccaaggagacattttccgatccaaactgaaaaatcgaccatccagtgaaggaagtattaataaaattctttctggcctagatgatatgtctattggtggaaatctttcaaaaacacaaaacatggaacgatttggagaggtaagntttccctaggagattctatct

SEQ ID NO: 217328 - DNA, 636 bp, Homo Sapiens; identical to SEQ ID NO: 50729
  misc_feature (8)..(8): n is a, c, g, or t
  misc_feature (582)..(582): n is a, c, g, or t
  misc_feature (593)..(593): n is a, c, g, or t
  misc_feature (624)..(624): n is a, c, g, or t
  misc_feature (628)..(628): n is a, c, g, or t
  misc_feature (632)..(632): n is a, c, g, or t

SEQ ID NO: 217329 - DNA, 743 bp, Homo Sapiens; identical to SEQ ID NO: 52656

SEQ ID NO: 217330 - DNA, 723 bp, Homo Sapiens; identical to SEQ ID NO: 54404

SEQ ID NO: 217331 - DNA, 424 bp, Homo Sapiens
tgggagcacacagtaccggtcccaatcctggttctgcccctgactggctggtgactctgagcaagttgcttgacctctccaagcctccgtttcctcatgtgcaaagtgtggacaaaacagtaccttcctcataaggaacgtgcgacgcgcctcagaagtacgtgttcataaatggtagccattgttgttaccttcccgtctgtgaacatggatcacatcatctctgtgggtaacccagtcctcgttgtatgacttgtcaaaatgcagttccacttgtattaatattgaccctgttcatcgtcaccaggactgcatcttgcaccactgtgccgtcttctaggcacacacgacccgttatctcccttggaaaaattcctctcactggaaatgtacaattaaaggatgattgaaatgtttaaaaaaa

SEQ ID NO: 217332 - DNA, 774 bp, Homo Sapiens; identical to SEQ ID NO: 53079

SEQ ID NO: 217333 - DNA, 598 bp, Homo Sapiens
tattgatcaactagaaagaaaaatatgaaaagagaaaaatattttaatttaaaaattgtaatacattgatttataaaatgccttctctgatacttttgaaacagatgtgaaaaacagaaaaagaaaaaattgtctgaaatgtttattttgcaaaacagtgcaatagaatctagttatgccttcatcactgttgacagtaaatactgacagccccttgcagtgtgttagttttagatcactctgttttagttgagagaaatgttttatatcatggtttttatatgaatacaaattatttctcaaagatttatagcacacactattctcaggaattctgtattacatgaatgctgcttatatattttcatattctaacttgtcttttcaagcaaataactaatatatatgtgcatgcagtctgccttgacaagttgttccaagctgaagagctttcactgtacaatgtgtggaaaatcaccatagatcatggctgaaatagtttgtaattgtctgagtctgtgcacgtacttttagataaaatgctgctgagtgactgcatgatgagatacaacttctgaatgctgcacattcttccaaa

SEQ ID NO: 217334 - DNA, 628 bp, Homo Sapiens
tctcatggtattcgggaaggcatttgtgggaagaaacactctgagcaagtcccagatatattacaactcaatgcaatctttaacatgttgaataccaagaactgcccaagtttgaaggacaaaccgaaggtgatcatcatccaggcctgccgtggtgacagccctggtgtggtgtggtttaaagattcagtaggagtttctggaaacctatctttaccaactacagaagagtttgaggatgatgctattaagaaagcccacatagagaaggattttatcgctttctgctcttccacaccagataatgtttcttggagacatcccacaatgggctctgtttttattggaagactcattgaacatatgcaagaatatgcctgttcctgtgatgtggaggaaattttccgcaaggttcgattttcatttgagcagccagatggtagagcgcagatgcccaccactgaaagagtgactttgacaagatgtttctacctcttcccaggacattaaaataaggaaactgtatgaatgtctgtgggcaggaagtgaagagatccttctgtaaaggtttttggaattatgtctgctgaataataaacttttttgaaataataaaaaaaaaaaaaaa

SEQ ID NO: 217335 - DNA, 610 bp, Homo Sapiens
aattaccttaagtagtcaaatttacagaaacaaagtagaatggtggttcccaggggctgggagaggcggggaatggatgtgtttggtgttgcttaatgggtacaaagtttctgatttgcaagatgaaaaagttctggagatggatggtggtgatgattgcacaacagtgtgaatgtacttaataccactgaactgtacacttaaaaatcgttaaaatcgtagaaataaacaaatgcagctcatatttaaagggaaaaaaatttcaaattaaccatcatatcacagatctcttcagaattaaagggatgctttatatgttaggtattttgtacgtttgttctggtttgtccagttgcagagagaaatacacaaatatgtcaacattgcttaaatgctaagcagttatggggaacattttgtaagaacagatacaatattggttaaattccatgagggggttgagtgagaactaaggaaatttgaaattcgagcttgaaatctccatttggatgtagaattgatatctcaaatttgaaatgttctaaactgaattcatgattgccccaccccaaaatcaaaacagagaaaaaaaagaaaaaaaaaggcggcc

SEQ ID NO: 217336 - DNA, 798 bp, Homo Sapiens; identical to SEQ ID NO: 48799

SEQ ID NO: 217337 - DNA, 374 bp, Homo Sapiens
  misc_feature (373)..(373): n is a, c, g, or t
ttttttttttttttagagacagggtctcactatattccccaggctcaactcctggactcaagtgatcctcccaccttggtctccggaagtgctggaattaccgccactgtgcccagaccccaaatttattattaaaaaattcaaacatacagtaacgttgaaaaaacgtataataatcaccaggacatccataattatattcatcaattattagcattctgacatgttcattttatctagaaccatttgaaagcacagacatgaagacacttgacccctaaatattttagcacgtgcttcctaattagagggacattcttctatacaaccataagaccattaattaatatattttaaaaaaaaaaaccgcggnc

SEQ ID NO: 217338 - DNA, 692 bp, Homo Sapiens; identical to SEQ ID NO: 48125
  misc_feature (684)..(684): n is a, c, g, or t

SEQ ID NO: 217339 - DNA, 813 bp, Homo Sapiens; identical to SEQ ID NO: 55600
  misc_feature (66)..(66): n is a, c, g, or t
  misc_feature (140)..(140): n is a, c, g, or t
  misc_feature (777)..(777): n is a, c, g, or t
  misc_feature (786)..(786): n is a, c, g, or t
  misc_feature (791)..(791): n is a, c, g, or t
  misc_feature (802)..(802): n is a, c, g, or t

SEQ ID NO: 217340 - DNA, 786 bp, Homo Sapiens
  misc_feature (679)..(679): n is a, c, g, or t
  misc_feature (762)..(762): n is a, c, g, or t
ccaatctgaagtgaattaaaggagatgagggttttcaagggggtagagtaaatatggaagaacaagagaatgggacgtcagagtaaatcccttttatcagtctggaatccctcaactcggtaaaacgaaggacatgaattgctgtcctatgttccgcctctaaaaattacacaaaagttaagaaaacacagattttcttcactaaattacgatactaaactgttaaggtggcaaatccagaccaagtaagtactttaagcaatggttagtttaaaatatatttaggacttttactagcccactggagaaaaaaatatgaacatttttgtaaacttcagatgctttcgggcagcgtcctaaactgatgatgacaccttgatacttttaagttgctaaggagtctcaaagattatgaccttgctctgccagctgagagcagtgtggccttaaataatattccttagctgagaaataccactagctctctgcagtacctcaggatggaaggagacaacatgcacaaaagtgcttggtcaactgtcaagcgttacaccaatgaaagatgttcaaatgcacctcaaatttctcaacattttccaaagccaaccaaaacccttagcttctttgtaatagagacgatgaattactaggtaagaaatgagcacccagagatagaagntcaaataatgttttgaagaatgcaaggtcatgccagagaaaacaaactatattcctcaaactaaaatcaatgctacaagatgntgggtcatcactgcttttataagc

SEQ ID NO: 217341 - DNA, 649 bp, Homo Sapiens; identical to SEQ ID NO: 54487

SEQ ID NO: 217342 - DNA, 658 bp, Homo Sapiens
ccttgagctcccagtcgcaggaccacttgatccttatcactgcttttggcacactcctcatccaagagttgatcgcagaggcagagttccttgccaccagtccagtggaagtacaagccaactttgctctccaaatggcagcagtagctgagcaggccgccctgcattctctcctcataaacatgctgttctcaagtttgtcagaatccagagctctctactcattacccccttttccaaacaagcaagcaaagcatgctcttcctttgtttcccttaattgcctaaaacatctccatgctcatagctgttgactctctttgcctcctagttcctgttcctctggtgtaggatttctcagccctagcactgtaaacatgttgggctggataatcatctcttgtatgggctgtttgtgcattgtaggatgttgagcagcatccctggcttctacacactaagtgccagtgacactcttctcccctccccagctgtaaaacccaaatgtctgcggacattgccaaatgtctcctagggggcaaaatcacccctggttgagagtcactgctctatcatttattcactaaatactgctggtcagctgggtccactggcgaacctcacatcaataaacctggtaatagaaaaaaaaaaaaaaa

SEQ ID NO: 217343 - DNA, 405 bp, Homo Sapiens
taggtataagtagtaggtaggtaaaggtatgtataagcaggtataattcaaaaggtatatgaagtacagcgaagtcattgtgttagataaaagcagaaactacaaaactgtaaggttttgcttattttgtcacgctctgcttctgtttttggtgttctgtggctctttccgccgatcctttgtctcagcctcatttgtaagtgacttgttttttccatttctcaagtgatccgcctgctttggcctcccaaagtgccctgggattacaggtgcaagccaccatgcccggccatttatttttattttattctattttattttttaagatggagtctcgctgtgtcatccactgcattctccagcctgggcaacaggccaagaccctgtctcaaaaaaaaaaaaaaa

SEQ ID NO: 217344 - DNA, 508 bp, Homo Sapiens; identical to SEQ ID NO: 51910

SEQ ID NO: 217345 - DNA, 710 bp, Homo Sapiens; identical to SEQ ID NO: 55907
  misc_feature (637)..(637): n is a, c, g, or t

SEQ ID NO: 217346 - DNA, 664 bp, Homo Sapiens
cggttctctgccttccttctgcaattacatgggtttcccagctgtttgcgcggccttggagcacccacagaggcggcccctgctggcaggctatgccctgggtgtgggactcttcctgcttctgctccagcccctcacggaccccaagctctacggcagccttcccctttgtgtgcttttggagcgggcaggggactcagaggctcccctgtgctcctgacctatgctcctggatacgctatgaactctcaccggctccccagccctccccaccaaggggtactgcaggggaagggctggctggggtccccgagatctcaggaatttttgtaggggattgaagccagagctagttgcgtcccagggaccaagagaaagaagcagatatccaaagggtgcagccccttttgaaaggggtgtttacgagcagctgtgagtgaggggacaaggggcaggtcccaggagccacacactcccttcctcactttggactgctgcttctcttagctcctctgcctctgaaaagctgctcggggttttttatttataaaacctctccccaccccccaccccccaacttcctgggttttctcattgtctttttgcatcagtactttgtattgggatattaaagagatttaacttgggtaaaaaaaaaaaaaaa

SEQ ID NO: 217347 - DNA, 472 bp, Homo Sapiens; identical to SEQ ID NO: 40102

SEQ ID NO: 217348 - DNA, 663 bp, Homo Sapiens; identical to SEQ ID NO: 54153

SEQ ID NO: 217349 - DNA, 760 bp, Homo Sapiens
tctttagaattacttatttaattattcctttaagttcatataatataatctacagtttagatacttggacatatatcctgcccaaggcactaagtgtaatataggaaaaggatagaaagccattttctctatcttcaaaataatgtgccatctccattaaaattaagactttaaagttctataattttttctttgtattcaactttttaatacctccaaattacaaacatctatttttttcactacatagatatataattacactatgatagacagaattctagagtgattctcaataatccatgccttggtataatcctctcccccattgagtgtgggtgggacatgtaacctgcttctaaccaacagaatatggcaaaagtgatgggatcatctctcccatattatgttatgttatataacaaaagtgaagagaagttgcagatatacataaggtttctaatcagctgactttgagttaatcaaagagatcccctgggtgggcctgacctaatcagactagtcctttaaaagagagtgaaccagtcagagactctctctcctattagccttaaataagcaagctgccatgagctctacggctgcaaggaaataagttttgtgaacaaccatgtgatcttggaagaagcatctgaacctcagataaaagcccagccccagccaacgccttgcttgcagctttgtgaaactctgagcagaggacccagctaaatcacgtttggactcctgacccacagaa

SEQ ID NO: 217350 - DNA, 734 bp, Homo Sapiens; identical to SEQ ID NO: 51889

SEQ ID NO: 217351 - DNA, 619 bp, Homo Sapiens
  misc_feature (27)..(27): n is a, c, g, or t
  misc_feature (594)..(594): n is a, c, g, or t
  misc_feature (615)..(615): n is a, c, g, or t
gcctcgtgccgttttgctaagcacggnaggctgtttataggctgggccgcatattacaatgctcagggctccactgcaccctctcgggggtctgctagcgctttccgtagactgtctccacgccctccccactcccagccagtccagatcctctccggagggactgcagcaaggatcgttaagtctgtccaccgggatgggggaagaccagggccggagcagattggccatccttcagaagatcgacttccgctattggggagagtctgaggagtccgttctcccacggggcctcgtcactctttgcgaagggcgcctggcaggtcaaatgacctccatttccacctcgccttccaccttcttcttttgcttctccatcactgcctccagctctgacactttctctttgtcctccagcagcgagcgctgcacggtgacctggctgtacacacgtgccccctcctcggggctcaccgcccgcagctcctccttctgcagcgagaaaagctgcgccccggtcagcacacccagcgcgtccacggtcccggagctaaagcccttggcctgcagccaggcgcggacctcggaggcgtncgagcccgggcctgagctgcngttc

SEQ ID NO: 217352 - DNA, 786 bp, Homo Sapiens
  misc_feature (709)..(709): n is a, c, g, or t
  misc_feature (775)..(775): n is a, c, g, or t
  misc_feature (783)..(783): n is a, c, g, or t
tgcactcagtggtgatgaactggggcagtctacagaagaaaaggttaagaatgtcttggatgacattttggagaaacttccagaagagttcaacatggcagagataatgcaaaaaaattcaaatagaagcccatatgttcttgtttgcttccaagaatgtgagaggatgaatattctcattcgggaaatacgtatatcacttgaacaactggaccttagtttgaaggtaagcttaaagtgaggctatagtagacttcagcacattggaagatattcactgtgtggctttttttctccatgcaagggggaattggcattatctcctgctgtggaagcccagcagtttgcattgagttatgacacggtaccagacacttggagcaaactggcttatccttctacttatggcctagcccagtggttcaatgacctcctcctgcgatgccgagaactcgatacttggacacaagaccttacccttccggctgtcgtgtggctatccggcttcttcaaccctcagtccttcttaactgcaatcatgcagacgatggctcgaaaaaatgagtggcccctggataaaacgcgcttgactgctgatgttaccaaaaaaacaaaggaagattatggacacccgccaagggaaggtgcatacctccacggactcttcatggagggcgccccgctgggacacccaagcaggaaccattgntgaagcccgtctcaaggagctggcatgccctatgccggtcatctttgcaaaagccccccccggggncaggccangaa

SEQ ID NO: 217353 - DNA, 695 bp, Homo Sapiens
  misc_feature (668)..(668): n is a, c, g, or t
  misc_feature (695)..(695): n is a, c, g, or t
tgtagaccatcttttttttttcccatcatgatagtcaaaattttagtctgtgtattcaagtgagaaaatttttagtcagcattatacaagtagtatttattatgtatacattcagtggagttgtttctacaaaagtatttcggaatgactattctgctgcaaacttgtgtaagcgcttcaccttattcctacaataaggagaagtgcactaacaaaatgaacaatgcagcaagggcttcagtcgcagctcaggtcttatcaaacaccagagaaccctcaatgggagaagccttatgagtgtgacaactgtggaaagacagttccttttttgttagtatcacttctacttattgtagaaatatgctttcattattgcatctactcacatttctcactcggtttctggcaccagcaatctcttccatatttataatatcagtcaaaaactctggaattcaaatataacaagacttttctggtcacctttgatagttaatgacttgggcattttgatatattatctcctgctgtatgtattttgtttagtagaaattgaatcattatccacaatcctttatagaactatccaagtccctgtttttatgctagtttccaaggcttggtccttcaaggttttcagggatctaggggacacaaatctaacaaancctaatggatattatttggattatagn

SEQ ID NO: 217354 - DNA, 788 bp, Homo Sapiens; identical to SEQ ID NO: 43526
  misc_feature (722)..(722): n is a, c, g, or t

SEQ ID NO: 217355 - DNA, 780 bp, Homo Sapiens; identical to SEQ ID NO: 45374

SEQ ID NO: 217356 - DNA, 492 bp, Homo Sapiens
ctgagtgtcagcagccgaagcttcttttcgttccttggcgaggcttttgatggggctcgggacatgtggagagcctactctgacatgagagaagccaattacatcggctcagacaaatacttccatgctcgggggaactatgatgctgccaaaaggggacctgggggtgcctgggccgcagaagtgatcagtttattttcagctgaactgtagagagtgaaggaagaagccttttttcttcactcctacatgacccaggcattgatccaggcaatgaagattcagtgtaaataaccaccactaacaagaccatggcctttggaacctgtgctaagaggcatggatgagctccctcagcatgtggatggagactgaagagaggtctgaaggctcagtgtggtgtctccattctctaagaagtttggaggagaagctggatacagcaaaacagactgagaaggagcagctgttgggaaaggaggaaaactagga

SEQ ID NO: 217357 - DNA, 502 bp, Homo Sapiens
gcaggccggctgaacgtcgggactgtagatcccgaagggctcctcgggggcagctgccggctgacctcacctgctggttccaccagtgcgcgcccacgaaaccggcaaaatgtcccaactgcagtatctctccgctggctgatagctccccgggcaaaaatgaaaccttgccagaatagcggaagctccgctaaagcctcccatgccccctcatctcttcagaagtcacacggatcacgactcttcagaagtccacagatccccgtggactgacctagctatcatatctgtatcatttacatgtattaatctatctctgtgtatgtaacactttatgtaaatagagtattggcgtctgtcttttgctcaatatggtttatgcaatttatgtttttgcatatatatttttcatctctgtggaatagtccattgtatgaatacaccaccactgatctattctaaagaatgaatatattctgctgataataaaaaaaaaaaaaaa

SEQ ID NO: 217358 - DNA, 467 bp, Homo Sapiens
tggggccacaggtcaggcaggtccaggccccaaggacctcccagtgacaggcgactgtgagctgggcagacaggagtgaagtcaggtgggggttctggcttgctgacaccagcgtttggagcctcctgctgctgcctggcttccctgcattccctgttccctgcctcaggcaagaaataaccaagccgagttgcctctgcacagcagtgagctcctggtggccctggcttctggggagccctgtggatggcttccttgcccaagtccaggccttcttgttccctttgtgtgctccagagaaagggggcagcaccagatccagatccagggccaaccaacagaaagctgagtccatcccaaactcgcccattctcagagcacaaagaccccatgatctagggcaaacttgtccaactgttggcccatggaacagctttgaatgcagcccaacacaaatctataaattt

SEQ ID NO: 217359 - DNA, 522 bp, Homo Sapiens; identical to SEQ ID NO: 48479

SEQ ID NO: 217360 - DNA, 535 bp, Homo Sapiens; identical to SEQ ID NO: 45906

SEQ ID NO: 217361 - DNA, 514 bp, Homo Sapiens
actctttggaatattcaacctaaatactacccgctgctgtggtgacggggggtggaggaagcgtggtggaaccccaacacctagtgaggggtggctgattaataccacggctcacaacataacagagcggctcattccatgaacaaccccggggggatttcgaattctatcatctgggcaaaagatgtgatgagtgtaacttcctgttttctccaaactaaaacactacgcagattcctgtaccgctctgggacagaaatcctcagccagagcagaggccgtccccagagtccacactgtttcctgcataaagtgggttatctcagaagaaacatcccactggtctgtgtgatccttctattgaaatgtggtcttttatctacatctaagtatctctagaagtaatgcgtttgtatgtacttgtcactcagatatgtaatcccttaatttgtgcggggttttggggtgtgaaaaattcttggtttatatcctacacttttaaataacctcgtca

SEQ ID NO: 217362 - DNA, 724 bp, Homo Sapiens; identical to SEQ ID NO: 51607
  misc_feature (673)..(673): n is a, c, g, or t

SEQ ID NO: 217363 - DNA, 470 bp, Homo Sapiens; identical to SEQ ID NO: 53904

SEQ ID NO: 217364 - DNA, 723 bp, Homo Sapiens; identical to SEQ ID NO: 43083
  misc_feature (698)..(698): n is a, c, g, or t

SEQ ID NO: 217365 - DNA, 680 bp, Homo Sapiens
  misc_feature (586)..(586): n is a, c, g, or t
attattttcttgatgaataaattttcaatttctcctctgaccatttcagaacatcttccaataactcataaaacaactgaagtaaaattgagtgctggaaaatatattcaccaaactttggtaatttaagttgactaaagtttaaaattaagtctaaaatagtttacacctatactgcataatccaacaattttaatttcagttgaagacatgttactaatataactattattaaaagagtagaggatgtgtaattaaccatatcttctaaaacatggttactaaaagaatatgtaacatcaatattgaccttggtttcttacacaagtgttgctaactcaatagtgaaggagacattattaaattttctgaacccatgagagatactagagatggggagtggaaagtgtttggttcagggatatctgaagaacagaagggcagagatttcttaagtgacgcctcatctacaagctggaaattcctaaaaacaagtagaaagcttataaacaacaggtgatacactcacctcactggttttagtaaattaccaatacagaaagtatccctagtcttaaaaacaagnggaaaatttgaactgattagtcatattcctttgattacactgtttgttacaatatttttctcagtaaacagaaataactaaaaaaaaaaaaaaa

SEQ ID NO: 217366 - DNA, 700 bp, Homo Sapiens; identical to SEQ ID NO: 43439

SEQ ID NO: 217367 - DNA, 653 bp, Homo Sapiens; identical to SEQ ID NO: 48045

SEQ ID NO: 217368 - DNA, 497 bp, Homo Sapiens
cctttccagctgagtgaccatcaacgggtaattaacctctcaaagcctcaatttcctgacctgcaaatttacacaaatctttatctcaagaagaaaatctgaaggatcagtttaactatacccttagtacatatgaagaagctttaaaaaacagagagaacattgtttccatcactcaacaacaaaatgaggaactggctactcaactgcaacaagctctgacagagcgagcaaatatggaattacaacttcaacatgccagagaggcctcccaagtggccaatgaaaaagttcaaaagttggaaaggctggtggatgtactgaggaagaaggttggaaccgggaccatgaggacagtgatctgattgaaaaaaaacgacagtctggggaagcgatcacatctggtgaccaggctgcttcattcaacactgtgtaaacaccaaagccttaacttagcaaacagttgttagaagtgggacactccaaccacattccaa

SEQ ID NO: 217369 - DNA, 761 bp, Homo Sapiens
tgtatgtatacttactatcaaatgaagaagataataaaataattcattgagtttcatgttaagaaagagtgtgagaaaagaagagagcagtaccataaatgtcagattaaaagaattaggtagctacctctccaggagaaaaaaatatggctaaatgctatctctacagcagaaacaaaaattaatttttgtttcagtgatgtttttgttttagatacttttatagcatgtgttgtagaatcacaaaattgagccctcgatatatataggaagtgtattcggtctagaataattaacttctccaaagtcacttagataataagggagctacaaattataacccagaattcaagattcctagaatagtattgtttcttccattttaaataaagttctgcagggacttaatgattctgcaaatgtacctcagaagctgtctttatttgttttaattattggagttccacgtttgaaaaaagaaaggttgaaaactttttgtactatatggatagtctatttttagacatgatttttgttttacgtactttcaggtcccaatcccaccttagagaaccatatctcttgttttattttagtgaggaaagaaatatacttttgctaaaatttactttatttcatgcgtttcttgaacatagtaaatgaggaattgcttttttgtgtgtttttgtagggtctcgtatagtgatatactagatcttagcaaggtaccaaaaatagctgcctcctgctgaaaagctttg

SEQ ID NO: 217370 - DNA, 711 bp, Homo Sapiens
  misc_feature (655)..(655): n is a, c, g, or t
tgaggattccaagcccctgagaggagaggcgatttactctcagacacccagcctagctataagacagaaccaggatcagaaccaaggtcattttggtgtcaaagccatgcatgttttaaaatgtttttctacaaactgtcttgttttggccacgctctcagaataggtcatgcctacaggcaggtgccattgttgaggcttgttaagagtgtagagaaaaaagaatactggcaggcattgtgcagtggactgtgcatagacgatctcatttattccattgtacggtcagattagctgaggtcaggggcaggattcgaacccatgtctccctgacagcagaactcaggtgctcatccacttgccaaccagctttccacttagatcattaggataatagctactctctcagcactaagtgctaagatctcattaaatacataccaccaggggatgaggtgagaactgttatctctgttacacatagaaggaaatggagacatgattgctttgattttgacctaaatgctctcctgccccctcaccctttgatcttccattgaggtgagattgggggagtgccgcagtgtggtcctcagaagacacaccatagatacactgttagcattggatgaaaaagaagggcttcatacctttncacagaggtcggtcctcttcaagaccatttgaatttaatgctcaaagagtttcctt

SEQ ID NO: 217371 - DNA, 681 bp, Homo Sapiens; identical to SEQ ID NO: 46982

SEQ ID NO: 217372 - DNA, 611 bp, Homo Sapiens; identical to SEQ ID NO: 54872
  misc_feature (490)..(490): n is a, c, g, or t
  misc_feature (590)..(590): n is a, c, g, or t

SEQ ID NO: 217373 - DNA, 711 bp, Homo Sapiens
taagaattaagcaaccactacaaatccttttgaaatctcttttagatctggtgctctcatgaaaatctacatcaggaggacctagaaaaggaaggaggcattgaatttcctcagatctactatgatcgattcagtggcaaaaagtatcatttcttttatggctgtggctttcggcatttagtgggggattctctgatcaaggttgatgtggtgaataagacactgaaggtttggagagaagatggcttttatccctcagaacctgtttttgttccagcaccaggaaccaatgaagaagatggtggggttattctttctgtggtgatcactcccaaccagaatgaaagcaattttctcctagttttggatgccaagaactttgaagagctgggccgagcagaggtacctgtgcagatgccttatgggttccatggtaccttcatacccatctgatgggacaaccacaaggtctggaaactaggtttaaaataagtgtgcacttggacataaagactggagaaataaacactgaggactccaaaaggggggcaaggaggaagaggggcaggggttaaaaagctacctattgaatactatgttccctatttgggtgatgggttcgttagaagtccaaacctcagcagcacacaatatactcatgtaacaagcctgcacatgtaccccagaatctaaaataaaaaaaaaaaaaaa

SEQ ID NO: 217374 - DNA, 653 bp, Homo Sapiens; identical to SEQ ID NO: 43828

SEQ ID NO: 217375 - DNA, 479 bp, Homo Sapiens
aatgaatgaggttgatcagatcaaaaagtggtgttgcaaaaccaagtggccttagacataactgctgcccaaggagccacctgtgcccttttaggaacacaatgttgtaccttatccctgacaatcagcagaacataacagcagccctgcaaaggggtcttccaggagattaaggtgactgagagcctcactgtcaaccccctgcagagatggtgagcatccctaggttctggcgtacattgggccctaatagtcataagtatcatagctgagatcctagtagtgagctgttgctctctgtattgttgttgtgggttatggactcagggctccgccatataggcatgtgtccctgcctggaggacgccctcagcctagggggtgtagtgtaagggaaatggctgtgctttagtcaggagtaggctgaggcagccttctggtgcagcatgactcagtgggtttggagtgcaagcacacaa

SEQ ID NO: 217376 - DNA, 497 bp, Homo Sapiens
  misc_feature (15)..(15): n is a, c, g, or t
ttttgacactattanctaacttttattttttccttgcaacagagaggaattttaaaaggacaatcttaacaaatgtgcagttctagttctttgtgtaattcttcttttaaatcttcgaagagaaaaaatgcaaaagaaggaagatatttttaaacaatgcttgctgcttccttcccaaaagaacagaaacatctcaacttctacctttgtgaagagctggcagaaagtaagcatacaaagctgaatgaatgtatattcttgccatggcccaggtcaccagtttcagcctcgtttgggtatctgaggaggactggctgcactggaactcctggaatgaaggctcctggtttaaaagtaatcatacaggaacgattatgtacaagtaccttctgggaaaactagtatctggggccattctcctcctgatgttgttcgctttattatttcatttattgtgttttttcgggaatccggatctacacgggacaccaaaactg

SEQ ID NO: 217377 - DNA, 555 bp, Homo Sapiens
  misc_feature (494)..(494): n is a, c, g, or t
gaactttaaaatattaatttagatcattttattacatctcaatttgttactgctgaaaattatccaaattctggcaagtttggatatttaatatgctggaatttttcaactgagacctttggaacaaagctattttttgtttttaaggaataaattaatttgcaacaggaagcaaattcatgggattaaacccaactaatttgatagctctttacttttttctgagacggagtctgactctgttgcccaggctggagtgcaatggcgcaatcttggctcattgcaacctctacgtcccaggttcaagccattctcctgcctcagcctcccaaagtgctgggattacaggcgtgaaccaccacgcccggctgatagctcttcactttcatgatgctgtgcccaagagttgataatagcatgtagcacactgcatttgctcattcaacaaagattattgagcagtcagtgtgagtctgacactgagccagagctgnggatataatggagcacagggcacgggctctgtcctgaaagagcatagcttctaaaggaaga

SEQ ID NO: 217378 - DNA, 587 bp, Homo Sapiens; identical to SEQ ID NO: 60815

SEQ ID NO: 217379 - DNA, 565 bp, Homo Sapiens; identical to SEQ ID NO: 61802

SEQ ID NO: 217380 - DNA, 548 bp, Homo Sapiens
cacaaatactgttgtaaatatattaaaaaaatcagcattctatctggtaaacgtcacttttgcccctctataaaattttgaattaaaaaagcctcaagaactttttattgttccccccaccctccatttctttttctttttctcttccacaagaatatatcctgacacttttttttttttttgcaaagattgttggaaataatccttctcttgtacctagaaacataggtgcaaatttctgatatctttgttttatctgcattcctgcctttcatgaaagtccctcttgattgtgctgaggctgtggctcagcgaagacactgaataaatacgatagccactgttgcttgttgcttgtccaagtcttcctggcttctgctgcaagagggggatatggagaaggtgggccagggtgtgtggacccgggcagaatctggggaagaagcctgccattcgtctttctttcccacaccaccgaacccactgcccttcccacccccacagcccttttatgaaatcagacaacgtggtaggtggaaaacagcagg

SEQ ID NO: 217381 - DNA, 711 bp, Homo Sapiens
  misc_feature (590)..(590): n is a, c, g, or t
  misc_feature (677)..(677): n is a, c, g, or t
tttttttctgagaacacatgaagcaggtattggacatcagcagatagatgagactccttggcaccacagtccgagcctggggttgggggatagctggggagttgtcaggcaggaacattgatgtagtcatctgaatcactgtcctccatcatggcggcaggctggtggtagaggctcacgtattcacagctggtcttcagagatggggcatggagccagggagattcaaacacctgcagcggggcggggggcaacggcgctccggggccgggaacgggggcctcccctgtgcctgcagcgtccgctccacgagcgcgccgcgggcaggcgctgtagatgttgttttgggagcgcggtcgcggcgacccgcggggcctctgggagctctccagggcgcgcatcctcacggccagtcggcgggcccgcctggagagggctttcctcctttcaacggcccttttcaccaccagccccagaagtgccagcaggaaaaggcccaggatggtcgggatcaggatgtgaaatccttggccttccctcccagactgtgagccatagtccagtgctctctgcctgtgcacgcctggtgngtgtgtgtagccctggcgtctggggcttgagcagcccctccagagctgagattttttgagctgtagtggatggcaaagagggtcggngcttgtcacctgctacttgagaatgctctgacac

SEQ ID NO: 217382 - DNA, 489 bp, Homo Sapiens
aaaagagatggagtttcctttatctgttgcccaggctggagtgcagtagcacaatcacagctacactgcagcctcgaacttccgggcacaagcagtcctcctgcctcagagtggctgggactacaggtgtgcaccacgacgcccagttatctagtttactcttacccaagtataaatgatatgaaacaatctgagactagtcagtcaactgtccttggtaagatctccttcttgacagccatgtggattctatcacaccctttataatttacagcaatcttcagtggttaaagcaaaactgtacatctataaaggaattcaagagaagtgcaggaaaaggatgacaaaaggtaaatccctagctaccaccagaatgttatctatctaaaactgccaacttacgaataggtaaaacttatggtaaaattataaaggtgagcacaacaggaactggaatctattctgaagggcaatataatgtacttccaa

SEQ ID NO: 217383 - DNA, 378 bp, Homo Sapiens
gattcaatgtcctccccaaggtcacacaacttctaactgctagagtcagaactaccataggggaggggtggctgcttccacatatcaatttcttaaccaaaagagaacttcatcataaatgccgaatctcgataattagcgtagatctgtgctcctatcaccgaaatttcatctcatcagagaaccaccaccagcaaaaaagctgttttaaagttaaaacttaaactgctatcaatttgggaaatggctaaaccatgatatactgaaactatggaacatggtgcagcagttgttaaaaaatgacttgaagcattacatgctaacattgaaagttacggtgcaacagtccttgttaaagcagtcaaaaatgatgttaag

SEQ ID NO: 217384 - DNA, 521 bp, Homo Sapiens
tttcatcaaagtaaccacaacctctttaatttcaaaattcagcagcatattaatgatgtctacagacctaatttcttccactccagttgttaaagtattttttgaatcatgtacatcttgtgatatagagatttcaaggggctctttaatttcacctgtctcttgtactcttggtttcactttatccaagtcttcagtaccctcacagagattttctgttagtatcctaaataaaagattaagatcttcttgatttagactaacattcattgaatcaagatgtcctttaatttccacaacaggcaccttgtggtaccaagatgcagctagattccgatttacaagaaattccaagttaattgggtgcaacagctgaatatcaggatggtagatgcctggctggatcactgtcctataaagtgtaagctttgttagctgcacatccattctatcaattactggaggatttaagtagtcttcatcagacaccagactgaactgattatgaactctgattaacc

SEQ ID NO: 217385 - DNA, 525 bp, Homo Sapiens
tttttttttttttttcaaggggattttaatgaaattttattaaggagatgagaagcagggagtctgtgttgaaaattcaataaagggcttgttttccatctcagcctggataatctatgttatctctgagtaaagggggtaacaattctaacaacctggcttccttagaagtttccattctcatatagtcaccgaaggcagcagcactcaggcgtttgctgccgtgcctgccctttggtttctgggacggctcgggtcccgtagcgccggcacagctgagattgccaagccgggaagagaccttgctccaggtgtagctgcgttttccccagatcacctgtccttttcccctccgacaaggaagctgtgatttttctctggcctttagaggcaaagtgattccagataagtagattaatgtgtagaatatctcatctgtgttgttccagtgcagccctttcagctttccagagccagttagacttgatatgaggagctaagtgattggctggctctggagctcag

SEQ ID NO: 217386 - DNA, 644 bp, Homo Sapiens
cagattgaaagatttttggctatgtgcaaataagcttcttattgccaaacagaaaagaagccaaatcattgcatcttattttctgcacgctattggcactaactgctggcagggagatttttcagaagcatccacactttacacagtgttttctaacatgtagcacccgggggtagcgggtaagtggtaggtagaaaaagaaaaggcagcaaataattcttcaatacctccaggcactgtgcaggcatctcacacacatcattatcacatttaacccttccacccacacagcaggataggtattattatgcctagtttatccaggaacaagccagtgctcaaggacagaagacaaaacaaaagtgtgctgcgtggccacactgacattctggtctcctcacccagtccccctccattcccggctgagctgtcctcatccagaggtacagagacagttactaaacatttcacggctctttgtttggaaactatacctcaactaacaatatactaaaatttaaaactaaatatgtaaataaatgcattaaatttttcacagctcatgaaggtgcttttagtactgactatcccaggctgattaagagttgattatttctaaatggcacttcatgtagacatagaag

SEQ ID NO: 217387 - DNA, 600 bp, Homo Sapiens
aagaagtagattaataggaaatacttgatattgtttcttggcaagactggctcaacactgacagtcaaaagaagtcacaaacataatgcataaacaagcagccactgggaggggctaataaccaaaggaatcacaactttaaaaagcaaaaaaaccaaatatgatacaaaaaatcaaacccagaaattgaaaggttgggggagagattcccatactgacgattggaaacatagagaatacattatcacagacaactaaaaactgtcaaataactacggagcaagttctccaaatgccaatgggtgccgatgtattggagaccaagtcaagcatggcactgtgatgtaagatgggctggatatggttcaaaggaatcacaaccacaaaacctgcaaaaacagcgtcccttatgttagacactcacagccatggcgtgggaggagaccccgagaaaggagggggccatgggaggcctggcaagcacctccttctgtttcacacttgtggggacttttcgggaaagcaagcaagcaagggacagggaccctctgcgcctcctcccatgtcccagttgagtctctcaggacacccaccctctcc

SEQ ID NO: 217388 - DNA, 461 bp, Homo Sapiens
tttgtaaagacataaaagtttaatgatgaagagacacaggaagtgtttttaagtttagtggtggatactttggaagtgaatgccaaagattacaatttagagaagaccacaaccaagaaacagttaacaaagttttagttgaatgaaaaattttaaaaaagtacatccaatttcttcaaaaaatttgtttcttctgcgattccaggtttaattttggttatcccatgacaagtggttcacaacactgtactggcgcgggctgcggaagcctgcgggaagccgagcgttgaggcgcggcgcccacgccactgtcccgagaggacgcaggtggagcgggcgcggcttcgcggaacccggcgccggccgccgcagtggtcccagcctacaccgggttccggggacccggccgccagtgcccggtgagtagccgccgccgtcggctgggcaccatgaacagcagc

SEQ ID NO: 217389 - DNA, 602 bp, Homo Sapiens; identical to SEQ ID NO: 59006
  misc_feature (22)..(22): n is a, c, g, or t

SEQ ID NO: 217390 - DNA, 461 bp, Homo Sapiens
ttaacagttttattactgtagccacttttggtgttaactgggaccccagttttaaaatgccataatcaagtatttcagtaatatatgacattcattatatctgtagacactggataactgaacgaaaattcatgctgcaattatcaggaggtcaaaggttaataaattaattatttgagtaacaaaaggagattagcagggcctagcctggtgtctaggaaagattagtggacaagaggtcaggaagttggattcagtcgtccctggctctgccattagcccatccctggagtttaaaaaagcaagtctttttaacttcttggagttcagtttcctcacctgtgaaatgaagaagctgaataagctcatcttagggttatttgctgctccaacagtctaatattctctgaggaacaatatgcttgggttcatgggagagtcacttcccacaggaaccacgc

SEQ ID NO: 217391 - DNA, 495 bp, Homo Sapiens
tgcgcgtcggaagccggaagcagggactgagcgacagactaggaaacgccggtttctccggggctccccagcgccccacctttaccccggaggccgccctcttccatttgctcttgggcgtcagggcggtaccccactccgctcgaccctttggatccgctcgcacttcctcccgtccagagtcaaaggccccggaagtgacgtttacgcgccgtgcgtaatcggcgtttgctggcggtgccgggggcggggcgagcaggagggtgggtgtgaggcgggagctggccgcggagcccagacctacccgggcgaagcgggcgagcggtggtttggacgccggcggagacgcgggcgaggtacggagcggacggactggggctgagagctgctcggctctcagctacaggagcggcgcggcggggcgtctcgggctgggggtggcagggcggtcggtccgtgccatccgcgcggctggggcagttgcgcgtcggtgcc

SEQ ID NO: 217392 - DNA, 555 bp, Homo Sapiens
cacttccatgcacatgttaggcaggagaagaatcaagagactgtatcctggactcaaacgaacagagtgttttcagtacagtaactgccaagtactacctggaagttgaatgagatgatgttatgtcttagtcaaggaaagcagtttggacttaatttttcttcctcttaatttttcttccttttataaatatgttgatgtagtgcactagagtaatctatcatttcttgctttacttttcatctttataaaagttgaacaaagttaagctatgtgacctgaaccccaggaaaagatctaaaataacccactaactagctcttttgtaacctattggcagattctgtgattttttactaatacaattaagtcaagtattatattttaaaaataggtaaataaaaggaactgcttctcaggacagaaatgaaaattatcaatacaagtaatatttttacttactgtaagttgacctgctaccccaaaatctgcaagttttgcatgtccttctgtatttagcaaaatatttcctgccttgatatctcggtgtttttt

SEQ ID NO: 217393 - DNA, 768 bp, Homo Sapiens
  misc_feature (646)..(646): n is a, c, g, or t
  misc_feature (661)..(661): n is a, c, g, or t
ttggaaaggaggattgcttttaataaagacttaatctttcttaaaggaaaagtatttaagaaatacagaaaaaaattactgggcttttattggcaattacaaaagtaatagattttcttacataatacatttcttcagtaatatatgtttcaagtattttactgtagaatttctaaagtaccttgtcactgaccccataatttaatataaagtaggtcccataatcacattttttggaagttgctgaaactgagataaaaaaatattgctttcttatgggaaaaactggacaaaatacagaatagccaaaactagattcactggctcagttatgtctactaggtgaaagaaactgagtcttctaataattcattcagaatctgttactgtagaaattttaagaggttttgagtcagttccagtataaaaataaggccaaagtgctcctgtaaaattatcattaaaagtatagagaagagatctatcattcaaattataaaaggaaacttcattcatttcatagtctaaaaaaatgccaatcttactaggaattacttgtggcagcagaataatttccctgtggcccaatacaatataattattctgactagatcgccaaaatccccataatccatcctgtactaanaatggttgactcttnctccttctgggaagacagtcattacagacaccaagaatccattcaggcttgtctttcacttctaccttccagtactgcctgccacaactatatcccttagaacccag

SEQ ID NO: 217394 - DNA, 410 bp, Homo Sapiens
  misc_feature (192)..(192): n is a, c, g, or t
  misc_feature (197)..(197): n is a, c, g, or t
  misc_feature (216)..(216): n is a, c, g, or t
  misc_feature (230)..(230): n is a, c, g, or t
  misc_feature (247)..(247): n is a, c, g, or t
  misc_feature (311)..(311): n is a, c, g, or t
  misc_feature (341)..(341): n is a, c, g, or t
  misc_feature (405)..(405): n is a, c, g, or t
caacagaagttcaggttcgggataagatcatcacagataagaccaaggacacaatattcactgatctctaagcaaacagaaaaactccacttacagaaatcgttgcaactttggaacttccaagacaatctggcctctatcaatgggcagacagcgaccctcactgttggcagaaaaaaaaaaaacccaggnttttntaacacaactgttataaantcacggcaacaaantttactccacctctganttactggtcttaatctcagaagccgaatccgtacttatttttcttcaggttatcagcttcgggntaggtttcatcattgattagaccaatcagnccttgtatatgtacacataatacattaaactgcacttctgtgacactgactacaaccaaggtantgcta

SEQ ID NO: 217395 - DNA, 345 bp, Homo Sapiens
aaagtgaaatggaagcacccttaaggaaatcagtactgggtctcctacctgcccttcccaacctgatgaaatgcattccagaatcaccaagaggtagaccagcacttctttgagaggccacagggaaataaggtgatggagaacttgtctcctgggatgaggggagagcctttgaagccaaccccaaaggccaatgtgaaggtgaatgttgccctgggcatcaagggttatcttctatttcttgacagcaggacggccttaccggctctcagagtgaggatataactaactagctggcttctgctagctcattgctcctcaaactatctgtggctaatgacaggt

SEQ ID NO: 217396 - DNA, 415 bp, Homo Sapiens
  misc_feature (395)..(395): n is a, c, g, or t
gatatttttggactgcagttgaccacacaggtagttgaaaccacagaaagggaaaccatgggtaagtgggagctgctgtactaggagattcctaaagtcaagctgtctagtctttccttagtcacaccagagggaacagggatctgaatattcagccttccctaccccacactttggaaaatgatccacctccacagtcaggctttcatctctcatcctcttctaggcagtactttggatacaaaaaaagggtacagaaatgaaaggaatggtagagaagatgaggcttcgcatgatggatcagtggccgcccattcaagcaatggtccacacaggttcctaccacatgtttaattgcttactgtgggtgacatgcgcctgaggctttttggagntcaccgtcggacgttcagat

SEQ ID NO: 217397 - DNA, 582 bp, Homo Sapiens; identical to SEQ ID NO: 51094
  misc_feature (561)..(561): n is a, c, g, or t

SEQ ID NO: 217398 - DNA, 582 bp, Homo Sapiens; identical to SEQ ID NO: 52516

SEQ ID NO: 217399 - DNA, 587 bp, Homo Sapiens; identical to SEQ ID NO: 40005
  misc_feature (568)..(568): n is a, c, g, or t

SEQ ID NO: 217400 - DNA, 581 bp, Homo Sapiens
agcgctcgcgagactcggacccccaacctgaaggtgcttaggaagttgaaaggcccagaggaggcctccgggcaaatggccggagctggaccgaccatgctgctacgagaagagaatggctgttgcagtcggcgtcagagcagctccagtgctggggattcggacggagagcgcgaggactcggcggctgagcgcgcccgacagcagctagaggcgctgctcaacaagactatgcgcattcgcatgacagatggacggacactggtcggctgcttcctctgcactgaccgtgactgcaatgtcatcctgggctcggcgcaggagttcctcaagccgtcggattccttctctgccggggagccccgtgtgctgggcctggccatggtacccggacaccacatcgtttccattgaggtgcagagggagagtctgaccgggcctccgtatctctgaccacgatggcgcttacctttcagacttcattaaacttatgaccgaaaaaaaaaaaaaaaagggccacttgtcctcaacctgaaggtcggggccgttaaactagtctagaaacttcccccccccccaac

SEQ ID NO: 217401 - DNA, 582 bp, Homo Sapiens; identical to SEQ ID NO: 52056

SEQ ID NO: 217402 - DNA, 581 bp, Homo Sapiens
gggcgatgcgcttgcgcactgagaactcacaccatatgtgtcctgttccagtgcgcgggtctgtggagagccgggtgcgagcggcggcagcacgaggggaaagagctgagcggagaccaaagtcagccgggagacagtgggtctgtgagagaccgaatagaggggctggggccacgagcgccattgacaagcaatggggaagaaacagaaaaacaagagcgaagacagcaccaaggatgacattgatcttgatgccttggctgcagaaatagaaggagctggtgctgccaaagaacaggagcctcaaaagtcaaaagggaaaaagaaaaaagagaaaaaaaagcaggactttgatgaagatgatatcctgaaagaactggaagaattgtctttggaagctcaaggcatcaaagctgacagagaaactgttgcagtgaagccaacagaaaacaatgaagaggaattcacctcaaaagataaaaaaaagaaaggacagaagggcaaaaaacagagttttgatgataatgatagcgaagaattggaagataaagattcaaaatcaaaaaagactgcaaaaccga

SEQ ID NO: 217403 - DNA, 582 bp, Homo Sapiens
tgagaaaattagtgccctcaaacaagccctcctcagaaaatcaagagaagcagaatccatggcaacccaccaccttccatgaaaaactcctctcgtccttgtcattttacttttttgtatacatatgtgtaacttacactgttattaattcaacggatatatatttatcaatgtagacttctctgtgaagtcaaggtttattttcacatgagtccagcttgcagcaagtaatcttcaaatattccagtaagttttgaaataatgaatgcattgaaaatagcattgttggaatttattcccttctgttttaaaggaggtattttggaaattgaaaaacttaatttacaagtgctggtacatcttttttcttttgtggaccacaggaaggaagatttattttgatattgatactttaaaaggactttatatttgtaacattgatgttaaccagtttattagtttaaatcagtactttgcatataataagcattcaacaaaaatttattgactgaaatgaattttaaatgcatgtgtatgaacttgtttttcttaatctttaagatgtcagtattcatgtaaata

SEQ ID NO: 217404 - DNA, 587 bp, Homo Sapiens
  misc_feature (499)..(499): n is a, c, g, or t
actcctggttgtttagacgttggcctgcagacgatgtcatttctgtattcctctaaggcaggaagtcattatgcaacttacacatattcatcagatttcctctgacttacccggacatgtacatgggaatgatgtgcactgccaagaaatgtgggattaggtttcagcctccagctattatcttaatctatgagagtgaaatcaaggggaaaattcgccagcgcattatgccagttcgaaacttttcaaagttttcagattgcaccagagctgctgaacaattaaagaataatccgcgacacaagagttacctagaacaagtatccctgaggcagctagagaagctattcagttttttacgaggttacttgtcggggcagagtctggcagaaacaatggaacaaattcaacgggaaacaaccattgatcctgaggaagacctgaacaaactagatgacaaggagcttgccaaaagaaagagcatcatggatgaactttntgagaaaaatcagaagaagaaggatgatccaaattttgtttatgacattgaggttgaatttccacaggacgatcaactgcagtcctgt

SEQ ID NO: 217405 - DNA, 459 bp, Homo Sapiens
ggatgcgtgtgagccgttttcctggctgttgatggatacatgtgagctgttttcctgcccgttggtggatgtgtgtgagctgttttcctggctattgctccagatcctgtttgcgggggaagccacacatcgcacgttttactccacgacgcacggggctctgctgtcgggatggagggaggccgaccgcctcctcagtctgtgggccccgcaggtgcagcagcccaggccgaggctctagctgggcccagcctactctgttccacccgtgtcgggggtaggctgggaccgtcatttcttctgacagatttcagtctggcttgaaatttggggatgttaatgagggtcctctggtttttggtaaccagggccaccttctcagttcttgtgtctgttattggagtctggccagggttgacttgagctgagacaccagatgctcacggagaaaggccacat

SEQ ID NO: 217406 - DNA, 584 bp, Homo Sapiens
aaaagaatataaatgaggtctcgttgatgctggacaattcaagaattcagacttgaaccttaaacctaggaaaagttactttgtatcaggattctaacaattatgcttcatatttgtgaagtcctttaaaacataattttctcaagttctttctttgagacctcaatctgtcttagcattttgtaactaataactgaaattttattcaaaggaattgtaaaccttaaaccaccaatttatttccatgtgaaaaagtgttatatatgacaagtgttttttgattgtaattgcgttaaatcttttgagagtgtaaatgccgggctaggcaattgcagttaatacatacaggggttagtgaagggcttattaagttgtaggggaagcaagctgggaagaatcagatcagatattttcctgacaaaaaaaaaatgaccctgtagacagcatcaaaatgtggtgttcttgttaagtaattgatcgtggtctttgctttaatcttagttccgccaggcacggtggctcacacctgtaatcccagcactttgggaggccgaggcgggcggatcacctgaggtcaggagttc

SEQ ID NO: 217407 - DNA, 582 bp, Homo Sapiens
tgaacagttccatagcagaccagatgacattgtgatagccacttatcctaaatcaggtactacttgggttagtgaaattatagacatgattctaaatgatggagatattgaaaaatgtaagcgaggttttattactgaaaaagttccaatgttggaaatgactctccctggattaagaacatcaggtatagaacaattggagaagaatccatcaccccggattgtgaaaacacatctaccgactgatcttcttcctaaatctttctgggaaaacaattgcaagatgatttatctggctcgtaatgccaaggatgtttcagtctcatattaccattttgacttaatgaataatttacagccttttcctggtacctgggaagaatatctggagaaattcttaactggaaaagtggcctatggttcctggtttactcatgttaaaaactggtggaagaaaaaggaagaacacccaatactttttttgtactatgaagatatgaaagagaatccaaaggaggaaatcaagaagatcattagatttctagagaagaacctgaatgatgagatcttggataggatcat

SEQ ID NO: 217408 - DNA, 584 bp, Homo Sapiens; identical to SEQ ID NO: 53813

SEQ ID NO: 217409 - DNA, 532 bp, Homo Sapiens; identical to SEQ ID NO: 44462

SEQ ID NO: 217410 - DNA, 582 bp, Homo Sapiens
tatatgcaaatactgcaccattttttatcaggggcttgggcatctgaggattttagtatcctcaggagtcctggaaccaaccccccacagatacggggacaactttatgacattgtttttcaaccaatgaatgtttataccttttgttttccttgccgcgactgtgaagataaagttcaaaagtatttttaccaaagtgtagctaatatttcaagctgaaaataatagttctactgcccgtgtctccagaatgtagagcccatcaatatttttattttaggaggtgtacttgacacccaataaactgcacgtatcaaaagtgtacaatgtgttggcgtatgtataccctgcgtaaaactatcaccacaactgaagtgaggaacggacccatcattcccaagtgcccttgtgccctgttattagtttgcatgtcctagaattctatgtaaattgaatcatacaatatgtatcccttttttggtcaggcatattttactcagtatagttattttgagattcatccatgtgggagcatgtgtcacgagtttttgtgtttatgtttttcattgttgagtactgctt

SEQ ID NO: 217411 - DNA, 582 bp, Homo Sapiens
tggatgctctttgaaaacatgggcgcttacactgttgctgctgcctctacgttcaatggcttccagaggccgacgatctactatgtgatgtcagggcctgcgtggcaactcatgcagcaattccagaaccccgacttcccacccgaagtagaggaacaggatgccagcaccctgcctgtgtcttgtgcctgggagagtgggatgaaacgccacagagcagcctgtgcttcggctagtattaatgtgtagatagcactctggtagctgttaactgcaagtttagcttgaattaagggatttggggggaccatgtaacttaattactgctagttttgaaatgtctttgtaagagtagggtcgccatgatgcagccatatggaagactaggatatgggtcacacttatctgtgttcctatggaaactatttgaatatttgttttatatggatttttattcactcttcagacacgctactcaagagtgcccctcagctgctgaacaagcatttgtagcttgtacaatggcagaatgggccaaaagcttagtgttgtgacctgtttttaaaataaagtatcttgaaa

SEQ ID NO: 217412 - DNA, 582 bp, Homo Sapiens; identical to SEQ ID NO: 55790

SEQ ID NO: 217413 - DNA, 583 bp, Homo Sapiens; identical to SEQ ID NO: 50578

SEQ ID NO: 217414 - DNA, 583 bp, Homo Sapiens
aagaagccagcagggctggtgctggggcttcttctcctgaaggggctgcaagagggaaggcttagccatgtcgtccttgatcagaagggtgatcagcaccgcgaaagccccaggggccattggaccctacagtcaagctgtattagtcgacaggaccatttacatttcaggacagataggcatggacccttcaagtggacagcttgtgtcaggaggggtagcagaagaagctaaacaagctcttaaaaacatgggtgaaattctgaaagctgcaggctgtgacttcactaacgtggtgaaaacaactgttcttctggctgacataaatgacttcaatactgtcaatgaaatctacaaacagtatttcaagagtaattttcctgctagagctgcttaccaagttgctgctttacccaaaggcagccgaattgaaattgaagcagtagctatccaaggaccactgacaacggcatcactataagtgggcccagtgctgtgtagtctggaattgttaacattttaatttttacaattgatgtaacatcttaattaaccttttaattttcacaattgatgacagtgt

SEQ ID NO: 217415 - DNA, 580 bp, Homo Sapiens
  misc_feature (11)..(11): n is a, c, g, or t
gactaccgagnagcactcagcttacagtgtttggcttcctttctgttcctgtactgtgcctgcatgtcacctgtcatcacctttgggggattgcttggagaagccactgagggacgcataagtgcaattgaatccttgtttggagcttccatgactgggattgcttattccttgtttgcgggacaggctctcaccatcctgggaagtactggaccagtgcttgtgtttgaaaagattttgttcaaattctgcaaagactatgctctttcatacctctccctgcgagcttgtattggactgtggaccgctttcctgtgtattgtccttgtggcaactgatgccagttcccttgtctgctacattacccgtttcactgaagaagcatttgcctccctaatttgcattattttcatctatgaagcaatagaaaaactgattcacctggcagagacctaccccatccacatgcacagccagctggaccaccttagcctctattactgcaggtgtactctgccagagaatccaaataatcacaccctccagtactggaaggaccacaacatcgtgacagcagaag

SEQ ID NO: 217416 - DNA, 580 bp, Homo Sapiens; identical to SEQ ID NO: 45182

SEQ ID NO: 217417 - DNA, 582 bp, Homo Sapiens; identical to SEQ ID NO: 53073
  misc_feature (540)..(540): n is a, c, g, or t

SEQ ID NO: 217418 - DNA, 581 bp, Homo Sapiens; identical to SEQ ID NO: 50352

SEQ ID NO: 217419 - DNA, 582 bp, Homo Sapiens; identical to SEQ ID NO: 42023

SEQ ID NO: 217420 - DNA, 737 bp, Homo Sapiens
  misc_feature (435)..(435): n is a, c, g, or t
  misc_feature (473)..(473): n is a, c, g, or t
  misc_feature (496)..(496): n is a, c, g, or t
  misc_feature (530)..(530): n is a, c, g, or t
  misc_feature (571)..(571): n is a, c, g, or t
  misc_feature (576)..(576): n is a, c, g, or t
  misc_feature (594)..(594): n is a, c, g, or t
  misc_feature (601)..(601): n is a, c, g, or t
  misc_feature (603)..(603): n is a, c, g, or t
  misc_feature (608)..(608): n is a, c, g, or t
  misc_feature (615)..(615): n is a, c, g, or t
  misc_feature (648)..(648): n is a, c, g, or t
  misc_feature (660)..(660): n is a, c, g, or t
  misc_feature (665)..(665): n is a, c, g, or t
  misc_feature (676)..(676): n is a, c, g, or t
  misc_feature (682)..(683): n is a, c, g, or t
  misc_feature (702)..(702): n is a, c, g, or t
  misc_feature (727)..(727): n is a, c, g, or t
  misc_feature (730)..(730): n is a, c, g, or t
  misc_feature (734)..(734): n is a, c, g, or t
atgagagaaacaaacacaggttttattgtccattttctgtgaggatatgcaaaccatccaatctcttgtaagcaacccatgctgtgttcatgtgacataatacatcatctctagtcctttgcctttctgcacggtgtacccatctcccatatctccttggctagcccaaatccctgacttcttaatgctaaaatacttcttgctctcctctcctccaatagcttacttcagacttttttttcagtgtataattataaaagggaagcttatctatggaaaagtaaaaattctgtgccgactaccttagaaattcatgatcctaagatccatggatcttatcctaaatgagtgttactgacacagggtctttctagcttactggtgtccactttgattgctaatttgactataatctagttaaggaggttgctgcangaaggtaggagtagcatgtgacatgtgggccactgcanggaagccccctgctttgccaganaaggatagagaggtaaaagcccactcccttttgntaccctggtaaagtggcttttctgatcgcactgtacatgtnctganagaagcatcctggcccanaaaggcnanctttnaaggttntttttttaattaagccaaatatttcaaagttgngggattcctttnaaaanttattccaatnccttgnntggctttcttaaaaaaaanctttcaaattgaaaaatggggaaanttnttanctt

SEQ ID NO: 217421 - DNA, 582 bp, Homo Sapiens; identical to SEQ ID NO: 41988

SEQ ID NO: 217422 - DNA, 548 bp, Homo Sapiens
agccttgatattgatactgctaaatctatgttagctcttctgcttgggaggacatggccactgttttcagtattttaccagtacctggagcaatcaaagtatcgtgttatgaacaaagatcaatggtacaatgtattagaattcagcagaacagtccatgctgatcttagtaactatgatgaagatggtgcttggcctgttcttcttgatgaatttgttgagtggcaaaaagtccgtcagacatcatagcaagaactatgtgaagaaaatgcaaacctttcaattcccacgtgtatacaagctaatgtgatgagggggaaaaaaatccaacgggtgcattttcattcatatgaaagacttctcatagtacttttttttcctttttttaaaggaggtttttcttgttacatgtgatgggcattgagccacacctcttcttagactgaatattgaagtttttgttttgagttatgtttataacatttatttcagaacaataaagattcagatttgtgacaaagaaaaaaaaaaaaaaaaaaaggccacat

SEQ ID NO: 217423 - DNA, 582 bp, Homo Sapiens; identical to SEQ ID NO: 49697

SEQ ID NO: 217424 - DNA, 578 bp, Homo Sapiens; identical to SEQ ID NO: 54466

SEQ ID NO: 217425 - DNA, 582 bp, Homo Sapiens; identical to SEQ ID NO: 44107

SEQ ID NO: 217426 - DNA, 582 bp, Homo Sapiens
  misc_feature (541)..(543): n is a, c, g, or t
  misc_feature (548)..(549): n is a, c, g, or t
  misc_feature (557)..(557): n is a, c, g, or t
  misc_feature (560)..(560): n is a, c, g, or t
  misc_feature (574)..(574): n is a, c, g, or t
atttaaggaagtccagaatcatactgcatacatgctacaaaaaatagcaaaaaagtacaaagttggcttagataacttgtaccattttaaatggagatcataattttatgttcacttgatggggaatgactagaatggggcaataacaaatcatttctaaacagttattttccattaaaagccatattaagtattttgcttgttaaattctagttttatgttttaaatctcttagtggttacattgccatttggtagcatcatgtatatatttatgcttataagtttgcattatgactcctgtaaaatatgaaattataatgcaataaaagtgttatctttcttacaaaagttttgtacctaagtggatatagataactgcataaatgaataaattcagaattaactccttcaatatttctagtagcacaactgataatattgatattttctacaaatgttacttctaaaattacagacaaaattacttacacaattcagttaagatgctttgacactgaataaaatattgatttcatgannnacaanncccccccnccntccacgcaccaaanaccccacc

SEQ ID NO: 217427 - DNA, 582 bp, Homo Sapiens
  misc_feature (440)..(440): n is a, c, g, or t
tttgtctttctctggcttataaacttcgtcattgcattaggtcagtgcgcccttgctggtgcattcgctacttattactgggccatgaaaaaacctgatgacatcccacgatatccactttttactgcatttggacgagccatacgatatcacacaggatccctagcatttggatctttaattattgcattaattcaaatgtttaaaattgtactagaatacttggaccaccgtcttaaacgtacccagaacacattgtctaaattcctacagtgctgcctgagatgctgcttctggtgtttggaaaatgcaataaagtttttaaacagaaatgcctatattatgattgcaatatatggcagaaacttctgcaggtcagcaaaagatgctttcaatctgctgatgagaaatgttttgaaagttgcagctacagatgatgntacatactttgtattattcctggggaaacttctagctgctggaagaataagctgccctggtcttcctattcttcacacaaagactgccagtgactgcacaaggaccagcatctttaaaatactaactgggaacctttgttga

SEQ ID NO: 217428 - DNA, 583 bp, Homo Sapiens
  misc_feature (581)..(581): n is a, c, g, or t
aagctgtctatcgggctccagcggtcatgtccggcagaggaaagggcggaaaaggcttaggcaaagggggcgctaagcgccaccgcaaggtcttgagagacaacattcagggcatcaccaagcctgccattcggcgtctagctcggcgtggcggcgttaagcggatctctggcctcatttacgaggagacccgcggtgtgctgaaggtgttcctggagaatgtgattcgggacgcagtcacctacaccgagcacgccaagcgcaagaccgtcacagccatggatgtggtgtacgcgctcaagcgccaggggcgcaccctgtacggcttcggaggctaggccgccgctccagctttgcacgtttcgatcccaaaggccctttttagggccgaccacttgctcatctgaggagttggacacttgactgcgtaaagtgcaacagtaacgatgttggaaggtaactttggcagtggggcgacaatcggatctgaagttaacggaaagctaccgcggcccatagcgctcacagccgtaaagacttaagtcgttgaccgaaagcggctttttcacttacctgggctntt

SEQ ID NO: 217429 - DNA, 457 bp, Homo Sapiens; identical to SEQ ID NO: 44487

SEQ ID NO: 217430 - DNA, 583 bp, Homo Sapiens
  misc_feature (555)..(555): n is a, c, g, or t
  misc_feature (569)..(570): n is a, c, g, or t
atttggttacccctgctgataagagcagccattacctgccactgggaccagcaggtgaagcgttgcaacatagccccctccatcatccttcacctcctatcccccactccaaaccaggacgacctgcaaggtcccagccagcaggacaccgtgggcactctggcaaatgaaaaaatggaacctggtcttgagctgaatcaatgtgttattgttacccccacccccggtttacctgatcagtgttaacctttactgggacactcatctgttacactggaacaccttcttctttttgtcaatcggcacagaccactgtaaggaaatgcagtgtgttgcagtggccttttctccccctcaccttctaaggtcagctctagctgagcatcagtgctctcttaaggaggaaaaaaacggtgcggctgggagcggtggctcacgcctgtaatcctagcaccttgggaggccgaggcgggcggatcacttgaggtcaggagttccagaccagcctggccaacaaggtgaaactccgtctctactaaaaatacaaaaatagcncgggtgtgggtggnngtgcgcttgtaat

SEQ ID NO: 217431 - DNA, 583 bp, Homo Sapiens; identical to SEQ ID NO: 48873
  misc_feature (569)..(569): n is a, c, g, or t

SEQ ID NO: 217432 - DNA, 582 bp, Homo Sapiens; identical to SEQ ID NO: 42229
  misc_feature (539)..(539): n is a, c, g, or t

SEQ ID NO: 217433 - DNA, 600 bp, Homo Sapiens
  misc_feature (594)..(594): n is a, c, g, or t
cttatgcagcgaatgtggaaaaggcttcactgtcaaacgcactctcgttatacatcatcgaactcatactggagagaaatctgacatatgcaatgaatgtggtaaaggcttcaccacaaagcgcactcttattatacatcagcgaactcatacaggagaaaaaccctatgaatgcaatgaatgtggtaaagccttcagccagaaaatatgcctcatacaacatgagagatgtcatacaggaaagactccctttgtatgtaccgagtgcggaaaatcctattcacacaaatatggcctcattacccatcagagaattcacacaggagagaaaccttatgagtgcaatgaatgtggaaaggccttcaccacaaagtcagtactcaatgtacatcaaagaacgcatacaggagagaggccgtatggatgcagtgattgtgagaaagccttctcccacttatcaaaccttgtcaaacataagaaaatgcacacaagagaaatgggtagaatcagtcaagttgaaaactcctgtaatggagagtcacagctccttccttataagtgaactcatgcagaagaaaaccctactagtgccgngactat

SEQ ID NO: 217434 - DNA, 609 bp, Homo Sapiens
tcctggccttctacacgtcggacacattgaaaaaatgcaggagggtattgtacatgtgctcagacttcatttgcagagcaaccacccgtacgatatctgtctcttcccaaaacttcttcaaaaaatggcagacctccggcagctggtgacggagcatgcgcagctggtgcagatcatcaagaagacggagtcggatgctgcgctgcacccgctactgcaggagatctacagggacatgtactgagttccttcagatcagccacaccttttccaggagttctgaagctgacagcactacaaaggagacgggggagcagcacgattttgcacaaatatccaccactttaaccttagagcttggacagtctgagctgtaggtaaccggcatattattccatatctttgttttaaccagtacttctaagagcatagaactcaaatgctgggggtaggtggctaatctcaggactgggaagattacggcgaattatgctcaatggtctgatcttaactcacccgatgttaatcaatgcacattgctttagatcacattcgtgatttaccatttaattaactggtaaccttaaaattcgtggtctgtcttcccat

SEQ ID NO: 217435 - DNA, 632 bp, Homo Sapiens
tcactggcttcttaaaacaaagtcatcagctttgccaggttacatactttatttaaaagtatagtgaggtcgaagttcattcttgtgttccattctaataatgtgggcattattaaattggtgtggaagctaatagtaaaaaataaaagctggtttcaccacctccctccccaccccccaaaaaaggcgtacagccaactcttagttatttagggtaagagaaaaaagaaaactgttaaacaatgaaatcaaagataataaatatgatagatttccagtatgaggcacttgcaaaacagtcatttaaactgatggttactgtaagtcagttggaagctggcatgtatgtaaattacttggtgttacaccatatccgaagaagttcctatgtgcagtgcagaattgcataaacagtatttaatcactgctacaaatcttccaaccaagaaggaaaactgctattcttcataaatctaatttttagtatatgcttcctttcatcttatacttttatcaatatttataaaagtcatttctataataaaagcagtctttcttgctcaaagtattaaggtgaacaattgaatagagtactgtggtcgggagactgatttgagactgcagagctgatg

SEQ ID NO: 217436 - DNA, 564 bp, Homo Sapiens; identical to SEQ ID NO: 55144

SEQ ID NO: 217437 - DNA, 562 bp, Homo Sapiens; identical to SEQ ID NO: 49739

SEQ ID NO: 217438 - DNA, 570 bp, Homo Sapiens
aagatgccccaatcttgtccatctagacttagtgatagtgtcatgctaaagaatgactgctttcaggaatttttccagctcaactacctccaacacctatcactcagtcggtgctatgatataatacctgaaactttacttgaacttggagaaattcccacactaaaaacactacaagtttttggaatcgtgccagatggtacccttcaactgttaaaggaagcccttcctcatctacagattaattgctcccatttcaccaccattgccaggccaactattggcaacaaaaagaaccaggagatatggggcatcaaatgccgactgacactgcaaaagcccagttgtctatgaagtatttattgcaggatggtgtctcttctttagaacagggaaaataggcaggaagcccaattgctggagtacttagctagttttattcttggttttccctttgccttcattctgcaagtatactagggagccatttgagagggaaaactatgaaatcttgctttttgaaatgattctaaaagcttctatcactgctttgctcttaagagccaaagt

SEQ ID NO: 217439 - DNA, 583 bp, Homo Sapiens
tcttcctcttttatcgccagcagaagtgggcatcaggtgtgattgccattgcttggctgttatattgccataagactcgactaaagaagatactaaaggaatcacgtcagagacacctggagaattttcgcattcgagccaagcatctggcagccaactggaatcgcatcaggacctccaggaggactattatccatatcccatcattagggtattcccagcctgtgagagaacatattgccgatttcaacacacagcagaacatgcagctggggaggctgtgtgacatcttagatgccaatgtgaatgtcatctacatctgctcccatcatatgaatgacgagttagtgctgtattacaaaaaaatcctaagtctacatgcagccgtcaaatctgggaaccttgaggacagaagtgacctgcaggacaggttcaaaattatcacacctgaagctgtaaacatcttccctatgatagagcagctgagtcagctgataactgatcacctgcaaatacagcgctggctctttaaaatggactctgagttccgaggaaatgggactgcattttgtgatattccttc

SEQ ID NO: 217440 - DNA, 587 bp, Homo Sapiens
aaaatgtttaatctcatttctccctcattaaaatccctcagtggcatcccatggtttttaagttaaagcacacattcttcaaaatagcctaaaaacctagcctctaacaccttgttccaggttaccttccaaagtttctatcttgtgtcactatccatctcattctctgaatacttatccaggattaagatacatattccaggatcaaaaagacctgggttccaatctttgcacttccatttcctgccctctaatttgggggcagcagtttgtgctttgtaagcttcagtcttatttatagtgtgggaataataatggttctacctcagaagttaatagaagaatgaaataatgcatgtaaattgctcagcagcgcgcctagcataaagtaattactcaaaccataatgtaaagtaaaaagataaccatactatacatagaaagccaatcatctcagccatgattatctcagaaataaaaagagatgcagcagctcaggactgagagattgtgaagtttttttttttttaggaagggtaggcatttttctaaaagtgggggaggggggtatctaacagtgggattta

SEQ ID NO: 217441 - DNA, 592 bp, Homo Sapiens; identical to SEQ ID NO: 42071

SEQ ID NO: 217442 - DNA, 587 bp, Homo Sapiens; identical to SEQ ID NO: 54677
  misc_feature (470)..(470): n is a, c, g, or t

SEQ ID NO: 217443 - DNA, 583 bp, Homo Sapiens
cattgtgaagaagtctacccgctccttaagcacgactcaggtggaatctccttggaggctcattcggccatccgtcatctcgatcattgggttgtacaaagaaaaaggcaagggccttggctttagtattgctggaggtcgagactgcattcgtggacagatggggatttttgtcaagaccatcttcccaaatggatcagctgcagaggacggaagacttaaagaaggggatgaaatcctagatgtaaatggaataccaataaagggcttgacatttcaagaagccattcatacctttaagcaaatccggagtggattatttgttttaacggtacgcacaaagttggtgagccccagcctcacaccctgctcgacacccacacacatgagcagatccgcctccccgaacttcaataccagtgggggagcctcggcgggaggttccgatgaaggcagttcttcatccctgggtcggaagacccctgggcccaaggacaggatcgtcatggaagtaacactcaacaaagagccaagagttggattaggcattggtgcctgctgcttggctctggaaaacagtcct

SEQ ID NO: 217444 - DNA, 600 bp, Homo Sapiens; identical to SEQ ID NO: 48195

SEQ ID NO: 217445 - DNA, 583 bp, Homo Sapiens
  misc_feature (533)..(533): n is a, c, g, or t
ttgaggaagacgcggtcgtaagggctgaggatttttggtccgcacgctcctgctcctgactcaccgctgttcgctctcgccgaggaacaagtcggtcaggaagcccgcgcgcaacagccatggcttttaagggataccggaaaaacacccgtggagccggaggtggcaattcaccgaattcgaatcaccctaacaagccgcaacgtaaaatccttggaaaaggtgtgtgctgacttgataagaggcgcaaaagaaaagaatctcaaagtgaaaggaccagttcgaatgcctaccaagactttgagaatcactacgagaaaaactccttgtggtgaaggttctaagacgtgggatcgtttccagatgagaattcacaagcgactcattgacttgcacagtccttctgagattgttaagcagattacttccatcagtattgagccaggagttgagttgatcgaatctacagatgcagaacccatggatacagagggccagcagtacactttgagaagtgtattcgaatccccggngacatgtcctttttaactgcattctcctccgccaaaaaagtgaccaagca

SEQ ID NO: 217446 - DNA, 582 bp, Homo Sapiens; identical to SEQ ID NO: 41672

SEQ ID NO: 217447 - DNA, 584 bp, Homo Sapiens
tttaaactacatttaaaactagcaaatctgcataccaaattatgtataacgtagattgaatttttatgaacttaaagtgagttaattgtataatgtaatattgtttaaaatatgtaaaaaccaagcatttccgcttggtccataattctatttgatattttaaaattctcatttaaaaattatattgctatcattcagcatgtgaaaatttattgataaaatgtgattttaatattctttagatataaactttcagcgtacttccatatgaggattataatagccctgctttattaaagaccataaaatattaactttccccaagatgttatgggttccagttcttctgatcatttgattcctttaattactgtccctcaatttcttcatctttacaatagatatattaacatttacagatcgactatttcctttaacctcctagaagaaagtttttgtggggaaagatgattctgtattattcagtagcatagacattttgcatatcaaagatgttcatttggcactaatgttgattgaaatcaaatccatctgagatgcctagctcgtatttgcattctgga

SEQ ID NO: 217448 - DNA, 569 bp, Homo Sapiens; identical to SEQ ID NO: 49662

SEQ ID NO: 217449 - DNA, 571 bp, Homo Sapiens; identical to SEQ ID NO: 47614

SEQ ID NO: 217450 - DNA, 570 bp, Homo Sapiens; identical to SEQ ID NO: 41212

SEQ ID NO: 217451 - DNA, 549 bp, Homo Sapiens
agcgcggcggtgatggcggggccggtgaaggaccgcgaggccttccagaggctcaacttcctgtaccaggccgcccattgtgtccttgcccaggaccccgagaaccaggcgctggcgaggttttactgctacactgagaggaccattgcgaagcggctcgtcttgcggcgggatccctcggtgaagaggactctctgccgaggctgctcttccctcctcgtcccgggcctcacctgcacccagcgccagagacgctgcaggggacagcgctggaccgtacagacctgcctaacatgccagcgcagccaacgcttcctcaatgatcccgggcatttactctggggagacaggcctgaggcccagctcgggagccaagcagattccaaaccactacaacccttgccaaacacagcccactccatttcagaccgccttcctgaggagaaaatgcagactcagggttccagtaaccagtgatggattcaccccatctcccaaataaagtttacttgttttacattcaaaaaaaaaaaaaaaaaaaggccacat

SEQ ID NO: 217452 - DNA, 586 bp, Homo Sapiens; identical to SEQ ID NO: 53692

SEQ ID NO: 217453 - DNA, 583 bp, Homo Sapiens; identical to SEQ ID NO: 41577

SEQ ID NO: 217454 - DNA, 579 bp, Homo Sapiens; identical to SEQ ID NO: 43433

SEQ ID NO: 217455 - DNA, 581 bp, Homo Sapiens; identical to SEQ ID NO: 43680

SEQ ID NO: 217456 - DNA, 556 bp, Homo Sapiens
  misc_feature (549)..(549): n is a, c, g, or t
aaattgaattttttttggccttgctttaacaggatttttgtagactttagaatttggacttacctaacaagagtataaattgacttgggttgcaagcactgagcactgttacttctatcacgtctctcttttatttctgggatataaaacaggctttaagtttcttggttgcccaagggcagagcaaggaatatctggtgtttcttgtgatgataatattttaattttaaatatccctccctcatacaagtgtatgttaccattttaatataattctttttgtacctttccttcttgttttgtgaagatttttgtggcatggattgctgtgctcactgctgtaaaaggtgacctagtgtactgggcagctggtggcggtgcagaaaagagtctcaggttattttttgtttttagttatttcttggaccttgacagtatctaatgactcctcctgaaaatgctgcagtataaaagagcaaagagctttgggaaatacctaagaagcaccttaagattaggggggcattgcttttatagattcttgacccnaaagcaa

SEQ ID NO: 217457 - DNA, 578 bp, Homo Sapiens
agtataaactgacaaaccagcgggccctgcggagattctgtcagacaggggccgtgcttttcctgctggtgactgtcattgtcaatatcaagttgatcctggacactcggcgagccatcagtgaagccaatgaagacccagagccagagcaagactatgatgaggccctaggccgcctggagcccccacggcgcagaggcagtggtccccggcgggtcctggacgtagaggtgtattcaagtcgcagcaaagtatatgtggcagtggatggcaccacggtgctggaggatgaggcccgggagcagggccggggcatccatgtcattgtcctcaaccaggccacgggccacgtgatggcaaaacgtgtgtttgacacgtactcacctcatgaggatgaggccatggtgctattcctcaacatggtagcgcccggccgagtgctcatctgcactgtcaaggatgagggctccttccacctcaaggacacagccaaggctctgctgaggagcctgggcagccaggctggccctgccctgggctggagggacacatgggccttcgtgggacgaaaaggaggt

SEQ ID NO: 217458 - DNA, 572 bp, Homo Sapiens
gattataaaaatgtgggtatctctccgttcctatcttaagcgtcgaggtcctcagcgatcagttgatgtaatagtttcatctgctttcttattgactatctcagttgtatttatctgttgtgcccagctacttcatgtacacgagatcttccttgattgtcactacaattgggaattggtaatctggtgcatctcgttaacactttttctcctaagatttgttacccttggatcagaaacaagtaaaaaatatagtaatacctcaatattacttactgaacagataaacctctacttgaaaatggagaaaaaacctaacaaaaaggaggaactgacactagtgaataatgttttaaaactggctactaaactgctaaaggagttggacagtccttttagattatatgggcttacaatgaatccgctgctttataacatcacccaggttgttatcctgtcagctgtttctggtgttatcagtgacttgcttggatttaatttaaagctatggaagattaagtcatgacaattcaaagaaaagaagatgtagcctcttttccagaataagagta

SEQ ID NO: 217459 - DNA, 583 bp, Homo Sapiens
attctggcctacacagcagtccttgatggctgacagccacagaattccaaaccaagtagtgtctgtcagccctcttaactctgtgcacgccctatttcagtcttttacatttgttcttctagggaatgtatgcatctctatatatattttccctctcaaaaccagaacatcaacagtgctgtttctgacacttcagacatcccacgcaaagccacattgaatttttgccaaatgaaaaacacatccaacaatcaagtttctaagaaggtgtcaagtggggaataataataatgtataataatcaagaaattagtttattaaaaggaagcagaagcattgaccattttttcccagagaagaggagaaatctgtagtgagcaaaggacagaccatgaatcctccttgagaagtagtactctcagaaaggagaagcgccactcaagttcttttaacccaagactttagagaaattaggtccaagatttttatatgttcagttgtttatgtataaaaataactttctggattttgtggggaggagcaggagaggaaggaagttaatacctatgtaatacatagaaac

SEQ ID NO: 217460 - DNA, 576 bp, Homo Sapiens
actaaaaaaacctaaaaggaagcttagatgggctgtgacacaaaaaattcaattactgtcatctaatgccagctgttaaaagtgtggccactgagcatttgattttataggaaaaaatagtatttttgagaataacatagctgtgctattgcacatctgttggaggacatcccagatttgcttatactcagtgcctgtgatattgagtttaaggatttgaggcaggggtaattattaaacatattgcttctattcttggaaaaatagaagtgtaaaatgttaataatacaaatgtcactgtgacctcctccactgagaggactggtttatgccagatcattttccggcacacacggagtggctttgacagattgataactttgtaagatgggagacatctgaaatattcatgttttccttttgtagtcccatctccactatttagaaatgttctcagactttaaaataatgcacagggcttgagctttctgtcatttgactttaaaaggaagtttcattcatatttatcctcttatgtaaaattgcggtataaagtctcatttccaaatatgttaa

SEQ ID NO: 217461 - DNA, 580 bp, Homo Sapiens; identical to SEQ ID NO: 43815

SEQ ID NO: 217462 - DNA, 557 bp, Homo Sapiens
ttgtcatgattatttaatccttaattttgtgatttccagagtttgttatcagaataacccagaccaaggcttaattgtaatagtgaacattaatggtacctttacagagaaattataggccaagagaaaatgctggctttcagtagaagttaatattagaaacccaaatctggttctgaaagtgtgtatcagatgtacggtgaacaaacttgggaaagattttctttaaaaatcaatgagcgttggccaggcacggtggctcacacctgtaatcccagctgtttgggaggctgaggcaggtggatcacctgaggtcaggagttcaagaccagcctggccaacatggagaaaccccatctctactaaaaatacaaaaattagcagggcatggtggtgcatgcctgtatcccagctacttgggaggctgaagcatgagaatcacttgaatcctggaggcagaggttgcagtgagctgagatcatgtcactgtactccagcctgggcaacagagtgagactgtctcaaaaaaaaaaaaaaaaaaaacaaaaaaaaaaaaa

SEQ ID NO: 217463 - DNA, 582 bp, Homo Sapiens; identical to SEQ ID NO: 49871

SEQ ID NO: 217464 - DNA, 426 bp, Homo Sapiens
accacgccctccacgtgttccactgcctcttctcttctcgcttgggaactccagtctcacctcggcttgcaatggaccccaactgctcctgcgaggctggtggctcctgcgcctgcgccggctcctgcaagtgcaaaaagtgcaaatgcacctcctgcaagaagagctgctgctcctgttgccccctgggctgtgccaagtgtgcccagggctgcatctgcaaaggggcgtcagagaagtgcagctgctgtgcctgatgtcgggacagccctgctgtcagatgaaaacagaatgacacgtaaaatccaggattttttttttctacaactccgactcatttgctacattcctttttttctgtgaaatatgtgaataataattaaacacttagacttgaaaaaaaaaaaaaaaaaaaaaaggccacat

SEQ ID NO: 217465 - DNA, 581 bp, Homo Sapiens; identical to SEQ ID NO: 44180
  misc_feature (535)..(535): n is a, c, g, or t
  misc_feature (576)..(576): n is a, c, g, or t

SEQ ID NO: 217466 - DNA, 581 bp, Homo Sapiens; identical to SEQ ID NO: 51821

SEQ ID NO: 217467 - DNA, 581 bp, Homo Sapiens
attccagatcatttctctccattccaggaagtttgcatagctccctggacttctgctttgcactgcactccatccccctgatcctgctgtggacgtggccttttaacaaacccatagctctgccccgctgctcagagatggtgcctggcacggctgactgcaacatcactgccgaccgcaaggtgtatccacaggcagacgcggtcatcgtgcaccaccgagaggtcatgtacaaccccagtgcccagctcccacgctcctcgaggcggcaggggcagcgatggatctggttcagcatggagtccccaagccactgctggcagctgaaagccatggacggatacttcaatctcaccatgtcctaccgcagcgacttcgacatcttcacgccctacggctggctggagccgtggtccggccagcctgcccacccaccgcttaacctcttggccaagaccgagctggtggcctgggcagtgtccaactgggggccaaactccggcagggtgcgctactaccagagcctgcaggcccatctcaggtgggacgtgtacggacgcttccacaagcccctgtcccag

SEQ ID NO: 217468 - DNA, 569 bp, Homo Sapiens
acatgcaatataaaattcataggagtattaatagcccatttacacatctataaaatgtaatgggattgcagagctgcagagtacagtgtaacagtactctcatgcaatttttttcaggatgcaaaggcaattattctttgtaagcgggacatttagaatatatttgtgtacatattatatgtatgtatatttcaaagtaccacactgaaaattagacatttattaaccaaatttaacgtggtatttaaaggtaatatttttaatatgatacattacatattgtgaatgtatactaaaaaaacattttaaatgttaaaattataatttcagattcatataaccacaactgtgatatatcctaactataaccagttgttgaggggtatactagaagcagaatgaaaccacattttttggtttgataatatgcacttattgactcccactcattgttatgttaattaagttattattctgtctccttgtaattttgattacaaaaattttattatcctgagttagctgttacttttacagtacctgatactcctaaaacttttaacttatac

SEQ ID NO: 217469 - DNA, 581 bp, Homo Sapiens; identical to SEQ ID NO: 41318

SEQ ID NO: 217470 - DNA, 583 bp, Homo Sapiens; identical to SEQ ID NO: 45336

SEQ ID NO: 217471 - DNA, 583 bp, Homo Sapiens
  misc_feature (557)..(557): n is a, c, g, or t
gtttccagatggctctaacctcagtggtcgtcacgctgtggtacagagcacccgaagtcttgctccagtccagctacgccacccccgtggatctctggagtgttggctgcatatttgcagaaatgtttcgtagaaagcctctttttcgtggaagttcggatgttgatcaactaggaaaaatcttggacgtgattggactcccaggagaagaagactggcctagagatgttgcccttcccaggcaggcttttcattcaaaatctgcccaaccaattgagaagtttgtaacagatatcgatgaactaggcaaagacctacttctgaagtgtttgacatttaacccagccaaaagaatatctgcctacagtgccctgtctcacccatacttccaggacctggaaaggtgcaaagaaaacctggattcccacctgccgcccagccagaacacctcggagctgaatacagcctgaggcctcagcagccgccttaagctgatcctgcggagaacacccttggtggcttatgggtccccctcagcaagccctaagagctgtggnaggattgctatctggaggccttccag

SEQ ID NO: 217472 - DNA, 582 bp, Homo Sapiens
cttcgtgtggaaccgcacgcgtggcatacggaaggaatcacgcagcagcacctctgtgaccccctgacggtgtccctgattgagaagtgcacccggtttcacatccactgtgcccacttcatgtgtgaggagcccatgtcctcctttgatgccaagatcaataatgagaacatgaccaagtgcctgcagagcctgaaggagatgtaccaggacctgagaaaccgggtgtcttctgtgccagcgaagcggagttccagggctacaatgttctgctcagtctcaacaagggagacatcctaagagaagtacaacagttccatcctgctgttagaaactcatctgaggtgaaatttgctgttcaggcttttgctgcattgaacagtaataattttgtgagatttttcaaactggtccagtcagcttcttacctgaacgcttgtcttttacactgttacttcagtcagatccgcagagatgctctccgggcgctcaactttgcgtacacggtgagcacacagcgatctaccatctttcccctggatggagcggtgcgcatgctgctgttcagagactgtgaagagg

SEQ ID NO: 217473 - DNA, 582 bp, Homo Sapiens; identical to SEQ ID NO: 46773

SEQ ID NO: 217474 - DNA, 570 bp, Homo Sapiens; identical to SEQ ID NO: 46070

SEQ ID NO: 217475 - DNA, 584 bp, Homo Sapiens; identical to SEQ ID NO: 42828
  misc_feature (551)..(551): n is a, c, g, or t
  misc_feature (557)..(557): n is a, c, g, or t

SEQ ID NO: 217476 - DNA, 583 bp, Homo Sapiens
ctgttaagtgccgtgctcggggaattggccccaagtcacgggctggtcagcgtgcatggaagaattgcctatgtgtctcagcagccctgggtgttctcgggaactctgaggagtaatattttatttgggaagaaatacgaaaaggaacgatatgaaaaagtcataaaggcttgtgctctgaaaaaggatttacagctgttggaggatggtgatctgactgtgataggagatcggggaaccacgctgagtggagggcagaaagcacgggtaaaccttgcaagagcagtgtatcaagatgctgacatctatctcctggacgatcctctcagtgcagtagatgcggaagttagcagacacttgttcgaactgtgtatttgtcaaattttgcatgagaagatcacaattttagtgactcatcagttgcagtacctcaaagctgcaagtcagattctgatattgaaagatggtaaaatggtgcagaaggggacttacactgagttcctaaaatctggtatagattttggctcccttttaaagaaggataatgaggaaagtgaacaacctccagttccaggaactccca

SEQ ID NO: 217477 - DNA, 581 bp, Homo Sapiens; identical to SEQ ID NO: 45173
  misc_feature (543)..(543): n is a, c, g, or t

SEQ ID NO: 217478 - DNA, 582 bp, Homo Sapiens
gttcaactgcagggcgtattcccggagggcagttggggagcgcagatcccgaagcagcgctgggagcgtaagtgcgggcagagcactgcgccgtttgggaacgcaactttgaggagacagtgcggtggacttcagtgaagttccttatgacttcccctgaaattgcttccttatcatgggggcaaatgaaagtaaaaggctctaatacaacctataaggactgcaaagtatggccagggggtagtcggacttgggattggagagaaacaggaactgagcattctcctggtgtgcagcctgcagatgtgaaggaagttgttgagaagggtgtacagactcttgtgattggccgagggatgagtgaggccttgaagggtcttactctgccacccaggctggagtgcagtggcacgatcataactcactgaagcctcaaactcctgggcgcaagtgatcttcctgcctcagcctcctgaggagtggggattacaggcacgtgccaccacgccaggagctggactgagcatcaaacatgtctgtgagctggcaatgagtcacctaagtacttttttgtatcaaatc

SEQ ID NO: 217479 - DNA, 582 bp, Homo Sapiens; identical to SEQ ID NO: 42096

SEQ ID NO: 217480 - DNA, 581 bp, Homo Sapiens; identical to SEQ ID NO: 51847

SEQ ID NO: 217481 - DNA, 581 bp, Homo Sapiens; identical to SEQ ID NO: 54736

SEQ ID NO: 217482 - DNA, 583 bp, Homo Sapiens; identical to SEQ ID NO: 55107

SEQ ID NO: 217483 - DNA, 582 bp, Homo Sapiens
atgtgcggccttcgttccctcgctatctcgaccttgacttcgcatgtgcatccgccgaagtctttctagatcaatcggccccatctctcgtcttcccgattcggccatgacctcacccgtatcctcgacgtaggacctcggacttcatttccgccaccccgacacttccggaatccccggaagcgacccgttgccatggcgactatgtacacagccaggcagccccgcgtggggagtgcaggtggtttcggttgcggcagtcgcgtcccgggagcgtcgctgcctggtgaacgctagaatgggtactaggaaaaaagttcatgcatttgtccgtgtcaaacccaccgatgactttgctcatgaaatgatcagatacggagatgacaaaagaagcattgatattcacttaaaaaaagacattcggagaggagttgtcaataaccaacagacagactggtcgtttaagttggatggagttcttcacgatgcctcccaggacttggtttatgagacagttgcaaaggatgtggtttctcaggccctcgatggctataatggcaccatcatgtgttatgggcagac

SEQ ID NO: 217484 - DNA, 557 bp, Homo Sapiens
  misc_feature (551)..(553): n is a, c, g, or t
tttttaaaaagctgtgcagtgtgatgtgtcccaaacggactggctcatgggtggccacgtcacaacctctgatctcagaccgtgcatgccttgtcctcttaagacaactcctgtggcaccgtttctccctccacagggccaaagccatagtgtccggtcccaaggacaaggctcttccagtgctaggagaggtatgagcagcctctcacctgtgagctgtggggatcacaaggctgcctgcctcagtcttggagtcctgttgggtgaatgaggcagatgggaaagagcctcaccagcagctgcttttggagcaggggtccaaggaagagagggtggcctcgacatcaaactgcctggatttttctaccaccctgttacatcataacaacttctgaaacacacaccagccctgagttctgggctcatttgaagcctggaatagcaataaatctttttaacttgcggacaaaaaaaaaaaaaaaagggccacttttccttcaacctgaaggtcggggcccttaaattagtttaaaaaaacctcccccacaatnnncttg

SEQ ID NO: 217485 - DNA, 582 bp, Homo Sapiens; identical to SEQ ID NO: 49717

SEQ ID NO: 217486 - DNA, 582 bp, Homo Sapiens; identical to SEQ ID NO: 52426

SEQ ID NO: 217487 - DNA, 579 bp, Homo Sapiens; identical to SEQ ID NO: 54188

SEQ ID NO: 217488 - DNA, 575 bp, Homo Sapiens; identical to SEQ ID NO: 54042

SEQ ID NO: 217489 - DNA, 583 bp, Homo Sapiens; identical to SEQ ID NO: 53535

SEQ ID NO: 217490 - DNA, 556 bp, Homo Sapiens; identical to SEQ ID NO: 41971

SEQ ID NO: 217491 - DNA, 579 bp, Homo Sapiens
  misc_feature (526)..(526): n is a, c, g, or t
cagattcagtggttctaccaggccctgaacctctccctgcccctccccaatttccatgctgggacggagcctgatggcctggaccccatggtcacactgtccctgaacctgggcttgtcttttgctgagctgcgccgcatgtacttgttcctcaatagttcaggacttttggttcttccccaggctggactcttgacacctcacccttcctgaattccacagtgcaaatatctttctgtaacaccctcagcatcctgcactgccctctctgaaaacacccacattctttggtcactgtgatttcttaggcctccgtctgttgtaccactagcatctatatgacttttgtgtaattttctctcttgaactctggtgctgtttttttgtttgtttgagacaggagagtcgcttgagcccgggaggcggaggttgcagtgagccgagatcgcgccactgcactccagcctgggtgacacagtgagactccgtctccaaaaaaaaggatgaagaatagaattctgtgcanatgtcctgacttggcaattttgtgtccctgcctcactgtcttcaccaaccccc

SEQ ID NO: 217492 - DNA, 573 bp, Homo Sapiens
gtgtccccgactaccacaagcagtacgccccgaggtgctccgtctgctctgagcccatcatgcctgagcctggccgagatgagactgtgcgagtggtcgccctggacaagaacttccacatgaagtgttacaagtgtgaggactgcgggaagcccctgtcgattgaggcagatgacaatggctgcttccccctggacggtcacgtgctctgtcggaagtgccacactgctagagcccagacctgagtgaggacaggccctcttcagaccgcagtccatgccccattgtggaccacccacactgagaccacctgcccccacctcagttattgttttgatgtctagcccctcccatttccaacccctccctagcatcccaggtgccctgacccaggacccaacatggtctagggatgcaggatccccgccctggggtctggtcctcgcccatcctgcagggattgcccaccgtcttccagacaccccacctgaggggggcaccaggtttagtgctgctgctttcactgctgcacccgcgccctcggccggccccccgagcagcctttgtactctg

SEQ ID NO: 217493 - DNA, 582 bp, Homo Sapiens; identical to SEQ ID NO: 48887

SEQ ID NO: 217494 - DNA, 446 bp, Homo Sapiens
ctcttcccttttgcggccatcaccgaagcgggagcggccaaaatgaagtttaatccctttgtgacttccgaccgaagcaagaatcgcaaaaggcatttcaatgcaccttcccacattcgagggaagattatgtcttcccctctttccaaagagctgagacagaagtacaacgtgcgatccatgcccatccgaaaggatgatgaagttcaggttgtacgtggacactataaaggtcagcaaattggcaaagtagtccaggtttacaggaagaaatatgttatctacattgaacgggtgcagcgggaaaaggctaatggcacaactgtccacgtaggcattcaccccagcaaggtggttatcactaggctaaaactggacaaagaccgcaaaaagatcctcgaacggaaagccaaatctcgccaagtaggaaaggaaaaaggccacat

SEQ ID NO: 217495 - DNA, 583 bp, Homo Sapiens; identical to SEQ ID NO: 45016

SEQ ID NO: 217496 - DNA, 582 bp, Homo Sapiens; identical to SEQ ID NO: 40161

SEQ ID NO: 217497 - DNA, 582 bp, Homo Sapiens
gtttcaaggtatatggtgctacctatctacaaaaactcctggatcctttattacgaattgtgatcacatcctctgattggcaacatgttagctttgaagtggatcctaccaggttagaaccatcagagagccttgaggaaaaccagcggaacctccttcagatgactgaaaagttcttccatgccatcatcagttcctcctcagaattcccccctcaacttcgaagtgtgtgccactgtttataccaggtggttagccagcgtttccctcagaacagcatcggtgcagtaggaagtgccatgttcctcagatttatcaatcctgccattgtctcaccgtatgaagcagggattttagataaaaagccaccacctagaatcgaaaggggcttgaagttaatgtcaaagatacttcagagtattgccaatcatgttctcttcacaaaagaagaacatatgcggcctttcaatgattttgtgaaaagcaactttgatgcagcacgcaggtttttccttgatatagcatctgattgtcctacaagtgatgcagtaaatcatagtctttccttcataagtgacgggc

SEQ ID NO: 217498 - DNA, 582 bp, Homo Sapiens; identical to SEQ ID NO: 49332
  misc_feature (534)..(534): n is a, c, g, or t
  misc_feature (550)..(550): n is a, c, g, or t

SEQ ID NO: 217499 - DNA, 583 bp, Homo Sapiens; identical to SEQ ID NO: 49856
  misc_feature (565)..(565): n is a, c, g, or t

SEQ ID NO: 217500 - DNA, 593 bp, Homo Sapiens; identical to SEQ ID NO: 47007

SEQ ID NO: 217501 - DNA, 611 bp, Homo Sapiens
  misc_feature (574)..(574): n is a, c, g, or t
agcagccacacctctgcagagagaatggccagcaggaaggcggggacccggggcaaggtggcagccaccaagcaggcccaacgtggttcttccaacgtcttttccatgtttgaacaagcccagatacaggagttcaaagaagccttcagctgtatcgaccagaatcgtgatggcatcatctgcaaggcagacctgagggagacctactcccagctggggaaggtgagtgtcccagaggaggagctggacgccatgctgcaagagggcaagggccccatcaacttcaccgtcttcctcacgctctttggggagaagctcaatgggacagaccccgaggaagccatcctgagtgccttccgcatgtttgaccccagcggcaaaggggtggtgaacaaggatgagttcaagcagcttctcctgacccaggcagacaagttctctccagctgaggtggagcagatgttcgccctgacacccatggacctggcggggaacatcgactacaagtcactgtgctacatcatcacccatggagacgagaaagaggaatgaggggcagggccaggcccacggnggggcacctcaataaactctgttgcaaaattggaaaa

SEQ ID NO: 217502 - DNA, 578 bp, Homo Sapiens
agatcgcttgcagcttgctagctgtgtgggctgggaggtctggtagggctgagcttgcaagaggatcaacatgcctttggctagagatttactacatccgtccttggaagaggaaaagaaaaaacataaaaagaaacgcctagtacaaagtccaaattcttactttatggatgtaaaatgtccaggttgctacaagatcaccacggttttcagccatgctcagacagtggttctttgtgtaggttgttcaacagtgttgtgccagcctacaggaggaaaggccagactcacagaagggtgttcatttagaagaaagcaacactaatgattcaaacagcttcctgaattttgtgttgtctcacagaaagccttatcataaattccataattctaattaatttaccaagataatgtaattacatttggttttgtaaggtatacagcagtaatctcctattttggtgtcagtttttcaataaagttttgattatgggcaaaaaaaaaaaaaaaaagggccacatgtgctcaacctgaaggtcggggccgttaaactattctaaagaacctctcccccccaa

SEQ ID NO: 217503 - DNA, 583 bp, Homo Sapiens; identical to SEQ ID NO: 52540
  misc_feature (571)..(571): n is a, c, g, or t

SEQ ID NO: 217504 - DNA, 583 bp, Homo Sapiens; identical to SEQ ID NO: 40152

SEQ ID NO: 217505 - DNA, 587 bp, Homo Sapiens
aagcggcgcggctctcaacgtgacggggaagtggttcgggcggccgcggcttactaccccagggcgaacggacggacgacggaggcgggagccggtagccgagccgggcgacctagagaacgagcgggtcaggctcagcgtcggccactctgtcggtccgctgaatgaagtgcccgcccctctgagcccggagcccggcgctttccccgcaagatggacggtttcgccggcagtctcgatgatagtatttctgctgcaagtacttctgatgttcaagatcgcctgtcagctcttgagtcacgagttcagcaacaagaagatgaaatcactgtgctaaaggcggctttggctgatgttttgaggcgtcttgcaatctctgaagatcatgtggcctcagtgaaaaaatcagtctcaagtaaaggccaaccaagccctcgagcagttattcccatgtcctgtataaccaatggaagtggtgcaaacagaaaaccaagtcataccagtgctgtctcaattgcaggaaaagaaactctttcatctgctgctaaaagtggtacagaaaaaaagaaagaaaaaccacaaggaca

SEQ ID NO: 217506 - DNA, 583 bp, Homo Sapiens
ctgtgggtctcagccctgagctgttctttctccttgccagcttcttccctttcttctctggtgccccaagtcagaaccagctacaattttggaaggactttcctcggtcttgataaatgcaatgcctgcatcgggacatctatttgcaagaagttctttaaagaagaaataagatctgacaactggctggcttcccaccttggactgcctcccgattccttgctttcttatcctgcaaattactcagatgattccaaaatctggcgccctgtggagatctttagactggtcagcaaatatcaaaacgagatctcagacaggaaaatctgtgcctctgcatcagccccaaagacctgcagcattgagcgtgtcctgcggaaaacagagaggttccagaaatggctgcaggccaagcgcctcacgccggacctggtgcaggactgtcaccagggccagagagaactaaagttcctgtgtatgctgagataacaccagtgaaaaagcctggcatggagcccagcactgagaacttccagaaagtgttagccttctcccaactgtgttataccaaccacattttcaa

SEQ ID NO: 217507 - DNA, 581 bp, Homo Sapiens; identical to SEQ ID NO: 48321

SEQ ID NO: 217508 - DNA, 564 bp, Homo Sapiens; identical to SEQ ID NO: 41443

SEQ ID NO: 217509 - DNA, 580 bp, Homo Sapiens; identical to SEQ ID NO: 49366

SEQ ID NO: 217510 - DNA, 582 bp, Homo Sapiens; identical to SEQ ID NO: 50122

SEQ ID NO: 217511 - DNA, 587 bp, Homo Sapiens; identical to SEQ ID NO: 52033

SEQ ID NO: 217512 - DNA, 582 bp, Homo Sapiens; identical to SEQ ID NO: 45533

SEQ ID NO: 217513 - DNA, 545 bp, Homo Sapiens
  misc_feature (542)..(542): n is a, c, g, or t
aacgatgaaagcaggaaactcttctctgacttggggagttcctacgcaaaacaactgggcttccgggacagctgggtcttcataggagccaaagacctcaggggtaaaagcccctttgagcagttcttaaagaacagcccagacacaaacaaatacgagggatggccagagctgctggagatggagggctgcatgcccccgaagccattttagggtggctgtggctcttcctcagccaggggcctgaagaagctcctgcctgacttaggagtcagagcccggcaggggctgaggaggaggagcagggggtgctgcgtggaaggtgctgcaggtccttgcacgctgtgtcgcgcctctcctcctcggaaacagaaccctcccacagcacatcctacccggaagaccagcctcagagggtccttctggaaccagctgtctgtggagagaatggggtgctttcgtcagggactgctgacggctggtcctgaggaaggacaaactgcccagacttgagcccaattaaattttatttttgctggtanaaa

SEQ ID NO: 217514 - DNA, 574 bp, Homo Sapiens
attctccccaccgccaggatggtggtcatggcgccccgaaccctcttcctgctgctctcgggggccctgaccctgaccgagacctgggcgggctcccactccatgaggtatttcagcgccgccgtgtcccggcccggccgcggggagccccgcttcatcgccatgggctacgtggacgacacgcagttcgtgcggttcgacagcgactcggcgtgtccgaggatggagccgcgggcgccgtgggtggagcaggaggggccggagtattgggaagaggagacacggaacaccaaggcccacgcacagactgacagaatgaacctgcagaccctgcgcggctactacaaccagagcgaggccagttctcacacccctccatggatgattggctgcgacctggggtccgacggacgccctcctccgcgggtatgaacagtatgccctaccatggaaggattacctcgccctgaacgaggacctgcgctcctggaccgagcggacactgcggctcagatctccagcgccagggtgagggcggccatgggggctgaacaaaggaaagcctacctggagg

SEQ ID NO: 217515 - DNA, 582 bp, Homo Sapiens; identical to SEQ ID NO: 40762
  misc_feature (439)..(439): n is a, c, g, or t
  misc_feature (561)..(561): n is a, c, g, or t

SEQ ID NO: 217516 - DNA, 593 bp, Homo Sapiens
  misc_feature (591)..(592): n is a, c, g, or t
gtagaagacgatgatagcagcctggcttcccaagtcgatgaaacgcaacagcagttcatcttccagcagcctgaggcccccatggagggcttccagctataatatctgcctccagggaggggaggggatgggaagcaccaccagccagcggaagagcagccctctggtgggcgggaaaccagtgtccccaccatcagccaccacacacctctgctgccctggagactgtgctcttgacctgctccgcccccttccctggagggagcaccctctggacagacagaaccatctgaggctcacctttgggttttgtgacaagaaggggacgtgttgggtttttcttccttacactatattttggctgcacacatgtctttaacccaggagcccaggggtagacaaaggaggactaaggtaatcaatttgcacctttttttatttttattttttttctttttttcttcagtggtgacttccttccctttatcttttttcattcttcccggtcctctgccctgatctgtgtaactcttatcttgggtacttgagcagacggtatattccagaggtgggaggtgggaagggaaaggnng

SEQ ID NO: 217517 - DNA, 585 bp, Homo Sapiens; identical to SEQ ID NO: 51451

SEQ ID NO: 217518 - DNA, 574 bp, Homo Sapiens
  misc_feature (565)..(567): n is a, c, g, or t
  misc_feature (570)..(570): n is a, c, g, or t
  misc_feature (572)..(573): n is a, c, g, or t
atctcttgaagcttcacttcaacttcactacttctgtagtctcatcttgagtaaaagagaacccagccaactatgaagttccttgtctttgccttcatcttggctctcatggtttccatgattggagctgattcatctgaagagaaatttttgcgtagaattggaagattcggttatgggtatggcccttatcagccagttccagaacaaccactatacccacaaccataccaaccacaataccaacaatataccttttaatatcatcagtaactgcaggacatgattattgaggcttgattggcaaatacgacttctacatccatattctcatctttcataccatatcacactactaccactttttgaagaatcatcaaagagcaatgcaaatgaaaaacactataatttactgtatactctttgtttcaggatacttgccttttcaattgtcacttgatgatataattgcaatttaaactgttaagctgtgttcagtactgtttctgaataatagaaatcacttctctaaaagcaataaatttcaagcacatttttacatgtnnnaananna

SEQ ID NO: 217519 - DNA, 581 bp, Homo Sapiens
  misc_feature (13)..(13): n is a, c, g, or t
attgtggcccagnacacacctgtcacgtggctcgtgggaccctttgcccctggaacactgagaaagccccggaggactcagcgggccccgtctctataatgcagctgtgctctggagtcctcaacccggggctcatttcaaacttattttctagccactcctcccagctcttctgtgctgtccacttgggaagctaaggctctcaaaacgggcatcacccagttgacccatctctcagcctctctgagcttggaagaagcctgttctgagcctcaccctatcagtcagtagagagagatgtccagaaaaaatatctttcaggaaagttctcccctgcagaattttttttccttgttaaatatcaggaatataggccgggtgcggtggctcacacctgtaatcccagcactttgggaggctgaggcgggcggaacacctgaggtcaggtgttcgagaccagccaggccaacatggtgaaaccccgtctctactaaaaatacaaaaaaaaaatgagccgggcatggtagcaggttgtctgttatcccagttaggaggctgaggcaagagaatctcttgaacct

SEQ ID NO: 217520 - DNA, 582 bp, Homo Sapiens; identical to SEQ ID NO: 54263

SEQ ID NO: 217521 - DNA, 580 bp, Homo Sapiens
tttggatggcagtagtagcagcagtggcttatcctcagacccgctggctaaaggcagcgctaccgcagagtctccagtagcatgctccaattcatgctcttcgttcatcttgatggatgatctctcacccaagtgacttaaccatttctgattcaacgttttaactgctgtttcctacataaaatgtttagtggggaacgcagagaactttgatccataatgaggattaaagttttacagatttcacacattctgatgctattattactctttggcatctctcttctccaaagttcaattttgtgagcctagtgaccttactagtatctggttttgctgatctcattttggatttagtgattaaatctcaaatgctgatttttgattgcttagaggaatcttttttcttagtgcctcaaaaaacacctattttgagtctatacatttaagaaaggcactgatgtgtattgcctttaatggtccttttccgcagcagtgatatgacagatttgatcagaaattctcttgcttgagagatttttttttgtcctctgttgactacatagtttcaaatctctct

SEQ ID NO: 217522 - DNA, 582 bp, Homo Sapiens
  misc_feature (11)..(11): n is a, c, g, or t
ggaagctgagnagatttccaagaacaagaaccctagtatttcttgaagttaatggaaacttttctttggcttttccagttgtgacccgttttccaaccagttctgcagcatattagattctagacaagcaacacccctctggagccagcacagtgctcctccatatcaccagtcatacacagcctcattattaaggtcttatttaatttcagagtgtaaattttttcaagtgctcattaggttttataaacaagaagctacatttttgcccttaagacactacttacagtgttatgacttgtatacacatatattggtatcaaaaaggataaaagccaatttgtctgttacatttcctttcacgtatttcttttagcagcacttctgctactaaagttaatgtgtttactctctttccttcccacattctcaattaaaaggtgagctaagcctcctcggtgtttctgattaacagtaaatcctaaattcaaactgttaaatgacatttttatttttatgtctctccttaactatgagacacatcttgttttactgaatttctttcaatattccaggtgatag

SEQ ID NO: 217523 - DNA, 581 bp, Homo Sapiens
aacttatttaagacatttatgagacatattaacttgtgctgtcgccttttagaaggagaaacttaagtgtggaatgcattatatgggcaaagaagctatgaagatacatgatacactttgtacaactatcctgcagcccattggttgcttatatttatcgcttggctcaagttctgccctttggagaaatactgagcaagtctttcattctctgtgtgacagccctctgaatatttgaagttgtttgttgtaacttaaggttataacagcccttagttcatttactctgcatttgttcaataaatatttaactgaattcttcaattatttcatctaagatagtttctggaaatttcactctcgatctttctgtggacacaatctattttgtcattgtgtctatatgaatctcttaagtagaaatgagttgtatggtgaatctgtgtagtgataattatataatttatttattttgaatgcattttagtggctatttcagtttttcttaacatatatgggaatactttttgaattgcaattttatttaacccggataggtaagtcatattaaaattccttgt

SEQ ID NO: 217524 - DNA, 583 bp, Homo Sapiens
gtttaatcagcttcctgttgagctaaaagggaagtagagatgaaaggtgtgtggagcatgccatcaaaatactctgaagaaggagtttataacgttcagtacagtttcattaaagaagctgaacatcactgcttgttacatagcccaattcctgtgaactgccccataagattgctccatggcatgaaggatgacattgtaccttggcatacatcaatgcaggttgccgatcgagtactcagcacagatgtggatgtcatcctccgaaaacacagtgatcaccgaatgagggaaaaagcagacattcaacttcttgtttacactattgatgacttaattgataagctctcaactatagttaactagtatcacatgtttagttggtatgtaaactaatgtatccagaagattggaagagggataagaaatgaaagatcctgatactttaggtttttccctttcctctattttgtaaatatcagatgagtattatttaatgatgtatttgcataagtaatgcaaattgtgaagaaggaccagctgctgtttagaaaattttctccttccttctgtccttgatttt

SEQ ID NO: 217525 - DNA, 582 bp, Homo Sapiens; identical to SEQ ID NO: 47399

SEQ ID NO: 217526 - DNA, 579 bp, Homo Sapiens
ggtgctcggggcgctcggggcgacgcggcgcttgttggcggcgctgcgaggccagagcctagggctagcggccatgtcatcaggtactcacaggttgactgcagaggagaggaaccaagctatacttgaccttaaagcagcaggatggtcggaattaagtgagagagatgccatctacaaagaattctccttccacaattttaatcaggcatttggctttatgtcccgagttgccctacaagcagagaagatgaatcatcacccagaatggttcaatgtatacaacaaggtccagataactctcacctcacatgactgtggtgaactgaccaaaaaagatgtgaagctggccaagtttattgaaaaagcagctgcttctgtgtgatttcttccaaaatacatgtaaaatcttgtacacatcttagctgcaatgtatgttgaaggaaatttatgtgaacaaatagagttgttctttttctcttttttttaagacagagtgttgctctgtcgcccaggccagagtgcagtggtatgatctcggctcactgtaacctccgcctcccaggttcaggtgattct

SEQ ID NO: 217527 - DNA, 587 bp, Homo Sapiens; identical to SEQ ID NO: 41240

SEQ ID NO: 217528 - DNA, 584 bp, Homo Sapiens; identical to SEQ ID NO: 48529

SEQ ID NO: 217529 - DNA, 581 bp, Homo Sapiens; identical to SEQ ID NO: 49687

SEQ ID NO: 217530 - DNA, 581 bp, Homo Sapiens
  misc_feature (19)..(19): n is a, c, g, or t
  misc_feature (513)..(515): n is a, c, g, or t
taaaatttgccaacaaggnaaatttccaatatgagaattttttcaattacgttacaaatattgatatgctggaggaatttgcctacttgagaactcaggaaggtgggaaaattcatctggaattactacccaatcaaggaatgctgatcaagcaccacactgtaactcgaggcatcaccaaaggcgtgaaggaggactttcgcctggccatggagcgccaggtctcccgctgtggagagaatctgatggtggttctgcacaggttctgcattaatgagaagatcttgctccttcagactctgacctgagtggagacctttccaccagacacagctcgggcctgtgtaattgtaggagaagacactcagcagtgattgccatggcacagagccgtggtcattgttgctgttacaaagaagaaaaccatctgagttctaactccttggttgcttaaaagtagttcccaagagtctgagaagctatttctatttttaagagtcattttttgtaatnnngggaaaacaaaagtaccaatctgtttttgtaaataaaaatcattctaaaatttgaaaaaaaaaaaa

SEQ ID NO: 217531 - DNA, 583 bp, Homo Sapiens; identical to SEQ ID NO: 51967

SEQ ID NO: 217532 - DNA, 585 bp, Homo Sapiens
  misc_feature (482)..(482): n is a, c, g, or t
  misc_feature (540)..(540): n is a, c, g, or t
acaggagtgagggcataccagtgtagtatctgcaacaagcgcttcacccagaagagctccctcaacgtgcacatgcgcctccaccggggagagaagtcctacgagtgctacatctgcaaaaagaagttctctcacaagaccctcctggagcgacacgtggccctgcacagtgccagcaatgggaccccccctgcaggcacacccccaggtgcccgcgctggccccccaggcgtggtggcctgcacggaggggaccacttacgtctgctccgtctgcccagcaaagtttgaccaaatcgagcagttcaacgaccacatgaggatgcatgtgtctgacggataagtagtatctttctctctttcttatgaacaaaacaaaacaacaacaaaaaacaaacaaacaaaaaagctatggcactagaatttaagaaatgttttggtttcatttttactttctgtttttgtttttgtttcgtttcattntgtactacatgaagaactgttttttgcctgctggtacattacatttccggaggcttgngtgaataatagttttcccagtctccctcgaatgggggccacatgt

SEQ ID NO: 217533 - DNA, 584 bp, Homo Sapiens
ctctcagccgactcctccagccaggcttttataggagaggaggtcctggaagtgaagacagagtccctgtccccttcaggatgcctcctgtgggatgtcccagccccctcacttggagctgtccagatcagcatgggcccatcccttgatggctcctcaggcaaagccctgcccacccggaagccgccactgcagcccaaacctgtagtgctaaccactgtcccaatgccatccagagctgtgcctcccagcaccacagtccttctgcagtccctcgtccagccacccccagtgtccccagttgtcctcatccagggtgctattcgagtccagcctgaagggccggctccctctctaccacggcctgagaggaagagcatcgttcccgctcctatgcctggaaactactgcccgcctgaagtggatgcaaagctgctgaagcggcagcagcgaatgatcaagaaccgggagtccgcctggcagtccggagaaagaaagaagagtatcctgcgggactggaggctccgctgcaagcaatactgggtgaccaccaaccagtcccgcgaaagaatgctggcctcccg

SEQ ID NO: 217534 - DNA, 585 bp, Homo Sapiens
gtttaaatgaaagaaattgagttgcacttattgaccattttttaatttacttgttttggatggcttgtctatactccttcccttaaggggtatcatgtatggtgataggtatctagagcttaatgctacatgtgagtgacgatgatgtacagattctttcagttctttggattctaaatacatgccacatcaaacctttgagtagatccatttccattgcttattatgtaggtaagactgtacatatgtattcttttctcagtgttggtatattttatattactgacatttcttctagtgatgatggttcacgttggggtgatttaatccagttatagaaagaagttcatgtccaaacgtcctctttagtttttggttgggaatgaggaaaattcttaaaaggcccatagcagccagttcaaaaacacccgacgtcatgtatttgagcatatcagtaacccccttaaatttaataccagataccttatcttacaatattgattgggaaaacatttgctgccattacagaggtattaaaactaaatttcactactagattgactaactcaaatacacatttgctac

SEQ ID NO: 217535 - DNA, 427 bp, Homo Sapiens
tttttcattttgccaaaaagggtatgtctttatcaaaggagagtcacagaacaaatgtttgtttgtaaagcgttccaagtattttgccacgttctggactgtcttctccctgcacaagccagggtgtgtctcggtagctgtgcgtggtgtggagtgtgtgtctttcctccctgaagctgtgcggagcgaactggcgcctccgagggacgcggctcccggggcagggcagccgtcacccctgcctcccgcccccttggctgggacgtctggggtcctgtggggcccccacaatggtcccaaacagctgcctctgccactgactgcagggacacgggcagcctggctcccaggacacgacttgtaatgaaagtttggggacatgtgattgattgattgattgattgtaaataaagaataatggccacat

SEQ ID NO: 217536 - DNA, 587 bp, Homo Sapiens
gaggtggacatggcgtgcggctttcgccgcgctattgcttgccaggtatggatcccggagcgcgcagaggagtccctgaggagctagggaccccaaaggcctttcaccgctgcgggccagtcctcagtcagctggagggtgggtcccacggaatcctgttagtttctaccacctcctcccccttctctggagctggtggagcttcagaagtcctgtggagcgtcggctgggatcagtttgtctcggtgaaaagtaaactttgaaagctttccagagtgttgaatcttccaccagaaaacttgatcacatcaatatctgcagttccaatttcccaaaaagaagaagtagctgattttcagctttctgtggattctttattggaaaaagacaatgaccattcaagaccagatattcaagttcaagccaagagactagcagagaagctaagatgtgatacagtggtgagtgaaatcagtactggtcaaaggactgtaaatttcaaaataaacagagagctcttaacaaagacagtgctacaacaagtaattgaagatggctcaaaatatggattaaaaagtgaacttttc

SEQ ID NO: 217537 - DNA, 582 bp, Homo Sapiens; identical to SEQ ID NO: 49488

SEQ ID NO: 217538 - DNA, 582 bp, Homo Sapiens; identical to SEQ ID NO: 43209
  misc_feature (367)..(367): n is a, c, g, or t
  misc_feature (471)..(471): n is a, c, g, or t
  misc_feature (564)..(564): n is a, c, g, or t
  misc_feature (568)..(568): n is a, c, g, or t

SEQ ID NO: 217539 - DNA, 582 bp, Homo Sapiens
aaccgttcctgccgccgagtccgccacggacggcgcgtttcccgcctgaggcggttacggaaacgcggagactcgagacttgaagccagcttattctggacccacgcaggcgactgaagacgatgggacccactgccctgcattcgagaaacctgatgtaaagcaaaagtccagcaggaagaaagtggtcgttccacagatcatcatcacgcgagcgtcgaatgagacgctagtcagttgcagttccagcgggagtgaccagcagagaaccattcgggagccggaggactggggcccctaccggcggcacaggaaccccagtacagcagacgcctataattcacatctcaaagaataaacaagcacctatgagtgagaacatgcggtgtttggtttattttacttgcgatagtttgctgagaatgatggtttccagcttcacccatgtccctgcaaaggacatgaactcatccttttttatggctgcatagtattccatggtgtatatgtgccacatttgcttaatccagtctatcactgatgggcatttgggttggttctaagtctttgctattgtgaata

SEQ ID NO: 217540 - DNA, 582 bp, Homo Sapiens
  misc_feature (477)..(477): n is a, c, g, or t
gaaccttttttcacctcgtctgaaatggctgcctcccagtgtctctgctgctcaaaatttctcttccagagacagaacctcgcctgtttcctcacaaacccacactgtggcagccttgttaatgcagatggccatggtgaagtgtggacagattggaataatatgtccaagtttttccagtatggatggcgatgcaccactaatgagaatacctattcaaaccgtaccctgatgggcaactggaaccaggaaagatatgacctgaggaatatcgtgcagcccaaacccttgccttcccagtttggacactactttgaaacaacatatgatacaagctacaacaacaaaatgccactttcaacacatagatttaagcgagagcctcactggttcccaggacatcaacctgaactggatcctccccgatacaaatgcacagaaaagtccacttacatgaatagctatccaaagccttanattgggcatcactcaggatgtgtataagatcttaatattgactagtttcacatccaggtttctaagaaatgataagatacttcacttttccagagtgaaatgtag

SEQ ID NO: 217541 - DNA, 581 bp, Homo Sapiens
gaaccttttttcacctcgtctgaatggctgcctcccagagtctctgctgctcaaaatttctcttccagagacagaacctcgcctgtttcctcacaaacccacactgtggcagccttgttaatgcagatggccatggtgaagtgtggacagattggaataatatgtccaagtttttccagtatggatggcgatgcaccactaatgagaatacctattcaaaccgtaccctgatgggcaactggaaccaggaaagatatgacctgaggaatatcgtgcagcccaaacccttgccttcccagtttggacactactttgaaacaacatatgatacaagctacaacaacaaaatgccactttcaacacatagatttaagcgagagcctcactggttcccaggacatcaacctgaactggatcctccccgatacaaatgcacagaaaagtccacttacatgaatagctatcccaagccttaaattgggcatcactcaggatgtgtataagatcttaatattgactagtttcacatccaggtttttaagaaatgataagaaactttcactcttccagagtgaaatgta

SEQ ID NO: 217542 - DNA, 582 bp, Homo Sapiens; identical to SEQ ID NO: 51834

SEQ ID NO: 217543 - DNA, 589 bp, Homo Sapiens
  misc_feature (574)..(574): n is a, c, g, or t
ttcacttctgtctgttgaggcatcaaaaaaacaagtttagaaagctggcaacatgaagaatgcattcaaaatataacaggtgcttctttgttgtacgcagaggaattttttcttttgattttgtttactgaaatttgttatacttcaaaagccataacttgaaaaatactggtggcgtcgatggtgagtgatttttatcccacgtgggccttttgctcagttccatggcaattttgtaaattgaccctagccagagaatagatcagtatttcactgataccacgaggaaaagaacaaacaaaacttaaaagtattcatacaccttgctaacctaaaagacagcagggacaagatacatatgaggacaaggtatacacccagttctgaataacttgaagaacaggcttggcaaagaagtaagtttatccaaatcttgaatttctgccaggcatggtagctcatgcctgtaaccctggcacttaaggggccaaggcaggaggatcacttgaggccagtgagctgtgatcactccagtgcactcgagcctgggtgacagggcaagaccctgtctcanaaaaaaaaaaaaaaa

SEQ ID NO: 217544 - DNA, 583 bp, Homo Sapiens; identical to SEQ ID NO: 45771
  misc_feature (461)..(461): n is a, c, g, or t

SEQ ID NO: 217545 - DNA, 583 bp, Homo Sapiens
ttaaaactttaatcccacttgcccctgttacctaattagagcagatgacccctcccctaatgcctgcggagttgtgcacgtagtagggtcaggccacggcagcctaccggcaatttccggccaacagttaaatgagaacatgaaaacagaaaacggttaaaactgtccctttctgtgtgaagatcacgttccttcccccgcaatgtgcccccagacgcacgtgggtcttcagggggccaggtgcacagacgtccctccacgttcacccctccacccttggactttcttttcgccgtggctgcggcacccttgcgcttttgctggtcactgccatggaggcacacagctgcagagacagagaggacgtgggcggcagagaggactgttgacatccaagcttcctttgtttttttttcctgtccttctctcacctcctaaagtagacttcatttttcctaacaggattagacagtcaaggagtggcttactacatgtgggagcttttggtatgtgacatgcgggctgggcagctgttagagtccaacgtggggcagcacagagagggggccacctccccaggccg

SEQ ID NO: 217546 - DNA, 582 bp, Homo Sapiens; identical to SEQ ID NO: 42215

SEQ ID NO: 217547 - DNA, 582 bp, Homo Sapiens
  misc_feature (578)..(578): n is a, c, g, or t
  misc_feature (580)..(580): n is a, c, g, or t
cgctacaagttctacctgcctcccaccttcacgctcacgctgctggtgccctgcgtcgtcatcctggccaaagccctgtttctcctgccctgcatcagccgcagactcgccaggatccggagaggctgggagagggagagcaccatcaagttcacgctgcccacagaccacgccctggccgagaagacgagccacgtatgaggtgcctgccctgggctctggaccccgggcacacgagggacggtgccctgagcccgttaggttttcttttcttggtggtgcaaagtggtataactgtgtgcaaataggaggtttgaggtccaaattcctgggactcaaatgtatgcagtactattcagaatgatatacacacatatgtgtatatgtatttacatatattccacatatataacaggatttgcaattatacatagctagctaaaaagttgggtctctgagatttcaacttgtagatttaaaaacaagtgccgtacgttaagagaagagcagatcatgctattgtgacatttgcagagatatacacacactttttgtacagaagaggcttgtgctgtggntngg

SEQ ID NO: 217548 - DNA, 584 bp, Homo Sapiens
  misc_feature (422)..(422): n is a, c, g, or t
  misc_feature (557)..(557): n is a, c, g, or t
gttgcttcacctttccttccatatcttgctctcatgctttctaacgcctaagcagaatgtatcatcagagcgccgaggagagtgggaaattcagcccagccggcagaccaatacctcatacctaacgtctcacttggctgcagaccgccatgggggatcagtgcaggtggttagctcaaccaatggagagctgaatgttgatgatcccacgggagcccactccaatgcaccaatcacagctcatgccgaggtggaggtagtggaggaagctaagtgctgctgtttctttaagaggaaaaggaagaagactgctcagcgccacaagtgaccagtgcctcccaggagtcctcaggccctggggactctgactcaattgtacctgcagctcctgccatttctcattggaagggactcctctttgnggggagggtggatatccaaaccaaaaagaagaaaacagatgcccccagaaggggccagtgcgggcagccagggcctagtgggtcattggccatctccgcctgcctaaggctctgagcaggtcccagagctgctgntcctccactgcttgcccatagggctgc

SEQ ID NO: 217549 - DNA, 583 bp, Homo Sapiens; identical to SEQ ID NO: 50196
  misc_feature (6)..(6): n is a, c, g, or t
  misc_feature (64)..(64): n is a, c, g, or t

SEQ ID NO: 217550 - DNA, 579 bp, Homo Sapiens; identical to SEQ ID NO: 40252

SEQ ID NO: 217551 - DNA, 570 bp, Homo Sapiens; identical to SEQ ID NO: 43375

SEQ ID NO: 217552 - DNA, 568 bp, Homo Sapiens
atgcttttcgctggttattacatcttgcgtttctctgttgttatgtctgaaaccgtgcctgcagcttctgccagtgctggtgtagccgctatggagaaacttccaaccaagaagcgagggaggaagccggctggcttgataagtgcaagtcgcaaagtgccgaacctctctgtgtccaagttgatcaccgaggccctttcagtgtcacaggaacgagtaggtatgtctttggttgcgctcaagaaggcattggccgctgctggctacgacgtagagaagaataacagccgcatcaaactgtccctcaagagcttagtgaacaagggaatcctggtgcaaaccaggggtactggtgcttccggttcctttaagcttagtaagaaggtgattcctaaatctaccagaagcaaggctaaaaagtcagtttctgccaagaccaagaagctggttttatccagggactccaagtcaccaaagactgctaaaaccaataagagagccaagaagccgagagcgacaactcctaaaactgttaggagcgggagaaaggctaaaggagccaagggta

SEQ ID NO: 217553 - DNA, 569 bp, Homo Sapiens
aatcgagaaatccagctaagactcaatgttatatcagaggaagaaaatgagctagggctctttttaaaatttcaagcagaacgggatgcaactcaagctggcaaaatgatggatgccactggcaaggcactttgttcttcagccaagcaaagattggccctgtgtactcctctgtctcgtctgaagcaagaagtagcaacattcagtcaaagggcagtatctgataccttgatgacaattaatcggatggagcaggcacgcacagaatacagaggagctctactgtggatgaaagatgtatcccaagagctggacccagacaccttaaagcaaatggaaaagtttagaaaagtacagatgcaagtgagaaatagcaaagcttcttttgacaagttaaagatggatgtttgtcagaaagtggatttacttggagctagtcgctgcaatatgctatctcattcgctcactacctaccagagaacactgcttggattctggaagaaaacagctcgaatgatgtcccaaattcatgaagcctgtattggctttcatccgtatgattttgtagc

SEQ ID NO: 217554 - DNA, 572 bp, Homo Sapiens; identical to SEQ ID NO: 40777

SEQ ID NO: 217555 - DNA, 532 bp, Homo Sapiens
tttataatttatatctttatttttccattgcacattttaaaaaaagtctttatttgaggtttttggcaaagtgctgacaagggtaaaactagcgttataagatcatgctggttaccaagtggagtattccaggtgacagaggaggaccaaggatggtgacagtgggaaggaggagacataggtaaaaggagactccacaccactggtcactggtgatcgccctgtgagggcagggttgttttatacaagctgttcttcagtaccatgaacaggggcctggctgttgaggacgcccaataaatatccgttgacagcgaaaggttgacaggggcagacggatccaggatgactcccaaattcctggcccagtgcaaaagcctggatgatgatcccagtctccagtatgagggccccaggaggagaagctggattgcagggaaagatgaatccagaagccatctctctgatctagagaaaacaaggcttttctttctttttttttataagagggccagaattagcctcttcgact

SEQ ID NO: 217556 - DNA, 497 bp, Homo Sapiens
ttttaacttaagaaatcatttttatttttatagtacaaagcaaatgaatgtataggcacatttatttcaatcaagtcataatctgaacctaaaatgcaaagcaaaacattaacgtgcatttaatacgtatttcaagtctttgtaacagagaataaaaatcattacaaaattaaggtatgagacatcaagtcactaatgatagagttgattagacaatggcttccatgttccatctaacgacatggaacaatgtacatttgacaattcagccttaaagggttaagtagaataaactgcagccagctccttacactcaactgcctcagtaacaatgactcaaagaatagatattttccctatcaatgacaatatttcagtgctaacacttgcagtttaatattggataaaagctaaggagtggttcatcctgacagattataaaagataaaacttattggcttcaagaaggattaaacctgttagaattgggaccaatt

SEQ ID NO: 217557 - DNA, 311 bp, Homo Sapiens
  misc_feature (279)..(279): n is a, c, g, or t
tttgcgtgagcgcagctaggaaactgctcggccttagagacgccgaagagagaacgcagccccaataagctggagctgcttgtatttatttagtacagatttaatgacaaaggcctggagccaacacaatctgtgggtaattgttgcccccgcctgtagggagcagtccagcagaagttgaagtaacaatttcaacagcttttgaagcatctgcatctctttttaaggtagatgcagatactttctttgactctaaagtctttttcttcacctctttgntctgggcttttttctttcctggacacatattt

SEQ ID NO: 217558 - DNA, 525 bp, Homo Sapiens; identical to SEQ ID NO: 57994

SEQ ID NO: 217559 - DNA, 416 bp, Homo Sapiens
tttttttataatgcaaagttgacactttaatagatccgaaataaacatctgttccaaaataaaagttcaagaaaaattatctgacttcgatattagaaattgaaattttcataaagaaatcttgcatttcactaaatgagttggtaacttttttcaggcagcaaccaaaacaaaaacatttaacacagattccttcaatctcatgatttctgaaggacacaaaagcatagaatatccaaaagctattgtattggatattctaataaggtacactcaagacacacatatacaatggaactctgaatttcagtagcaatgatgaacaaaaaaatactgactttgcaatgacttttgcttatcactcacatcgtttagggaatacttatttgatttttttgacatttctatgtattaaa

SEQ ID NO: 217560 - DNA, 509 bp, Homo Sapiens
agtaatcatggggttaaaccgtgttaaccaggctggtctcctgacctcaggtgatccactcgcctaagcctcccaaagtgctgatattacaggcgtgagccactgtgcccagccatacccacaaagattttcattctaaaataccttactctttctacagcctcagaccccatgctctaccattccgttgagccccacataacctcatgctagagagaatctgtactatgttctacctcactcacctgttctagtatttcaaaatacaacagtctttcccaaacaacaattggtgggaaacagtttcaggtgatctacacaagtattctttgcatgtaacaaaactgtttacaggatttaaaattttaattgtctccagaaagcaagggggcatttaagaccctaaaagtagttatgcacatttagatgaacctagcatcctaaaccagtaggagcacattaaatattcatcaaaccagcaagacagttgttcacagggtttttctctg

SEQ ID NO: 217561 - DNA, 521 bp, Homo Sapiens
ttttctctaacattgtaatttttatttaaaaaggagactaaacagaagtcaggggtaggtggttctccatgactgcaaataataataataatgatgattttttttaatgtacagctctcacacaaatttcattttgtgaacacactggtaagtacacgatgctggggcttccaaaatgtggcgtatcccactgatggctccaacttgcgagtgggctcagttatgaaaaactcgggagaggacgggttgtcgctgctcgagcccgtttctcggaagccgctgctcaccaacttctcgtatttctccttgtacgcgtccctctcgcgcaccagcctggagatctcctgcttgaggtggtcgacttgctgcagcagctggttcttctccgactccaggacgtgtctctgctgcaccctcttgaagcggcaggactgggcatagccgcggtttttcagggtccgcctcttctgcttcagccggatcacctcctccttgctgaccccgcgcagctgccggttcag

SEQ ID NO: 217562 - DNA, 469 bp, Homo Sapiens
tttgcaacgacagtctcaacaaaattcctgaggttcctggttctaaaattctctgcacatgcctataaattttgtgatgcacgagaatataaagtccctcaaacactcagagctcaccaatgaggtattctacaacttgctgtccctccctggaaaccatgagaaatgaaaataaacttctcaacaccagaacttcccaaaccctgcctccatctttttctttctgtactacctctcagggttgttggcgtctcactgtcacaaaatgtgacttgtcctgaagggttttccagttttgaaagcatgctcttagcagaattaatcttcttgtccacaggtaatactcagaataaaatagtgtgctgctgcctttaagctcctttccaatcaaaatacttttaaaatatcaaatttcaaatgtttctgattgccctactagtattcaaaatttatacaaaggatataattt

SEQ ID NO: 217563 - DNA, 575 bp, Homo Sapiens
tttttttttgactgggaaatttttttattctaaatatttgttccaatagtaccagacaatttgaaatcaataaactgtggtgaggactgtggtttttgagaaatgaccaaagtgtgttgtgccacgccaccgggcttcctgactctacccatgaaggacaatttgcggtcttaatcctttatgtcaactacaaacaccagccacggttacgactgttcaaaactactctctcaactagttcagaccagggggactaaggaggtgaaatgtggcccccacggcctggaagcgaattcctaagctcggctggataaatctacaaatatacacataaatacattcagacaaggataaataatcagggaacgaaatgactcgctccaaataataaatacagatagtttagtccgatgcaatccttacggcacaggaaggagaatataaattaaggtctctgaaactaagctagacgcgggccaggcccaagactctccaagctctggtccctctgcagggcgcgccgctgatgggtctcagacttacctttgggacaccattaccagattggagtccct

SEQ ID NO: 217564 - DNA, 588 bp, Homo Sapiens
tttaaaagtgttttttcctttttatttgcatctgtttatgactgaaaaaatgactagttattatgaagacactactgttgaagatggatattttaacatggagtttcaacaaaattacttcttgagacagagctgatgtgttttttaaataacgtgattttaagcatatatttgaacaaaactaaaacatttagtattatgaatatgaaaaaagatcagtaaatcaatgtactcttctaggctgaattaaggtagactatttaaggtttcaaaaaaagtttggctggggcagaataagttttacaaaacccatgccatccaaaattaagatgacatgtagcagcaagaagtattccaatgtctcataaccagttctcgcaagcaatgtgtattccttactttaaggaagtgtcaaacaaatagaaaaatctggaagaatttactaagtgtaataaattagaggtaaatcgtaataaaagaatttatgtctcacaaaaatattcacaagtgggagttttcttctaccaacttctcagagtccttctagccccctcttcacttctgaaagatgggatttaccaaaatctg

SEQ ID NO: 217565 - DNA, 554 bp, Homo Sapiens
agctttcatttattcctcatcacttaatcaacatcagagaactcatactggagagagaccctataaatgtaatgaatgtgataaggattttagccagagaacatgccttattcaacaccagagaattcacacaggagagaaaccctatgcatgtcgtatatgtggtaaaaccttcacccagagtacaaaccttattcagcatcaacgtgttcatacaggtgccaaacatcgtaattaatggataagggaaacttcaattcggttttacaactttgtttcaattttgttttgtgcattctatgtgtcagaacattcagaagaagtctgaagaagtgcaatatgttagatactcagcagaagtatcagaagtagtggtatggatataacctatttagatttaatgtgaaatttaagaaggaaacttgacttcttaaccttaatttgatatgattttaattcattacagaaagaaaccctgtgaagggtattcaaaaacataactcatcaactctctatttcaagtacacttatcctttggtatactcgggggattg

SEQ ID NO: 217566 - DNA, 583 bp, Homo Sapiens
  misc_feature (496)..(496): n is a, c, g, or t
taaaggatcgcttgaggaggagagaggagagggaacgggaggagcgtctgagcaggaggtcgggatcaagaaccagagatcgcaggaggtcacgctcccgggatcggcgtcggaggcggtcaagatctacctcccgagagcgacggaaattgtcccggtcccggtcccgagatagacatcggcgccaccgcagccgttcccggagccacagccggggacatcgtcgggcttcccgggaccgaagtgcgaaatacaagtaactactctgactccttcggtagctgcaaccaggagttctccagagagcgggcatccagagaggagtcctgggagagcgggcggagcgagcgagggcccccggactggaggcttgagagctccaacgggaagatggcttcacggaggtcagaagagaaggaggccggcgagatctgaacccgtctcccgggtgctgtaaatagtctgataaacgttcacacagtctaaaattaccctntatatttgctgaataccactcatcttttgtagtttaaatttctattgttttggagctagctgtgagtttctagaagtgtacagagtt

SEQ ID NO: 217567 - DNA, 562 bp, Homo Sapiens; identical to SEQ ID NO: 47409

SEQ ID NO: 217568 - DNA, 583 bp, Homo Sapiens; identical to SEQ ID NO: 40454
  misc_feature (490)..(490): n is a, c, g, or t
  misc_feature (514)..(514): n is a, c, g, or t
  misc_feature (547)..(547): n is a, c, g, or t

SEQ ID NO: 217569 - DNA, 581 bp, Homo Sapiens; identical to SEQ ID NO: 49562

SEQ ID NO: 217570 - DNA, 566 bp, Homo Sapiens
tatgcatctaatttcatttgcgtaatacatagttttgagccataagcaggttctttatgtccgttaatttgataattatgaaatctagccagcgatttcaaaattttaatctccaacgtcccaaatagctatctgtggaaattcaagaagtccctgagagtaggtagcagtacgaacattgtgaaatccagttttcccctctcttgtttatgtcagagctttgttgtaagcctctcactttgtaaggaaattcttattgggtaggttaggctgagggcttacatccttatcatcaggaagacacaatgttgttatttattactccttgagatctagatacacatatggtataattcatctagagtgtaatttcttttatattagccttaaaaaccaaaaatgctgggttcaaagtccttagaattcccttcctccctcaacaagctgctgtctatgttgatgaccataactgggatgtataatatttacagacaactctaagttacgttcacatggattatgtacatcattgattttttttttttttttttttttggaaacaaatt

SEQ ID NO: 217571 - DNA, 579 bp, Homo Sapiens
tttttttccggtaggtcgccagctgaggcggtttgtaagttttgggtcgcagtatgctagaattttgaggctcccttctgatgaaaattgagctgtccatgcagccatggaacccgggttacagcagtgagggggccacggctcaagaaacttacacatgtccaaaaatgattgagatggagcaggcggaggcccagcttgctgagttagacctgctagccagtatgttccctggtgagaatgagctcatagtgaatgaccagctggctgtagcagaactgaaagattgtattgaaaagaagacaatggaggggcgatcttcaaaagtctactttactatcaatatgaacctggatgtatctgacgaaaaaatggcgatgttttctctggcctgtattcttccctttaaatacccggcagttctgcctgaaattactgtcagatcagtattattgagtagatcccagcagactcagctgaacacagatctgactgcattcctgcaaaaacattgtcatggagatgtttgtatactgaatgccacagagtgggttagagaacacgcctctggctatgtca

SEQ ID NO: 217572 - DNA, 582 bp, Homo Sapiens; identical to SEQ ID NO: 54786
  misc_feature (22)..(22): n is a, c, g, or t

SEQ ID NO: 217573 - DNA, 564 bp, Homo Sapiens; identical to SEQ ID NO: 51752
  misc_feature (543)..(543): n is a, c, g, or t

SEQ ID NO: 217574 - DNA, 582 bp, Homo Sapiens; identical to SEQ ID NO: 52489
  misc_feature (500)..(505): n is a, c, g, or t
  misc_feature (508)..(508): n is a, c, g, or t
  misc_feature (510)..(513): n is a, c, g, or t
  misc_feature (515)..(520): n is a, c, g, or t
  misc_feature (522)..(523): n is a, c, g, or t
  misc_feature (525)..(528): n is a, c, g, or t

SEQ ID NO: 217575 - DNA, 565 bp, Homo Sapiens
  misc_feature (11)..(11): n is a, c, g, or t
  misc_feature (470)..(470): n is a, c, g, or t
taaatctacanacattaaacaattgttgtgttctttttaccttttatttttctattaccttgctaccaaacagtttagatagcaatataatagcaaaaaagcaaatatggtaaaatagagaaggtttgaaggtttgagttactctgtcatataacatgtagatcagtcttcatgtgacctgcagtatttttttttctaatgtatttgtcagaaatctgttgtagactgttaacttcttcctgatggaatttattttctgcaagaattattctgatatttaagagagccaattttaactgctgtgaaaatgtttccagtgcaagagaagggaaatactaggaactaagacatttctaatttattgcttattactttcttaattttacaggataattataagcaagtggaactaccatcttttattcttaataattattaatcccttcaatgaaactttaaaaaaactgaanttttatacatggcatacattttttctagttccttctgcttgctttattaactcaaaagttctagttctagtctgttgatctggcttttgttctcc

SEQ ID NO: 217576 - DNA, 584 bp, Homo Sapiens
gggtgactttggaagtccgtagtgtctcattgcagataatttttagcttagggcctggtggctaggtcggttctctcctttccagtcggagacctctgccgcaaacatgctccgccagatcatcggtcaggccaagaagcatccgagcttgatccccctctttgtatttattggaactggagctactggagcaacactgtatctcttgcgtctggcattgttcaatccagatgtttgttgggacagaaataacccagagccctggaacaaactgggtcccaatgatcaatacaagttctactcagtgaatgtggattacagcaagctgaagaaggaacgtccagatttctaaatgaaatgtttcactataacgctgctttagaatgaaggtcttccagaagccacatccgcacaattttccacttaaccaggaaatatttctcctctaaatgcatgaaatcatgttggagatctctattgtaatctctattggagattacaatgattaaatcaataaataactgaaacttgaaaaaaaaaaaaaaaagggccacatgtcctcaacctgaaggtcggggccgtta

SEQ ID NO: 217577 - DNA, 511 bp, Homo Sapiens
agctgtcggaggtggcgagcctgaggcgaacatggcggagctgggcgaagccgatgaagcggagttgcagcgcctggtggccgccgagcagcagaaggcgcagtttactgcacaggtgcatcacttcatggagttatgttgggataaatgtgtggagaagccagggaatcgcctagactctcgcactgaaaattgtctctccagctgtgtagaccgcttcattgacaccactcttgccatcaccagtcggtttgcccagattgtacagaaaggagggcagtaggccatcccccaggagaatgacagaagcaaaggacttgttactaagcagatttaagggtcagtgggggaaggctatcaacccattgtcagatcagcatcaggctgttatcaagtctgttggtgctaaaaagtaaaagatgaaatgttcaaaaaaaaaaaaaaagggccacatgtcctcaacctgcaggtcggggccgttaaactagtctaagaacttcccccccccacc

SEQ ID NO: 217578 - DNA, 573 bp, Homo Sapiens
agcattggagacccttttcacaagatggcgccgaaagcgaagaaggaagctcctgcccctcctaaagctgaagccaaagcgaaggctttaaaggccaagaaggcagtgttgaaaggtgtccacagccacaaaaagaagaagatccgcacgtcacccaccttccggcggccgaagacactgcgactccggagacagcccaaatatcctcggaagagcgctcccaggagaaacaagcttgaccactatgctatcatcaagtttccgctgaccactgagtctgccatgaagaagatagaagacaacaacacacttgtgttcattgtggatgttaaagccaacaagcaccagattaaacaggctgtgaagaagctgtatgacattgatgtggccaaggtcaacaccctgattcggcctgatggagagaagaaggcatatgttcgactggctcctgattacgatgctttggatgttgccaacaaaattgggatcatctaaactgagtccagctgcctaattctgaatatatatatatatatatcttttcaccataaaaaaaaaaaaaaaaggccacat

SEQ ID NO: 217579 - DNA, 621 bp, Homo Sapiens; identical to SEQ ID NO: 43134

SEQ ID NO: 217580 - DNA, 624 bp, Homo Sapiens; identical to SEQ ID NO: 47122
  misc_feature (448)..(448): n is a, c, g, or t

SEQ ID NO: 217581 - DNA, 630 bp, Homo Sapiens; identical to SEQ ID NO: 52117

SEQ ID NO: 217582 - DNA, 601 bp, Homo Sapiens; identical to SEQ ID NO: 40728

SEQ ID NO: 217583 - DNA, 703 bp, Homo Sapiens; identical to SEQ ID NO: 53566
  misc_feature (196)..(196): n is a, c, g, or t
  misc_feature (553)..(553): n is a, c, g, or t
  misc_feature (560)..(560): n is a, c, g, or t
  misc_feature (577)..(577): n is a, c, g, or t
  misc_feature (580)..(580): n is a, c, g, or t
  misc_feature (585)..(585): n is a, c, g, or t
  misc_feature (592)..(592): n is a, c, g, or t
  misc_feature (613)..(613): n is a, c, g, or t
  misc_feature (621)..(621): n is a, c, g, or t
  misc_feature (644)..(644): n is a, c, g, or t
  misc_feature (668)..(668): n is a, c, g, or t
  misc_feature (677)..(677): n is a, c, g, or t
  misc_feature (682)..(682): n is a, c, g, or t
  misc_feature (700)..(700): n is a, c, g, or t

SEQ ID NO: 217584 - DNA, 1000 bp, Homo Sapiens
gcatcccacctacagagatgaaatccatttaggtcaattgctctcacccaggggttttgttcccaagggagcatctagagagtctggagacagttttggtcgtcacagcagaggggcagatggtatggcatccagtgggtggaggccaggggggtgggggggcaccaagcaccctgcagggcacagggcagcccccacagagcacagcgtcatccagccccaatgccagtcatgctgacattaagaaaacatggtgtaaggccagtcacggtggctcacacctgtaatcccagcactttgggaggctgaggtgggcgaatcacaaggtcaggagttcgagaccagcctggccaacataatgaaaccccatctctactaaaaatacaataaattagctgggcatggtggtgggcgcctgtaatcccagctactcgggagactgaggcagaagaatcgcttgaacccagaaggcggaagttgcagtgagccgagatcgcgccactgcacagccagggcgacggtgcaagactccgtctcaaaaaaaaaagaaaacatggtgtaagttaacaatgtcctttcttaaaatgcaaataggacgggtgaggtagctcacacctgtaatcccagcacttcgggaggtcaaggtaggtggatcacctaaggtcaggagttgaagaccagcctggccaacatggcaaaaacctgtctctactaaaaatacaaaaattagccgggcgtggtggtgggcacctattatcccagctactcgggaggccaaggcaggaagatggcttgaaccctgggagcggagattgcagtgagctgagatcgtgccattgcactccagcctggcgacaagagcgagactccgtctcaaaaaaaataaaaataaaaaaaaataaaagcaaatagttctggtatgttagccattcacattttagcatgaaacagcataaataaatggacttcctcccaaaaaaaaaaaaaaaaaaaaaaaaaa

SEQ ID NO: 217585 - DNA, 1000 bp, Homo Sapiens
cttgttcgaagttactaatcaattaagtaacttaataatttattgacatctgaggcatttctctctttctacagcctcagaccagaaatgatgggatttcagccttcttttcttagagattggtgagccaagacctggagagagaactctggttgtcttaagtcacccagatgaactattaatagaaaaagaattctactcagtcagtacttaaaagcttgacatgtttgtgtggagacctgtgtgtgactgagttcagatcactctaatttcctgggcctcacttgacccatctgtgaaatggggcaatgagctcttttcggcatgaaggcaaggaactgtccagaagacctctggagaattcttcttaccctgagatcaagggttctgtgagtagtacaactcacacccaaagtcttagttgcagggcactttagtgggaaaaaaaaaaaaaacgctgaggctatttttagagccttcatctggttatagactagttggtaggagagcaatacctttgaaaagttaagaaatagttttatacactgtgttaaggatgttgtcaaaactaatactcgtgtatgcaaagactttaacatttattaataattttttctatagattggtgaaattggtttgtaatttttgtcatttcacttttgtggaaattgagcaaaggtgagagataaaatgatgtgatcaggctgggtgcgttggctcatgcctgtaatcccagcattttgggaggccaaggtgggcgcctgaggtctggagttcaagaccagcctggtcaacatggtgaagccctgtttctactaggaatacaaaaattggctgggcatggtggcacatgcctgtaatcctagctacttgggaggctgaagcaggagagtcgcttgaacttgggaggtggaggttgcagtgagacgagattgcgccattgcactccaggctgggcgacagagtgagactccatctcagaaaaaaaaaaaaaaaaagg

SEQ ID NO: 217586 - DNA, 503 bp, Homo Sapiens; identical to SEQ ID NO: 49761

SEQ ID NO: 217587 - DNA, 653 bp, Homo Sapiens; identical to SEQ ID NO: 54962
  misc_feature (616)..(616): n is a, c, g, or t

SEQ ID NO: 217588 - DNA, 638 bp, Homo Sapiens
tgagacgactttatgttgtgagaagagtccttgttagaggctttctggagtatataccactctgtctgaaaatactggaaaggtagcgtttctgctgctctttcagacattccgaattcttatgaatgcacacaggcttgctgcggggcgtggcagatgacaaactcaactggagaaccatctcaggacacctggaaagggtctgggtcagcttccatcatccaagcagtccattctcttgtgggcaattgtctcacacggttgtccttctcctgccaggaactaggcactttggcaaacaccgcacagcagaatttctccaccttgattgcacagacatatccacggagggccccttatcatgcacttcaaggaagttaaggacatattttatctcaggcctttgtgtgcagaaatgatggacaggtagcttcttaatacagccatcaatagaagccctcaagctcgtagggtctatttactctttttcacatccaatcacttgacaagtctcatcatgcacaccagaaaatacatatcctccttcaggatttgcaaatgcagaaacacacttcggaagtctgtcttaacacagtgtgacccgtctgtcgagaaggtcgctcacgggtaacgagccg

SEQ ID NO: 217589 - DNA, 390 bp, Homo Sapiens
  misc_feature (12)..(12): n is a, c, g, or t
aagccttatctnactttctattgtctgttgcagtttcatgtaggtaatctcatctgtctacctacccaatgagagacaggaactaaaactattagagcatctgtatactactacagacttcataggtaattttatacaatactgaaggccaaagtaggatatgtgaagcaacgtcggagatagtttattcgcttaacctaatagggaacttggattggaatccagatgacttcaaaatccatgttgttctccattttaccatgcttcttccaagctctctagggattgtaaatacatatttttcaattctccagtgttgagcatagactgatgaacactttaatcatttacatggtagtaggaaaaaactatctctaagttaacactgtt

SEQ ID NO: 217590 - DNA, 528 bp, Homo Sapiens
gatcgtggccggggtgtggctcaggaatgtaaggacatgctgaattctggatctctaagggtgcctggacatgggcgttgcagaaagagagccacattctcagggtctctggtggtgtgtgcttgcggacttgatgactgatgttgcctctgcagcccacacgctggggttcaacactgggttatgctcgttttttcctggagtcagtgctgctagcttcatgttgctctgcgacaatcataggattgaggtcgaggaagacttttgaacaaactcctcaatttaaatccgccttgagcaaacgttctctgtggtctgagaagaggaaggggggagggataaatgagtgtctatgaatcaaagctttattatcttgtgattccattaatttgcatacagagtcttagaagtttctttattcaaaagcaaatgtggatcacaatgtattacaaaaaaaaaaactctgctatggggtccagagtctaggagtggttcctgcagttgatagtcaggggagtcctgtgggtg

SEQ ID NO: 217591 - DNA, 402 bp, Homo Sapiens
  misc_feature (3)..(3): n is a, c, g, or t
gtngttatagttagtaagggtggggaagcgaggttgacctgttagggtgagaagaattattcgagtgctataggcgcttgtcagggaggtagcgatgagagtaatagatagggctcaggcgtttgtgtatgatatgtttgcggtttcgatgatgtggtctttggagtagaaacctgtgaggaaaggtattcctgctaatgctaggctgccaatggtgagggaggttgaagtgagaggtatggttttgagtagtcctcctatttttcgaatatcttgttcattgttaaggttgtggatgatggatccggagcacataaatagtatggctttgaagaaggcgtgggtacagatgtgcaggaatgctaggtgtggttggttgatgccgattgtaactattatgag

SEQ ID NO: 217592 - DNA, 537 bp, Homo Sapiens
tcgggggaccttcagcacggtagacatccaagaggcatcgtgccccagttaacaaagtagtcaatagagagcagaacagcaatgaggttacagaacttcccccattccaacaaagcaggaaataaatcagagtggcaccaatttctcttttaaaataggctattttaaaagtgtactgaatatacaccagctactttatttcaatgagatttacttcacttgcaatgaaatgggaactgcaggtgctttgataaaggtatcgagaagttgacctagtttctataacaatgtcttatgtcctcaaccatgagaatatattttagtttcttaaaatatgagcttcctaaaacaaaaatcttttcttttctctttttttatttttttattttgagatggagtttcactcttgtggtccaggctggagtgcaatggcgcgatctcggctcaccacaacctgtctcccgcgttcaaacgattctcctgcctcagcctcccaaatggctgggattacaggcatgtgccaccatgcctggctaa

SEQ ID NO: 217593 - DNA, 498 bp, Homo Sapiens
agaactttattagctgtcaatagaacaaagtgcagattccttcatttagcatcgaaggccctctattagctgaaattaggtaaggagttttccccactatttccttactcaccattcagttaatctaactcatgagctttccctatttgactaaactattcagtgttcttagactgtctatctcttgcatttccccagttcaacttccttcaccaagttctacttaatcctttctggattcatgaaacaatcttttcccacccaaaacattcacagcattctctgtaactctcttatactatttatttccttctgtattaatatttttatgtttctgtcttctttttttgtccttaaattccttgtattttaccttggtaccaatgccactgcattggcacagtgttttccagtgataatgatgttgttgtcattgaagatgatgatgatgatgatagcccctaaagtttaccaagtattgtggaccaatatatgtcc

SEQ ID NO: 217594 - DNA, 615 bp, Homo Sapiens
tgtcattttatttttacgttgttagatatggggagtagtgtgattgaggtggagtagattaggcgtaggtagaagtagaggttaaggagggtgatggtggctatgatggtggggatgatgaggctattgttttttgtgaattcttcgataatggcccatttgggcaaaaagccggttagcgggggcaggcctcctagggagaggagggtggatggaattaagggtgttagtcatgttagcttgtttcaggtgcgagatagtagtagggtcgtggtgctggagtttaagttgagtagtaggaatgcggtagtagttaggataatataaatagttaaattaagaatggttatgttagggttgtacggtagaactgctattattcatcctatgtgggtaattgaggagtatgctaagattttgcgtagctgggtttggtttaatccacctcaactgcctgctatgatggataagattgagagagtgaggcgaaggcttacgtttagtgagggagagatttggtatatgattgcgatgggggtagtcctcgtcatgtgagcagaagcggccggtgtcagaggggtgcttggcaacctctggcaccagacgtgaaggggc

SEQ ID NO: 217595 - DNA, 312 bp, Homo Sapiens
  misc_feature (15)..(15): n is a, c, g, or t
ctcgagttacagtgnggtgcctgtggtgagcattagggaaacagacaaggaccaggggttagcaccagcatcgctgatcgctgctacttgggtaggaataaagcctgccccatatctaagtataatttcagatattttaaaaagaacacaagaatagctgcaaccaaccaaacattccagcccatttctcttcagaaagacttaaaactagacagacatctttctcactctataaaaggttacttcaaacatttaattgttcagtaaaatgccacctgctttgcctttgaatcaatgaagctctggtgttat

SEQ ID NO: 217596 - DNA, 1000 bp, Homo Sapiens
ttacgcaaccaatgaccactactttcccagacactgttcacaggctgcatgttgatgaagggcagagaaaaagtcctcataactgatgtttaggtgggaagcacctatggcatttttaagttctagttcaaaataagaagctcagctacatttcatgtccaaagtaaaataatctatttcacaacttttattgagcagttcctttgtgccaggtgctatgctggctctgatactaacacttgaagaaatacaaattattaattttgtacacaagacattcaatcctgaaaagaggcacccagggtattagaaatgctctctcagcaggtaggagtgttaatcttggttttgccattttgtttttttcctatttatttatttatttatgagacagagtctcactctgtcacccaggctggaatgtagtggcacaacctcagcccactgcaacctccacccactgggattctcctgcctcagcctcccgagtagctgggactacagacgcgtgacaccacacctggctaatttttttgcatttttagtagagacagggtttcaccatgctggccaggctggtctcaaatctctgacctgaagtgatcctcccacctcagcctccaaagtgttgggattacaggtgtgagccaccacgcctggctggttttgccatattattgaaattttaaacatccaaagggcttttgactttttgtttttgctttgatactcaatgtattttagctgaaattattcctgtaagtatttaatactgctggtataactaataaataaaaacaaatattttataaagttaaattactcaagaacttaaatattatcaacttgattagttaaatcttttaaaacatgtcaataaaattatgagcttttcctttttttaattgaagaaacagggtcttgctctgtacatccgatatgaagtgcagtggcgtgatcatagctcactgcagtctcaaattcctgggctgaagagatc

SEQ ID NO: 217597 - DNA, 387 bp, Homo Sapiens
tttttaatggtaaaaatttgtgttatttattcagcaatcatttaatgagaccctattgcccataaagagcatttgccagttctatgaatgatgcaaacagcgaacacaatacaagtcaatattgggtgttcaaagagttacacaaatcagaagccatgggagttgaaaaacagatcacttctacaggggataaagttgatggcatttaatcaatttttatggtttacaaaccaaatatttcaggggtcagctagggaaagaagagacattaaataggccaggaaactattctttagagctctagaaaagttatgtaacccagagccacttctccattagtggtcactcacttaacccaagtgagccaaaaaccctaaagcagggagc

SEQ ID NO: 217598 - DNA, 523 bp, Homo Sapiens; identical to SEQ ID NO: 137473

SEQ ID NO: 217599 - DNA, 481 bp, Homo Sapiens
ctactactactaaattcgcggccgcgtcgaccctgcttcttaacaagatttcttagtcctcagtatttacatttaaaaatccaaacagctttgacaacaattgtaaaaaaaaaaatcattaaacttctgcttttccctatcttgaagtaaaatgcatatgtatagttaatttatcgaaaacacaggacagtgtagtgttctaggaatgagctatataaatttgtgtattcagattcaacctcttttcccttgatttctacttatcctagttagaatacatcatttttagtcactgtcaaaaatagggcttagagcaccctgtttaacagatgtgttaaatgttaacatgaatggaataagcatctgccgtgagcatgcttttctgtttcattcagtgcttgtgttgtagtcttgttccttgttcctgctgaatatggaagatgttccttattaaacttttactggcatttcttgtgaaact

SEQ ID NO: 217600 - DNA, 351 bp, Homo Sapiens
ctactactactaaattcgcggccgcgtcgactttttttttttttttttggtattttcactgtcaattatgcctcgtattatttatttatttgccaaaatacgactgtatgaaaaaaagctacctcatagagctcatgacacataataggtattcactgagcatttggtgatttgttaagcactcacatcaataaaatatttcagctcaacaggcacactaggggccagatgagcactgactttccccattgaggagtctcgattacctcatgtctcacttcaaacaatttatttttcttgtatgcatagctgggttcaagagttctttcttgttttgtcgacgcggccgcg

SEQ ID NO: 217601 - DNA, 487 bp, Homo Sapiens; identical to SEQ ID NO: 61545

SEQ ID NO: 217602 - DNA, 437 bp, Homo Sapiens; identical to SEQ ID NO: 48944

SEQ ID NO: 217603 - DNA, 458 bp, Homo Sapiens
tactactactaaatccgctgccgtgtcgacctccaattgcattgctttccagggaggggataaaaggtaaaaaggaacgaagagcgattctttggcaatgaatgggaaaggagaaaagaaggagaagggttaaattagggttctgtaaaacaaaggagaaccacaaacttggaggactcaactcttctcccctactactaaaacaaataaacgtataaaagaaataattttgctgacacctggaatttgccagattgaccaaaaaaaaaaaggtgcctttaaactaggaattgtgtaaaatatcctcacatcacaaaataaaaaaaggaaaataaaaaatcatacaaatctactgaaaaagatcagatagtgaattttcatacaaatcaatggagggaaataccaccttcacccccaccccccaccaaaaaaaaaaataaaagtcgacgcggccgcga

SEQ ID NO: 217604 - DNA, 405 bp, Homo Sapiens
ctactactactaaattcgcggccgcgtcgacccacagccctccagtagagggcacacgagagcaggctatctgtggagatagcctgttggcacaggggtgaagatgacagaggcgaacccaagcaaagagagttaattagcagagtttgccctccaggctcggagggcaagtcagcctggggacctggagttagttcccttttcagctgtgaccattgaagacattcatcaagttctctggctccgggatgtcagctgtggtagtgacttgcatgggaggttatccgacatacctcacacactttaactccacctcttcagagtttgtggccaagaatggagccaggtggctattttttttttttaaatttatgtaataacaaacattcgcatttattgaaaact

SEQ ID NO: 217605 - DNA, 536 bp, Homo Sapiens
  misc_feature (467)..(467): n is a, c, g, or t
  misc_feature (530)..(530): n is a, c, g, or t
aaaaacatgacctggtagaaggaagagaggcaaaggaaactgggtggggaggatcaattagagaggaggcacctgggatccaccttcttccttaggtcccctcctccatcagcaaaggagcacttctctaatcatgccctcccgaagactggctgggagaaggtttaaaaacaaaaaatccaggagtaagagccttaggtcagtttgaaattggagacaaactgtctggcaaagggtgcgagagggagcttgtgctcaggagtccagccgtccagcctcggggtgtaggtttctgaggtgtgccattggggcctcagccttctctggtgacagaggctcagctgtggccaccaacacacaaccacacacacacaaccacacacacaaatgggggcaaccacatccagtacaagcttttacaaatgttattagtgtccttttttatttctaatgccttgtcctcttanaagttattttatttgttattattatttgttcttgactgttaattgtgaatggtaatgcaatanagtgcc

SEQ ID NO: 217606 - DNA, 442 bp, Homo Sapiens; identical to SEQ ID NO: 55686

SEQ ID NO: 217607 - DNA, 491 bp, Homo Sapiens
  misc_feature (461)..(461): n is a, c, g, or t
ccacgcgtccggttatctaaatcacattttgtaaaagcagttagatgtagtaagtctcttaaaactatattaactcactagaaacagccaagttatcaaaacagaatatatgtaatggaaattaccatttttttcaactataactaagttacttttattttaaaccaaaagtaacttagttatagttgaaaaaaaagagtttccctcacagaaaaagcatgtttatctgtaaaactgttagctgagcaaaataactagtgttgccagataaaagcaagctaccgataggggtatataaaataggacatcagaaatgccattgcaatattttatcaattctgtgatgcatgtaattttacattaagttatgtaaaattaagtgatgctatagttaaattgacagcattttttttcctagtggtaaatgaggtatgtcttgtaatgaatagtatcttagattntatgaaacacaatattactgaatttagact

SEQ ID NO: 217608 - DNA, 539 bp, Homo Sapiens; identical to SEQ ID NO: 46913

SEQ ID NO: 217609 - DNA, 202 bp, Homo Sapiens
catcatcatcatgatcgctcgacatcgatacgactttttttttttttttttttttttttttggaggttcacgtacttcaagcatatttttcggacaggcgtaacttaggtgtccacttttcccacaaacataacacttagattcatcaaagtagttctgcctttgggtgaactcggctgcccttctgtcgtcttctcgcagc

SEQ ID NO: 217610 - DNA, 561 bp, Homo Sapiens
  misc_feature (2)..(2): n is a, c, g, or t
tnccctccaacaagaacattcacagcagctttattcataacaataaaacctgcaggattattcacaatagccaagatatggaatcaacctaactgtccatcggtggatgaatggataaagaaaatgtggtatatctacacaatggaatactattcagccttgatgaggaaggaaattctgtcatttgtgataacatggatgaacctggaggacagaactcaaatgtttgtaaacagaatagaatttttaaattgtggtatattcagactatggactattacacagcaattaaaaagcataaactactgataatacaacatagataaatctcaatgacactatattaagtgaagaaaacagacacaagagggctgtttatggttccatttacatgaacaggaaaaacaaatctatggtgatagacatcagaatagtgataacctttgaggatgaggtggggcccaagggaaatttctgggacgataaaatattttgatggagaccgtggtgggtatagacatatacaaaattcaccaaggtgtaccctaagatttattaacg

SEQ ID NO: 217611 - DNA, 874 bp, Homo Sapiens
ccaaatgccttggaactccagacgcacccgcagggcctgaggtaggcttcatagagttctaggacttccgtgtgcgttgccaccagatcctgcccagcaatggcctttcccttctaaggtcattagattcagccaaaagcgacctcttctctagtccggtgttacgaacagaagttctgagttgtgctacaaaagtagttccatctttttggtgtaattttcatgtttttaatttgaaaaaaaaaaaaaaaaaacaactttttataagttttttaagggccctgcttagtcagtgtacagggtggagtcagaggcagttttcagaaaaaaacaaaaaacaaaaaacaatttcaccaagcggtagtaattgttgttttactagttatacatttagaatataaaggaggcatcagaaaacacactctctaaagccacttccttgtgcacagagtctgcacagggagagcacaggcatctccctggaaaagcacctgccaatgacgaatttcatggaagaacctaggcaagaaaggaagcctctttctgagacacagtctctgagaggtgagcctagctttgctcttcctacagggtatgcttgggccatacacaatgctcgccttactttaaagctattttgccacagtcctgttaaatagtgtggacgtccttttgcagtctggtgtgcatgccatatgatcaggacagcttttccactttactcggtttcctacaagcaagtaggaaatacagtgaatttaccctaaaatgtccaatctgtatttatgtaccttgtcagtgttttgctgttggttttctaaaacaatctgatcaataaatcttatccaaatcaaaaaaaaaaaaaaaaaaaaaa

SEQ ID NO: 217612 - DNA, 556 bp, Homo Sapiens
tttttttttttgtaaatgtaatttatttaaataacaattcaattgcttgttaagtaaaccagttgtagcaatataaaaatacagaattttgagaaaatctggcaaattaaacctgtatctaaatgcagcatattctgtgatactacggaatgaaaaataaaatgtgttgactttcaagtcaggatgatttatttgcacttaaaaatataatttctaagatgacatctgttttcaaaaacatcctaatggtaaaaacaggctacaggaattgttgtcatcatgttgaaattttagattttatattagcattagcttaaaaatcatagacaataacattaacacaaaatcagcaagagaacactcattgggaacagtttttatgttaaaaatatcagaggttcacagttttcttcttttttcttgacttacattgataaaatgctttgatagctacaatcaatttcaccttctagtaccagatccaatgcctccttgatcagcagatggatgttactaacacattcattgtatatagaactcacacatattcagtttc

SEQ ID NO: 217613 - DNA, 453 bp, Homo Sapiens
tttcacatgaatggctaaaaattcctgtcttctttactctgtaaccatgctgttgattttcttttctttttctttattctttttgttttacttagatgtagactccaaatgcatcagatccttgtaaaatttccccttttgttttcggaccattattaaacctgcgtagatagttcgcaacctaactctgacttcccacagtttgaccattccttcttgcttgatgactccattaatttgatgaggatgccttctgtatctccatctacatcacggataaagacgttgagaaggatgggtaaaggataatgccctctgggtatccctttcacttggacatttgctaattattcaactagctgcaaattcaccttcatcttactccctatacaatgacctggcctatgtttctaaatcttttctacaggaatccagatccatccatttagatag

SEQ ID NO: 217614 - DNA, 400 bp, Homo Sapiens
gaatttgggttttattctccagatactctgtgtacatgtgggtaagtatgtgggagtatgtgtgtttgtgtgtaagaggggataattaattgtctctcaactctatctcatactttaatatcaaataaaaaatgaaatgtataaagggtcactttgtaggattaggcatcctccttctacctacttaaaccaggggtttgggattcagaattctccatataaccaagaccgaaagtcactggaagactttaaaattagtattttaaccaccacacccagagtcaggtatggaaataaacctatagcatggattctttctatgcataatctcaaaatttaactacccaaataagtaagtttttaaaaactaatttaaaatttgccattgaggaaaatatca

SEQ ID NO: 217615 - DNA, 564 bp, Homo Sapiens
aagttctgattggctactgtaaaggcaatcttagaagatgcatgtaaatataatataaatcaactttcttatcaattagacattttccccactcacatctcttagtttttagggtattcagtcccagcaaccaaaaaaaaaaatgtaaatcatattttgtttctggctaatgttcaatcagtttttcttttataagagcttttgatgtactgtttctacggttctttaggcacttacacataaaaacattcagagggttttccccttaacacacaacttttaattctcatgaaaatgttgcacagttagaatttgtcttgcataggtaaattctgtttataacatggactctgataatccaaatattaacattcctaatatagggaaaaataagcaccattcatagctaaaaataatagaatcctgtcataacccaatatcataattacaaggatctggatatattctagaccaaatcacactccctgaaacattaccatgtacaataaagcctgaaatagccaactaattgaatgttattcttaatcctttacactggcacta

SEQ ID NO: 217616 - DNA, 546 bp, Homo Sapiens
tttgaaatgtatccggtattttactattacaaacaaaaatccaatgaacattcttgaagacatacacaaaaataatggttacaatagaagttactggaattgaaattttggttcaacctatattaaaatgtaaggcttttgatatagctaatagatttttgaaatgatcagtcttaacgtttgtaggggagcacactcctgcatggggaaaagattcactgtgaagcacagagcacctttatggttggatcatcttgtcattaaagttcaggcgttatctatcctgtaagtggcagaatcaagactgcaatattgcctgcttttctttttaactcatgttttcccttgactacactggtcctcaaagtaaaacccctgtgtcagtgtactattcatggaatactctgcaattataaccaccttctaatacttttaatacccaatcaaaatttattatacatatgtatcatagatactcatctgtaaagctgtgcttcaaaatagtgatctcttcccaacattacaatatatattaatgatgtcgac

SEQ ID NO: 217617 - DNA, 355 bp, Homo Sapiens
ctccatatctgtgcatcttcacacttgttcaaggctgggattctcacaagggcatgacctggtcacacatggctcagcccgcagagtggcaagaccatcagaggctgtgaaaactttgatgccgaagttctgcctcccaggaccacacagcagcctcaaaactcagagcccagagatgagctctggaaatctgatgtcgtctggcaaatgacaaaaccccacagcagccatgtcaaggccacctaaacaagggcttcctctgcccttcccaacctccttagcaaaagggcagagcttttcctgctggacacaggctgccgctaggaagtctacctggatttaacacaaggaggag

SEQ ID NO: 217618 - DNA, 585 bp, Homo Sapiens
tggcttttacaaaaaaggtttaactgaagagtcttttaaaaaggaagcctctctagttttttttgttttttttttgtttttttaaattacatataacttttcagggatttctcatatatacaaacatttaacaattttaaaacacaaggtaaggattccactagagataaacatggctcaacttcccaccagctttcgttttcctttctcttgtatcctccttctctttataattctcctttaaaaaattttttcattccctacatagctcatgaccccaacaggcaatatgtatttcttttactaaaaagaagtggataaaatattgcttagatttcgtctaggaagcaggagaacaaagtaccatgttttttatttcctaataccatataagtggtaaaggcaaagttttaaaacaaagcatcagaaactaagaatagaggatatggttattgttcttttaacttgtaatttcttctaggatacttgtcacaatttttcttttaccccaggaaaataaatagctataaaaaacaaatgttagttatctcaaaaatgttctttacttttatgcactcctccttc

SEQ ID NO: 217619 - DNA, 553 bp, Homo Sapiens
tgtagaggtagtctcgctatgttgcccagggtggtctcaaacttgcgggctcaagtgatcttcctgccttggcctcccaaagtgctgagattacaggtgtgagccactgtgcctggccaggtaggttaatttatataatttcagaatagatacaaatttacgttagcaacatttcaagcaccataaatctcatgttctttttggacatttaggagttattttccagtgctgatgtgattttaacatttcaagagcatctataatgctcacatataacaatcatagcataagattctctgattatagaataaaatcttaacatacttgcctcataataagatagggagattatcctggcttatctgggttttcacagtgtaatcacaagggtcctcaaacatggaagagggagacagaacactcaagtgtttgagtgatgtaagactgattggccattgctggttttgaaaggaggccccaaaccacagaatttgggcagcttctagaagctggaagggcaaagaaagacgctcccctagagcctccaaaaaga

SEQ ID NO: 217620 - DNA, 511 bp, Homo Sapiens
gcattgaacattttattatggaaagtgatattaatgactaccctacactattctaacttcctaacattatatgctaaaactattttcttttcttaccagcttttaaacactgactgcaattagtgttgagatgtgcaatttgaggtaaacagaaagaaatcaaaagaaattcccaccattagaattattcaaagacagagtaattaagcaggcatcacaaacagttttaatcggttttgaactcatttctgaacacgttaatggaccttaaaagtgatagccagcaatttcattatattaatttaaaggaaaactttgacaatgtttgtgtctttaattttaccattactacgctgtctcaaacatgccaataaattcagtttatttctgcaatgtttttgttctctagttctacttatgtaataaaatcgcatattaaagttaaattttagtatactcaatatagacacgtctcgataaatttagttaagtatacttggtaagtctaaat

SEQ ID NO: 217621 - DNA, 409 bp, Homo Sapiens
tggtgtgtgaatatatatatttatttatttaagataaaaattttttcttgatgttcaaagcttccctgccctatcaggttcaacagtaaaggtcatagccagcccttagggccagaacagtgttttcaaacttggactagaaaagattcaaagctatatcaatcaaccactcaggatcaaacaatgaacaaagacaatagtgactaggtgaggtgaggtgaagggagtggcttccaatgaagaattagcattatgagctgcaccaggaccctaacacctaacacagaaaataaagatcaaagataaggattctcatttaagggactgttgatactttgctttgtttcatttaactattttatcactgttggtgaaatgcaaaaataaatagaggcaaaaagaatttgag

SEQ ID NO: 217622 - DNA, 436 bp, Homo Sapiens
tttttttatgttgggattttcaaatttattccaacatgctaattcttttttttttaaaaaatatcctcaggctgaacactcagccagagctgtaataaaggcaattattatacttgtaaaaacttctcattcacagtacagatgtaatttacaacaaaggtcacacacatcaatactgagcatttttccttttgtacgtcagactctgtgctttagacctgcgtggatttttgttttttttttttgtttgtttctgttttgttttttcttttgcactgatatataccataccaacattgcaagatgcaagtgtggaaactggagtttaaataaaattacaggcaaaactaccccatcccagtgcggttgctgtacatatctacagtacaatttttggaatgtattgccatttaagaacatagaaactttctacaga

SEQ ID NO: 217623 - DNA, 461 bp, Homo Sapiens
gccttcacaccactgacaggaacaataattcatcagaagcaacatctcttgcgacgtgcagtgattcccaggcccacagatgttcccctgtagagaacaagtgctagtgggttggtgcaagcaccaggagctcttctgaggaaaaggccttgcagttatttacatttatgattcttcaatgctggaagatcatggatcaatcccaggctttgccagttctagctgtgtgaccctgggagaattacttaatgtatctgagcctcaatttcttcatttatgtagtcaatataatcatagttcctgcttcacattgctagaacttaaagagacaatgaatgtaaaatgctgagcccagtacttgaccataacaagtatagaattgacactagacgttgttatttaatagctcttccaaactagaaaactcagagctctgtctggtgggctggatgggattctat

SEQ ID NO: 217624 - DNA, 473 bp, Homo Sapiens
  misc_feature (427)..(427): n is a, c, g, or t
ttgtttgtttttttaggagtgtgttttgaccaaaaggttgaaaatccattaggacactgaatgtagacagaggcctggagaggggagcttcccatactcttcccacacacattgtatctaggagtttcctgtagcatcatacaggtgtgattaattttgaataacaagatcatacatgaaaagttctatatgaactaaaagttgaccaactgaatcatatctttaaggtataagaggagctctttgctgaaaggaatcttatcattaatacttttttttttttttaaatagggtcttgctctgtgacccaggctgatcatgatcatggctcactgcagccttgaccttccaggctcaagagatcctcccacctcagcctcctgagtatctgggactacagtcatgtgccaccatgctcagctaattntttttttaatagagacagggtctcacaatgttacccaggccagtct

SEQ ID NO: 217625 - DNA, 434 bp, Homo Sapiens; identical to SEQ ID NO: 59908

SEQ ID NO: 217626 - DNA, 514 bp, Homo Sapiens
ttttatttgggatttttatttgtaaatttctcttacattttacaattgttaaaacagtgtattataacttagcctaaattttaattttcctttgaatttctacatactttttagcaacccaatgaactttcatgtcttcctcaaatagctcacaatacttgctaagcaactatattaggacttggcaaacaacagtgtacaggccaaatatggcccatggcatgtttttgtaaatgaagctttattggaacacaagcaatttatttgcacagtaccacagctactcttgtgctacagtaggaaagttgagtagttgcaaaagacactgcaaaacctaaaatatttactatctgacttttacagaaaaactttactaatctgtgagaatattgtagtttcataagacagcattttgaaatattttgattcacttctgaaagacaaaaatagttatatatctcaaaatgagattatgtgtacacaaacttcttgatccataaagaaatgtaactgt

SEQ ID NO: 217627 - DNA, 492 bp, Homo Sapiens
  misc_feature (479)..(479): n is a, c, g, or t
  misc_feature (485)..(485): n is a, c, g, or t
gctgaaaaggcatgattttattgcacactcacaatatgacaggtgctgtgctactcatcaacactcttttcaaaacaggatttggagacaggattcttcaaaagagaactgcacattcaactaaacatgtccaaaaaacttcaactcttttgaattagtctccaaatctacacaaaccatagaaaatagaagatcattaaaatacatgattatacacagacaaatggacaaatgaaacagtaattaatattgcttgagctcagattgctcctgtaagatctgcagaaatcgtatgatggggtaaggttttctagaacaatatttcatcaggagataatggcagtatctcattagactaaaaggagatgatagatgctggaagatcagttttcatacagctcttctctgttcataataatactgtgcaccttctccaaatgacaaagaagtaaattcatactccatcaaaataacctcanaacagngagccat

SEQ ID NO: 217628 - DNA, 493 bp, Homo Sapiens
ttattttagagactgggtctcactctgtcaaaaaaaaagtaattttctttaaggaaaaatatggcctcgtctctttttgaaaaacgcttgtgaaatttagaatatctagttttgtttttcttgtttttaattgttctctttttcttttctcctctaggaaagaataaacaagtattttagcctcagcagaaaaaacaaatgctctgagttataaacagaatgaactttgttgttgtttctaaacaaacaaatcctatccatgaaggagacagctcagcttgggaactggcagacgactaaagcctacagcattttgacggctgcaggcgcttggtaagagaagacagctcgttttctcagaagtttcatacctcttacagtccttccttctgagagggacccactcatagttagcaatgcttaaagagcaccctccacagccacatctgatacaaactgaagtatctcctaagagagccaagtcctgtgcgcg

SEQ ID NO: 217629 - DNA, 477 bp, Homo Sapiens
gagttgattttgggtaacattaaatgtcaacaggagggtgaaacaaatgaaaataacaccagtccctcaagtcacgatatagcagctctagtctctgccaggcccttctttactataatgttgcctaatgactggcaacctaggaacaattgttaggtgcttgtccccaaactagctcttatttttcagaactacccataaggaatgggatccagggatgtgtgataggaatggggatggagtggggacaccaaatgaggactaatctagagacctgagctattcagatcagctagtctagtcacttgctaggaatggggatctttagaggcaccagaaagatacattttctaagagatacaagagcagtagatatgccattctggcagctttttaacaaaagtacaaggcattcaggatgaaccagatggttaggaaaggcttagaaccagaagtctgaagggccactctggtcag

SEQ ID NO: 217630 - DNA, 484 bp, Homo Sapiens
ctatgttaacatgtaatggatttattttttgtttttggaaaaaaaaaaccaagagaaaagaaaataaagtcatctttagtttccttaaattcaaagtctgagcctgaaaatggaagtatcaaagctgatggttatacgtcagtgagaaaaaaatttaaaccaagctgggtgggtctttacatgagataaactatctacaggaaagaatgaccactaacttctgcataataaatgagagtggatcttttaattctgagatggcaatgtactttacaaggaccatttacagactacatcaaacctttttctagataaaaaacgtacttcagtaacttgcctgaattgagagagcaaaacagtccggagagaaaacttaaaatgtttccacattatcaagcccccttcagaagtactgtggtctcggcccctcctttgaacagatgtccgctcgccacagtccaatcaggtttaaagcaagagtatt

SEQ ID NO: 217631 - DNA, 482 bp, Homo Sapiens; identical to SEQ ID NO: 60616

SEQ ID NO: 217632 - DNA, 527 bp, Homo Sapiens
cccaccactcaaaaattttaatatgtattgaagattttggccaaaaaatatgcaaaagacaaggaatataaaaataacttacaacaaatttctaaaacccctcatatattaaaattggtaagacaaaaatatgatttataatacatgtttgccattgtggtatatataagaaaatagtactcatactaaattcaatctacttatcaaaattcttaatataagaatgaaaatattcagatgttataaatagaaagacaggtattaaaaagtttcttttggacaacattctttggtgctgataaaactgcatgttattgtctatggtaaagtcttttcagactttactacatatctagttacaactggaaatgaaaaaaatataaattagatatgactatagaaagtagttatagggtattttgatttcatggtgctcaaatgtttatgaacaagttttacttattaaactttgaaataactacctattctttgatatttcttatatatctatatgttccagaaattag

SEQ ID NO: 217633 - DNA, 511 bp, Homo Sapiens; identical to SEQ ID NO: 48798

SEQ ID NO: 217634 - DNA, 365 bp, Homo Sapiens; identical to SEQ ID NO: 61521

SEQ ID NO: 217635 - DNA, 699 bp, Homo Sapiens
  misc_feature (632)..(632): n is a, c, g, or t
catttgatttctgtttttatttcatcttgagcatgtgaaaaatcagtggctttttaaactttcaaagttgactgcctagactgataagtttaagaacacacaagtaaatgtcaacagtctcttgtgttgctgacacactcaaaccagtgctaaaacaatttttgtcttaactctgaattatacatgttcagacctgctattgaaacaaatgcattttgatatttggatttttctaaactaaacacacagctgtgctaggctctttgctctgttagccttctgaccattttatagctctaagcatgtgatattttctcctagaagactccgaagtgctagaatattttcagagggcaaagccttataataattcttactggaagcaaactaaacaaaaaccaagttccagaaaacattgcttctgagaaattctcaaatatcatcaagaagaataagtgggttacctaaaaaccaaactatggcaatatgttaaagtacaatactgcagtaagggtagaaaacacatctaaggtttcacccttagtgttaagctttttaaaagcaaaaaggtcatgtgtatcaatttgcagtgtactaaaaatgtgttcaaagtttatttcaagtcacagaanatatacaaactaagacaataaaatgaagtgatttgttctgagagaaggtgattggagtcctcacctg

SEQ ID NO: 217636 - DNA, 504 bp, Homo Sapiens
tttttttttgaaaaaaattcaaatttattctttattctggtaatggccaactaatctgaataaggcacatcatcagcatctataagaaacaaatacaaaagcaatccctgttatacagaaagggagtgcagagaagtgggacgttagtattggcaaagcacacatattttttgttaagcacaaataagcaaaatgcaattgagtttgaaagtcagtgtgctgtttcttttatgacaggaaaggcaaatagatttaaatttcctgtgctctctgatgaaccaggagcaactgcctggagctttgtgttgatgcgtcctcaggcctagaaggaacacagagagtagggctgtgactgccgggggcttggccaactctgccccatacaatgtgactcagcctgttgcttcccaagtctaaaatgttctttttggttcatgtaactgcgcttagccaaaggcaaatttagtttataagcctcagtgaggaaaagcaggagaccatttg

SEQ ID NO: 217637 - DNA, 483 bp, Homo Sapiens
tttgagtataaagggctgggtgcagcagttcatgcccagaatcccaacaccttggggactgaaacaggaagatcacttgaggccaggacttagagatcagcctgtgcaaaatagcaagacaagatacctacaacgcggggggaaaaaaggaaacaatctcatacaggttcttatcagtgtccaaaaataaagaaaaaaaggataaaacatgaatgaagaaaaggctcaggccaggactagttgtagcactatcccaagctccaagagttaagtctttactcccagttttgaacctaaaccttctaatgtgtagctggcaattctagtcatacttgtatgccttagtctccaccgttagcatttctaaaaaaagattaacaagaaagggaaacactctacggctgagctgtccagttccacagccacacacagttactgagcatctgaaacatggctaggaaggcaaaggagctggttttttgt

SEQ ID NO: 217638 - DNA, 572 bp, Homo Sapiens; identical to SEQ ID NO: 59554

SEQ ID NO: 217639 - DNA, 487 bp, Homo Sapiens
ttttttttggtgactgcaaaggacagagaacctttccactttggccatactgggttgctaagccggagccatttcagctcctggctcctcaagataacggcgagtccagtgccatcttggagaagctccaggggcagggctgacttttctcctacaggaggaacaatgtggggatctgagggatgggagggagacttccccctagagtggtggtcctgctgggggctcatatccagggacccaaaaggggggctgtgtaggaggttccacattggaggggctctctctctcgcagctgtcagagttggtcctggctgtggcgtccaaacagcttgagggaaaaagatcctgtctaaccacctcatctactactcaagttctttctgaaggagggatttcttcagttaaccatggacagtgaggtttctcaccacagtaacttgagtccaggttgagggggagacagatctgtggtaaatctctgact

SEQ ID NO: 217640 - DNA, 372 bp, Homo Sapiens
tttaaatctaagctattcccatcttccccattctatgctggggggatacaccacaagaagttacaggaacaactgctaaaagaattaaacatcttgggcctttacacagctgttgccatatcatggctttggtgcatggtcggtcacagatgctgtcaagaggcttatgtttagttatccttttgcttccccaacccccacattaaaggtctccttcaccttctctgtcctttttgctacctcccttcttcctgctccaagctcccacaaaccagccttaataaaagaggaaggatcaaggcaacactccacatcagtcatatttcagggcagcttgatgtttgtttgctaatagatggttggtattatcta

SEQ ID NO: 217641 - DNA, 556 bp, Homo Sapiens
  misc_feature (529)..(529): n is a, c, g, or t
attgtatgcgtcttaatatttttttaaattttgaatcatatgagtgtatcgcctattcaaaaattaacaagaaaaacttaagaaatggtgtcattaacattttaatttcctggtcattacagaagaaggaataaatacacaggattgaattaaaatgatatataaaagtataaaaattatgtaaacttaattgtatcatgaaagtcaatgatggtcactgcacattactaatatcatttcatcagtattttataaacgcattaacaaatctgtgtttcaggaaatccactggctcccaacccaggattgtggatctcctaagtagctgtgaaggtggtgatagtgcttaatttatttactatatttcacaaaggtgcaaatattaaaatactaaattacattgattttcattgaaacagttattgcataccaatcagaaattatgaacagcaaattaaaaagtttcttatagaattttaatctaattagtgctatctgttaagtagataaaatcatacagatcctacanaagagaaaacaatagatattcttcgtg

SEQ ID NO: 217642 - DNA, 550 bp, Homo Sapiens
taatataaaatacttgaggaacattcaaataagtagaggggacataagggttgctttcaccttcattaagtctgctgaaacgggatttttcagaaaattgtcaattaataaatagtaactggtaactaaattcataaagtactttgaaagtttaacataaaggtcatcttaatagaatcactggggagaaggggaatttccctgcctttcctagtttgtataatcaaatgttaactcaataatagaaatgttttgtttcttttaaaagttatgggttgattattacctataaactatcaaaaaatattttaatttactatttctgaccaaaaataaataatacaagtactaaaatgctgcaaattaactataatattacctataaaactactgattactgtgaagtcaatagcaaaatgatccctgatttatgaatcctgtaaagtttttggtcaggtcatcttttaaatgatacaaaagtgttctgtaagtttccctttactataaacttctcaatcaatttattaatgtaaatatagtgtgaggaata

SEQ ID NO: 217643 - DNA, 580 bp, Homo Sapiens; identical to SEQ ID NO: 60849
  misc_feature (580)..(580): n is a, c, g, or t

SEQ ID NO: 217644 - DNA, 309 bp, Homo Sapiens
ttccataaacacgagtttaattagcccctggggctcggcagggaagaaataatcagacttcaagggtgccccattccccagagtccattcctggtatttgaaagagcaacatgccccggagtgttgtgagtcctctggaggctcaaggagacgcccgggcagccgccggctcttcccactggatctccgccgggaccaactcccaccctcgccggacaagctcagacctgctgctccgcaaaaccagaattggaaatgctccagatgggacgaggaacaaggacagaaagtcaaaagcatcaacaggtg

SEQ ID NO: 217645 - DNA, 462 bp, Homo Sapiens; identical to SEQ ID NO: 61434

SEQ ID NO: 217646 - DNA, 791 bp, Homo Sapiens
  misc_feature (515)..(515): n is a, c, g, or t
  misc_feature (733)..(734): n is a, c, g, or t
cgggccccggggttgaggcgaggagcccgcggtcggccggtcgggcggggcggcggcgctggcagggtcctgagtttagcattacacttctcccagtggagcccatgacttctgatcaggacgctaaggttgtggctgaaccgcagacgcagagagtccaggagggcaaggacagcgctcatctgatgaatggtcctatatctcaaaccacttctcagacaagttccatcccacctttgagtcaggtaccagcaactaaggtttcagagctgaaccctaatgcagaagtgtggggggctcctgtgttacatctggaagcaagcagtgctgctgacggtgtgagtgctgcatgggaggaggtggctggccaccacgcagaccgtggcccgcagggatcggatgccaatggtgatggtgaccagggccatgagaatgccgcattgccagacccgcaggagtcggacccagcagacatgaacgctctcgctctgggtccctcagaatatgactctctngcctgaaatagcgagacaggaggacatgagtctcaaccagacagccagaaagacccccgagaagtacttgaaagaacatggcaattctgcttatctagggagaaccttgctagtgacatgtatcttatatcacagatggatagtgaccagtatgtgccaatcacaacggtggctaacctcgaccacatcaagaagctcagcactgatgttgacttganntgtgagttgctaagatctttaaccttaggtcaagtggatgataaggaagacaagtta

SEQ ID NO: 217647 - DNA, 557 bp, Homo Sapiens
  misc_feature (545)..(546): n is a, c, g, or t
tttttggggcttaaaaaaatggttttatttcttaaagacgaaagctttttggttttaatacacaaactaaatgaggtccttggcaggctcttccaccttccggcccaacccctccaagggttgtgggctgcagtctctggtggccaaggacagaagagctgggcccggctgcaggggcctcaacagcctcgtgggctcgggagtccaggctggacagacgggccaggagagctcatccaggagaaggtcacttcctgggcgtctgcccccttttctattgctgtccacccagggaggcgtctgggtcctggtgggactggacttcagttcaccgtaggcacctggctgtggtgcaggctgaactccttggccttgagacggaggctggcgatgctgttggccatgttgacccctggggttgcggggcctgagctcccagggctgtagggtggcactgtgctgtagggggacgaggctgtccaggagagataatctggactcagggcggtgggccggggagccacgggctgctcgatggcggcctnnctgctgtagga

SEQ ID NO: 217648 - DNA, 497 bp, Homo Sapiens; identical to SEQ ID NO: 59783

SEQ ID NO: 217649 - DNA, 567 bp, Homo Sapiens
  misc_feature (33)..(34): n is a, c, g, or t
tcctccaataaagggcagagccattttattggnntgtcgtaataacaggggaaggggggttaccaaggcaggaggagaggagacaggaggtgagggagaaagagaagggaagggaggaaagaaaggagggaaacatttcttggaagagttatctgtacattgcttgatggggattagaattgtgatcagtactataatacacccccaaatcaaatgaaaacaacataaatacactaaaaatatcacaagtaatgcttctaattgtttagcttctcacagtagtcacaaagcagaaactgacaaacctatgatttcctctaaaaataaacatggaaaacaatatcctcaaggactgctgttgttcttctctctttggctgtttttactgtgatggttacacctggctagctgcccatgaagagctgcttccttccctcagcagtacctcttccccctggcccagcggctgtcctgggctggatgtacctggcagcctcagcagattgttcatgtgttatttactcatacgcatacgttgtagcacacaaactgcttcctaggagacga

SEQ ID NO: 217650 - DNA, 492 bp, Homo Sapiens
aagataacctagatgtactaaaagaaacagtattttggatacagctagagagcaaggactcctggtataaaaggaaaggaatccttccctttcctttccttgggagtacttgttaactgggtctgttcagcaaactttagaagcaagcgtgtttttaaataaataagtctgagaagtaaaaagcaccactggaactacacagaagtgcacagcagtttcctacaacagagcaagcacaattaaaatatgcctaatcgcagggatgcacaatgctcaatacaacgcccccaaaaccaaatggctaaagatatatgcacttccagaaaaatattggttttactcaaaaacaatttctattgcaaaactgcccttgaattacatgagctttgatttatgggaggtttttaaaatatattgcggacataaaatgggacttccccataaggaaaaaataaataaaactggaaataacagtagtaaataaaatgcatg

SEQ ID NO: 217651 - DNA, 407 bp, Homo Sapiens
tttttttttttttccaggaccctggtctgtaatgaagggaatgaagggaggggctggcagggcactactggggtggtataggggacactgcttatattcacaaggccacgtggtccaagcatagcggagagcaaccacagtgccatgacaagaatcgatcgccagggtcagggactgggtggagacggtgttcatagaagctggaagccacttgcatcgatggtcactgcaacaggagatctcaaatatcttgttgtcctttttctgcacctggatttgctggtaatatgtgagattgagcagccccttgtgagccaagagttctatcttctcaggcagtggtccttcaaaggtcaaattcttctcaccataagccagagcacgggcccccaaatgcagccgataag

SEQ ID NO: 217652 - DNA, 544 bp, Homo Sapiens
ttttttttaccccaaagtatttttattagggatgggtgccaccatattaacatataaaacaatctggatgttgacatagaaatgcaaatttcactatacaaaggtaaggctccaatcacagtaacatggcccccatatctctagtatttcaatgaaataaactcattgtgaattcaccccgagttgtgtttataaatattagacaaaccacaaaatatattccaaatacataacattttacaatatttttcaagcacagacaaatacatactttactttacctacattgttttcatgatccaacttgcattagcactaaaggcaatattgtgtgtgtatatgtatttgccatatgtgtgtgtgtattatatatatttatttatatccacaaatgtacactcagtggcatttatggaaaatttaaccctttcaggctgtgggttttacccaccatagtatctgagagggagaagaaccaataatacgtctcaaattcctcaattagggcaaaataagcacaattatgcatgaggggcatatatgt

SEQ ID NO: 217653 - DNA, 498 bp, Homo Sapiens
ttttaaaccaaatgcaaaagtttattgaaaattaaaatcacggcgattcactaaagcaacagcctcaataacaagaaatcattgtcttggtgacagaaaatacagtgctggtgactgggtgtgggaagatggaggggaggaacatttttaaagtctttatgctattatcttaaaatatgtttttaaaatggaaagaaacagagattctctaaactttttgagttaaaaaaaagaaaagtagtctaccctttcaatctttaatttccagtccaggagtgctgattttaacacgtctgcttggatctcacttactcaaaacgtaagtctcctggctaaatgcactgaacagtatcagtaatatggctggttttatggtaggtaggcttgagggatagaagctctaattaagcaaattaatcacagattttgtgagagggcttcaaattctattttgagctttgaataatggtaaacaactacgtaagggcaatattactg

SEQ ID NO: 217654 - DNA, 530 bp, Homo Sapiens
ttttgactgttttattttttttaataaaaataaagatgagagaaattatttggacaagatgttggcaaatcacttttacaggtgcttgtaacctccaggagacctcagcttgactgtagaagatgcctgctgtagggcagttcacgttctggagtcgttcagcaccacctgcgaactctttgaccggaggaaggctgcctatacttcctgcttgctgggtctggaacagtcctggtttatgctgtttgtgctggcataaatagaatagcacggccttttattctcacaagtgactcagtttgacaataacttagtcacccttgctttgggcatgttaggtgagcttactgaatcaaagatttcaacaatatcatctaccttgaaagtctgtgaagcttggaggtcatataatcaaggtggctggccatgctgcctgctcagagctggtagagacagcagaggaaagcagctgagtactcctgagcttatttttccaacaccacagaacaacgttctctgaacaataaggt

SEQ ID NO: 217655 - DNA, 595 bp, Homo Sapiens; identical to SEQ ID NO: 60833

SEQ ID NO: 217656 - DNA, 522 bp, Homo Sapiens
tatatttttttaagtttattaaatttttttttaaatgggagtttcagacctgccctttgtggtttgtgtttttgtttgttaatacagggtctctgtctcccacgctggagtgcagtgatgtaatctcggctcactgcaaccttgacctcaaggttaagctccagcgatcttccgacctcagcctcccaagtagctgggaccacaggcatgcatgcgccaccccacccagctcatttcattttttatttttgtagagatagggtctcaccatgttgcccaggctgatctcgaactgctgggaatacaggcatgagccaggtgcccagcctttgttgttgttgttgttgctgctattttggcaacatcacggcagaacggtaaaggcagaaagcacagtgcccagcagctagcagtgtggcgtgccaagaaggctgttccaatgggggagaagccagcagacacagaggcatcatggcgagccccgactgagtgttcagtgaagagggaaaacagagacagtgg

SEQ ID NO: 217657 - DNA, 451 bp, Homo Sapiens
tttggtttttttgtttgttttttgcccctggtggcagtcctttggagaaaggacaaaacagaacacagaatccctcaggaggaagagtgtccactctctggaatcaggcaccagcatggggaacacaggctgtcatcttcaagactgcagccataccaggaagggaggtgaggctagggtaagctaaaatgccacaaagatctcttaccttgtttcagtgccctttcttctggcgaagtatttgcttggctgctgtaaacctttgattacctttccagagttttgataagctaaattctgacttttctgtcaaggtgtttggtgtttctgcagagggatgacccacagaagtcctactctaccattttcgctgacatcaccctgtcattgtggttttagtttgctttccctgatacgaatataccaataaggctaaacatcttgtcatgta

SEQ ID NO: 217658 - DNA, 564 bp, Homo Sapiens; identical to SEQ ID NO: 60781

SEQ ID NO: 217659 - DNA, 626 bp, Homo Sapiens; identical to SEQ ID NO: 59800
  misc_feature (587)..(587): n is a, c, g, or t

SEQ ID NO: 217660 - DNA, 454 bp, Homo Sapiens
gacaaaccttcagcctggatgattttttgccctttcgtatgagcgagccatagcttagctctataagaaattctaaattcaaaatactcctttacagtattttgtagaccttaccctactttttatgataatagatgagaagtctgatgcctacttacagttgctttgtagttaacctcttttgttcctctgaaagagggtagcaatttctctttaccactggagtttaccaacctcaccatgatatgtctaggtaacatctttttcccacaataatcctagaaagcacttgatagaacccttctacttgaaggcttaagattttccttaactttggagttttttttttctttttatcatttctttcttaccttccatgtcctctgtatttcctttagacagagcagctttcttagcttgagcctccaagtatcaaattttatttcataatttt

SEQ ID NO: 217661 - DNA, 542 bp, Homo Sapiens
gtaattattactttttattaatttagagcatttgaagtataaaaataaaaggcttttgacatactgtatatacatacatagccttctgttgtacatcctttccaacgtgttttttaaaatttatatttcagtccaatattcaataaaagggtcattaaaaacaaaacaaaattgtgaaaaaaaagaaataagaatgtgtctctgttgcacaactgcattctatccttgcaggtaatattcttacatccaatgagagcgctgcctgcatagaggtcatgaaattgaacctttaacctctccatgtggatcagatagaaaaggatttctgaagagtgcatttgccagtttaaaagcaacacttttaccatctatgagatagaggaaatatgtcaacattaaccaataataatctttaaaagttaaccctttaatccatcctattttccttctcgtattttaaaaagtggctttaaatcataattttctttgaatagcaaattgtatctgatatcttttaaaaattactccatgtgaattcactg

SEQ ID NO: 217662 - DNA, 490 bp, Homo Sapiens
ttttttttctttattctttttggtctttaaagtgacaaaaaagaggaaaaggaacacgctcttacaaaacagagcaagtttcttttccttgtactgttgaagcccggtttcccaggggccgcccttggcctcctccacacagcactggtcactcgtagcagcatctgcaggccaggtgccaggtgcccagcgggcccccacgctctgggatgaacttggagtgggagacggtgggtgggtcccccagctctcaagtgcacagagaccccgcacccaagggctggggaagaatcccacacgtgcaattgggtttttctgaagcctgcgggagaccaagctgagtctgcgagacagctgcctccaggacactgcgaggcagggaacagctgcccacaccagccgctgggcgaggccggggcgccaggcctggttcctccatgggaccccagcatgcgggcagcaggtgaggccggggcggcaggcccagttc

SEQ ID NO: 217663 - DNA, 410 bp, Homo Sapiens
tttttttgtattttttgcagggacagggtttcaccatattgctcagggtagtctcgaactcctgagctcaagggatccaccctgccttggcctcccagtgtgctgggatttcacacgtgagccaccgagcccagctacattcttatttcctaaactttacaagttcacactcttccctttaaacaaatgtgccccctttggcggggtcatttgagtcccggtgtatgtcattaagccctctaaacctcaaccactacttcccactgaaataactctattttctttttttctaatgaaaaagtaagacatgttctatgtaaaaattaaaatatggtgagcacttaccacttactatgagccaggcattgaactaagtattttttaatcttattttcatcctcgtgatatga

SEQ ID NO: 217664 - DNA, 583 bp, Homo Sapiens; identical to SEQ ID NO: 61616

SEQ ID NO: 217665 - DNA, 556 bp, Homo Sapiens
ttttttttttttttttaatctgaagtggtaaaacccctgggaattaagctgagcaggaacatacatttgtggtaggtaccttggcaatataatttttactttttggtgattttacaaagttcacagcataatttttttccccatgctttcagggatccagaaaatagtgtgttacaaaatttgaaagatgttttagaaattgattttccagctcgtgctatcctggaaaaatctgtaagttttatcagtgttttgatattccagacagtattgcataatgaagtttaaatgcttctctcagtgaaaaatgaggctgaaaaaggagggaattagaaaaatattataacacagacttctgatctgcatcaaaaaacttgtttacctttgattggttgttaagtacaactgtctcttggaacagggggattgatttcagggctgcccatggatacaaaaatccacagacattaaagttccacagttaccctgcaggacccatatatagaagaagtcggccctctgtatacagagatttcacataaacacaggttctgca

SEQ ID NO: 217666 - DNA, 534 bp, Homo Sapiens
tttttttttttttttttttttttaggaatgaaaggtcataagccattagaaatagtggcattattatgcaataacaacaccctagctaacctgcttttgtcatctgtagcacttacaataaagaatgatgaccttccaaccctggacactacctcgataaagcaaaccagagatcctctctacactttctatggaagccataaaagttgccatcaatatatccactttcatagttctatacttttatactttctagacttttttatagactttatgatcagatctttttgtctcagaggataggttttgcaagattcaaaggaaaatcaaactccttggttgttccagctttgaagcttttgcttcagtaaatttgtttaaagaaccagatcacataccatttatcaaattctttacttaagtcagaatactttgcagacatacatatttggaaaacaaactgtttcttgttcactagatagaatctgtattgtagtaagaaactacttacaaggtggctttctttctgctttg

SEQ ID NO: 217667 - DNA, 481 bp, Homo Sapiens; identical to SEQ ID NO: 61988
  misc_feature (4)..(4): n is a, c, g, or t
  misc_feature (52)..(52): n is a, c, g, or t
  misc_feature (54)..(54): n is a, c, g, or t
  misc_feature (71)..(71): n is a, c, g, or t

SEQ ID NO: 217668 - DNA, 646 bp, Homo Sapiens
  misc_feature (463)..(463): n is a, c, g, or t
  misc_feature (583)..(583): n is a, c, g, or t
ttttttttttttttttttcggtgagaaggtgagaagagacaaagtagaaaccaaacagatggctaaaggcagaggattgtgagggtctgactgaagcagcaggggatgaattcaggaaaccattcacagaaaggtagaatcaggaggacttgataacttactgactttgaagaaaagaagtcaaagatgaccgagttcctatcctgaagcctaggaagatggtaatgctgagataaggcatacagaaagaatggtgaagacaccctgggctacttacccaacctgatagattaagacagtataaccaaatctgccagaaagaactaaagatatataatgaaaggccatcttctgaacacttgaccattttctactgcctctaagaactccttcctccttgtcattaattagatgttaatgctgttaggcaaaatccagaccaggtacagagaaggtgaggganctattcattcaccactggagggcaatgggaaacttgacaaagcctgtctcatgatgcttacattctagagttgaagggaaacacaaatgttaatttcagatagtgatttaaaatatgaangaaatatggcaaacagaccaactggggtgatcatagaaagctgcttctgaaggagttggaatt

SEQ ID NO: 217669 - DNA, 583 bp, Homo Sapiens
tttttttttttttttcccctcaggccctcttggataatatttttaatgggtataaatttcatggttaataacatttcagtctcattaaataaaagtctctattcaaacctagttgataggtccaagctatcagaaagtgaggaaatatttatttataaaataagttaaaatttaaaataaacatttaatctttttggttattaaaaaataaagcttggtacatttttacatttcacaagtatgtctaaatttcatacaaagatgcataatagataaggttttacaaatatcttggattataacagaaaatcttaatggagctaacaaagtcattttctataacaacaacaaagaaacttatggtgataaatttaatagactattactaagaactatatgaaaaaaagtgactctactgcttgcataaaaggagaggcataccacatatgaagttggagaaactcactattacagatatgacatttccatataatttataaacatattgtaatgtcactgaaagtcccacttgcattttgtaggggtggagtaaagacctcggtaaaaagtcatttaaagttca

SEQ ID NO: 217670 - DNA, 711 bp, Homo Sapiens; identical to SEQ ID NO: 46669

SEQ ID NO: 217671 - DNA, 772 bp, Homo Sapiens; identical to SEQ ID NO: 60675

SEQ ID NO: 217672 - DNA, 666 bp, Homo Sapiens
tttttttttttttttttttttttttttttttttgaggcaaaagcggctatttaattttttaaaaggtgagttgatttaaacaagtgattagtttaaatggaggtgcagtagtggttatgcaaatctgtacatgtgatacaactgcacagaactgtatgcacaacaaaaacatcaatgcaggtaaaaatggaggaaatccaaacaaggcctacagttcaggtaatcctattgtaccaatgccagtttcctggttttgacaatgtgctacagttatgttagatgttatcacgggggcaatgtgggaggggagaccagaaatccatactattttttaacttcctgtgaatctaacattattttaaaatcaaaagtataaaaaatggaaatggtcaaaaacatggagggaatccacagatgactaaggactggaaatactggactgaaagctttcttgttgggaggccgaggcagaaggactgtttgagcccaggagttcaagaccagtccgggcaacatagcaagacctcgtctgtctaaaattaaaaaaaacattagccaggtatggtggcctgcacctgtagtctcggctactctggagggactaaggcagaaggattgcttgagcccaggagttcaaggctgcagtaagccatgattgtatcactg

SEQ ID NO: 217673 - DNA, 743 bp, Homo Sapiens
gttcatctttattatttctaaagcactttcctcaacctaatttcagtttttacaattggtactcaagaaaatagagacagaaatcatttgattttgcccagaaaccatctgcttatatttataaggccacctaatttgaaatcacatatagaccaggcgcggtggctcacgcctgtaattccaacaccttggaaggccaaggcaggtggatcacaaggtcaagagattgagaccatcttggccaacatggtgaaaccccgtctctactaaaaacacaaaaatcagctgggcgtcgtggcatgcacctgcagtcccagccactcgggaggctgaggcaggagaattgcttgaacccaggaggtggaggttgcagtgagccgaaattgcgccactgcactccagcctgatgacagagcaagactgtcccaaaaaaaaaaaaaaaataccacatatactttatctccaaaacctaatctgattataaattctaagctaggaaacaaaaacttttgggacaagtacttttttttttgacggggtctcctttgtcacccaggctggagtgtcacccaggctgcagtgaactgtgacacaaccacaattaattgcatcctcgaattccagggctcaatagatcctcccaccttagccttatggagtagctgggattgcaggaacgtgccaccacgccccagccaatttttggtattttatgcagagacagtgtttcacccatgttggcc

SEQ ID NO: 217674 - DNA, 1000 bp, Homo Sapiens
agatgaaaacactgctttttatctttttttcactacaagatcctcttatccacatagaatctcaatgaaaagttgaaccagaactgaaaatagtgctcataccccagagggatttttctggaaaaaaaaaaatatatgtgtgtatatatatatatatatgtgtgtgtgtgtatatatatatatgtgtgtgtgtatgtatatatatatatatattccaggagctgtattcccaactcagcagggttatgggagtcgggccagagctggacttttatagttgtctctttcattcctgctggttaaggagaagaaagaactaagtacaggtcctactaagttgtcactcctggagctacatacagtaaggggatgtgggaaacagcctagaggcttgttttctgaggagggaggtgatggtttgtggggaccatgagttaatctgcctccctgtcagcattttcgcactatgcaggtagcttcaatggctaagagtatgtaccttgcaattccaagttcaatgaaaaaggctgaaatgctctttaagaatgcatctcctggtcaacagattgttttaaccagagtcccaacattgccaagaagagaataggccagtctgagaaccaccaatctgtgtttgtgcattcattcatttggaaaaggcaatatagtatagtacttagaaacaagcactctaggctgggcttggtgactcacacctgtaatcccagcactttgggaggctgaggtgggcggatcacctgaggtcaggagttcgagaccatcctggccagcgtggtgaaaccctgtctctactaaaaatacaaaaattagctgggcgtggtggcgcatgggtgagggggtgagggatgagaatcgcttgaacctgggagatgggggttgcagtggaggtggaggttgcagtgagccgagatcacaccattgcactccagcctgggcaacaagagcaaaactctgtctcaaaaaaaaaaaaaaaaaaaac

SEQ ID NO: 217675 - DNA, 691 bp, Homo Sapiens
attgaactatatgcacacacatagaaaataaacatttcatataactgtatatatatttttaatcctgtatttataaagactgaaaaactaccaatttagcaattggaataagttttaaaaacaaaaagaaaaagcaaaaatctacaatccttcatcaagatttgatgctttatcacagttcataaatacttcattttatataaataagtcttttctctagttactaggaatttaaaattagacttacatggattctttaatcatgtagaattttcttactccatgatgaggaaggttgagcatgtcattatttttaaaatacatatatttgatttaaacacaatcccccctaaaatcccactgtaaacaaacatttcgaatgtgataaagtttcataataaagaacgtccttaaatcttagcaattagggaagaggaaaaaaaatctgagtaaaaattttgcaatttaaataaaaattgaaaaaaaggctgcatgcatccactagaaggagaggagaggaagggagcactgagtcaagtaacagagaatgggataaaataaagaagaaacgaaaggaaaatcagggaggacgcagggtacgaaaaggagaaaataagggaagggaggaaggagaaaatggtagaggacataaggtgatagaaaagggaaagtaaatttattatttctactt

SEQ ID NO: 217676 - DNA, 584 bp, Homo Sapiens; identical to SEQ ID NO: 60991

SEQ ID NO: 217677 - DNA, 627 bp, Homo Sapiens
cctttattatgtggctacttgaaaattttaaaattacatatgtagctcacactataaaacacagattagaaatattgtatagcactgacctagaaacctccatttaggtaaaacatcttaacccctttggaagcaaaatatgttaaataacagcataaactcccaccaagaaaatcctcaccttcctcctttcaacacatttattatatacagctgtcactgcattgtcaatctgccaaatggctctatgttccaacagggctggagtagtcccctgctcacaccagccttcacaatacttcccatgtcttccctgttaacctctctccacccagcacccaggctcccaactctcctggctgcctccagccctcagctggcaccactgacatgctgtttccagtacccttttcttctttctgcatcctccctgggggacatacatccctcatctcgtgacttcagctgtcacataaattcaaatgtttcagaactctattttttacctcctacatctgtcagtttaaatgtcaggatattttactttcagtaaagccctaaaaagacaaatctatgtacttttaaagaataaaagaaatgactggctgcagctcaaacctacaactg

SEQ ID NO: 217678 - DNA, 658 bp, Homo Sapiens; identical to SEQ ID NO: 45559

SEQ ID NO: 217679 - DNA, 732 bp, Homo Sapiens
caactctggttatattgaaaaacagcagcattgggggccattcaggggaggggcacacacccacccccggcccccgcagcccctctcctcagaactcgctcgcccccaccctgggggctgttttggcacatctggggcctcagaacaatctgcccccgccgtgggctcacagtacagtttcgggaacaaacagcagcaggtgaaccccaccccctgtgctccccaagcctggcctccccggacctgccctggagctgcccaggccctccacccaggccctgctccactgaggggcaagaggggccagggaggctcagcccggggcctggggcccagcagggaagccgtgagcaggacctgcttccccgggcactgccagcccaccaccgccgggtacctgcacagccacatatatgcaagtacacacacaggcactcgcacgcatgcatgctcatgcaacacacatgtacactctacatgtacagctcacatatgcatccatacacatgtgcatgctcacccatacaccagccacacacaagtactcatacgcatacatgcccacacacaaagtacacacacgtacaccatatgcatatgtatgcactcatacacttcatacatatgtgcccccctcagagaagtacacaagaacatgcgcatcacacatgcatacgtgctcatgcatacacacgcacatttcatacacacgtgcatgcttatgcatacccc

SEQ ID NO: 217680 - DNA, 646 bp, Homo Sapiens
ccttttttttttttttttgcatattaaaaggtgctttatttcattaggcactggaaaatgcaaattaaaaccacaatgctataccagtacacacgtacagacaggcaggcaatattagatattcacattggtgggtgggtaaattggtacaaactgcaatgtctactaaaactaaaaatatgcataccttataagccagcaactctatttctaggtataaatagccaacagaaagccaggtatatgcttaccaaaagacctgaatgtttatagcaacactcttcttagcatccacagtgagaactacccaaatgcccaagaacagtaaaatggataaacaaattgtgttacagtcgtacaatgggcatttagaataaacaatatagaaaaatctcaggaaaatattgagtgaaggaagcagacacaaaggattcaatactgtctgatcccatttatgtgaagttaaaaaacaagtgaaactatgctgtcagaatatagaatagtggttatcactgcagagaaggtgactgaaaaggggattgggaggctggttggggtgtgtaaaggcctgtttcttattctggaggctagttagatgagttcaatttgtgaacagtcaccaagctgtaggtggacatttgtgcac

SEQ ID NO: 217681 - DNA, 671 bp, Homo Sapiens
  misc_feature (21)..(21): n is a, c, g, or t
  misc_feature (241)..(241): n is a, c, g, or t
  misc_feature (389)..(389): n is a, c, g, or t
  misc_feature (553)..(553): n is a, c, g, or t
  misc_feature (580)..(580): n is a, c, g, or t
  misc_feature (627)..(627): n is a, c, g, or t
  misc_feature (638)..(638): n is a, c, g, or t
  misc_feature (658)..(658): n is a, c, g, or t
  misc_feature (669)..(669): n is a, c, g, or t
ccagggacccggggtcacagncctcactccattgcaggggtggggatgacagaggccagaggggatcagacaggggcagctgttgatggttctgagatgcagtttctgtctgaggggcctcctcccactcctggcctgtgcagaggggtgggtgtgtggagggaaggtgggtctgccctggtcaaacagcagaggcattgcctgttagtctcattccattccgagtgcccccagggagagncagccaccttatgtagagaggcaaggccagaaggcagggggggcctcccctctggtgaccaacagggcctgtggtacaagcagtgccggctgctgccctctctggcctttgtctccttccagcctctccgctattagcagaggagcanaacacttgacaggtggacacaggccacccccaacccctggccctggaggaggctccacagtggcctcctagagccaggagaccggactgagctgaatctgctgctcctgacaggacctcacagggggcgcctttgaggacaacctgaagtcactgcacttgcanggagggccaggacttccttcacttcanctgacggacccatggcaagctgctcccaatgcatcccaggccagcangaagcttttgngaagcttgcaggcatggccnaattggtgccncc

SEQ ID NO: 217682 - DNA, 646 bp, Homo Sapiens; identical to SEQ ID NO: 60296

SEQ ID NO: 217683 - DNA, 649 bp, Homo Sapiens; identical to SEQ ID NO: 60880

SEQ ID NO: 217684 - DNA, 742 bp, Homo Sapiens; identical to SEQ ID NO: 48739
  misc_feature (663)..(663): n is a, c, g, or t

SEQ ID NO: 217685 - DNA, 661 bp, Homo Sapiens; identical to SEQ ID NO: 61249

SEQ ID NO: 217686 - DNA, 560 bp, Homo Sapiens
caaaaatttaaaaattagctgagtattggggcatgtgtctgtagttgcagctactcaggaagaggaggctgaggcaagagtattgagcccaggagttggaggctgcactgagctttgatgacaccactgtactccagcctgggtaacaaagacagaccctgtctcttaattaaaaaagattgattctaggactgtggaagagatagttaaacagcatgggatatgaaggaaatcctcagcagtattaattttgcattccaatttcatgttgacttgatacctacgatggctttttgttttaaaggcttttatcttgagaacatgatgtctgtagttaaaggtattggcgtattccacacatctgtactattcttgagtatgatcgcttagggtgtcaaattgagaaccaggcagatccaccaccacaaacactgggaagcctcgtctttttttccaagcttgaagttagaatcactgaaaggtttttggcatacatcatcattaattctatagaactatccactgagtaaaactttaatcagtttggttccagaagcctt

SEQ ID NO: 217687 - DNA, 559 bp, Homo Sapiens; identical to SEQ ID NO: 46448

SEQ ID NO: 217688 - DNA, 698 bp, Homo Sapiens
ttttttttttaacaaaactaagatggacatttcacacaacgcagagctacgagaacatctcttatgctccttgccatgggattttaatgccccaaggttcataactacagcaaagaaagtaagtcaaaaataaactgagcttaaagaaggtggcaggccaattttcccaaaaagactgtggactgtgggctgctgtgtagcctttgctacaaggctgaggaagcagaagaaagatgaattgggcaattggtgatgaaaagtatttgccattttcaaaggcttctcagtgtggccatagattttgctagtcaatttttaaaaaattatatttttagctcaacacacagctctaaagcagggttcagtgtagtgtgttctctaccgaaatggttatatacagatggtatggaaatggttttaaagattactcataaactatccttttaaagaaaaactagactcggtcatatttgttaaaatgagcaatgtcaccaaacagaaatgtaggtgggaaatactgaaccacaaacatttggagttgcaggcatagactagcagagcatgaatagtcatcactgtttctataatactgaaacactcaaatctgtttctgaggtttaaaacacagagctatattatattcataaacttccccctccacttaagttatatttgcctaacacataatggacaaatca

SEQ ID NO: 217689 - DNA, 572 bp, Homo Sapiens
  misc_feature (97)..(97): n is a, c, g, or t
agaaatgttttaattaaacagatttaaaacttaaaattttaactgatggactaaaattaattttggatgaaagtgataattggggcagagaatattntttttcacaacagaatgccagcaaaaagaaattaaaattaattttggatgaaagttaaaatttgggcagggaataatcttttttacgaagaatgccagcaaaagcaagtataaggtaatattttgagatagaaaattttcattgtgcaaacataaatgtaataactgacacaggcggggtgattaattggtgataaaatgttctgaagaagatcattagaatacaggatatttatactatttcacaccactttccaaattacttacaaataagatgtctttacaagggacagagctcctagacccctccttaaccaagtgaccatcctagtatcaccgcattggggatggacacactgggccttctctgcctgcagatggactgaggtaggaagctacagcatggactctgcagagttcctggcaaaatgtttaggctggatttaatcatgacgacattttcagataacttcaga

SEQ ID NO: 217690 - DNA, 515 bp, Homo Sapiens
  misc_feature (502)..(502): n is a, c, g, or t
tgagacggagtcttgctgttacccaggctggagtgtggtggcacaatcttggctcactgcaacctgcccctccttgcttcaagcaattccctgcctcagcctccggggtagttgggattataggcacccgcaaccatgcctggctaatttttgtatttttagtagagacggggtttcaccatgttggccaggctggtcttgaactcctgtccttgtgatctacccgccttcaccctcaaaagtgctgggattacaggtgtgagccactgcacccagtcaaaaattttttagtgttagatttgcaacaacatttttttttttaatgcatgtgcatcagtaacttttatgtagacagttttcaaatatttcattgtttctcagcatacttcaactcattaaatctttcccagtcttcctcctgggcatgcatacatgtcaacatcagttcaatttcctgtccagggtacacaatgagccttgtgtttgggaacctttgacctgntcataacgtacca

SEQ ID NO: 217691 - DNA, 603 bp, Homo Sapiens
ttttttcagtttcaccaaaattcctttatgtaagtaaccctctcaacagtgctaagaagtaagtattgacattttcattttgcagatgagaagcatggattctgggacgtcaggtctatgggccatccaggtcagaactctcttgacctcgccctgcaacgggtcctccaaggaccatgagccttgggggaggcgggaaccaggtctgattcaactccgtatgaccaggtgcagcacaatgtagggctcaatctgagttggaatatgacaccaagaggaacatcccaagtccccgagtcaggggtctgcgccccggtggacagtggggtctgagagcgaccacctaccgaggctcctcttctcggcgtgggggggtctgcagctggatgggacccaggacgacgtccaccttttcctggtaggagcccacatccctcttcgacctcaacacacagcctcggtagcagcgggaagaggggtcatacgctctgcacaccaccattttacaacgcaggtacacggagggggacggttcaggaagtggaaggccctgaaccggaagcgggcaatgcgaagagacggcgaggagtgggtccgtagtgt

SEQ ID NO: 217692 - DNA, 548 bp, Homo Sapiens; identical to SEQ ID NO: 43957

SEQ ID NO: 217693 - DNA, 456 bp, Homo Sapiens; identical to SEQ ID NO: 58265

SEQ ID NO: 217694 - DNA, 502 bp, Homo Sapiens; identical to SEQ ID NO: 60537

SEQ ID NO: 217695 - DNA, 709 bp, Homo Sapiens
tttttttttttttttttttttgagacaggatctcactctgctgcccagactggaatgcactggcacgatcacagctcactgcagccttgacctcccgggctcaattgatcctcccacctcagcctcctgagtagctgggactatagacacaccaccatgcccaactaatttttgtattttttgtagaccacggggttttaccatgttgtccaggttggtctcgaactcctggacacaagccttggcctctcaaagtgctgggattacaggcgtgagtcaccatacctggccccagttttatttgttaagggaattgggtgtttgtcctaattttcttcattctagactttgctgactatatccctggggaatgtatgttatgctattttgtgtcctcatcttttcatataacttagcaaacattccccatactgccacagggttttcacaatctgtcctaaatggcttcatactattccatccagtggatatactgtaatttttttcttgggcatttggttgctttcagtttttcactactataaatattgctggaatgaacatcctgacacattgcagcttttcctggacatgggatgacttccttagaatatgctaccaaaagtgtaattatggctctgaggcaagaagaatttttcagcttcttggcacacagtgacaagtgtttgtccaagggtttgtatgtccc

SEQ ID NO: 217696 - DNA, 596 bp, Homo Sapiens
tggaaaatccagaatcaaactttatttagatgttaggcttgctctgatacagaccttcaaaaaaacaaatcactggagcttctcatgtcagcagaatctggtttaaagaattccttgaacctatcagcagcaggatgtaaacattcacaagaatgctgtcacttctggctgctgtgggcagacatattctttttcaaagacatagttgaagagctagccttaaaatttgtgagaggttgcaagcctgcaaacaactttttttctagttcttcttggatcttaagaagaattctctcctgttctaaggcttctatatactttgagtagcaccaggttggctgtcggccatatggttggaggcctaggaaggaatcactgagtaaagcagttttgatagcaggcactgaagtatttgcatattgtttgattccatcctttccagatttttcgtcttctaggactgccaatttttttttctgcttattatattcttgtcttctctctaaaacactcataatattttcatctgttaaattcttcctaaactcacagaactgaggccagaatttaaacagaaccccaaaaattgtcatctg

SEQ ID NO: 217697 - DNA, 666 bp, Homo Sapiens
tttggagatctaaatccaaactttatttcagagcttaacttttgattctgtgttttatgttttaaagtacattataatttagtaaagctgttttctgagggtatttagtgaaaaagggatcattatgtaagtgaaaattttttatatcatcttcctcttctccctggaagagatgataaaatcagtcctcggccttgatgtgaacatcgcataccttgagttggtgttaacaaattttcttcaaccttttttcaagcagtgtcagctaaatggtgccatttgcttatcactcttctttttggttatttatcctaaagataagaacattagtaagccgtaaatgcccattttgtaaaaactgcatagctagacagatttgcaatccatattagggtaataatccatctgttatggaactggatcaattttgtaaattaaatagattaaaaagggggaaaaagggccatgacttttcccacagtaagccttttctcaaatgctaaaaagatttgggaagactcaaactatttgccattcttcctctctttgcttaactcagagagaaggccaaatatctattaaaaagaggggtgggtgcagttgtttttttttttaaattcttcagggtctgattgctcctggaagtttcatatttttgacagagtt

SEQ ID NO: 217698 - DNA, 638 bp, Homo Sapiens
  misc_feature (592)..(592): n is a, c, g, or t
ggccgccctttttttttttttttggttgtttttggttgcaacaactgttttctgtctacagaaccttttttaaaacttcggaggcagtagtaaaatcattaatattcacaggaaaaataattcccatagcactttacaagaaattgatcagagtgatgaaaagtgcaattaacaaaagctgtaaacagtatcttcacattcattttcaaatgaaaagaaaaatctgtgggcataaatttcaatccaagagaacaaataccctaaaagggaaaagaaaaaagaaggacatttaagatataggagtgcttttttccccccaaagtaaatacagattaaaaagtctaagaatgttgatcaagtatcaaactgataaggaacaaattctataaactacaaaataaaaaccttcattgacaaaaatacataaactctgttttcatttttggaaatttatttttaaaaaaggtagaagaaaatacctggaaaactattttaaatatatatatatatatctatattttaaaacaatagttaaggtaggcatccaacagcaaactgaagctattgagaaagatcttgcaattattggtgngggcattttcccccaaaataaaattaatatttgaaaatgctcaata

SEQ ID NO: 217699 - DNA, 588 bp, Homo Sapiens; identical to SEQ ID NO: 50064

SEQ ID NO: 217700 - DNA, 720 bp, Homo Sapiens
ttttttttttttttttttttttttttttggtagatatgaggcttcaccatgttgcccaggctggtcttaaactcctgggctcaagtgatccccccctttcggcctctcaaagtgctgggattattggcttcagccaccatgcccagccaaggaccttgtctcttgtgacgtactccagaacaaaacatcactgcaaaaacacaccaaggcatgagttttagtcctaagtcccacttatccaccatacactatgtgccaggcacaacgctaagtgcttctatggacgagcttcccttaatctcagcagcaacaaccccaggcaatggagcctgttgacagatccatttgccactgaagacagtaaggctcagagagggtaagtggcttgtgccatgtcagccagctaaggaggggcagaaccaggatgcaaaccccagccgcctggctccagaatcgcgttccaaaggtctcactacacttggtcactccaccgcattctggtatcctggtctttggcagagtccaccgtaaaagagggaggtagagggagtgagagggacttcatgcaataaagtttcccggcgttacactgccaccgtaattgtgtccccaaccaggacctctcccttctcatcctttccgtgatcggccctggaaaaccttccaaagaactggcctccttctcccgggatctcagagaaaattcacctgagttcagtg

SEQ ID NO: 217701 - DNA, 276 bp, Homo Sapiens
  misc_feature (59)..(60): n is a, c, g, or t
  misc_feature (175)..(175): n is a, c, g, or t
  misc_feature (273)..(273): n is a, c, g, or t
ttggctcactgcagcctctgcctcctggattcatggcacgtcctccttgcctcagcctnncaaatatgctaggactacaggcccccacgcccagctgattttttgtatttttagtggagatggggtttcatcatgttggccaggatggtctcgatcttttgaccttgtgatccgnctgcctcggtctctgagagtgctgggattacaggcttgagccaccgtgtccggccagttttccatttttaaggtgttccaaaggccattttgtgttanaaa

SEQ ID NO: 217702 - DNA, 647 bp, Homo Sapiens
actttaattcacattttctagattctggtgggtacaacagtaaattatttggaattctgttcaaaatcaaagctgcacctgtagatattccttaaaatacagtacacatagatttgtgtgtgtgtttttttaccaaataatttccacgataccatgcacctaatctgtgtattttggtgagtagctatggtttctgcaggtacctcagtttgcaaactactgagaggtttactgtgaactgttcccaaattttcagctgaaggcaatgctgatgaagatcaaaatagctgtcctttcttatatacagtggcacataggcaaagttgaaaaacatggcagagtttcatatacatacagagattacaaatatcgaataattcacaatgttaaaaatgtcaaaataaaacgttttgacttatcaaatttcaaaagtgtggagtcttattctgtctgatcctcctcataatctaagaatcaaaacaggagaaacattcaaagtttaccaattttaatatatagtttgtctaacttacatagatgccacttaagtaaaaaataaacttacgccattgaaggaaggaatattttccttttcttcattttcattacttcatcagtgggtacaatcatttctgtcagttatattc

SEQ ID NO: 217703 - DNA, 719 bp, Homo Sapiens
ttttttttttttttttttttttttttttttttttttgtatgtacattcctctttatttaatacaacaacaaacacgtaacatatacaaaaagaaaaaacactcattaaaaggccctgtcacaaaggatagacaggaaacatctacactgaatcaaataaggctcttgcttcaaaaacaggggtttgctagctacacctggaatatgagcaaggctgttgcaaaaaaattaaaaaaaaaaaaaaaaacacaaaaatccctgcactgaaggagtatattcatgggggtaatttactaaattcacaggtccatatttaggaatgtttatgccctctcacatatccaaaattcatcagggttttatgaaatgtgtgatttttttttggttaaaaaaatttacctgcccttcttttttcttaggaaggagtgataagagctttctaaaaactagagacaagcaaaccatccaaagtgtgaaatgttttaccattaaagttcaaagggcacgtaaaactgaaaatgcaaaggcaagatggcagtgggaagaagaacgtgacttctgcgtcatttcctggtagctagcgtttagttaaccaaatggaaatacctcggctcagggcagggttcagtagcagcagtttgtccatattcctgctccgatttgagctggaaattaaacaagcaccagttcatctcaaaagagccttatacaaacacacac

SEQ ID NO: 217704 - DNA, 611 bp, Homo Sapiens
  misc_feature (600)..(600): n is a, c, g, or t
gaggttgtcacatacatacaatcttaaaaatgtcaccctcatatattaggattacaaataagcatattacataatagactttacattcatgttttatactgtatttccaaaacttgtaactatttgagataattttacattttactttagctaatgagaatgaaaatgcatatgagtctgacattacttaaagctgactttcatatttaagacagtaagtttgaaaggaacacttcaaatgaaatattaaaggtaaagggtatatgttaataaaatgaaatcaattaagatttactcaaatgaaggctggaaaaagtacccttaatagcaatctttaaaaaaaaattgcaattaccatgtctttcatttgaaaagactgtcatgcaggtgagacatttagagtaaatatgtactacttccaatgttttcctagaaaagggttttatgtatcagacactcaaggtaaaaaataaatttaatctacttttaatatttaggttacacctcaaactaatctgacaaatcttagtttttataaggcaaaactgctaatacgaaagctcttaaaattcttggttttatttctccaaatctataaantaggatttacc

SEQ ID NO: 217705 - DNA, 570 bp, Homo Sapiens; identical to SEQ ID NO: 58925

SEQ ID NO: 217706 - DNA, 606 bp, Homo Sapiens
ctggtgcctagaggaaggcaggccaacaaattcaactctgattatttcaagattcttaatgtaatgtcttaaaacgtaatcttcccttttgttttcaggcagtatccagtctgatagcagtgggtacatctcatggattggctttaatatttggtaaatttttaagtgctttcctgcttttaaatattaagtgtccttttgggttttataatgtcctttaatcacagtttatatagtgtacttgattttcttgaacaaaaccagaaaaacttgaaaagtagcagtcagtatttttatagctaaaaattatttgcctcacagctttgttttgctgcttattgcaagtttattttcttcttcatgaatttataagctatcatatctattgatctctctgcaaacctagacaaaaagaataaagttgaagggaaccttgggttatcatcttgtctgcctccggttgttggtggtggggatttttgattctgaatcaccttccagtaatgggtattctaaaagatcttcaggaaaacaggctttctcagtaattttcaggagctctcactgacaataagcttttttaaaaaatttccattgtaaatcact

SEQ ID NO: 217707 - DNA, 535 bp, Homo Sapiens; identical to SEQ ID NO: 47933
  misc_feature (525)..(525): n is a, c, g, or t

SEQ ID NO: 217708 - DNA, 582 bp, Homo Sapiens
  misc_feature (560)..(560): n is a, c, g, or t
tttgaggcgggaagcttgtatagtttttattgtttttgctgtgtgttttccagccaggttgtttgtagatgtctgaggtttttcttccatcaggctatctttagacccatttcttctctgatgaactgtagcatccccagaaccctgagcatccgaagaatgggtcaccggaagtggtggtacaagatctgtttttgaattcacttccgagagaactgatcgctccccatctgaacactgggacctgcgatactggcggtaacttcgtggcgaatgagaatgcctgatgcggattgggtcaccttgtgtctctattttagtgtatggaatctcttttaattgttcttcggacaatccggatggatccacaagttctttttgaatgtgcttccataactcttcttttgcttggatatcggggcttctcgaacgagatctgtgtctggatcgcctgctgttggggtcggcttggtttttttccttttgtctccttaatacagcttcccactgaggcgctgaatcaaccatatcattctcctgccgtattctgtttctctttntcccgtgttctctattagaatt

SEQ ID NO: 217709 - DNA, 454 bp, Homo Sapiens
ttttagtaaacaaacacgtttttattgaatgcctgctatgtggtgacccagtaactgtggagaacaatatagatatttaagatttaaatactatcctccggcgttctgagaccctcctttctgtggcatacaggtcttagaatgttagattcaagaaggtcttagatttatgcataagtcccccattttttaaacaaatagaagcaaactgattttccactgagctctgtgtttctgaggtgcacatccttgttcctgtgactttgacacctctgttaatgggtctgtaataaaaattcctctggttcgggtgagtcccattcccatctctctcatttcaactgctccagtggaaatgtggtctggaatatgcatgaaaggggtggatccagaatgtacgaagaaaccaagtagaagcttttcacgggatctactcggatgtctgggatctggc

SEQ ID NO: 217710 - DNA, 755 bp, Homo Sapiens
  misc_feature (632)..(632): n is a, c, g, or t
caagagggatgctgggtttattctggtgatctacgcctgaccacctgaggatgcccaggctccaatgtcagggcccaggggaaggcatccgtgtaagcaatgccctcagctcagggccctccgggagccaccagcccaggacaggctgcacagccgcaccctcccggacctccctgctccccagccagagaggacagggggccaggcaggcaatgcaaggccggtgtggcctgagacaccccctaccacagcccagctgtgtgtggagacaaccaagcagggctcagccagactgcaggacctggggtggggctgagggtggggaagagccggcgtggagggctcccctgggcagcgggagctcaggcacaggcagcctcagccttctgtgtgctgcctgggggcccttccaccttgctggccaggctgtagtaacaggctcgcatgcgctgctccacggtcaggaagtcggggcgatccttccacttgtagatccagcagtcactcatgagtgcgtacagttcgggtggacactctggtgggcactccatccgcttgccctgctcgatgaaggccatgacctccggccctttcatcttcttgtagggcttctggccgtaggacaaggcctnccacatggtgaccccatagcttcagacatcgcttgcgctgggagactttgcggagttgatgcattcgggtgcgtaccacttgagcgggcacttccctgctgaagcggccatgtagtagctgtc

SEQ ID NO: 217711 - DNA, 305 bp, Homo Sapiens
ggatgaagcttgtattaatgccggataacaaaaacaccaattgtaatatgatacttggcaaacaaattttaagggtctttacttgcattcaaacagagactcaggctataaacagaaattccacagaatgccaacagatgtcactcataaggttgtgttgtcctggagagttccaggacaatatttgttttagagaccacttccacatgttcactgctctgctgccaagtacaggttctctatagtgtttgtgtagggaataagtgacctgaaagtatcacaatgttttaaactccacgtgtgta

SEQ ID NO: 217712 - DNA, 411 bp, Homo Sapiens
ttttttttttttttgagacagggttctcccacctcaccctcccaaagtgctgggattacaggtgtgagccaccatgcctagccatgactggcttcttctgtacattaatcttgctgccctatgggatatttcagctgtagcatacacaacccactagcaacttcctcatgtctctcaattaaaaactcttgcaagacaatgcatcattttgaccaagtcccagaagttattggttttcttagccagttagataggcccaacttggttaggtagttaactccgttagctgtgaccaatatgagctatgtctgttggacatcatgggtttgcagagatttttctgagggaggagggcagaggatgggcagagcagacctacattattacagaaagatggaactaggattccaa

SEQ ID NO: 217713 - DNA, 407 bp, Homo Sapiens
attttcttctcatagctttaatttagtttaattttttgagacagagcctcactctgtcgcccaggctctgttgcccgggctggagtgcaatggcacaatctcggctcaccgcaacctccacctcccaggttcaagtgattttcctgcctcatcctcctgtgtagctggcatgacaggcgtgtgccaccacacttggttaatttttgtatttttagtaaaggcagggttccgccatgttggccaggctggtctcaaacttctgacctcaagtgatctgcccgcctcggcctcccaagttgctgagaccacaggcgtgagccactgcacctggcctcatagcctttaaaccacctcagagaccttaatctggtgtcgaaaattcaaacaacttattaccactgatctct

SEQ ID NO: 217714 - DNA, 415 bp, Homo Sapiens; identical to SEQ ID NO: 49513

SEQ ID NO: 217715 - DNA, 539 bp, Homo Sapiens
  misc_feature (473)..(473): n is a, c, g, or t
  misc_feature (490)..(490): n is a, c, g, or t
gagtcttaagtatttcaaaataaaagtggttttaaagtaaattcatagattaaatgtatcattatctatatataaaccatgatttaaaactttaattttctaaacatagtattcaacttagttgaataaatatatgatagaagttaaatagaatttttatttcattcttaagaaaaactcatgtttgtaacaaatgatatctaaagatctattttgccttaccagaaaagaaaaaaaaaaccctaaaaccaaaaactccttttccctaggaagtcaaaaatgctgtgatttaaaatatctaattatatttttttctttctatggtagtggggtttacttctgaggataaaatattttgaaaaagctctgtcccttgacatggtagttctcccgtgccttgtacttgttctctctccatatgcacagtgtgacaagatgctcacctttaatgaagaaggtgtagcttttcgttntaagctgtaattgtctntgtcttgatttggctatttttataactgaaatcctgagcaacagagata

SEQ ID NO: 217716 - DNA, 544 bp, Homo Sapiens
ttttttttttttttttttttactggggcgttaggctttattttaatgtaaacataaagcacacatctaaactctgagaaatacaggtagatatgctggtttacctatttgtatagtcaattcctgtttattatgaaacagcgttatctctttgtgtatcttttagctcatatagtcaaaccccatgctgccaacctcaggactaaataaactgagatggggctttactatctatgacagaataaatgtttaaggtgttgcaaagccagacatgaatcagtttttctgagtgattggaaacattttggtacgatttatatcctaactctttttgaccattagcagataaatagggactattttcctgctaacaggctattttaaaatatcattaaaaacaaattgtatgcagttgtatatcctgtttcagttgtatatctaattatatgccacattctttcaaaaaattggcttttcattcagttgtcttaaatttgcaagacgaatggtaacaatgtctttatgaagatcacaattttgaatgt

SEQ ID NO: 217717 - DNA, 531 bp, Homo Sapiens; identical to SEQ ID NO: 61452

SEQ ID NO: 217718 - DNA, 530 bp, Homo Sapiens; identical to SEQ ID NO: 59953

SEQ ID NO: 217719 - DNA, 281 bp, Homo Sapiens
gcggtcgtctactactactatacggctgcgagaagacgacagaagggttatttggtgctggagctctccaaattaagaatgggtagtgacaaactttgaacaggtaacaaacaataaattcaaagtatatttaggattaaacagtcaatttctaaatgggagtctatcatgtctcccctttgcaatactggcttcccaacaggaattctatacttgtccagtccaccataatgggtattctcattgaaaaaaaaaaaaaaaaaaaaaaaaagtcgtatcga

SEQ ID NO: 217720 - DNA, 404 bp, Homo Sapiens
aatcaatacccgagataacagcagaagcaaaaatccaccggtgcgtcagcaagcagggcactcggccattcagctccatccttccttctgagctgttctccagcaggctccggccgcagctccaggccactagagcagatagataatgtaggacagaatgaccaggcctatgatggcaaagaacatcaggatgaaaatatccagcattgtggattcctaggccgaccaagcccctggattctggtgaaccgtgagctgtgagcacggaggttgcagtcggtggagagaaatggctccccttcactccacagctcagccctggttctttcccctccccctcccaggggcctgagactgaaggatgctgcagctccaccagcagcttcctgcccccccaccaacca

SEQ ID NO: 217721 - DNA, 446 bp, Homo Sapiens
tcaattctcaacctactaagttgaaggtgatggtgctatatctaagtggcagacagagataagggataggtgtctacaggggcaagatttggagccaggagaagaaatgagctctccaagggtagtggagagagatctgggatgttgggggctggcaggtaaatgctttaagtgatagaataggaggaatgagaaagccagcagaagaaattcacgtcccatgtcttccatcatctatatgtctgacttgtttaagtggtcctggattcaccaaattttatagagctctgcctctgcctttattgggtaggcctgatttttgatgatgtccttaaaaggctagcctgattcttcttgtagttttgtagaacactttgtatcgagagttctctgataatgaaagtggtattacagaataatctgcccccgaaggactcctgattttg

SEQ ID NO: 217722 - DNA, 351 bp, Homo Sapiens
tttttgttctgaataacaaattttattgatttccaggtgcttttgaaatacagagaacagtggtaaacaaagaatttgcctccagtaggaactggaaaactaacagtcctaacccctgctaatatcgacttagtcataggacagaggatgggctcaagcttacatctgctctttgaaacacgctaaacaaataatagtttaaatgagacattgctgagtaggaaatggctaaattacaggtaccaatttttaaaaagtgacgtctcaatttagaaaataaacaggaaatagtttctctgttttcaagagaatttcattacatagaagcctcttaagcagaagttccctggt

SEQ ID NO: 217723 - DNA, 409 bp, Homo Sapiens
gagatatagtctcactctgtcgcccagtctggagtacagtggcaccatcttggctcactgcatcctctgtcgccagggttcaagcaattctcctgcctcagactcccaggtagctgggactacaggcacctgccaccgcgcccagctaatttttgtagtttttagtacagatggggtttcaccattttggccaagctggtctcgaactcccgacctcgtgatccacccactttggcctcccaaaatgctgggattacaggcgtgagccaccacgcccagccgccactagcatgattttaaaaatagtatcaaaaattcagacaatcaaaatgtgatttaggctctgactgaaataaaatttattttattcaacttaatattaaacaatatggactactggtagttttgt

SEQ ID NO: 217724 - DNA, 451 bp, Homo Sapiens
tttttctgataaaatacacatttattagaactttttcagcagcattatttccagttgtttatctaatcaaagtaattacagtcagcactcaaaatatcagcaacaaatattttgagaactctggaataaaataatcagtagtatatgtttcattcattcatccatccatccatccatccattcattcattgtttaacaaatgtgcaatattagcacagagagtcaggtatgctatttgctatgggaaagtgtatattcctgccatggttcctgttgtgcagactatacccactatttaagaggagagctggaagccaggcacagtggctcacgcccgtaaccccaaccactcaggaggctgaggtgggaggatcacttgagcccaggacttcaagatcagccttggcaatatagcaagactccatctctaaaaaaaaaaaaaaaaaaaaaa

SEQ ID NO: 217725 - DNA, 286 bp, Homo Sapiens
gaaagtttatcacagatcagaacttgaaaacaccgtaaaacccccacagaggattcaataaacaaacaatacgataccaaagagccgccgccgacaacaacaacaacaacaacaacaacaacaacaacaaaagacatacttttttcaagggtatccatgtggaaaatgctcagtataaataggctactgaggggaagagttcccacactgagtacgtgaccccttcctatatgcacaggaagaagactgcagagaaacaccatgcaagcagtggctgtctctgtgg

SEQ ID NO: 217726 - DNA, 346 bp, Homo Sapiens; identical to SEQ ID NO: 55836

SEQ ID NO: 217727 - DNA, 531 bp, Homo Sapiens; identical to SEQ ID NO: 48625

SEQ ID NO: 217728 - DNA, 521 bp, Homo Sapiens; identical to SEQ ID NO: 60384

SEQ ID NO: 217729 - DNA, 490 bp, Homo Sapiens; identical to SEQ ID NO: 60463

SEQ ID NO: 217730 - DNA, 497 bp, Homo Sapiens
ttttttggatacagggtcccactctgtcacccatgctggagttcagtggcacaatctcgtctcactgcaacctccgcctcccaggttcaagcgattgtcccgcctcagcctcctaaatagctgggaccacaggcatgcgccccaacgcccggccaatttttatattttcagtagagacgggtttcaccatgttggcctggctggtctcaaactcctggtctcaagtggtctgcccgcctcagcctcccaaggtgctgggactacaggcatgttcccggctaaaactaacaatatttaaatggacgaaggataagctaagatatccataaaagcactttcaggtaatacagcatactttttcatctttgttctttgccatctttgttactgtcttatttacatttgcaatttttttaattttttatttccacaggcttctggggaatacgtggtatttggttacacgagtaaattctttagtggtaatttctgagatt

SEQ ID NO: 217731 - DNA, 531 bp, Homo Sapiens
aagaaagcttatattaagcacacattacattaaagtactgtttgcacacacagtaaagatgagattgcctttctgcctatggcaatggctagtccaagtgtgggagcattgaaggccattattatagatttccctttttagataattctgtaattctatggcagggacatcagctccatgactacacaatcacacattcactagatagcaccttgttatgttaccagaatatagcccttagctccaaatcaatgctatataaacattctattctgaagctttttaaacagaattttcataattactctgcatttttgagaatccttatactttgacctagcagactgaaggagaacagggatgagagaggggaatatggaaaggatacgttagcagaaagttcaatgaagttacttcaaaaagtggaacaaactggtcaacataaagataagaaaaattagcaaaattatggtgctacttatagaaagaatgtcagttaaggtacttagagagatcacagaatcatcatct

SEQ ID NO: 217732 - DNA, 459 bp, Homo Sapiens; identical to SEQ ID NO: 55785

SEQ ID NO: 217733 - DNA, 445 bp, Homo Sapiens
  misc_feature (373)..(373): n is a, c, g, or t
  misc_feature (421)..(421): n is a, c, g, or t
gcgtcgacggccagggtgccggaagtgtccacaggtcttagattccctgttcagacgaaaagatttgtgcctttaatgataaaagtgatctgcatagagtcaaaaattcaagccatgggtataaaatgcaagtaaaatccctgccctcacctatcccaccctactacacagagatgtcctctcgagtttcctagactcactctggaaatttctgtatacacacagaagcttgtgcctctgctcgtgaaggcagagggagggagagctgaagggccagcaccttctcacctgtgggccccctcagtgctcggtcccagagcatgcaggactgtgcctcgtgttcagtttgctggtctgacttcatgctccttgngcaggatatgcatgtgccatgctaggagacatgtggatgtgaagctgngggacaatgtcccctggctatgcc

SEQ ID NO: 217734 - DNA, 403 bp, Homo Sapiens
gcgtcgactttttttttttttttcctcaaggagctatttttgtgcccttggttcttatgctcaaagcctgcaaaagagatcagaacctaccatgaaaaacatatcccatctccagaaaggagcttcacatctcactttctcatcttttggaggagataagacagaggtcttgacttttagaaagttcactgcatcccttggtgggaccctgggaggccctggccaaattctactttgagtgatgacattctgctcaccccaagctctgtgctgcttcagttgcacagaggagtatttattgctacttcctgcccttgaatgttttgcagactttctctattctgtttaaacaaatgctgtgtttcacctgtcagagccccatcccctggaataaaggtcgacg

SEQ ID NO: 217735 - DNA, 550 bp, Homo Sapiens
gcctactactactaaattcgcggccgcttcgacttttttttttttctattctaatctattaacttttggttattttggattaagctacaaattctaattacatcaaccaacagaaatgacatattatgcctttcaggactttgccaaatgatttatttcatgcagttcaaattgaatgtcactgtcttacatttatcacagtgcatcttgcattgtgcaattttaccctagaaatgcacttagcacctagagatgcattgtgagatttcaacttcagaggttcacaatacccagggcatttacaagctattcccaaagacggattacgcagtggatggaggatgcaaatgtggatggaggatgaagcagaggaacaaaacgagtctttgagggcttagagatgaaaaactatagctgttagtgaataagtaaagttctgtgtatgaattgcaagtatttgctgattttaaacaaagtatgccatattcctttaaactagattcaaaatgttaagtatactaatatgttattcaaacagtaaacctcccat

SEQ ID NO: 217736 - DNA, 344 bp, Homo Sapiens
gcctactactactaaattcgcggccgcgtcgactttttttttttttttttactccaaaccattcttgctgtaatcttttcactgttagcataaaaataattttttgtgatccttgcgccatcaagaagcctagaaaccactctaatcactgaagagcaggaataatctagacaggctggagtccatggaggatctaggcaacactttcttacattacaaagtctggccaggcacagtggctcagacctgtaatcccagcactctgggaggctgaggcgggaggatcacccgagcctaggggcttgagaccagcctggcaacataccaataccctgtcgtcgacg

SEQ ID NO: 217737 - DNA, 422 bp, Homo Sapiens
  misc_feature (359)..(359): n is a, c, g, or t
gcgtcgacctggttttttctgtgccccagtggaaggtgttccctctttaaacgcagccctgtgattcacacatcctcccaggtctttcaatgctaaagacaatggattatctctgagtttcagtccctacgtccagaagagaaaaatatgggtcaggcacagtggctcatgcctgtaatcccagcacttggggaggccaaggtgggtggatcacttgagaccaggagttcaagaccagcccggccaacatggcgaaacctcatctccactaaatctacaaaaattagccgggtgtggtggtgcacacctgtaatcccagctactcgggagactgaggcgcagcaatcacttgaacctgnggggcagaggttgcagtgagctgagattgcaccatcgcatccagcctgagcaacagagcaata

SEQ ID NO: 217738 - DNA, 413 bp, Homo Sapiens
ggatctccgcgttggaggaagagggagtcgaaggaggcttccactctttgaaaaagacccaatggtggttgggcttcgggtcacgtgacaccttctttgtggctccggaagaggattgagaagtttaggtttcgtggaagaaaccgatgattgaggaaaaaaaaaatcaagatttggggggaattacctacaaagatgtaaggtgtgttaatttgggcgcttcttggattctaccctgaggaggaggcgcgtggtgagaggagagatcttgatctgccgctcgctgaggttcagcaggttggccatctctacacggcgaggccggcacaggtagcggctaaaatggaactccttctccagctccaccagctgcgcgctcgtgtacgccgtccgcgcccgcttggacgccgccg

SEQ ID NO: 217739 - DNA, 465 bp, Homo Sapiens
caaaatggaggactgtttatttcattgctcaatcaaaacattccatgaaagactgccttaagtaatttcaaaggcttcactgatacatatgggggtggggagggaagctccactaccccatgccacaaaactatttgatataactaatgacatgcaaacacaatttgcaaaagcagagcattatcacaatatgacatttaaaaaattggttgagtaaacagatttcatatctttaaaacataaaataattacactgtattgagcctgggaaatcttggcaatatctacaaactttctcatttacagataggaacaaaggcccagagaagttaagccactcatccaagctcactgagcagagattctgcatttgctattttggaataagttgtctactttcaaatggttttttaaaatgggtattacatactttttgtttgtacagaacagtcatataaaatagtt

SEQ ID NO: 217740 - DNA, 606 bp, Homo Sapiens
ttcccacatgaaaatatgatactttaattattaccttttacattattagtttgcagacaggcataattaggtcctcagttgcagaaatcacagacatctgaaggccagcactttaatttggccaccgtcttaagatttctctgctcttcctttgctcctcctcataatgcacagtttgaactgatgctgttctatataaggtacttttccacctacctcatctctgactacagtgctatatttttcacacagtaaggacaggtgttgtgttaatctcaccatgccaacaatcagggcaccacctagcagagtcagtgaaggccaaaataaacagtggaagatagccatttggtcatacttttttataagaatgacatcttcagattggctggctggactgtagaagcatgaaaagggggttccatttttgtgatcgaagaattcttttatgtccagagcactgttgagcaaatcatttctatcttggtggcacttaggtgtgtaaaagcacttgggatttatctggacagcctcttcattataatgtaggagagctttctgacctggatggctgaggttcacaaacacctgaagacacgggtactt

SEQ ID NO: 217741 - DNA, 390 bp, Homo Sapiens
agagtcgcggggcgtgcagaaggggcccctggactccggcgcggggccggctcagtcccgccccttgcctgcgcggagcttctggcgactcccaggccgctgctcctcgtcgggacgcctcggggacacccaggcctgcttcttcctgggctcggcgtccctggagtcccgtgcccacggccggtggcccccttcgcgtgactcccagcgctggggtagggcttcccggggctccctggcggcccgtggcctctcctctttccgcggcctctctttcttaggtctctcctccttccgcggcttctccttccgcggcttcccctctctccgaggcctctccttgggtccccggtctgcgagggtcacacggtcctcccggacggactctcc

SEQ ID NO: 217742 - DNA, 464 bp, Homo Sapiens
acttctatcctgagctaagtcagttttggtttcatttctttgtggggttttttggtccatctctgttcttgattttagtatttctgattaaacatggttttttcatatcctccttaactgtttgaggatatctgattcagtttggaatgttatgttacaattttcttctgctttgtgactgattttctgggaaatattttcattacctgaaatgagctgatttgcattttctgttttgtaaagtagttttatatggatgtggtctgttctcttctattcctagtaatatcacaaatagcttcaaagtgccctcttctgaagtttctttaatggatagagggagatgagggaggctggttgtcttgtttttctttcatttccgcaagatccttaattttcccctcttatttcctttttctcatcattcccatccactccttctttgtatatctgattttctccaa

SEQ ID NO: 217743 - DNA, 593 bp, Homo Sapiens
  misc_feature (587)..(587): n is a, c, g, or t
tttttttttagattagcaatcaaacaaaaatttaattatcgaaagtcaattaagtactaaaacacacacatacatacactccctctctcacacatttcaaaaataagatgcaaggcacataagcagcattatatcaaaccagaatgcattaggatattgattatatttaaataattatttttctttttccttctgtaggggacgatggcttaatagaatttaccacagttactttagagtctccgaaagcatggctggtggaggcctgactgggaggcaggggatgcgactccttactttgcaaaggctcctctgagccttttgcaacaccaggacttgattggtcagttttcaagacatagcctgatccaaagagttcttccatgagactgcttttcttatctctgaaagttgtatccttcacttttattctggaagacttaccaaatgagggctcatacccactgtcagaatgctctagctccatttcctctctgttactgagatgcttgcctgtactatgactgtacctcatgttgccggcattggctggcccccctgaagcaggaagcccatgatgcaggttntcagtt

SEQ ID NO: 217744 - DNA, 519 bp, Homo Sapiens
tttttttttttttttttttttggaatacattcactttattggtatcagactttactcttgtccgtgggactttgcatacattgagcaactaacccgcatttcagttacattcatgtcacactttggtcatgatttagctctttggtaccaggggcaagctttgcttggtcagtagcatagggtgttgctgtgtttattggatggattccatggcccagactgagtaatgtcggggcaaggaacaacaggacaagtgctctagaaattcttgtctgtggggctgacatgacatgtctctgctttccctattaaatgtttcctgggctgaggcatgagatctcccaggcccctgaagcctggaaggggtcagaaagccaaggcagcaaggctagagggcactgccagggaaagtgacccacatctgtcccctcaaacatcagttcctctttccagggagatgggagctgtgcaaacatggaattcccacacctcacaggtctctcctgggtggagacttca

SEQ ID NO: 217745 - DNA, 532 bp, Homo Sapiens; identical to SEQ ID NO: 44288

SEQ ID NO: 217746 - DNA, 522 bp, Homo Sapiens
gacttaaacatagtagctaataaaactagtttatgacatctattgaaattctcagtctgacagttttaaaatagcttaaaactaagcaccaggtatatgaaaaaggaactggaaattttaattgtccagaaatcataggaatactgggaacctgtagttatgggaaatggctgtttttctgaagttgaaaccagtttcaattacaaaaccctctgaaattttgctaagcctatagttatctccctaagaaccataaaaaaagataattttattgttaatttcattccagtttagcttcctcattttacatgttgggagtcatgccctttaatatgcctggcactgcacggtggcagtagcagacttgggcttacccagaaccctaagtctctgacgctataggatagcgaaagaggtaggcaatcgtaacagacactgtataggataaatagggaagagaatgagagaaccaaaataaaaataatttaagaaacaattgttttactgtacatgtgaataaca

SEQ ID NO: 217747 - DNA, 567 bp, Homo Sapiens; identical to SEQ ID NO: 51313

SEQ ID NO: 217748 - DNA, 598 bp, Homo Sapiens
atcgcgagggccgccctttttttttttttttttgaggaaagctatttatttccaagatatagactgtacttttaagacaggacttttcagaagcaggaaattttagttgttgccagagaggtgtgtcaaggacacagtgaaaggagccatgcggacatggggtggaaggctttgtccaacactgttacaacacttttgtaaatgagcaaaacatctttaaaaatccttataaattctttataatatgttacacatttagagacaatatttacaataaaagaatgggggagggagggaaagaaatctactttacagtaaatctttgcataaaacaagaggactgatagacgtggcagcgggttcaccacctacctgggcttccctggaatgagtgagggtgtgtgggggctggcctggtgattggaagtctatttacagcctgtggggagaagagggcgctgggtcctgtccatcctgcaggaacagcccagctcagaccccataaatcagtgtgtgagtgacagagagacagcaggggtgttgactatccctcctcctaaggggaagaaggtgggcttctgtgtgcctgggctgtgga

SEQ ID NO: 217749 - DNA, 618 bp, Homo Sapiens; identical to SEQ ID NO: 41098

SEQ ID NO: 217750 - DNA, 584 bp, Homo Sapiens
agaatgccgtggagtctgtgcagtatggcgtggccggcagcgcagccttccttgagtgccagccccgctcgccccaagccactgttaagtggctgttccagcgagatcctggtgaccggcgccgagagattcgtgcagaggaccgcttcctgcgcacagagcagggcttgttgctccgtgcactgcagctcagcgatcgtggcctctactcctgcacagccactgagaacaactttaagcacgtcgtcacacgagtgcagctgcatgtactgggccgggacgccgtccatgctgccctcttcccaccactgtccatgagcgccccgccacccccaggcgcaggccccccaacgcctccttaccaggagttagcccagctgctggcccagccagaagtgggcctcatccaccagtactgccagggttactggcgccatgtgccccccagccccagggaggctccaggggcaccccggtctcctgagccccaggaccagaaaaagccccggaaccgccggcaccaccctccggacacatgaggccagctgcctgtgcctgccatgggccagcctagcccttgtccc

SEQ ID NO: 217751 - DNA, 623 bp, Homo Sapiens
actagttctagatcgcgggcggccgctcgccggacgcgtgggcaaaaatcaggccactgcactccagcctgggcaacagagaccctgtttgaagaaaaaaaaaaaaaaaaaaaaaagttaccatgtccagcttgaaacatgcagtttggaacatccatatggcattttgcaaatgtagttggtttagttttgctagttaacagtcagataaagtaggcctctgagcaccctgggggtgcgtgcttttgttccaggaagctgggcacagcctgaggcccaagacttggactggagaatatgctccaccgtacttaatccttttctctcccagaaagaagggggagctttggccaggcatggtggctcacgcctgtaatcccagcactttggtaggctgaggtggccggatcgcttgaggtgaggagttcgagaccagcctggctaacatggagaaaccttgtctctactaaaaatacaaaagtgagccgagtgttgtggcacacgcctgtaatctcagctacttggaggcagaggttgcagcgagctgagatcatgccactgtactccagcctggatgacagagcgagagtctgtctcaaaaaaaaaaaaaaaaaaaaaaaaag

SEQ ID NO: 217752 - DNA, 617 bp, Homo Sapiens; identical to SEQ ID NO: 50310

SEQ ID NO: 217753 - DNA, 602 bp, Homo Sapiens; identical to SEQ ID NO: 50294

SEQ ID NO: 217754 - DNA, 613 bp, Homo Sapiens
atagcccccaccatcctcacggacgtggacccccagtccccggtgatgcaagaggagatcttcgggcctgtgctgcccatcgtgtgcgtgcgcagcctggaggaggccatccagttcatcaaccagcgtgagaagcccctggccctctacatgttctccagcaacgacaaggtgattaagaagatgattgcagagacatccagtggtggggtggcggccaacgatgtcatcgtccacatcaccttgcactctctgcccttcgggggcgtggggaacagcggcatgggatcctaccatggcaagaagagcttcgagactttctctcaccgccgctcttgcctggtgaggcctctgatgaatgatgaaggcctgaaggtcagataccccccgagcccggccaagatgacccagcactgaggaggggttgctccgcctggcctggccatactgtgtcccatcggagtgcggaccaccctcactggctctcctggccctgggagaatcgctcctgcagccccagcccagccccactcctctgctgacctgctgacctgtgcacaccccactcccacatgggcccaggcctcaccattccaagtctccacccctttct

SEQ ID NO: 217755 - DNA, 624 bp, Homo Sapiens; identical to SEQ ID NO: 47725

SEQ ID NO: 217756 - DNA, 344 bp, Homo Sapiens
tagattgaaatagaattttaatactcatgagagagccaagtgtttccaacccagtgtcgcttaaacagccttggccatcgcaggtctattcacatggattctgaatgacgatcagaagatattccttatctggagctaccatgatttcatgtttctttgatctgatcctaagaaaagtcaggtcgttctgaggatcaatatcacgaactgtgcttttggctttcattgtcaggtgatgaagaaggcctgcatattgaacagttgttgagttgtccaaggttgttcggatgggaataccagaagctaggaagaggtaaggaatggtcctcccacagagtcttcag

SEQ ID NO: 217757 - DNA, 565 bp, Homo Sapiens; identical to SEQ ID NO: 40507

SEQ ID NO: 217758 - DNA, 522 bp, Homo Sapiens; identical to SEQ ID NO: 40996

SEQ ID NO: 217759 - DNA, 577 bp, Homo Sapiens
aaagaaatatacaagcctaagtcaagtaagggaatgcctcccacccttgctattttctctaaatagagaggctgagtacagacgcggaaagaaacaaggaggtgtgggagcagcccgccatgctagagaaagactacattcctgccactaacagtcggtggccactgggcaaatcttaagtctgtggtgcctcagtttcctcatatgcaaagcgggtttgttccataggcctctgaggacaaaatgagattgcagaagtgagattgcagatggttagaaaagacaaagccacactggtgtgagttttcatggtccccgggaccacatcctcagaaggatccctcccacttctcctgggggttcctgcagttctgggacaggggcattccctgcagaccagacgtgaatgaagccgcttagccagcatcttgtgaacggcctgcctcatgtcctgagccacttacacatgtgttttttctccccagggtctacgaagaatagggtgaaaaacctcagaagggaaaactccaaaccagttgggagacttgtgcaaaggactttgcagattaaaaaaaaa

SEQ ID NO: 217760 - DNA, 584 bp, Homo Sapiens; identical to SEQ ID NO: 44566

SEQ ID NO: 217761 - DNA, 580 bp, Homo Sapiens; identical to SEQ ID NO: 47540

SEQ ID NO: 217762 - DNA, 635 bp, Homo Sapiens; identical to SEQ ID NO: 49001

SEQ ID NO: 217763 - DNA, 627 bp, Homo Sapiens
ccccctccttttttttttttttttttttttttttttttataatttaaaagctttatttccccccataatttgcaaatagatttcatattagttccactggaagttttcttcgtacagttgcctttctcattgactatgctgttggtggggaaaactgctttctcatgaggggaagggttagatttcatagagatgctctgagctaatcacataaacaagagggtttgacctggcagcctctgaggcagtcaaggaggtcaagaaatcctttcagctaaaggcctagtcaggtgggactagttgccaggatcctctctgcagaactgcccaaacgtagctctctttgaccaggaagcctggaagtcagaccatcttctcaggccctgccaaattcccatcctcagtcctgtggcctcatgcgggaacattttatccaagcaaaccactggctttcgccttgaggtccaatgtgcactcttcaccaagtgcaagattgatcttcactccaaagttcaccgttcacacagtttttggcttgtgctttagaggctggtctctgcctctcctaggaatggtggcatcacagcaatggaagcacaaagacccaggcaagcactggtaggtaga

SEQ ID NO: 217764 - DNA, 604 bp, Homo Sapiens; identical to SEQ ID NO: 47976

SEQ ID NO: 217765 - DNA, 604 bp, Homo Sapiens
ttttttttttttttttttttttttactgtaatcttggccagtattgagacatatcaggttcacttccgggaacttgaactggaactgacacaccaggggaaatgagtcctgttgaagtggtgcccgaggtgcccattggctgactgttcatgtgtgtctgcatatgtgggggggtgtaggtatcataactccgcccattcaccgaagggctggtgggcagcatgcaggagtatgaggaggtctggctggggactgggggttgcataggcaggttatttgccatggtgaagctgggcataggcggcagagcgctgtaggtgtttgtgagggctgtgtctgttcggcccaacatggagccagatgtgaaggaggaaaccggtgtggtgggttgtggaattggttggtagacactggtgctgaaactactgctgataggaatatgactaggtgtgttgctggcctgtcttctctgattcctcagtttttcttctcttctccatttggcccttcgattagaaaaccatacctgtattcttgcttcaggtagatctattttggctgctagtctttctcgggcaaacacatctggataatgggttctctc

SEQ ID NO: 217766 - DNA, 577 bp, Homo Sapiens; identical to SEQ ID NO: 40601

SEQ ID NO: 217767 - DNA, 592 bp, Homo Sapiens
gcgagaggctgggcatcaaaccagagagtgttcagcctcacaggcctacaacaaatccaaacacttctaaatttgctcagaaatatggaggtgctgagaagtgttccagatgtggggattctgtatatgctgccgagaagataattggagctggaaagccctggcacaaaaactgtttccgatgtgcaaagtgtgggaagagtcttgaatcaacaactctgactgaaaaagaaggtgaaatctattgtaaaggatgctatgcaaagaactttgggcccaagggatttggctatggccaaggagcaggggctcttgttcatgcccagtaagatgtaaaccctgaactaaacatcacacactgagaatctcttcataatctaggcacagataatctttaacactaaactactgtgaaattctaccagcattaagtactgtatatcgccctgtacttggataggctggctaactcgtaggaagagagcactgtatggtatccttttgctttattcaccagcattttgggggaacatttcttttacattttaaataaaacttcagcttgaaaaaaaaaaaaaaaagggcggccgct

SEQ ID NO: 217768 - DNA, 541 bp, Homo Sapiens; identical to SEQ ID NO: 49367

SEQ ID NO: 217769 - DNA, 619 bp, Homo Sapiens; identical to SEQ ID NO: 52630

SEQ ID NO: 217770 - DNA, 618 bp, Homo Sapiens; identical to SEQ ID NO: 47466

SEQ ID NO: 217771 - DNA, 546 bp, Homo Sapiens
caacccaaaccaagcaaaacagctttctacacagaaaccagcttaatcttttaaaaatataaatcagaacactttactttcttgcttagaacctttcaatggctttccattccatgcagaataaaatccagtcttttttcttggactaaagccttatacgatctggccctgccttttctgaccttgtcttttaccacccttcccatctcaccaggtttctggtccctaagaactcacaatctgtaaatgtagtagcataagccatgggctgaaattaaaagagggtatctgtaaggaaggtgtttctggggttatttgaaggaggtgatcttacctgagtcttagagttgctgtcttttatttaaggcctcttatttgccaggaacagtgctaaatgcttcatatgcattaactcatttatatatatatatttaccattcaggtcgttcagcagacactttcatgttaaggcttactaagttgcaagaaacatattataaccacaaagcaattcccttttaatggttaaaaaaaaaaaaaaaaaag

SEQ ID NO: 217772 - DNA, 623 bp, Homo Sapiens; identical to SEQ ID NO: 46788

SEQ ID NO: 217773 - DNA, 597 bp, Homo Sapiens
aacatgtgttagcacctaccatgtgctggtgttgactaaggactttatatgcattcggtcctcacaatctacaaggctctccctggagtcagcagacctggcttcagtgttcttgatgagtgagtgacttgggccagtaactcacttcccccttggaagtccagagggcaacacggcctgccctgatcttgggaggcactagaggaatgaagcagctgtgcagccaggacatgtgtgtacacagtgaggggggacacacccgtgccttcccttctcctcgggctgttttcttctctcacgtggccactgtcatcccggaactactgtggcccaactccctccctgaagccctgaacccgaagggtagggattccggagcccctgccacagagactacactacttagagagtcattccaaaagacaaaggggaacctccaaaatgccttccttttcattctgaggagtctgtcccttctgtgcatatttatagtctacacgggagtgtctgatgcaactttgaattatgcaaatgggaaatagtgcacttgtgtacaatctttatattaaaaaatgtgaaataaaaaaaaaaaaaaag

SEQ ID NO: 217774 - DNA, 603 bp, Homo Sapiens; identical to SEQ ID NO: 48060

SEQ ID NO: 217775 - DNA, 611 bp, Homo Sapiens; identical to SEQ ID NO: 40689

SEQ ID NO: 217776 - DNA, 498 bp, Homo Sapiens; identical to SEQ ID NO: 45690

SEQ ID NO: 217777 - DNA, 542 bp, Homo Sapiens; identical to SEQ ID NO: 52544

SEQ ID NO: 217778 - DNA, 622 bp, Homo Sapiens
aattaattattaatttaaaaacaggctgtgggcaggagtgtactattgccagttagcgttcagcacagtccccagcttgtcactgttacctgtctgcttcccccacacacccatggctatgctgggctggctcacaggcagcagtgcccccctatttatcccgctgctgctgccaggctaggtaggggatgctggggcctccctcagggtgttggtcactaagtggtccccccgctaagctgagcagtggctcagcctctcacacctcctccaggctgggctggcccagaactcacctaggggcctggtctggggtctccctggaggctcctggtaacaaacagccccaccccttctgggtgctggtatccatggcaacggtatacagcccttccctcccaggcctgcttggaggtcgggcctcaggtgagtgctgggggtagggccctgagctggggggacaagagagagaaagagggacaccacatcacaggcaaagggccagcacctgggtggcaggggtacacgccagggacatgtcgggtggtgacctgctgcgccagcctggtcagaaacacacgggtgtggacacccacatgtgggtcccttcagagagcaacgc

SEQ ID NO: 217779 - DNA, 594 bp, Homo Sapiens
cgaaactttcaagttcacgtctgagctggaggagagccgactggagaggggcattcgcccttggaattgtcagcgatgttttgcacattatgatgtccagagcattttgtttaatatcaacgaagccatggctacgagggctaatgtggggaaaaggaaaaacataaccactggggcatctgcagcatcccagactcagatgcctacgggccagacaggcaactgtgagtcccctttagggagcaaggaggacctcaactccaaagagaacctggatgccgatgagggtgatgggaaaagtaacgacctcgtccttagttgtccttactttagaaatgagactggaggggaaggcgacaggcggattgcgctctctcgagccaactcatcctctttcagttctggggaaagctgctctttcgaatcgtcactcagctctcactgcacaaatgcaggtgtctccgtcttggaagtgcccagagaaaaccagcctattcacagggagaaagtgaagcgctacatcatagaacacattgaccttggggcctattattaccgcaaattcttctatgggaaagagcaccaaaactactt

SEQ ID NO: 217780 - DNA, 593 bp, Homo Sapiens; identical to SEQ ID NO: 46971

SEQ ID NO: 217781 - DNA, 539 bp, Homo Sapiens; identical to SEQ ID NO: 42738

SEQ ID NO: 217782 - DNA, 590 bp, Homo Sapiens
  misc_feature (520)..(520): n is a, c, g, or t
  misc_feature (569)..(569): n is a, c, g, or t
ttgctggatttttcttctattttattgtttgtccttgggaatggtccaaaaattttgctacttcactttttatagaaagaggaatttaaagtgtttctatagctatatatttacaatgaaaaatcattcagatagttcagttcacaatgcaactgaccatctagcagcttgagttcaaggtttataaacacaaatgcctaccagcctaagcagataacctgaaagagaagtgggatggtgaagggcgggttggcttaggttgtatgaatgcagaacagggtagagtactctttctaaaagtggatatcaccattcagcaactgaagattttatgccatgcaggaatataatagggtttatactgtcagattttcaattgaagtcagaaatctgaatgtctgggaaattcttgattcttaaatgttggcataaacttaaataataaaatgctttgtgggccaaacaaaacaagcctatagactaaatgcagtatatagactggcagtttgccactcagctntagttttatcctatcacttagatattctaagctgaccaacacagcctangtaagaatattataaactaca

SEQ ID NO: 217783 - DNA, 491 bp, Homo Sapiens
  misc_feature (405)..(405): n is a, c, g, or t
ttcctctattttctcagccactactcctaggcaacctatacatcctgatgggggtggggatatgcatgctggaaacttcctatgacaatttttatttgactggtgttcttgttagatctgttagtaatgagaaaagatgggactggaacttaaaaagggtaaaaaatttacaactttaggcaatgcacaaccaaatgagttttatattttataaattatgctaccgagaaatgtaatatatgagtcagagagaaacttgaatggtgaattcctagaaaaatcaaacaaattctcaagcaaattaagttctgactgctgaagacctgtttgatctcagaaaatgcagagaactgtgtctatgatttagactggtaatcacttgggatatgtggcacttcctgattntatgagagaaactgatggtctgaacaatctaaattattatgggcccaaatatttaggttctgaacagttgcgaaaataaactaagt

SEQ ID NO: 217784 - DNA, 578 bp, Homo Sapiens
tttttttttttaatgatttagagtttaatgtaaattttgtattttatacacgccaattttaacaagtaattacaaacagatcaatcactttcctctcagtagttatgctgtgcaactttgtaatcatatttaattaattttttttcactaaggtaaaatgttcattaacctaattagcagctattttctagaagctaattaataaaggtaagtgtcagtgatggtattattgaagttgtaaaaaattagtaaaactagtttctctagaattaaggaaatatttctatattttttagtattagaatgtcataaaagtaagtctccttattttaatgacttcgatatttcttctctttattgtaaaggtcttctttaaatctttatcttctaaataaacataaaaaattaagtccaatcaaatacagtttcaattagtttaaatcccttaggtttttgctaataatgaaaagttaatagttattattctttgtgtatcccacttacttaaatttttataagtatcccaataggtcaggatttggttaggggactaggatatatatacattttaactatca

SEQ ID NO: 217785 - DNA, 570 bp, Homo Sapiens
gaaattcaaaaggcaaagttttatttggaaaaagtacttttgaatgtggtcaacagacaacttacaagagttggaaaaaaatgtttgcatccaagataagaaaatctgaacatatattgtacaacatacaaaatgctttcacaaactagttaactaaaaagacaaacggtacaaacatatggaccaaaaataagaaaaatttaaaaatgtatataaaagtataactacgaatatttgtggtaggcagaattctaagatggcccccatgaactctgcccctcatgttacttccatgggtgatgttacattgcagggcagagggacttggcagatgtaattaaagctactaatcagttgaccttaacaatctgggtgtgcttaaactagtcacaagagccctttaaaagcagttttctctggctggtagaagtagagtcaaagtataaaaataatttgatgcaccctggcaagctttgaaggtggaagggaccacgtgcaaggaccacggagcaacctctaaaggatcagatttgacagtcagctaggagacagggacctccatcctctgac

SEQ ID NO: 217786 - DNA, 622 bp, Homo Sapiens
  misc_feature (592)..(592): n is a, c, g, or t
tcccgagacggagtcttgctctgccgcccaggctggagtgcaatggcgcgatcttagctccctgcaactgccacctcccgggttcaagtgattctcctgtctcagcctcccgagtagctgggattatagtcacacaccaccatgcctggctaattttttgtatttttagtagagacagcgttacaccatgttggccaggctggtcttgaactcctgaccttgtgatccacccgcctcagccttccaaagtgctgggatacaggcgtgagccgtggtacctggcaaagttatatattaacatatatttctaataacaacttatttaaaagcccaaccatatgccaataagcaatccatagaaactttttcatgacacttgggagaataaagtccctgaatcttcactacttcaagaacatatcagagatgaacttaccatcatctaaagtgatgtcctgcagaccaatggttgcaaagttaggctctcgatcttctggttcaggtttaatggctcacagttgccccataggtggaaatgacgctgatcacacaaactgtgacatattaagggatgaggtgcagaaagaccccnctggcccgtacctgtggctgagtgagtgtg

SEQ ID NO: 217787 - DNA, 478 bp, Homo Sapiens; identical to SEQ ID NO: 60775
  misc_feature (467)..(467): n is a, c, g, or t
  misc_feature (473)..(473): n is a, c, g, or t

SEQ ID NO: 217788 - DNA, 558 bp, Homo Sapiens
tttaatatgttgcaatttattgaatgtttactatatacatatatgtttatatatatatgtttatatatatgacatgtttatatatatgagacaatggataaaaataggttttggcaataaagtagggtccttacattagttataaatatatacagttaggatcctatcttaaaacacactaaatatgtgcagtaagccagaatttatagggtttgttaccctttagagatccattagatgtttgcaggataggtcattcactgtgctcaagatttttctagtgccactgcccattgattactgaagctgtactacttatcccatatgattgctattttatgtgctatttaatgatgggtttgccagcttaaagagacaaataatggtgaataggttcaaggtcccctttgaagcatcatcctataatcctatctgtagcagagtcaaaggaaatgactaaagaagtaacaggggactcttaaataatgagatcattagttgcatatgatgtgttcttctgtggttttgctttttgttgttcaaaccgcacagaagtgc

SEQ ID NO: 217789 - DNA, 481 bp, Homo Sapiens
ccaggctggagtgcaatggcaccatcccagcttactgcaacctccacctccttggctcaagcaatcctcccgcctcctcaccacgcccggctaatttttgtagttttagtagagatgaggtttctctatgttgcctaggctggtcttgaactcctgagttcaagtgatctaccaccttggcatcgcaaagtgctgggattacaagcgtgagccattgtacctggcctaacattactcatttataaaacatcacgttgacccaaaaaaggccttcaccttaaaaaagcaaaaccaaaataatcctttgactgtgtattaatgagaattttcaacccagccaccatttttatgagttctatgcttgatctataaggtcccggagggcagtgctaagtattttcatttccactgggcacttaacactctggaactatctacgtggcaaagtaaattcgtgtgggaaatactgatgttataagct

SEQ ID NO: 217790 - DNA, 450 bp, Homo Sapiens; identical to SEQ ID NO: 62047

SEQ ID NO: 217791 - DNA, 632 bp, Homo Sapiens
gaagacacaaaaagtcagagagactttatttaaatagagttaatttgaagtaaaccagagagttttgtgtgcagaagcattttgcttaacttagggccatcaccacattatgaactcgtgtgtgtgtgtgtgtgtgtgcacgcgcgcgtgcacaggctagtgtccttctgtgggtgtgtctgcgtgaggacccatccatgcatgtttgatctttatggcctccccctgtgcacctgcgcctatggataaggtatagtcttgtcttgattcccagtattcattctccttgaagaatcctgacagccttcagtcaccttcccttttccagtctcccaaaagcaatggcgccttaaatgtgcggtaaggatgaggtgagtcttgaggtagcctaggccacagctgccccttcaaggcaaggcctcagctgagttcaggaaataggagaacctggccccggagcaaccccagaagcgcaggaccacgaacgtcccgacccccagcagcaagaggccgcccagggccccaaagaagatgccgaagaacgcgtcgagtttcatgctcaggtgctcacagtgctcgcccccagccgtgtagatggagatggacacacagctgcagcggggcccacttgg

SEQ ID NO: 217792 - DNA, 553 bp, Homo Sapiens
ggctttttgtttgtactggttatagggctgttggttttttttttccaccatagcatttctcaaactgctgatgggttggggggagacagaaaacagtaaaaaaaagggaatagcacattaatcctggagttttgagggtgagggggagaaaaaaagccttctacaaagtacatctagctgggacccgaggggctgttgatctgagtgagggctgagcacacgcaggattattttctcccctttctgatttctttagacccccaagcttcccatcaaaggcactgcccctggctctaacttcttgggctgcagctgctgactttccaccctcagtcaaaagcacattctcggcccagcagggtggcacacacctataatcccagcactatgggaggccgagacaggtggatcacttaaggccaggagttccaggccagcctgaccaacatggtgaaaccccatctctactaaaaatacaaaaattagtcgggcatggtggtacacatctgtagtcccagctgctcaggaggctgaggcaggagaatcacttgaa

SEQ ID NO: 217793 - DNA, 463 bp, Homo Sapiens
tttaagagagagggtctcgctgtgtcgccgagggtggggtgcagaggtgcaatcatagctcactgcagcctcgaattcctaggatcaagcaatcctcctgcctaagtctcctgagtaactaggaccataagtgtacaccaccatgactggctaattttttacttttccgtagagatggagtcttgtgatattgcccagcctggtcttgaacttttggcctccgacaaccttcccatcatggcttcccaaagcattgggactacagacatggactagctccatttcttgatgtgaggccataagcagaaccaagcagactcaaggcccttggttgcttggacacaattagctattaataacatccaggaaaaagctcagtcttctgagtcaggaaaacctgggttgagtcctggctacactggtcaccagcagcagaagcctgggcaagatgcttcacatccct

SEQ ID NO: 217794 - DNA, 738 bp, Homo Sapiens
  misc_feature (447)..(447): n is a, c, g, or t
  misc_feature (634)..(634): n is a, c, g, or t
  misc_feature (726)..(726): n is a, c, g, or t
gaggtcactgagggatttttatttgcactgattttgctataaagtgttactgaggtagagccaactgtccagggttggacaggggcaaggaacacaaggacccaaggaaaggggagccagggtcctacgttgtggtgcagtgcctcccagtcatccgtataaacaataaattgggcaataaatagaccgtggacaaggatcggagggacaggcagagaaggcttcaaggagtgacaggctataggccttgaggaataaaacggtacagagttaggcatggacccagagcctacttccccagccttcccagataagtttagggcatatggagcagagagggtttcagccggaaggcatcaagaaaagagaagacaccccgctttcgaggggttgcccctgcaccgccaacccctcctttgagcagggggaggggcaggggacctcctngggaatccatggagctggtccgcttgagccgcaggcgggcacgggcctgggcaccccaggccttgcctcgagctgcagaggccacaagacacttctggtactgaaccatacaggcagcctgcacagcttcagagagtccccctgcatgggggctgcaccagaaggctgcgcactgaaagctctgacngccctagtcagcgatgaaggccaaagtgtgtgggtcgcgggccaacaccattaatgtcacaagcgcacagggcactgccacaatggctcctnctcttgactggc

SEQ ID NO: 217795 - DNA, 467 bp, Homo Sapiens; identical to SEQ ID NO: 59637

SEQ ID NO: 217796 - DNA, 468 bp, Homo Sapiens; identical to SEQ ID NO: 58420
  misc_feature (403)..(403): n is a, c, g, or t

SEQ ID NO: 217797 - DNA, 504 bp, Homo Sapiens
cctgactaatttttgtatttttagtagagacggggtctcaccaagttgaccaggctggttgtgaactcctggcctcaggtgatctgcccacctcggcttcccaaagttctgggactacaggcgtgagccgccatgccaggccttggatttctgtagctgcagtttctcaggcaggttctagacgagccttcactgcagacagcatcagccctgttcccacggtgtggctcctcctgagtctccactgaatgtccacagtgatcactggggacccatccccctggctggagcttcagtatgtcatgaccgtgtgcgaggtctggaagttgttcaccttacatgctcctttctcctctttgcctggctttgtggagttttcttctatacatgtacaggctggtcctcagtacagactcaagagaaccctgtgcagatttctggagctcttttctgcagtttcctccttgcgggattctgccctgaaatgccggctccttctgtgtc

SEQ ID NO: 217798 - DNA, 505 bp, Homo Sapiens; identical to SEQ ID NO: 58867

SEQ ID NO: 217799 - DNA, 450 bp, Homo Sapiens
ttttttttcaaaaacaaaacaaaacaatttattttctatattcaaataggtagaagagcagattttgaatgttcccaacacaaagaaatgataactgaggaaatgaatccgctaatcaccctgatgtgatcattacacattgcatacatatattgaaatatcacctgtatcccgtaaattattacaattattatataaacatacaattattatacataaattaaaaataataaaagcaagaaagagttctttttggcatttcaaacagaattccccctcttttgctcgtgaatttgagaggcagtgttcgaatcacagcttggttagcgtgtgacctcaaggaatgtttgttatctggggctgctcaaacaaaccatcccacaacttagtagcattaaatggattgccccaaacttagcgcctgtcgtgatttctttggaccagcgattc

SEQ ID NO: 217800 - DNA, 430 bp, Homo Sapiens; identical to SEQ ID NO: 61492

SEQ ID NO: 217801 - DNA, 456 bp, Homo Sapiens; identical to SEQ ID NO: 60765

SEQ ID NO: 217802 - DNA, 329 bp, Homo Sapiens
  misc_feature (189)..(189): n is a, c, g, or t
atttttgagacaaatctcactctgtcacccagtctggagggcagtggtgcaatctcagctcactgcagccttgagcacccaggctcaagcgatcctgtatccttagtctccctcggagctgggaccactggcacgtgccaccattcctggctaatttttaaattttttgtaaaggtggggtcttgccgngttgcccagggctggcagatctacactttgcaacttcaaattccatgtctttctattactccaggggcctgtctaggatgaccaataaaaccgagaccccaatgtctaccatccctaaaggagtgggtgtggcttggcgt

SEQ ID NO: 217803 - DNA, 568 bp, Homo Sapiens
acgggtaaataaaagatgttcttttattcatttgcctgccaatccaaaaatacaaatatagttaattgtacataggaaggtattacttgttcagagttttgagtgtgtgaattacatatatgaacatctgagaaaatcctataagcagtttaatcaactgttccactccactccaagtgagtccataggcagaattgagttatggggagagcggcctagtaataattggtttgcgtaatacaaagttctactgggtagtgatgttgtagaagttcatatagaatcagctgagctttcagaaatggtgaaagggtggtaatagtcataacttagattgtaatttttttcccataggcttttaaaaaatattcatgaggttctttttttatttcaatagtttttggggaacaggtggtttttggttacatgaataagttcttcagtggtgatttctgagattttggtgcacctgtcatgtgagcagtatgaactctactttatgtgtagtcttatccctcatgtgtatgaactccaccttatgtgtagtcttatccctcacccactcctg

SEQ ID NO: 217804 - DNA, 424 bp, Homo Sapiens
tttttagcaaaaagatttttattcaatattttattatcaaacattcaaacagaaaagttgaaagaattatacagtgggccatatcatataatatactcatcatctagattctacaattaacagttatttttatcacatgtctaatgatctgtgcatcactctattcatccattaattcatttttgtttatatatttcaaaagggatttgcaaacatgagtacacttcacacctgaacactttagcacagcaaaaggatttttttcaggtatagtatttgtccactggagggcctccaaatgccataaaatgcattaaaagtaagttcatctgtagtccccaagaactggagaaggtccagggaaggagatgcatggagtgtaaattgcatcaattagggcaagagactcaatctgaaatccaga

SEQ ID NO: 217805 - DNA, 479 bp, Homo Sapiens
gaattaagtaacaaaatttaaaaaatacaaaaggatgtacagtgaaaagtacatctcccttctatccctgatccccagactctcagaggctgcctcctttagatggggcgggtgctttccagatgtccccactctgcatcaactggccctctttcacttatctgcattgtctgcctgacccctttagacatctgagctgcctcccaacccattttaccacgcctctcctgcatccccttaacacttggcatgtctgtcgttagcactttcacacaagcttctttacaaggctgtgtctttttagatggggagattcacagatgcatgaggttaggtttacatcttcttttgactatctacatccctgataactaggatggtgtcagacttatggcagatgtacaagtttgttgagtgaattaataaattaatgaatgggcaaattgtgtattgtttccagggtcctgaggtgtgacgca

SEQ ID NO: 217806 - DNA, 432 bp, Homo Sapiens
gcctactactactatacggctgcgagaagacgacagaagggtttcattctttttttctttttcttttttaggattttagagtatttgcattataccagttgagcatctcaaatccaaaaattcaaaatccaaaatgttccaaagagcatttcctttgaccatcatgtcagcactcaaaaaattttgcattctggatttttggatttgggatacttaacctatattttactttatttagtccaatattaaaacataccaacttactacttaatagactatatactccagtatttcaatctttaccatacctctttcttcaggaacaaaaggcacacaatttaacacttgcacaatgtcacaatcaggaacagtgatcaaaagaagagatgatatctggaaatgaagaccaagattttaaaacttttgacgaca

SEQ ID NO: 217807 - DNA, 485 bp, Homo Sapiens
  misc_feature (452)..(452): n is a, c, g, or t
tttagaacagcaaccattttatttactcatgattctgcaaccagggctgggatgcgctggttggttctgctgggtttgttgtggtcactcgtgggcgtgaagctggtgacacagctggggcctgatgtctgctgggatattggaaggttgaacttttctttctctttgtagtcttagaactggcactgaaccacttctgcattgcactgattaaagtcacaggccagcccagactcaagaggagtacaaatacaagggtgtaaatcctcagaggcgtgggttcactggagtcacgaatataaaaggatatcacatcagttggtggagaaggcagcatatatgtgaataaaaggccctacccttcaactaccttctctatggatctcacgatcttgcctctagcatcatggtcttaacaactgttatatcaacacactaccttaaaaacattntttagggtataacacattttgagagcatgctca

SEQ ID NO: 217808 - DNA, 517 bp, Homo Sapiens
tttttttgctttaaagagtatgtagagagttacagagtttagggatgcagtagcgtgaacacttctgagtttacaagatttaacctcatggccccatcttaaatcttgcgggctgcaaacctggagtaaaatctgttcagggaagctcatatgctttcttacaagttcattgggtgatatgtctggagttttccctttttgcaactgacttggatttgtcggaatttcttcccagcacctacaggctgaactaaaccagtatccagtacatttctgggctgataaatggacatcattttggaatgcatttgttgcttttttgcttgtttttgccttgcttttgttttggatatgcgtgcaactccttgtatgacgttgtctagacctgttgtaggaggaaaaaaagttctttctctttatttcttcccttgtagagccaacacttagatctttatgtttctgaaatgtagttgagtgtctttttaaagatgctcttcctcaattatcagcagatctt

SEQ ID NO: 217809 - DNA, 479 bp, Homo Sapiens; identical to SEQ ID NO: 58843

SEQ ID NO: 217810 - DNA, 442 bp, Homo Sapiens; identical to SEQ ID NO: 50262
  misc_feature (403)..(403): n is a, c, g, or t

SEQ ID NO: 217811 - DNA, 586 bp, Homo Sapiens
  misc_feature (496)..(496): n is a, c, g, or t
gtcatttcatttagtttattagacaaaaatatatgatttagacaagttcgctgacgcgctatttacaatctgaaaccactctatatacagaaaaggggggaaagagacacaagcacgtgggggcatttaccgaacccgataatcgcagccactggagccgccggcagaggcctggccacctggacgcgagctcgggaccgaagaagcccctttctgcagaaagcgacggatgcgagtccttgacgtcgttgtcatatttgtcctttacaccagtctgaaatatttgtcttaattcctcggccttctccgggtcgccctcggtgtcgctgccgaagagcgctccatcttcctggtccttgctgcgcgctccccatgtcaccttgttctccttcttgaggcgccggcgcgcgttggcgaaccaggtggagacctgcgtgagggtcatcttggtgatgatggccagcatgatcttctcgcccttggtggggtagggatncttgcggtgctcgttgagccaggccttgagcgtgctggtgctctcgcgggtggcgttcttgggccggccggggtccccgtattggaactg

SEQ ID NO: 217812 - DNA, 506 bp, Homo Sapiens
ctcccaggaatggcctatacaatcctgtaataactttcattcttagttctaagcctagatataacagacccctctgtcatcgcaatggtgttttccccaagatgagacattctttttaaggtatgtgactctaagaatgggaaagtgaggggaacaggtacagtcatgtgccacataatgacgttttggtcaataagagaccacatatacaacagtagtcccataacattaataacacaaagctgaaaaatttctatcacctagtaatgtcacagtggaagcattactcacgtttgtagtgatgctggtgtaaacaaacctgcacagccagttgtataaaagtattgcacatacaatacatgaaatacataatacttgaaaatgataacaaatgaatatgttagtggtttattgtccacgaagacctttcagtgggacggcatggggaggggaaagccagtgataatgacgatcctaaccctccacaggcctagactaacatgtgt

SEQ ID NO: 217813 - DNA, 534 bp, Homo Sapiens; identical to SEQ ID NO: 60242

SEQ ID NO: 217814 - DNA, 495 bp, Homo Sapiens; identical to SEQ ID NO: 61708

SEQ ID NO: 217815 - DNA, 443 bp, Homo Sapiens
ttcacattccaactactgacttttattaaaaagagtactattagatgaaaatagttttcacactattatataaaaagacccattttacttaccctaaggctaagatcaattaacagaacccctgggataacagcccaggcaccaaatctggcacctcagagtcgtccttgacttccctaaaccgctttcccccatctcagattctgagaatttggtttctgtcaagatgtgcctctccagccaggcctctcctgccaggacggtggccacagggccatctccctctcctggcgcccccaactgcctggccaaggtgactgctacacacgtggggtcgcagaatccctcgagtcacaacgtcttcaacgtcttgtcagtcccgtgatcgcactaaacgtatttaaagccccctactcctttaagagggtcacctctgtgtacag

SEQ ID NO: 217816 - DNA, 576 bp, Homo Sapiens
  misc_feature (512)..(512): n is a, c, g, or t
aatgttttgacgtgcttgaacagtgtctgctctggtcacgctaagatcctatttgtcctaataatggcaaaccagagtcccatggccaggtccccacttgtgggacatgcttacttcatatgggaagctgcatgaaagaaaggggtttgctgcttaaaaagccccatcagagcataccctaatcatctgtttacaaaagcacccaatgtcttcagaggctggaggggacctgtggcagcattgtccccccgaagcagatgggatcagctttctctgccatggtctcctaccaggctggggccagaagaagggacacatcactgggagaattagtggtcaagaaactaggtcacccgattcctcattgggactcatgctgtggccactttaaggagtgggggagtggcacaaggacactgaaaacaacctatacaaggttactccaggagtggcagctcctgtaggaataaggatctgggagatttctgagggcttcagcacacacacatganaactcacctcatttgcagtgccgctcaacagccaggtttctgcagggctctcaactgttttctg

SEQ ID NO: 217817 - DNA, 510 bp, Homo Sapiens
tttttttttttaaacaaatcaaaccatttggtctataatccttaatctgggttttgatatgtggaaatgaatgtggttattccattataaagcaatgttttgttttgatagatgacagtgaaaagacctacatgaaccatcgaaaagttggaattctaaactcaataccagcaaagttttaatgctgagtagattacgaaatgttccatccacgctccaaatggcaaatacgcaggatggaaagtctaacagctaagttaccatattaattgcttaaaacataaaagtgttttaaagatcagttgctctatatttagaaatggctgtgagatttttgatgaaagggccttcataagtataaaaagtttcactgttatattattttgatcacggctgataacagacggccatcacaaacaccctctgacagaagtggaggaggaagtgtgaaactaaggttcaggagacacaatcccatttattgtgtttcctcacatttcagtgatactg

SEQ ID NO: 217818 - DNA, 542 bp, Homo Sapiens; identical to SEQ ID NO: 60024

SEQ ID NO: 217819 - DNA, 385 bp, Homo Sapiens
tttttttctgagtgcacatcatttatttggaaggtgaacctagaatgcacaagggaggaagtgcagagagagacccacagggaagggagaaaagccagtgcaggttgtggcatccaatgtgggcgattgaggtcatgcccactggggatcctcggaagtgtcatgtagaatatggctcagctgcagcccacccagggaagctgggggatttacacaccaatgcttttcccccattggttaagggttgccctggggctttcaactcccagaatttcaggatgaggcagctctgcacacaggccaggcaagctcttactgcactgtcaggatccagacagttgctgaggaccaagatccagacgagactgacagagcggacgcgtgg

SEQ ID NO: 217820 - DNA, 497 bp, Homo Sapiens
tttttaagtttattcgttcatttatttaactccccagcctgtatcaccaaaacactccctgagaattgaaagggtgtattaaagccacaagatttaaaaaataacactgttcattgatttatttaaattaaaaaataattgtatatggtaaatatctattaagtacaacatgggacaggcacggtgcctcatgcctgtaatcccagttctttgggaggccgagacaggcagatcagttgaggccaggagtttaagaccagcctggccaaagtaaaaccctgactctactaaaaaaatacaaaacttagctgggtgtggtggcgcatgcctgtagtcccagctacttgggaggctggggcagaattgcttgaaccagggagacagaggctacagtgagccgagatcatgccactgcattccagccttggtgacacagcaagactctgtcaaaaacacaaaaaaatcagtacaatatgatgttttgaaaaagctggatg

SEQ ID NO: 217821 - DNA, 457 bp, Homo Sapiens
  misc_feature (423)..(423): n is a, c, g, or t
acattttggcagcaattgtttattggtctgtcattgcagtaattgcaacttaacaataaaccagtctgacattttaggtcttgaggatacataccatatatatttctttaaaaataatcatactttttgtaagcaatactttacagtagacacctcaaaaatctaccatagatgtgaaacttaaaacgagaaaaatttaagttctaaagatttatacatatatatccagatttctatatatattatatatacatacataagtatatataaaatatatataatcagatttcaaaaatgaacaaaaactgggcactgtacataaagtcttttttaaaactcaaacaatagaaaactctttaaacattaaacaattttaataaaagtttctgtacaatgctaagcagttttatttacacatagaanatgtaataggagtagtgtttgaaattacagaact

SEQ ID NO: 217822 - DNA, 358 bp, Homo Sapiens
atggctgaggaggcctcaggaaacttacaatcatggcagaaggggaagcaggcaagtcttacatggcagcagatgagagagagagtgtgtgtaaaggaggaattgtcaaacacttataaaaccatcagatctcatgagaactaactcactatcccaagaacagcatggggacaactgcccccgtgatccaatcacctcccgtcaggtccctcccttgacacatggggattataattcaagatgagatttgggtggggacatatagccaaaccatatcaaatagcaattaaaaaaaatcacataagaaaagacactcttaataaaatacaaatagaaaatgaaaaaaaaccaactcata

SEQ ID NO: 217823 - DNA, 539 bp, Homo Sapiens; identical to SEQ ID NO: 60758
  misc_feature (528)..(528): n is a, c, g, or t

SEQ ID NO: 217824 - DNA, 457 bp, Homo Sapiens
  misc_feature (389)..(389): n is a, c, g, or t
  misc_feature (438)..(438): n is a, c, g, or t
tttttttaatataaatatatttgaaatagagactgggtctctctatgttacccaggctggtcttgaactcctggactaaagcaatcctcccaccttggcctcccaaaatgctgggattacaggtgtgaaccactgcacccggcgttttgcaaactttgatcagtgccagatccctgagggcctagaacagtgcctggcaccaatcaggccctcggcaacactgccttccccaggtgccagggtgtggggcaatctgggcagtgagccttgtgggtggggctcctgcttaatgagggagtggatggtacccagaccgcagcccaagtggcccaagctgacacgtgggcagagatcaaggaaaagaacctggtatgtggccctggcagaanccgtcaagctcaagtctggaactgcctgagctgtgggatgcactcttancttccattcaccctcatta

SEQ ID NO: 217825 - DNA, 578 bp, Homo Sapiens; identical to SEQ ID NO: 57903

SEQ ID NO: 217826 - DNA, 420 bp, Homo Sapiens
aagagatgggaagtttgtattaagttcaaacactttgggcaagaatttatacaatttcaggtaactgggcattttaggcaaagcacacaacttcatgatgtatcactgaggaggataagataaacagttctaaaagctggtacaggtgacaaattttgtgcaattttaagttttacatttttttgtacaaataggatcttgctatgcagtccaggctggtcttgaactcctggcctcaactgatcttcctgccttgaacccccaaaatgctgggcttacaggtgtgagccactgcacctgctgtttttaaagatattgtaacatactattattctaaaaccttatcctttgttgtatcagaaaaacgacatcctagactgggcgcggtggctcacgcctgtaatcccagcactttgggag

SEQ ID NO: 217827 - DNA, 867 bp, Homo Sapiens
  misc_feature (25)..(25): n is a, c, g, or t
  misc_feature (708)..(708): n is a, c, g, or t
ttcagttggactatgacagtttcgnccggaattccgggatttttttttccgtaaaaataaaatttatttctttttacacaagcagcaaggcatgccctatcctgacataatttcattccaaatggaaatcagatcaaggccctaaagacacagtgtgaaggtgagagggttgccttggccagcctggcctggaggggatgctgaccgggccgccttcctcctgcagctctgacctggtcattcccttccaggagtgacgccagctcccggaggtgctccagctgctggagacgattgttcgaggtgaggaccagcctgtgcacctcctcatccactcggtcgtacaggcttgtggcggcctccagggtgtcccggctgtcttctgtgccaagctcttctctcctcagccgcgccaggacggtgcccccctccagcctgagagacacaagcagtgggtcttccaggacaagcttcatcatcgtctcatgctggtcaattaactcggcgacttcctgggctgttcttggggttctgtgggtgttcagggagcagaatgaattctgtaggaaaatgatggcttcttcacagtttgcagcgaagtgttccagcctctgacggaagcagatccagtcaccatggctgtagggaaaggagccgtcgaggtctgcggtcagctggcagctgtcaacatattgtgccggccttcangagctcacgactcacctgaattatgcatcttgtcaggctaatgcagatcttatctacacagcagatctatgataaggaatgtgtgtctcatctgaaagcctggaacgcaggcactgatctgctgtcacagaacagccagtcgactctctggagcagata

SEQ ID NO: 217828 - DNA, 834 bp, Homo Sapiens
atcataccactgtgttctagcctgggccatagagcaagactttgtctcaaaaaaaaataaaacaaaaaatatttggtttagtctacaactataccttccttataacttaaccatatgcatttattaggaaaagtttatgtaatgcagacaggaagctctatgttcccttctctggggcatcctgaacgtctgaagggtcacagatgtctgtgtagagatctgtaagatgtcaaagaataaagataatttatagactaagctataactcatgtgcctttactatttctagttacagagaatctgtattctgattcaaaacagatttacaaaatacttctacaactaatttctcattgtctagtagcaactgaaaatgacactttgaaggggtgtgctttgcacagctgtggcagaaatgtaatgtcaaggcagtcagtgttttaacaggtcccgaagatccctgaaaataggtgactgtaaatatgcttattattcctaggtaatgacaagattggttttgtttttgtttttgttttgagatggagtctcgctcttggggcccggacaggacagcgcggtctggatcttgcgtgacttcaggcttggacctcgtgtatcaggtaatctcctcggcatatggtgaagctggtaatgcacgctgacccaaagccaccaatttgcatttttgagagggggttctcatctggtcccttggcgaatgctaactagggatccctcctggcccaaaggtggatgtgggcgaccctcccttactcattttaccaggcaaactctattggtgtttaaatctgatacgcattgtgcttcctttcc

SEQ ID NO: 217829 - DNA, 814 bp, Homo Sapiens
  misc_feature (607)..(607): n is a, c, g, or t
tgctccctgcagtttttgcttctgagatagagttctcttttcagctccttcggtagtcacttcgtacatagtgattcatgatgcgaaatcctctctgttgaaataactgacgaggcctctgtcttctgactggaccctgacttccatgccctttccactctcactccagtacatgcccaaaccccaatctttgttgctccaggcattgcctctgtggcgctgtgtcccctcctttgaactctgatccttctgctcaggccctttctcccagtctgaagtaaggagtgaaaaaatgtgaattgttctactcatctggaaaagagaaccctgaggcaggaacaagtcgttaattgcatgtgcgtttgtccacagctcaccatgagtcaggccctgtgctaggtgctgggatgaagcagtgactgacacaggcctggacctgtccttgtgaagagtgcgtctgtgacacagatactgtgccatgtggcaaagtaagcgcgtgggacagcagagccttgtttgccattaaagtaatatcacaagtctgttaaggttggagaatcaagtgaacatgctgaaaagttatggggaatgtagtctcatagctggnggagctgggggccttgtcaattggttcccccagtctggagagcatctgagagtagtagtgacactgtgtgtgctgatgtgtctgtggggtgtttttgataaaatacattgaattgtgactgatgagcaaggccctcatatgtggtggctcatcatagtcagccgcatagacactctgctgatgacggactactctctgctcgatgag

SEQ ID NO: 217830 - DNA, 813 bp, Homo Sapiens
ttttttttttttttttttttacttgggcctacatgggccagaggtggtttattcagtctccataagagaggggacaaacggcacagttgggtccgtgaagaggagggtccaagagctcacaagagagcctctctgagatttgacccctccatcccctcctcagggaggttgtggagtcactgggcctcatgggataggcccagggcaagcaatgatgagactccaaaccagctggacacagtccaggggcaggaaggcagccaagcgtcctgacccacaaggccctatacagcaatggagccatcgcggaagtccgtcctcccaatgaggatgttgaccacaaccgggtggccgtctcggcactgctgctgggcatcgtgcagcaccttgaccacctgatcctcgttctcccgtgagagcagcaagccccgggcccccaaacccatggctgccttgtgataatcagtgtaggccaggccacaggccacgttgctgcccatatagggcacctgctcccgagaaatctgtgtccagccagcatcattccctacccaggccatcactgggatcttgtgtctgacgaatgtatcaattcgatgaggtgtatccaaaactccgtcccaacgggtccagaactgactctggccggtcggtggcccaatggaatcctgcccgctccagagcccaaggtcaagatgtcgaccgggtgcggggctgtcataggaatatgccatatcctccttccacaattggtgctagtcttctccaccggccggcgcgtgggcggcagatcctcttccatgttgcttgggg

SEQ ID NO: 217831 - DNA, 886 bp, Homo Sapiens; identical to SEQ ID NO: 52646

SEQ ID NO: 217832 - DNA, 930 bp, Homo Sapiens
aaaagtttttcgggtcccggaattcccgtggatcctcaatgaaaagctgcaagactgaggagaagatcgagcgaacccagcgggacatcaggagcatccaggaggctctcgcccgcaacgctggccggcatagcgtggcgtcagcccagctgcaggagaagctggcaggagcccagcgccagctggggcagctccgggctcaggaagccggcctgcagcaggagcagaggaaggcagacacccacaagaagatgactgagttctagagaccccacaagcactatggacgaagcgtgggaccccagcacgggctgccctcaggaagaccagtgttgcccgaggaggggccggcctgctggcctggggcgtgcggacactgctgagtggagacagagctgcggggtcccatctggacacttacttgcccacctgccagtgtcttgggcatttccttggcaaggacattaaagtgaattcatcacagtgtcattcagtggagatcagctggctgcagggtctctggggagagaaggggcctcggcttcacatgatggggctgccagagtcctgggcccctcctgccctctgggttccaagggtgctgcgccctgctcctcccgctgtgggcgctgtgcacagcctggcgcaagtccaaggaagctgtagtccccccagaaagagtggcgcgaaggtcccgggcaaggccgcgagggcagggcaaacggcgcctgaaacttccccactggaggcggaccctccttctggcttccctcaacaagtctgaatcccaaactggcctgatttgcctcgggggtcccgcgtaatatacggggccctgtgtggcctgtcctccttggataccctctggcccccttcctttggtgttggggggtttcccaggggaatcatcacccggataatgccggagta

SEQ ID NO: 217833 - DNA, 900 bp, Homo Sapiens
tttttttttttttttttttttttttcatgccaactctttatttccataatagaaaatcttttatttccacctttagtgttccctgctagaatagatgaccacaaaacccaggccagaaacgttctggtctgccgtgaacagtccaggaggcacttgttctgctgctgtggaagtcgccctgactcggggaggaagggacacgcaggtggtatcagtcttgctcaagtaaacgggctgttttccaaacattgtgacttggctactgagtggggatacctggtttcattggcaatcttccagtatctctctcgcaaaaggaacgctgcactttttggttgtctctgccgagtgaagatcccctttttattccccagcactctcgtcggtgactgttcagtcatgaaatcggcaaaattccaaatgagctctccaaccacatattttctgcgtttttgatccagacccagatggtactgctctagcagacttttctggtactcttcagtgaacatcagaggtggatcctggtgaaaccctgcaatcgtttctgctccatactcgctctgaataatgggcttctgatacttcttataccagttctcaaactgggtggccagctgcagctgaatcaactccaggtgcccgtagtcgtgataccaagagtagtagctgttcaaacagatcacatccacatacggagccccctttgtctgctgcatagttagagttgctcccaaaggtcccagggccgggagggggcccagggatttggtgtgaaccaatccccatttttcagttaataacccaccaaaattcttaggggggaacccagggtcctttggccccaaaaacccaatccccaacccgggggggggggtttttttggcccccttccccccc

SEQ ID NO: 217834 - DNA, 711 bp, Homo Sapiens; identical to SEQ ID NO: 51467
  misc_feature (648)..(648): n is a, c, g, or t

SEQ ID NO: 217835 - DNA, 882 bp, Homo Sapiens
attgcatctcgtttattagcacagaaataacaggtttagagtatattacaaaaagagctcaaactgttcagatacagcaactgggcttactaggggacagaaggggaaatacgtcagactactgtacagggacacaaagactcctcatcctaaacaaagtattaaggtacatagacaagtttcttgtaagacagaaaacagagaaatccacagtaactctaacacatcccttaaggaataagcatgtatttgtaggaagcaaacaaagctttccatagagaaaccactttcacaggatgattaggtggacctgcaatgaagaaaatacatttcaaaagatgggttcagacttacaccaagttttcactgaaatacttaaaaaaaaaaagacccttctctgtatcaaaagaattaaaaaaaatacatcacggataaaataaatctcaggaaaggtccaagtcctactcagagacatacatttgcaaattaatataaattttaaagtttgacaacaaaaatactatttggaactacctagaataggccaagctaagttcgtgttctgctttagtgcattacattgaaatgaatctcattctcactataatttttttctttttaactttaatcaccagcggctggtcaactgaaatggacataagaactatataaatgtcagagaaatatgtaaacctcattaatgttttccaaaattcatttaaagataaaaacgggtccaaatagaatgcctgtctaattgccctggcaattactttacaattatttttcccaaaaaccccgaatattgctcctggcctttttctcaacttcatttaccggaactccaaacaaatttggccccctttcgggggaattcaaatt

SEQ ID NO: 217836 - DNA, 849 bp, Homo Sapiens; identical to SEQ ID NO: 48776

SEQ ID NO: 217837 - DNA, 889 bp, Homo Sapiens
ttttttttttttaagtctcgctctgtggcccaggctggagtgtaatggcgtgatctcggctcactgcaagctctgcctcccaggttcacgccattctcctgcctcagcctcccaagtagctgggactacgggcacctgccaccacgcctggctcattttttgtatttttagtagagacacggtttcgccatgttagccaggatggtctcgatctcctgacctcgtgatcctcccaactcggcctctcaaagtgctgggattacaggcgtgagccactgtgcccggccctggtctcaaacttctgacctcaagtgatctgtccacctcagcttcccaaagtgctaggattacaggcatgagccaccatgctcaacccaatggtgcttttgtattgtttttctcttatttgaatattaaattttgggaacattaatcatctgaaaaggtcgtgagcccgacagccctaatgaggtagatatcataaagttcatgcaactcagactactatagaagaaaatcttaaacaatctaacaagcttgttaacaatatttggtttctcattcacccaacaaaataaatattgaacagttatgtttccaggcatgcggttaagagctagggacacactgggaaacaagcatacatggtctcttacatttcttttgtggggaacaataaagcaattacattttgtggtaagacctatgacagaaacaaaaggctgaaaataaaaataggggcacaaggatctaccacaaacaggaatgataaaaaaaggtctcctttaaatgaaatttaaactaaacccggaacagcaaataggaaaaaaacccaacctaaaaaaaagggagaaaaaaagccccccaataaaaaaaaaaaaaatttttg

SEQ ID NO: 217838 - DNA, 874 bp, Homo Sapiens
tttttttttttttttttttctttcaagatgagctgtatttattactggaacggaagttgtcatatccgtgatcattagctttgaactttaagcacgactgcttttcctccaaggactgtttttcttcaaatgactggcaccagcagcataagcatgacttaaagcagtttttgaatcttttgctcaccaaatacagagcaattgggttaatgcaggaattcagtgaagccatgttgataccaatatagtccaataccaacagaaagctcaaaagttcacatctattgggatcattctgattataaagagtgagcttcagaatcctgctgaggtgaaggggaagccagcagagggcaaagacaaggaccaggcaaaagacggttttggccacttcccgtctctgctttaggtgatcatttaaagcaatctgcatgccacttttctttctcaacatttcacaggtcattagtgtataaaaaaaatgcagtgatggccaatggcaagcagaaatagaaactgaatagccaccaatcttttgctgtcttgtaaaactgcatgaaagctgtcttctgaacgggatgaagcaagcagattcgcagataacttcctttgtagtccatcctaattatatcaaaacctatggcttcagggacagccaaaacacagagacacccaaaatcaaacaatttctactgctgtccatttggaaccccaattcctttaatttcaaccccagaaacaaaacctcgaaatcggtaaaaaccaaaacaacaaaaacccacccaaatgattccccccgaaggcttttcttgaaaaaaaggcacccccccttaaacaattcccagccccccaaatgggccccgtccccccctcc

SEQ ID NO: 217839 - DNA, 790 bp, Homo Sapiens
ggtttttcgggtccggtattcccgggatattggtttaacacaggggtcgcaaactcaaatgcccacaggggccaggttaggttagcggctgaagcagtctggggagaggcaaaaagcaatggcagggaggtgggacagaggaatgtgggccccaaactatgggggcagctgctactcagtgccagctgttcgtcgccatggggggaagcgggaccagagccgccgggtcttcggctttttcaagaggacgcataactccggattgttatttgaactgtcctgactttggtaagactctgtgacggtgacagtgaaggaggccgactcatcgtcaatttcacacaagtactcgccggagtcctcgagctggacagcgggcagcaccaggcggcggacagtgtcttccttctgcatgagcagcgcggggttctccactcacctcctctccatccttggtccagcgcacctctgcccagggtcggcatagctcataggtcatcaccacacgctctaggcgcacggttgccacatactccttgtcgctgggatacacgatccactaggagacgtccgtgatggtgacagtgaagtaggcacactcatctcccgtgactcattgaaactcttcccctgtccgaaggctggcttgcgtggcactaccctgccggctatgggtcccctttctttctctaactccacgatgttcctcttctcccactccctggccttcttttgtacccaccctcaagggggcctttcttttacggttcccctcataggcctgctttaa

SEQ ID NO: 217840 - DNA, 730 bp, Homo Sapiens; identical to SEQ ID NO: 40971

SEQ ID NO: 217841 - DNA, 884 bp, Homo Sapiens
gctaggctgtgcatccctccgctcgcattgcagggagatggctcagcgacttcttctgaggaggttcctggcctctgtcatctccaggaagccctctcagggtcagtggccacccctcacttccagagccctgcagaccccacaatgcagtcctggtggcctgactgtaacacccaacccagcccggacaatatacaccacgaggatctccttgacaacctttaatatccaggatggacctgactttcaagaccgagtggtcaacagtgagacaccagtggttgtggatttccacgcacagtggtgtggaccctgcaagatcctggggccgaggttagagaagatggtggccaagcagcacgggaaggtggtgatggccaaggtggatattgatgaccacacagacctcgccattgagtatgaggtgtcagcggtgcccactgtgctggccatgaagaatggggacgtggtggacaagtttgtgggcatcaaggatgaagatcagttggaggccttcctgaagaagctgattggctgacaagcagggatgagtcctggttcccttgcccgcgtgggaccccaatagaactcagcccttccatgccagccctttctggtggctccctcctgtctggctcccgggggccatgcctagagcccaggctccagccctgaatgcttcccagctggcggaatgcccaggggcattcaaaggaggggggggtggtggtgatccggggaccgttggcttccctccctaaccccttttttccctcccttttagggccttgggagtttttccccagaaagggggggggagaggcgcggggggccccccccaaagggttttcttaattcgggagcccccccccctggggcctctc

SEQ ID NO: 217842 - DNA, 752 bp, Homo Sapiens
tccgcgcgagccgcgatggagctgcacatcctagaacaccgggtgcgggtgctgagcgtcgcccgtcccggtctctggctctacacccacccgctcatcaagctgctcttcctgccccgccgcagccggtgcaagttcttcagcctgacggagacccctgaggattacacgcttatggtggacgaggagggctttaaagagctgcccccatctgagttcctgcaagtagctgaggccacatggctggtgctgaacgtgtcgtctcacagcggtgcggcagtgcaggctgctggggtcaccaagatcgcccgttcggtcatcgcgccactggccgagcaccacgtgtctgtgctgatgctgtccacttaccagacggacttcatcctggtgcgggagcaggacctgtccgtggtgatccacacgctggcccaggagttcgacatttaccgcgaggtgggcggagagcctgtgcctgtgacgagggatgattccagcaatggctttccccgcactcagcatgggcccagccccacggtgcatcccatccagagcccacagaaccgcttctgtgtcctcacactggaccctgagacgcttccagccatcgccaccaccctcatagatgtcctcttctactcgcacagcacccccaaggaggcagcctctagcagtcctgaacccagctccatcacgttctttgccttctccctcatcgagggttatatctccattgtcatggatgctgaaacaca

SEQ ID NO: 217843 - DNA, 745 bp, Homo Sapiens
  misc_feature (30)..(30): n is a, c, g, or t
agacagtttcggtccggattcccgaggacnttttttttttttttttttttttttgattaagaaaagctaaatttatattaaattatcataaagtcctaaaatactgaacatagtggttaaataactccagaaagtccaatctctccagtgagtaacgttaaaaccattacacatgagcatgggagaatcgcttccattagtttaggacagagagattttgctttttacagagtaaatcagtgctcaaatagatacttcctcaaatatgtcctttctacattctgaacagcccaagtgcaataagatccttccccctttccaatcaagaaaatgccacttttctacttgctcttcctccccagacatgagtctaaggacccaaagtgctcactcctttactgcttgttaagtgtaatgtggggaggctcagaactggggctgacgctactgagagcaaggctaagggcctggtatctctctctagcagtcttagaactgactagaaaagaattgatcttgtcctttttcactttggtagctgatttctcaataccagtaaccacaggagaagtttcaactcaggaaacttcccctagaaattctcccctccattcccagcccctgttgttctctcctgccacttctaattcctgggggagaagaggtctgggtctgccatgggctaggagggcctcatcagtggtgctctctaccttcctactccttacccacctctttgtatttt

SEQ ID NO: 217844 - DNA, 801 bp, Homo Sapiens
ttttttttttttttttttttttttaaataaggggcaagtttccaaagatcagtgtggagtgctacagaaataattataggagaggaaatcataatcacagaaggtataatgcttgtttgaggctccggaataagaactaaaaaaaaaacaaaaaacactggtttcatgcttacggggtacacactttggtgcatcccgtgaacacaaattttaataccaaacaatccttgatgcttcacctggggctgccaagcagtttgtaaaacagaggaaaacatttagtgcagtctgtattatccttttccaacttttctgtttgtgcaagtttttgaagattcattggccaaacaatgaacaacaaaggttttctgagagaagacaaggtggacttttcattttgttagtaaataccagtggcactgttgaacgaaacaaatacttttatctcagtctttcaaatcagtattaatgtctgtgtttccttccactgacagctcttcttctagtttcactgaaaaaagggtgttagtatttttatcttggacactctcttccaaatccttcagcagctcctcttctttatattctgccacatcgacctctaaaccggaattgtccttcagtttgccgtggtgcttgagatagtaccgctggttctgaaagaacttgatgatggtgtacttgggaaggtcgagctgggcagacagagtctggatgggctcttcgtcaaggtacaggcccccgtcttgtatgaaactctggaggattcccaaagcttccactgaaatttttgttcctggc

SEQ ID NO: 217845 - DNA, 688 bp, Homo Sapiens
tccggaggtaggggcaactcttctcttcctgtctgggaaaaagaccatagctcaaaaggaaggccgagggagaagttagaaagggatgatgaacgaagcgttttgaggggactgcaacgccgcggcaatacccgcccctgagctgcgcgcactaccgcctcggtagctgtcatggccgccgggtcacgtgactccggcttggcgccgtcctggttttccgtcaccctggttctgtagtctcggttctccgactccctctttttctcgcttgtggactccgatatattgcccttcttcccttagaagaactgctgaaccgactctgagaaatttggaactcccgaaaactgaagaccgccgggtcgcagaaggggagaagatggggcaggggcagaaaccctcttctttcctgaagtaaagattcgcaaaacttcagacattttcatccaggaagtaggaggccgcattaaaagaagtatttgtggaagatttcgcagcctcaagtgctgagtgtgatattatttgtaggcacatagatgctgtattaggctatcggaatttatatggaagatgtgtagaagatgatattttctcgaataactcgttaaatgttttgagtcctaaataaacctgctcagtttttcgttgggtacacactgtattctctattcattaagtatgtggtgcc

SEQ ID NO: 217846 - DNA, 881 bp, Homo Sapiens
aaacagccaagccttctgtaaatgggcatcagaaagcactgtgagacgcacagacggcgtcttctgccaccaagagacccgagaactccagattcacgacattcctgtcccatgtagaagcatttccattcaaccgtggcccctcttcagaacctagacctatcagtgccatttttttttcataatctacgaagaacttggctatggctgatcttttttaaatttaactttctgatggaccctgtagtttccagttaagtgcagattccttacagacatatagaacagcgcattcttctgtagacatttgctcatgttggtaaatacaatcacccatatgaaaaaattgttttcacctgatatgaaaatgttagaaaaggcaaactccgggacttctaaagatttacttaaatcccattatgtactttattcagaatgtagaagctgacttgaaaggcatccttggtactaagtgaagcttattcagaaaatgcatttttcaaatgcaatggcaactgcttgtagatatcatttttgcagtgtatgttggagctgtaatggttgcaattatgtttcttatttccttaaaagcaaaaagcgtagtttctgatttatgttatagaatgatactgattagactttgagccaaggggaaaatactaaattcttttaaacctggagccctagagagccacaggaatatcttctgttgtacagtctaataagctgtggtaggaagtatcatgtaatcccagttttattgaaagtttatgtattataataatttagtaatcccttctggaaaacatagttggccaggggtttaaaaccctttgtaaacttggaatttttacctttttaagggctataatgttataccc

SEQ ID NO: 217847 - DNA, 754 bp, Homo Sapiens
ttttttttttttttttccggaaatgagcattttaatgcagaaagaaaaccatgataatttacaaatgaatcactttctgggccagagccaggaaggccccaggagctgtgagggtagaaagggaggtggaggctgttgagtgtccgggcaaccagtttagtcagcacctttctgatgggatcctgcccaggctctcccacgataggccctggggggccctggcccccaccccatcctcttggctccctctagtcattccagataggaagacctcgggtcagcttcaggacataaagtagagctggagagacatccctggaaggagggcctgagggccagggagggaacaaggcaggagactgctggttctggttttggccacctcacccttggccacgtcccctccggctaagccacagcacaaagcagagccaggctctggaggcccagggcctcaccactccctctcctgtccccccagcagggggacaaaacagaagcacaggagagcacgttggggagcatgtttcctcgggctgaggtttgattggatctggtttggagaaggtgagggatctcagaggaggtggctgctggggaagatgtcatgctcaattcttggcccccacccatcaccaagataggtacatccatgtgtcaaagttggtgtgatgctggtttggagctcagcccctcccacatggggcatgcagggggagacggaatggaagctcagggcacgggaggaagaaag

SEQ ID NO: 217848 - DNA, 719 bp, Homo Sapiens
ttgataccagcaaactggttccaatcccaggagttatcctcactccaccatggactcactgttgttgtagcacttttgttttcccagtagttaaatgctacctgtgcagctgacatcactggactagatctgggaatagatgaaataatgttgaaaacaaaactttagaggtgccttctggtatcagatgctgcaaggccttgagcatcagagtgtgttaagtcccatctactgtatcaaggccagagtgtggctccatgctcttaggaagggtttcccaaccacggggccagagcccaaaaggtttccccttccctaatatgctaatgaacgaaacatgtaaatctgttttcccctgttaggctagtcttactgtgatgagaagtgtacctggctttccttttcctgggtggagacagctggggcatattcgggtggcattccctctcagtaccagaggccccactgcctgcagctggaggcatgtgaccataagctcctgcttttgctttttgggcttgcatccctcttttctgtgaactctggagaatgctggaattaaaacatttaagcattttgattaaatgagcttgagctcctctgttcttttctaggtgctcttgttctccaactctcctgcctctttctacctctgccctatacattccagctctggagacagagtctgaaactggagtctctggagggatgagaaaacc

SEQ ID NO: 217849 - DNA, 787 bp, Homo Sapiens
tttttttttttttattgttaacaattataaacatttattaagcaccaagaatatactgtggtggttgctatatgaaaacataattaccaatatagtatccctgccattgagcttacaatctaaaacgaaatacaaggctatgagcctatctaaaaacttccttaacttagaaatggctactttggcaaatgagtgaggcaaaatgacctattattcaggtgcagtgctaataaggctttgaatatcatccaaagaatgttttacttgtacccattgttcctgattatgttacacttgctaagaaaaacagtacttagaattttggcatgaacaatgaattatttcaaattgtcttgtaggactttaaacaaagagatgcttactggcctaagttttccagcagccagggaaagccctattaaaaatattatgaactagaccaagtttctcttttaatccacttacacttttttttttttttttgagacggagtcttgctctgtcgcccaggctggagtgcagtggtgcaatctcggctcactgcaagctccgcctcctgggttcaagccattctcctacctcagcctcccgagtagctgggactacaagcgcccgccaccacgcctggctaatgtttttttttgtattttttaaaagaaacggggtttcaccttgttagccaggaaagtctggatcccctgacctcgtgatccgcccccctcggcctcccaaaaggctgggaattacgggatggagccaccccgcccgggcccactttaacttttta

SEQ ID NO: 217850 - DNA, 903 bp, Homo Sapiens
ttttttttttttttttagcagcacatcaattctgtttctgtaactgcttcatggcacagactctgctgtgttccagtagggctgcgggagaaggcactctgcagagttactagttgtgttccctaaccaaaggcaacagtgagatccagaagcagatcattgtcactgagatcgcaggccacgtcaatggccttaggtggatctcataagggaaaaaaaaaatccaatgttacagggaaggactctaaaaaagtggtaactttttttttttgtaagccgacattatttgggattgctgtttccaaggggaaaaaccaatagtgtgtttcttccattcatggaaggaaatatgattttaatttgtatgactggcaaccaaacaatgggcagcctcccagttcttcagtccctgaaggacagaaaaaggaacgacttgcaacatcttccaactctgaagtcagtttctcctcctgagtcttctaaagctaccattaatattctcttgcaagttttaggttactaaggtaccacctggtcttacaacatgcaacagtgtttaaatgtgattttcacagattcttgtttaaaaagcactctttggtggaagacaagcaccttgggtacttaacagagttaacattacaacagtattaccaatagtcaagggaagatgaataaccccaatagtatcaaattccagaaagaaccatttcctgtatggcctttttattttttttaatttttgaccccgggttccaagtggaacaaaaaaaaaaaaacataaaaaccctccttccgaattcccattctttcgaaaggccccaactccaatggttttgccatccccggggcaccaccatgccccccccgaacccgacccggtcccgtgggggacaagaagag

SEQ ID NO: 217851 - DNA, 770 bp, Homo Sapiens; identical to SEQ ID NO: 54592
  misc_feature (669)..(669): n is a, c, g, or t
  misc_feature (748)..(748): n is a, c, g, or t

SEQ ID NO: 217852 - DNA, 879 bp, Homo Sapiens; identical to SEQ ID NO: 43041
  misc_feature (769)..(769): n is a, c, g, or t
  misc_feature (782)..(782): n is a, c, g, or t
  misc_feature (816)..(816): n is a, c, g, or t

SEQ ID NO: 217853 - DNA, 836 bp, Homo Sapiens
  misc_feature (798)..(798): n is a, c, g, or t
  misc_feature (830)..(830): n is a, c, g, or t
ggcctttttttttttttttttgtctgagacagagtcttgctctaccacccagtctggagtgcagtggtgcaatctcggctcactgtagcctccgcctcccaggttcaaggattctcctgcctcagcctcccaagtagctgagattacagacgcccaccactaggtccagctaatttttgtatttttgtagaaaaggggcctcaccatgttggccaggctggtctcaaacgcctgacctcaagtaatccacctgcctcagcctcccagagtgctgtaattagagtcatgagccaccacacctggcctaaatgcactcctataagacaatgtggaaggtaggggccaaattccacacaaccagcttagaagacaaacttttacagcaaagagccatcatttggagaaggacatatgtataatggcaaagaggtattaatacgtgaagtacctgtgacattgaggatcgttacctagaattgacattcagtatttacttcacatagctctgtaactgggtctcttgtaaacaggcattttgtcctcccccttccaatactgtgaacccattattatgtcacctttcctcatgacagtcctataaactaggtaaagaacaaacgtctctattcacagacagaacaggggaaacaagataaaaaatacaactttccagtatttaacaaattctgtcaagtctagacaaaaggtatgatgtctaaatgaactgttagtgggctatgttgaatctcaaaattatctttctccttttttttttaagagatgatctcattctggtgnccaagctggaatgcaatggcttaatcatactnactgga

SEQ ID NO: 217854 - DNA, 850 bp, Homo Sapiens
  misc_feature (800)..(800): n is a, c, g, or t
  misc_feature (820)..(820): n is a, c, g, or t
tacttactactggaccctgttttctctgagcagtttaatatggtttctttactattaatctaaatttgggctaattttatatatttttcaaaaggcattgattttctaaagagttttttaatcattaattcactctggtaatataagtaatacctttatatagtcatctaaactttccaaagcacttttacctattattctcagaacagtccaggaagtaggcaaaacagacattatcaccattttatgaggtattggatgctaaatgacttgctcagcgtctcataactggtaagtagcaggatcaggtctgaaatccatttcacctggccttagatccatctttgagggtctctttatctgataggcttctcgtcttggataggcaaaggaaggatgaactggagcagaggatgtcggccctgcaggagagcaggcgggagctgatggtccagctggaagagctgatgaagttgctgaaggctcaggccacagggtcaccacatacatcgcccacccatggaggcggccggccaatgcccatgccagtgcgctccacgtctgccggctccacccccacccactgtccgcaggactcgctgagcggagtcgggggagacgtgcaggaggccttcgcacaagcagaggaaggtgcagaggaagaagaagagaagatgcagaatgggaaagacagaggtaaaggcagctcagcaggactgctcgtttaaatggggagcccgagctcatggatcagcccgccccccactttggttctgcattccttcctgccaccacctttnccagagctttcggacccgangtccctgacctacttttccatctgacaggc

SEQ ID NO: 217855 - DNA, 867 bp, Homo Sapiens
  misc_feature (763)..(763): n is a, c, g, or t
  misc_feature (838)..(838): n is a, c, g, or t
  misc_feature (841)..(841): n is a, c, g, or t
acaaccacccgacctgttcccgacacctcccggctgcctggggccacccctgggctcaccacggtggagatagtgacaatgtctcaccaagctctgggcgacgttgctggcagaggaaatgagaagaagcccagtagcgtgagggctctgtccattgtcctccccatcgtgctcctcgtcttcctttgcctgggggtcttccttctatggaagaactggcggcttaagaacatcaacagcatcaactttgacaaccccgtctatcagaagaccacagaggatgaggtccacatttgccacaaccaggacggctacagctacccctcgagacagatggtcagtctggaggatgacgtggcgtgaacatctgcctggagtcccgtccctgcccagaacccttcctgagacctcgccggccttgttttattcaaagacagagaagaccaaagcattgcctgccagagctttgttttatatatttattcatctgggaggcagaacaggcttcggacagtgcccatgcaatggcttgggttgggattttggtttcttcctttcctcgtgaaggataagagaaacaggcccggggggaccaggatgacacctccatttctctccaggaagttttgagtttctctccaccgtgacacaatcctcaaacatggaagatgaaaggggaggggatgtcaaggcccagagaagcaagtggctttcaacacacaacagcagatggcaccaacgggaccccctggccctgctcatncaccaatctctaagccaaacccctaaacttaggagtcacgtgttacctcttctatgcaagccttgctagacagcnggntagcctttgccctgtaccccgaatat

SEQ ID NO: 217856 - DNA, 852 bp, Homo Sapiens
  misc_feature (716)..(716): n is a, c, g, or t
  misc_feature (733)..(733): n is a, c, g, or t
  misc_feature (815)..(815): n is a, c, g, or t
  misc_feature (822)..(822): n is a, c, g, or t
cctttcctcctttcggccttcgccgtccaccaggtccctctctctgtccccggccgccatggagcagccgccggcgcctaagagtaaactaaaaaagctgagtgaagacagtttgactaagcagcctgaagaagtttttgatgtattagagaagcttggagaagggtcttatggaagtgtatttaaagcaatacacaaggaatccggtcaagttgtcgcaattaaacaagtacctgttgaatcagatcttcaggaaataatcaaagaaatttccataatgcagcaatgtgacagcccatatgttgtaaagtactatggcagttattttaagaatacagacctctggattgttatggagtactgtggcgctggctctgtctcagacataattagattacgaaacaagacattaatagaagatgaaattgcaaccattcttaaatctacattgaaaggactagaatatttgcactttatgagaaaaatacacagagatataaaagctggaaatattctcctcaatacagaaggacatgcaaaattggcagattttggagtggctggtcagttaacagatacaatggcaaaacgcaatactgtaataggaactccattttggatggctcctgaggtgattcaagaaataggctataactgtgtggccgacatctggtcccttggcattacttctatagaaatggctgaaggaaaacctncttatgctgatatcatncaatgagggctatttttatgattcccacaaatccccaccacattcagaaagcccagaactttggtccgatgatttcaccgantttggtnaaaaagtggtttgggggaaaaatcctgagc

SEQ ID NO: 217857 - DNA, 644 bp, Homo Sapiens
ttcacaactttctgcctttaaatctggttcctctcttcagcttcaccaagccactgaatgcttttcagttttattaaccctcacattccccatccttctcagcaagagcctctccttatgccatcagcatgtatatacatttcctaggaaatttgatctttcttgtcattcttttttggttccaatcggccttttcctggttctcaaagctctagtttcttctaatttctggatcatcgcaagtctggccctctttgaactttaaaacataatgtctaattccaccccaattttcagcatttcttcaactaaatcgataaagctgtctccattatgagaaaggccagaataatactccgggtaagcataagaaagctggtcattttacaacttctcccgactctaggaagtaatatgatgccatttgttgagcatctacagtgtgccaagcacatggttcatctctgcaaactgctgctacattctgtaaagcaagtattatccgcattttagggattaggaacagcttcctgatctcttgccaaaagtcacagctagtgagtggtttaggcaagatacaaaccctagttagttaatccttactcagaagtgtataggactatgatacattggtctcaagcttt

SEQ ID NO: 217858 - DNA, 598 bp, Homo Sapiens; identical to SEQ ID NO: 43334
  misc_feature (594)..(594): n is a, c, g, or t
  misc_feature (597)..(597): n is a, c, g, or t

SEQ ID NO: 217859 - DNA, 832 bp, Homo Sapiens
  misc_feature (693)..(693): n is a, c, g, or t
  misc_feature (801)..(801): n is a, c, g, or t
taaaagttcggaaaatttgcagcctgacaatgtgatagaaaagaaaaattcccattttctgaggagaaattcaagctggctgcagaaatttgcatgagtaacaggagccaaatgctaattcccaagacaatggggaaaatgtctccagggcatgtcagaggtctttatggcaacccctcccatcacaggtccagagatatcaggaaaaaatggttttgttggccaggcccggggtcctcatgctgtgtgcagcctagggacttggtgccctgcatcccagccactcccaaccatgactgacaggaggcaaggtagagcttgggctgtagcttcggggagtgcaagctccaagccttgacagcttccatgtggtgttgagactgcgagtgcacagaagtcaagaactggggtttggaaaccttcgcctagattaaagaggatgtgcggaaatgcctggatggccaggcagaagtttgctgcaggggcagggccctcatggagatcctctgccagggcagtgcagaagggaaatgtggggtcagagaccccacacacagtccctactggggcaccacctagtggagctgtgagaagaggtcctccagaccccagaatggtagatccaccgacagcttgcaccgtgtacctggaaaagttgcagacactcaatgccagcccatgaaagcagctganagggagctgtaccctgcaaaggtacaggggcagactgccaagacatgggaacccaccttcattgatgactgatgtagatgtgagcagagaatatttgacttaaattgntgccctgatttgcttatggctgacctttgtt

SEQ ID NO: 217860 - DNA, 468 bp, Homo Sapiens
  misc_feature (234)..(234): n is a, c, g, or t
  misc_feature (442)..(442): n is a, c, g, or t
  misc_feature (447)..(447): n is a, c, g, or t
tagtagagatggggtttcaccatgttggacaggctggtctccagctcttgacctcgtgatccgcctgtctcggcctcccaaagagttgggattacaggcatgagacatcacgcccagactctttttttttcttaagacataatctcactctgtcgcccaggctggagtgcagtggtgtgatctcacctcaccgcagcctccgcctccctggttccagctattctcgtgcctcanccttgccagtggctgggtctacagcgggggtgccaccacgcctgtttaatttttgtatttttagtggagacggggattcaccatgttggccaggctggtctcgaactcctgctcctgacctcaaacagtcctcacgccttggccttccaaagtgctgagagccaggcgcctggctctatgtctttttttggggggtatggagtcttgntctgntgcctaggctggagtgcagcg

SEQ ID NO: 217861 - DNA, 533 bp, Homo Sapiens
  misc_feature (62)..(62): n is a, c, g, or t
  misc_feature (321)..(321): n is a, c, g, or t
  misc_feature (332)..(332): n is a, c, g, or t
  misc_feature (347)..(347): n is a, c, g, or t
  misc_feature (351)..(351): n is a, c, g, or t
  misc_feature (364)..(364): n is a, c, g, or t
  misc_feature (381)..(381): n is a, c, g, or t
  misc_feature (386)..(386): n is a, c, g, or t
  misc_feature (446)..(446): n is a, c, g, or t
  misc_feature (490)..(490): n is a, c, g, or t
  misc_feature (492)..(492): n is a, c, g, or t
  misc_feature (525)..(525): n is a, c, g, or t
gagacagagttttgctcttgttgcccaggctggagtgcaatgacacaatctcagctcactgnaaccaccacctcccaggttcaagtgattctcctgccttggcctcctgcgtagctgggattacaggcatgagccaccgtgcctggcctttttcttttttaaacagggtcttgctctgtcacccagactagaggtgcagtggcacagtcatggctcactgcagcctcaatctcctgggctcaagtggtcctcaagggcctccagagtagcccaccaccatgcctggctttttttttttttttttttttgtaagtagagacncatttcactgngttggccaggctggngtcnaactcctgggctnaagccattgcccacctnaaagngctgggattacaagtgtgagccaccacacccaaccaggttatttgaacatttttaaagtnctggattttctctattggaaaattgactggcaatttttgggcangntttttaaggggtgcttaaggttgaaaccctttnaaattttt

SEQ ID NO: 217862 - DNA, 555 bp, Homo Sapiens
  misc_feature (524)..(524): n is a, c, g, or t
  misc_feature (543)..(543): n is a, c, g, or t
  misc_feature (553)..(553): n is a, c, g, or t
caatttgccctctacacttcccaatttagaagaaactatcactagtttcttgggtatttatatttgtcactaagtcactttaatgcatcttcaaatatgtgtaaaaaatagaactcttataccaccatcaaccagacagcatatattaccaattaaataagtgcccactatttataaatagtgcatgtttagggatcaataaaaacatatccttacacgtaaggacatatcctaatcttatcataatatctccaaactgcaaaagcatgtgctgggctgttctctaccgaataccataaaactgaatattgttcaccactatggtcgatctttctaactttaaagagtacacaactgaactcaattactccaaagatatgtgaaaacacagaaaaatgacccctgttaaaagagtaaacctagcttttgttttactttccttttatataaaaaagatgtcaggtttctcttctgagggccagtagtcaatttagagagatactacagatgctttttttgggggnggatttggaacttttactncccaggggtnct

SEQ ID NO: 217863 - DNA, 579 bp, Homo Sapiens
  misc_feature (453)..(453): n is a, c, g, or t
  misc_feature (483)..(483): n is a, c, g, or t
  misc_feature (499)..(499): n is a, c, g, or t
  misc_feature (577)..(577): n is a, c, g, or t
gtagagatggggtttcaccatgttgccccactggtctcaaactcctgggctcaagtgatccacccttctcagcttcccaaagtgctgggactacaggcgtgagccactgtgcctggcctgtatctacagatattaagaaaaactttgggctgcatatttagacataactgcttttttgcaattttgatttcatattctactgctaagatttcttatatgggatttgctgcatttcacagaaatctatctattcaaaaatcacactcatgctgattttgctagttcaaaagcagagatatgaccactataaggaaagcccgtgttcacttgcattggtaatattgaagaaataatacacttcatgggaaataaatacaggatatttacaaaatctttggtaaaacttcctaagaagtattggttggggttggttttccggagaccagaagtctncctttggcacccagctggaatgcaatggcncgactcggttactggnaaccttcgcttccggggttaagccaatcttgggcctaacctcctgagaactgggattccgaagcccgtgcccaccagnta

SEQ ID NO: 217864 - DNA, 562 bp, Homo Sapiens
  misc_feature (452)..(452): n is a, c, g, or t
  misc_feature (511)..(511): n is a, c, g, or t
  misc_feature (534)..(534): n is a, c, g, or t
  misc_feature (556)..(556): n is a, c, g, or t
gagacgaagtgtcgctcttgttgcccaggctagagtgcaatggcacgatctcagctcaccgcaacctccgcctcccaggttcaagcaattctcctgcctcagcctcccaagtagctgggattacaggcatgtgccaccatgcccgactaattttttatattttttagtagagacagggtttctccatgttggtcagactggtctcaaactcccgatctcaggtgatccacacgcctcggcctcccaaagtgctgggattacaggcatgagccactgcacccggccgtcaatttgcctttctttatggtgctgggtgggactaagtcacagcagagtcacctaacagcctggatgcacaggactgaggaaggtaagtcaaagagtgcagggcctttctctaccttctcagcaacaaagagaagagacacattcttctctcagagtcctgctgngcttctgctaatacatgcagccttggggacttatcgacagcacaaagccagcatttctnctttctcagagaaacattaaggnacctggactggcgatagggttnctggat

SEQ ID NO: 217865 - DNA, 528 bp, Homo Sapiens
  misc_feature (475)..(475): n is a, c, g, or t
  misc_feature (513)..(513): n is a, c, g, or t
  misc_feature (516)..(516): n is a, c, g, or t
  misc_feature (521)..(521): n is a, c, g, or t
aaccctgtggcacttaccacctatcctactatatatttaatatgcttatttcctactgactgcctgtctccccttatcaaggccaaggtcctcaaggtcagggatttggatctcatttgttcactgatgtatccaaagtgcctagaaaggtgcctgatacatagcaggcctcagtacgtctttgtaaagtatcggaatgaatgtatcatcaatcaaaacataatagtttccatttattggatgtcgtctatgtgccagggcactgcgatgaaaattttacaggcctgatcttactattcctcacaaaaatctcccaagaaaagagcctttattatgactatcttatgaaaaaagacactgtagtcctgcagggccaattaagatgaccaagaccacccaggtacagagtgggagaactgagcctcagactagttctgctcaatgggaacatgaccagatcctgctggaagaaccnagggtcgcttctggcaaataacgccgcaacccttttgngtnattcncttttcc

SEQ ID NO: 217866 - DNA, 567 bp, Homo Sapiens
  misc_feature (533)..(533): n is a, c, g, or t
  misc_feature (546)..(546): n is a, c, g, or t
cataacaagcattgtactatataatactgctcaggtaaaagactgacttttctaaagcgtaagtctaattgtagtactctcttcttgaacctgttccatggctttgaagtttctagcctgagtaactgatcagtatccatcttgttttatggcatggctactgtaccaggagagatacaagtgagaagtttgtgggctgtgtggaagtgaagatgaccaggcccctcaaaaagaagggaagtggagatgctcccactggaaactatgaaaaaggagaacagaggctgtactggggcaccaggaagggagaatggaggctgagggcagtggcagacaagaaagctcctgcaactccagcttagtcgttgcatgtgagatacactgttatggcgtaggtggaaatcaattcatttacgcaacaaaagcaatagacataccagtaatccttgcccaaataaattccttttcgtagtcaggaatcataccatctggatctacgctaggtcactacctttaaaaataattattaatcncttaatttagatntaatctgaaccaaaagtcggc

SEQ ID NO: 217867 - DNA, 581 bp, Homo Sapiens
  misc_feature (445)..(445): n is a, c, g, or t
  misc_feature (487)..(487): n is a, c, g, or t
  misc_feature (568)..(568): n is a, c, g, or t
gtgtgtgtggttttgtttgttttttttttgaggaatttagttctgtgcttttttccataaagaactcctaaagctccattaagaaacccaatggtgctaccattttagccaattcatttccagttactgagcctgtgttggctggagtacagggacctgcacataggtagaaggaagtttaccagaatgagttcaaagtattgaagatgggtctctgaaaatctaaaacttacgagaactcttgaagtagtctggcaattacaagaagtaacaattagttggaatatacctgtggttattaatgccaatgttagatgaaacttatatacagtagaatcctcaaatgatagcaaaagtcagacgtgccagttatgtaataattagaggcttatacaccttaatgaaatttaatcacacttagaccaatagcattatagaaagcatncacactttataatattctaagtaccaaaaatcagtttagcanccgaacaagcatgaaatgaggaaggaaaacaggaagagagctaatgggtatgtttctgtgccttggggaaggtgggggggnccggtttaactaa

SEQ ID NO: 217868 - DNA, 450 bp, Homo Sapiens
  misc_feature (432)..(432): n is a, c, g, or t
gtaggtggtgctgtattctctggtaataccacattcagtgcacacttagtgggttcaggcactgaccatgtgttccccactcactgtgaagtttcccatcaactttttagctaaaaggtttcatccattgatctttgcctaaatcagttactttgttagcagttgcaaaatagcaactttataattctgtcattcctgccactttgctagaattcctcagaatctaggaatatgcatcaaatttttagcatgcatatttgattttataaagatttgtaatattaatcagaactcctactcatgtcctcaatgatactaagacattagaattaatggtcatccaggagaatggcgtgaacccgggagatggagcttgcagtgagcccgagataagtgcctctggacttcaacctgggcgatagagcgagactncatcttcaaaaaaaaaaa

SEQ ID NO: 217869 - DNA, 571 bp, Homo Sapiens
  misc_feature (3)..(3): n is a, c, g, or t
  misc_feature (33)..(33): n is a, c, g, or t
  misc_feature (68)..(68): n is a, c, g, or t
  misc_feature (86)..(86): n is a, c, g, or t
  misc_feature (137)..(137): n is a, c, g, or t
  misc_feature (146)..(146): n is a, c, g, or t
  misc_feature (176)..(176): n is a, c, g, or t
  misc_feature (223)..(223): n is a, c, g, or t
  misc_feature (241)..(241): n is a, c, g, or t
  misc_feature (342)..(342): n is a, c, g, or t
  misc_feature (359)..(359): n is a, c, g, or t
  misc_feature (418)..(418): n is a, c, g, or t
  misc_feature (420)..(420): n is a, c, g, or t
  misc_feature (428)..(428): n is a, c, g, or t
  misc_feature (444)..(444): n is a, c, g, or t
  misc_feature (492)..(492): n is a, c, g, or t
  misc_feature (519)..(519): n is a, c, g, or t
  misc_feature (548)..(548): n is a, c, g, or t
  misc_feature (568)..(568): n is a, c, g, or t
ganatggagttttgctcttgttgcccaggctanagtgcaatggcactattttggctcactgcaacctntgcctcccaggttcaagngattctcatgcctcagcctcccaagtagctgggactacaggcacctgccgntatgcccanataatttttttttctgtattgtaagtaganacagggtttcaccatgttggccatgctggtcttgaactcctgacctntggttatccaccagcctnagcctccaaaagtgctgggattacaggcgtgagccaccacgcctggcccatggccatcctgtcacacctttaactccatctgcttctcctgcttcccctgngctatttcaaatcctanatatcctatcattttatctataaatatttcagtatacagctctaaaggatttaaagatncntaagagtncaatatcattactacnctttaaaaaaatctcaataaattccttaatatcaaacatatgggtagnggtcacaatttcaattttccataaatnggggttttttttacatttgggttaaatanggtcccaactggttgggacnggt

SEQ ID NO: 217870 - DNA, 535 bp, Homo Sapiens
  misc_feature (453)..(453): n is a, c, g, or t
atttaccaatgtcatgtattctgaacaaaggcaaaaaatacaaattcctaccattaaactggcttggttgttgtttgggttggagtagctgtgggggcttggggaagggtgtcgtttctttctagtagtctcatgtcgctttaggtcagctgggctggcttacacgcgctgtgcggtcttcatggagatgggagctctgtgtgtcagcacaggaagtggtctcccagcgttcagcctgaagcagcccaagtcctgtaggtgcttgccgtctctgaagccccaggaacatcagtgcaagaaggaagagactgctggcaaagatgactcccaaggctgttctccgctctggtgggacaacctgggtgctggccccaaggggctcctccagagagatgtgtgtgacctgcaggtgtaagtggcacctgcagagccaggttctgcgtgaaagaagangagatctgaagtgcctgccacctttgcctgagctggaaaagagcccaaaacttggctggggatccaccacttcttttggtcc

SEQ ID NO: 217871 - DNA, 542 bp, Homo Sapiens
  misc_feature (460)..(460): n is a, c, g, or t
  misc_feature (475)..(475): n is a, c, g, or t
  misc_feature (518)..(518): n is a, c, g, or t
  misc_feature (524)..(524): n is a, c, g, or t
  misc_feature (526)..(526): n is a, c, g, or t
  misc_feature (533)..(533): n is a, c, g, or t
gagacagcgtctcaccttgtcatctaggctggagtgcagtggctccatcatagcctcctgcagccttgatgactgtgctagagccaccctctcactttagcctcctgagtagctgggactacaggtgcttcccactgtgcctggccaattaacaatttcatttttatttttagtagagatgagatctcactatgttgcccaggctggtcctgaactcctgagctcaagagatcctcccaccttggcctcccaaagtactgggattacaaacaagagccactgtgcctgaccaggctctaagattgctaatctggctatagaaggactaatgttggccacctcagagacattcattcattttaagaaacatcatctttcactgaatataatatgacattttttagaaggcacagcatatatgtaccataaagagccatctcaactctgacataaactttgntatcatacagcatgnttattttatgcgaatgaaagaactcttttagatggtttagacnccaatntntcatatnaccccctgg

SEQ ID NO: 217872 - DNA, 549 bp, Homo Sapiens
  misc_feature (518)..(518): n is a, c, g, or t
  misc_feature (539)..(539): n is a, c, g, or t
  misc_feature (542)..(542): n is a, c, g, or t
cagtttctaagtcattactttttattttgaaagatttgtgaaactcttcacatcatggtgagagtttgtatgattaataagaagcagctttttcatgaaatgcttggaggtgaacgagttctcagcctgtgagatccgaccatcccattaactttgaagtttctcttgattaatagaagaacaaaggggagggtgaagaaaaggaggaacatgctaaaaaccttatgacaatcatccaaatgtgaggaaagaacaaccgattcaccaactccactttttctattttacaactttctacatctcactcttgattttggccttcctggctgaaacagcctggcagtccctagagcccctgagaagagccctggttctccaaaagacagaggaggagaagccctgcaggatgcgctgaccacttcccagagaactgacagtccgtgctcccaaaagtttgaaccaacagcctaatgtgaaaagaaactgcactgaaaggtaaaggggggaaatgggggatnaactggggcttatgtgagaanggnatttttt

SEQ ID NO: 217873 - DNA, 587 bp, Homo Sapiens
  misc_feature (473)..(473): n is a, c, g, or t
  misc_feature (506)..(506): n is a, c, g, or t
  misc_feature (540)..(540): n is a, c, g, or t
  misc_feature (561)..(561): n is a, c, g, or t
  misc_feature (574)..(574): n is a, c, g, or t
  misc_feature (583)..(583): n is a, c, g, or t
agtttttaaaaaatgctcctcaatgagattgtgttcaattttttttcagcattcttgcaacttttcccttaagtatagacctgtaaactgggaaaattgtacagtgcacttaattgtcctatctgagcaggtttattttatactcaacctctgtatctctgattagagaaaagatacagatatcacaggcagagtcaagtgctatttgaacaccaactggggcagatgctagcttaataaaaaagaaaaaattaaaaaaataaaaataaaaacaatgaatcctcttccatgttaacacaaatagcacacagtgtatggaaaagaaatgaagtacaacttttagggagcacagacatatatactgctactcttaaaattctttctcttctttttttaagaatgtcacatttaaatgcaagtcttaagaattcatagttaatcatcattgtatcaatattagcttatatacctgntctagttttaaatggcaaatagtcccacgttgngctaataaatcatattaatttcttctggtccctntggcaaaccctattgggagcncttcctttaaaangggttccanggct

SEQ ID NO: 217874 - DNA, 596 bp, Homo Sapiens
  misc_feature (422)..(422): n is a, c, g, or t
  misc_feature (491)..(491): n is a, c, g, or t
  misc_feature (574)..(574): n is a, c, g, or t
atcatacaacaaattaacacaaatttattgggtggaaaatgtgaaaagggacaaaaaaaggggtagttttgtactgatataagagttcataaagtgataaactcaggtccaaaatcttcagcccacatcaaagacttcatgttcttatgactctagaaacaggccagccccggctgctgggctcttggaatcatggagtgtagctacacataaagaagctcccttgtcaaggacatgacatcatgttttacatcttggtccttttcctgccacctgtcttccccagaaggcctctgcaaccggttttttgtcagctcaagttgtagaccatcaaacctgtgcttaaaccagcgatgagcttcttccagattagctgttatctgttctgattccacactggcttctttcagcgtattctctgntgcctctttacatttcttcaggtgtctgacagtttcttccaattcctggcaccgattctctacttctgncttattttccgtctgcttctaaggtgccagctcttgctggttattccgactgaggcatcatattggctcttagccacatttgnatcttttctggaggtaagcatt

SEQ ID NO: 217875 - DNA, 586 bp, Homo Sapiens
  misc_feature (549)..(549): n is a, c, g, or t
  misc_feature (575)..(575): n is a, c, g, or t
gagatggagtcttgctctgttgcccaggctggagtgtaatggctcaatctcggctcactgcaacctctacctcctgggctcaagcgattcccccgcctcagcctcccgagtagctgggactacaggtgcctgccactgtgcccagctaaattttgtatttttagtagagatggggtttcaacatcttggccaggctggtctcaaacttctgacctcgtgatccacctgcctcggcctcccaaagtgccgggaccacaggcgtgagccaccgtgcccggccaacacagacctctttaaaaccaaattctctaccagcttcctacaaaatttgtatggcatcaatgggtacacatactaccatctgatcactcatatccaactgaaataggcattctgatcacgaaatttttttggtgtagtcattgactatatttatgaattcatacatgatcattcttcaactaagtatgaactaactcctggattcttggtctagttagggcttaagaaattatttccttctaaatccaagggactgctaatcagtanaacctttgtggaaactaacttccaanatgccgggggg

SEQ ID NO: 217876 - DNA, 589 bp, Homo Sapiens
  misc_feature (503)..(503): n is a, c, g, or t
  misc_feature (544)..(544): n is a, c, g, or t
aagacagggtcttgctatgttgcccaggctggcctcagactccttccctcaggggatcctctcatctcagtcttacttgtagctaggattacaggcatgtgccaccaagcctggctaagagtttaaagttctgacaagccacttttgccatcaacatcactattattattgccattattcttaaattagaaatattttaatcctttttactgctattactctgatgatatgccaaaggtcatgctcctcaattctgccttattttcaccttttctctatttggtttttcataatcattattaaaccagcttaacaaagttgttctatttaatccaatatctactggctgaacaactcaaaatttcaggtggcaaagaaactggagattaaccaattgccattgccaaattattgtaacagcatggaaacctggtgtttccagacagtaagggctccagaggttatctgagaagcccggaaatttaaatatgcatttctttganacccttggtaccccaccctactttaatggtaaaagaagtcnttacaccatcttaggaccctgaggggctaaaccttggaaggctaa

SEQ ID NO: 217877 - DNA, 550 bp, Homo Sapiens
  misc_feature (433)..(433): n is a, c, g, or t
  misc_feature (437)..(437): n is a, c, g, or t
  misc_feature (509)..(509): n is a, c, g, or t
  misc_feature (512)..(512): n is a, c, g, or t
  misc_feature (514)..(514): n is a, c, g, or t
  misc_feature (524)..(524): n is a, c, g, or t
  misc_feature (542)..(542): n is a, c, g, or t
ggttcctacctctttaacagaaaacaacaatgcacttgagaaaaagtgattctttgggaagaccttcggaagcagcatgacagtgaccaaaatgagctcagatggacgtcctgcactgacactgaatgctagagagtcagtcatttcacttgcctgaacctcctcgtccccttgtccagagtgagagacgtgatgttcacatcacaggcttgctgtgagggccagtgaggaggcaaaagggataatgccacacaaagaccaggtgctcaataagggctgctgttattactgaagtcttgggctcagttccagctgtcctattgcttaagtctgtgagctgagacaagtcgtgtcaacttttgggccctctagaacacctggatagtctttggtgggtaccaccttgaaaaaggcttgggggtccactgtaccnttancaaggggtcacttacttttccaaattcacttactcttatatcagaatctactggatcgtaaaattctttcantanangggcctatancttggcacatttttaaanccctggat

SEQ ID NO: 217878 - DNA, 579 bp, Homo Sapiens
  misc_feature (503)..(503): n is a, c, g, or t
  misc_feature (569)..(569): n is a, c, g, or t
agtatatgtcacgcagcaatttatcaaaagcttttgttgtgaaaacacttttcttaaatacacaattaaaagatatgattaagcacttacaggatgtgaaatatttaaaggtaatacacaataatcgggttaccaaaaggacgccttccaatttttctttctattcattttgatgttttgttcttttcaaaacattttctctcattacattcattactaaaggccttactttaaatacatcatgctacattttgttctcctcttcaaatgccaatgttttaacaatttgaattctctggcctgggaaaaagaaaagttatccacttacaaggtatacgtattgacaacatggatgttacagtccaaacaacagcacaaaatcaaccatgtacatgtaacatagtgaaatgagtccacgttttctacacgctacaggataggaagagctggctcttaaggcccagggctcacatgattatgcacttgtcaaagcagcttctcantggtgttgggcatctggggatttcttcttgggcttctggaggcccgtggtgggctttttccttggnaattaacaac

SEQ ID NO: 217879 - DNA, 514 bp, Homo Sapiens
  misc_feature (422)..(422): n is a, c, g, or t
  misc_feature (449)..(450): n is a, c, g, or t
  misc_feature (476)..(476): n is a, c, g, or t
  misc_feature (503)..(503): n is a, c, g, or t
  misc_feature (510)..(510): n is a, c, g, or t
aagcttgtctctgaaaactccaatatctggaggtccctacagatgtttaaatagaagctcctgctggtattcactcatgtctctttctgtggctactttttattgtgtgttctacagtgtacctgcaaaactgtttatagatttattttgaggcctagtttgttagttttctacactgtgtaacaatattaccacaaatctggtgtgttaagaacaagacacatttattatctcacaggttctgtgggtcaggagtccaagcacagattagctggcttctttctgtttcctggtctcaaaagactgcaatcaaggtgttagccagagctaaggtctcaactagggctccactgaaccaggattcacttccaaaataacaaggttgttggcaatcttcagttcctggcacactactagaacanggatctggttctgctgactactggctnnaaggcccccttaagttcttgcctganggccttttccaaagctgggttaccatnatgggancttg

SEQ ID NO: 217880 - DNA, 546 bp, Homo Sapiens
  misc_feature (487)..(487): n is a, c, g, or t
  misc_feature (539)..(539): n is a, c, g, or t
ggcagcataagtttgttatagtttaccaggaagcagtgcaggcggacagcaaggtcctcttttcattttccctaaaaaataaatcagtgaaatccagggaaactagaaaagactgctaaagatctacctgtctaacttctctctttgtgtttgtttgtaaacatggcaattaatagagctcttaaagagctgataacctggaccacggtagactggaaaaataattttttttttgttttgtctttttgaagtaaacatggtgcagtaataaaactgatatgcaagacctaaaaccaattggatggctgaatctcttacctcgagaaacagcagtatcgctgttggggacctgtaaggttaaaaaacaatagaagaggaaagtagtctaaatggaaccattagaacagacctcagtgtacatagtaaagccaatagacgacattaaaaagagaaaaggtgatggggaaaaacattcgggaccacttgnctatggaattcacatcagtcaagtcggggatcttgctttgagctggaaggcnccctgcg

SEQ ID NO: 217881 - DNA, 538 bp, Homo Sapiens
  misc_feature (468)..(468): n is a, c, g, or t
  misc_feature (484)..(484): n is a, c, g, or t
  misc_feature (506)..(506): n is a, c, g, or t
  misc_feature (527)..(527): n is a, c, g, or t
gaacagtaattcatttaattgcaaagcattttgaaataaaaaaaatcaaacttaaaactgtgttctgttcctggaggtggcctgaggcctccccgacagcccagcacctgcgttcctggtgcgaacacgctagcacagggcctgccgcagggcctggatgcgggcaacgcaggcgccaatgggctggcgctgagcctggagctcctctgccagcagctggatctgcatttccacctgttccagctctttctgcacctgctgctctacttcctggtcctcaggccccggctcctctctgttcaagctccagccacctgcgcaggctgctcgcttgccgccgacaggaccagaggttctgcttggtggtctggtagtgcagtagttgctgctggatctcctcaagttcaacctcaaggtccaggctgcctgcaattgaaaagtccaggcccagccctggtggctgaaaantcccaagaaaggagtnaatggggtcaaggaacttggcnagggttaagggaaccggggcnttttccctagg

SEQ ID NO: 217882 - DNA, 540 bp, Homo Sapiens
  misc_feature (441)..(441): n is a, c, g, or t
  misc_feature (510)..(510): n is a, c, g, or t
  misc_feature (513)..(513): n is a, c, g, or t
  misc_feature (520)..(520): n is a, c, g, or t
ggtggctcacatctgtagatgcagctactcaggaggctgaggtgggaggatcaattgagctccggaggtcgaggctgcagtgggctgtgattgcaccactgcactgtagcctgggcgacagagcaagatcctgtctccaaaaaaaaaaaaaggaaaaactattgtttttgccatcgccacccagtaaacatagttactgatatttttacttgcagtgtaactttctggccccttcccataatcacatgtatttggtaagcttttgttttcaaaataagccaataacatttaataagaaacaacagtatatttgtctgttttcatgctgctgataaagccatacccgagactgggtaatttacaaagaaaaagaagttgaatggactcacagttccatgtggctggggaggcctcccaatcatggcagaaggcgaaaggcangtcttgcatggtggcagccaagagagagaatgagaaccaaccaaaaggggtacttaagacctttggcanganaatggcntgaacccggagggggacctt

SEQ ID NO: 217883 - DNA, 540 bp, Homo Sapiens
  misc_feature (85)..(85): n is a, c, g, or t
  misc_feature (462)..(462): n is a, c, g, or t
  misc_feature (480)..(480): n is a, c, g, or t
  misc_feature (486)..(486): n is a, c, g, or t
  misc_feature (507)..(507): n is a, c, g, or t
ggtagagatgaggtcttgctatgttgcccaggctggtcttgaattcctgtactcaactgatcctcccaccttgacccctcaaggngctgggactacaggcttgagccactgcgcccagacgaggaatcccgctcataggagggttgttgtgctgtgagttgtcaaatgtctcacagggctggcgcctcaggctaccattaaagtgttgcctcagccagtagggataattgagaggtacccagagctatagcttcaagtttggtctttgccagtgaatccaaatgcagggttctccctgtgtgctcagctcgtgctcccacaggtttcatggcttctcgctacacaatgccatgcctatttgaatcacactagggctattttctgggaaatgtgagctttattcaaaacagtgttttttcagagcttattctctattgaaatagtgttataaatgggagctgngttcttagagagaccccnaatggnctcatagatcataaagtaatngagaaaagttaaatacgcttggcatgaacaagt

SEQ ID NO: 217884 - DNA, 552 bp, Homo Sapiens; identical to SEQ ID NO: 53889
  misc_feature (407)..(407): n is a, c, g, or t
  misc_feature (409)..(409): n is a, c, g, or t
  misc_feature (478)..(478): n is a, c, g, or t
  misc_feature (488)..(488): n is a, c, g, or t
  misc_feature (546)..(546): n is a, c, g, or t
  misc_feature (550)..(550): n is a, c, g, or t

SEQ ID NO: 217885 - DNA, 544 bp, Homo Sapiens
  misc_feature (509)..(509): n is a, c, g, or t
  misc_feature (524)..(524): n is a, c, g, or t
  misc_feature (539)..(539): n is a, c, g, or t
  misc_feature (542)..(542): n is a, c, g, or t
ggagacagagtcttactctgtcacccaggctgcagtgcggtgatgtgatcttggctcactgcaacctctgcctcctgggttcacgcaattcctgtgcctcagcctcccaagtacctgggattacaggcatgcaccaccacgcctggctaatttttgtatttttagtacagacggggtttcacaccatgttggccaggctggtcttgaactcttgggctcaagtgacccacttgccttagcctctcaaagtgctgggattaccagcatgagccactgcacctggccccatacttcataatttaaatcactgttttcatctttttcaagcatgcaaaattaaaaaaaaaatggaataactttcaattataaaagctgtcaaacagaaatcctttaaaaggctaaagacctatgtaagtattaaatagcaatatataaattattaatgattaatatctcaaagaaaattttcagcaggacattactttcattatactcttcagtaatactgnagcacaacacttggnatgccgggttccaanggnaa

SEQ ID NO: 217886 - DNA, 555 bp, Homo Sapiens
  misc_feature (347)..(347): n is a, c, g, or t
  misc_feature (448)..(448): n is a, c, g, or t
  misc_feature (458)..(458): n is a, c, g, or t
  misc_feature (524)..(524): n is a, c, g, or t
  misc_feature (552)..(552): n is a, c, g, or t
agagcagttttaggttcacagcaaaagtgagtagaagtacagagttcccacacacctcctcccaccacacaggcacagggtcccttactaccatcatcccacatcagactggtacatgtgtaactgatgaccctacacggacatgtcattattgcttagagttcatagtccatacgagggttcacacttgggggtgcacattctgtgggtctggacaagtgcacagtgacatgcatccgccagtgtaatatcacacagagtagtttcaccgccctgaaatcctccctgttccaccttttcatccctctgtcctcccagcccctggcaaccactgacctttttactgnctccatagttttaacttttctagaatgtcatatagttggaatcaaacaataggtagtcttttcagagtggcctctttcacttagtaatatgcatggaaggnttctccatgnctctttgtgacgtgatggctcatttatttctagccctaaataatattccattaagttttggctatnccctattgaaggactttttgggtgcttncaa

SEQ ID NO: 217887 - DNA, 467 bp, Homo Sapiens
  misc_feature (453)..(454): n is a, c, g, or t
  misc_feature (457)..(457): n is a, c, g, or t
  misc_feature (462)..(462): n is a, c, g, or t
aaatggagtctcactctgttgcccaggctggagtacagtggcacgatcttggctcactgcaacctccgcctcccgggttcaagtgattctcctgcctcaacctcccaagtaggtgggactacaggtgtgcgccaccacacctggctaatttttgtatttttagtagagacggggttttgccatgttggccaggctggtcttaaactcccgacctcaggtgatccacccgcctcagcttcccgaagtgctgggattacaggcatcagccaccgtgcccggccaaaacttctttctaatctatggaattgggtctgagaactaggtatgctctacattttcacacaaaaagaattaaggatatggattctacaaaacatgaacatcctagagatagtggaaaaaacaaattcccagtcgtactcatttatcatacttctagttctttctgagggnntanggggnaaggg

SEQ ID NO: 217888 - DNA, 542 bp, Homo Sapiens
  misc_feature (439)..(439): n is a, c, g, or t
  misc_feature (463)..(463): n is a, c, g, or t
  misc_feature (502)..(502): n is a, c, g, or t
  misc_feature (510)..(510): n is a, c, g, or t
  misc_feature (537)..(537): n is a, c, g, or t
gagacagggtctctcactctgtcacccaggctggagtacagtggctcgcttacggttcactgcaggcttaacctcccaggctcaagcaatcctcccaactcagccttcctagtacctgagactacaggcacatgccaccatgcccagttaatttttttgtagagacagagttttgccatattgcccaggctcatctccaactcctgggctaaagtgatccacctgcctcagcctcccagagtgctgggattataggcatgagccactacacccggcctcatatgacatttttaatggttaagatacaattaatttactgtgtgaccctggacaagttaactctgaatctcagtttaacctccaatagatcagggttacaggacccatcacttagagtagctatgaaagtgacaagagaaggctttgtaaaatactaggnatatataatgcttggcaatagtgnatggtttggaagtattcatgaattttaatcatttaaggnttaatggnaaattttctgggttaaacctacttatnttaaa

SEQ ID NO: 217889 - DNA, 533 bp, Homo Sapiens
  misc_feature (460)..(460): n is a, c, g, or t
  misc_feature (488)..(488): n is a, c, g, or t
  misc_feature (507)..(507): n is a, c, g, or t
cattgaaactccactgaaaatgccatgggtggtttatggcaacttttacatgagtctagcaaaaggaaagaatgtgtcacctcttttctatcacaattgggggcttaagaatgcaggggtggatgtatcaacccccagaaagttacaagtttaagccaggaattctggccaggcaatcatttttagtaatacccttgagcttatgggagtggaagtttgtatttttttttttccaaagtacattactactaatgataatagttttcattagttctagtcactgggcttagcgttttccatattttaccctcatagcaacctatgaaacctgtgtaggaattgacatttgatgacaaggtctgttcaaatccagcacccatgtgttacttaccactctttataattttttaaaagagatttctccttctgaatccctatttttttttgaatggccgaatangaaaaattaaaatctgaaaagctcttanaaaatctggttcaatattngaacctagaaatggctggttcaagga

SEQ ID NO: 217890 - DNA, 565 bp, Homo Sapiens
  misc_feature (523)..(523): n is a, c, g, or t
  misc_feature (556)..(557): n is a, c, g, or t
  misc_feature (561)..(561): n is a, c, g, or t
gtttctttttgagatggagtcttgctctgtctcccaggctggagtgcagtggtgcgatcttggcctactgcaaactccacctcctgggttcaagcgattctcctgcctcagcctcctgagtagccgggattacaggtgtgtgccaccacgcccagctaatttttgtgtttttagtagagacggggtttcgccatgttggccaggctggtctcaaactcgtaacctcaagtgatccacccacctcagcttcccaaagtgctgggatgacagacgtgagccaccatgcctggtcatgttttctgtttttttttaagacagggtctcactctgttgcccaggcaggagtgcagtgtcacagtcatggctcactgcagcctcaacctcctgggctccagcaatcctcctccttcctcagcctctagagtagctgggaccaaaggtgtacgccaccacacctagcttattaatttttgtagggacaagggtctggatctggtggctaagctgggctttaaactccggncctaaacgatccttcttcccgggtttcctggannggtnggga

SEQ ID NO: 217891 - DNA, 558 bp, Homo Sapiens
  misc_feature (505)..(505): n is a, c, g, or t
  misc_feature (534)..(534): n is a, c, g, or t
  misc_feature (541)..(541): n is a, c, g, or t
  misc_feature (544)..(545): n is a, c, g, or t
  misc_feature (554)..(554): n is a, c, g, or t
gatacggagtattgctctgttgcccaggctggagtgcagtagcacagtctcggctcactgcaacctctgcctcccgggttcaagagattctcctgcctcagcctccagagtagctgggattacaagcgtgcaccaccatacctggctaatttttgtattttcagtagagatggggtttcgccatgttgaccagcctggtcttgaactcctgaccttaagggattcacccgccttggcctcccaaagtgttaggattacatgcgtgagccaccaccctcggcctgcttcttagcacttctaacctctgccccttggcatcacctggccaagcagatgaaaagttccagtgagctgtcagccggcaccaggctggggtcttccctaggcagctccaagtggctaggatctggcttcttttccagagctgggtccagaaaccaagatcgggaatgcctgatggctgctctgcggcccttgctatgaaggcactttccttggttcaggngatcggcccttggctttaaggaacatgtngggtcanccnngggttgggncaac

SEQ ID NO: 217892 - DNA, 557 bp, Homo Sapiens
  misc_feature (498)..(498): n is a, c, g, or t
  misc_feature (511)..(511): n is a, c, g, or t
  misc_feature (531)..(531): n is a, c, g, or t
  misc_feature (555)..(555): n is a, c, g, or t
cttcttctgttttggtctgtagtgatctttgtctctcttctctcttctttccttatctttttcttttctcttacctgcccagagtggatgggttcaattaaactgttcatgtcatgactctggaagtcctgataagcttattggactataagaggggatcttcattagcagtgctgagaaatcccaactcctgataccaaatgctgttgagcttttgtcttccaatttcacttttttttctgttttcgatattcctgctgctgctggagctcctcttccatcagctattgctttggaagaaggatttggaagcatctgtgtatcctctttttctgccctgggacattcattacggtaagaggaatctgaggctaccggtgctgtaacttctgaaccacgacttaagtcaagagggagacagggtcccagcttctcaagtggcaaatgtgcaacatcaggcataagttttatttatcactgaagaagaaagctgagatncaagcggcaaaancttgacttggattaaatctngggaaaatggggaattaagggggntt

SEQ ID NO: 217893 - DNA, 567 bp, Homo Sapiens
  misc_feature (481)..(481): n is a, c, g, or t
  misc_feature (507)..(507): n is a, c, g, or t
  misc_feature (566)..(566): n is a, c, g, or t
acagaaaacgaaggcgactattttattagaaaacaaaggctatatgttaatccatcaccagatacgacaatgcttaccaaagaactgtaaaaaattggtctaaaaacagaaaaaagcacaacgacagacgcatggtatagcacacctctaggaagcctgcagccctcactggaaataaacacatacccacacacacatatgtacaggtttcataagcaaagatgtctaaaacagattgtaagagaaagataaacactcctacatgtatatgtgtgcacattttccttaaaaacacataacatgcttttccttcattttactcagctctgagaaattcccgatacaaaactattccatgcctcatactacagatagaatatcataaagcaaaagtctacattttcctaggagctgttaattagaagaataaaatgtgttttgcatttttttagtgtaaaacccacatacaaacagagattgngatatagtgcttggcattttaattgnaacatattaccaaaaagctttatatacctaggctttatcctatttacattgcagtagang

SEQ ID NO: 217894 - DNA, 566 bp, Homo Sapiens
  misc_feature (539)..(539): n is a, c, g, or t
  misc_feature (549)..(549): n is a, c, g, or t
cacattctcaatatgctttattcaacagaacaaaagaaggcaaagagagcagagaaagcagtgcaggaatgcagactgcatcagaaggtacatcacttgccattcagggacactgcaagagaagatcaggacaactgacttgtcagatgagaactcctgagtgtagctataatgggcaggatggttagcaattaaagagaggactcctcatctgcagctggacctagactgagtttcagttcttatggggatataggtcattttcttctcagaattatggcagactcagatacctgtaataatacgggaactaaaaaggacattcgcatgtctgagtgctgataactgttgacttgatggtaagcaacaggagctcagtggaacaggtattgatgagaagaaaagtgagggcatcccagctctacccgggagggcaggggaaactggaggccaggggaggacaagcaacctgaggagaggctctgctgccaaaaaagggcctgaaaactttgggactgaaacttgcggaacactttaangcttggactntttctggttggaggagg

SEQ ID NO: 217895 - DNA, 557 bp, Homo Sapiens
  misc_feature (452)..(452): n is a, c, g, or t
  misc_feature (482)..(482): n is a, c, g, or t
  misc_feature (491)..(491): n is a, c, g, or t
  misc_feature (517)..(517): n is a, c, g, or t
  misc_feature (524)..(524): n is a, c, g, or t
  misc_feature (528)..(528): n is a, c, g, or t
gagacagagtctcacgcctgtaatcccagcactttgggaggccgaggcgggcggatcacctgaggtcaggagctcaagaacagcctgaccaatatggtgtttttttcttttttaaagaagaacaatcaatcatattgccagaagaatcaatgacccagccctactgcacgccgagtggttgcgacaggcttagatattgttagaggtttgcttctgctgccaaaccgtttgcattctcctggggacagtgctctcctgatgtgactcttattctgaatttagagcagaaggtggtggcatatacctggtgagacccagggagggcaggatcagcaccatgaagatcaagaatatgtagactttggtcatcatgatctggttttcccccgacctgcaggaagtcaaaggtgagcactcgcagtcccccaaatgctctatgtgcccccagtgangcccctggcatgtgcccactggctgagcancttgggggntaaggtgtggaccaagggaccggcanagatatncctnttaaggcaaggccttgggcttcccggcac

SEQ ID NO: 217896 - DNA, 561 bp, Homo Sapiens
  misc_feature (430)..(430): n is a, c, g, or t
  misc_feature (513)..(513): n is a, c, g, or t
  misc_feature (528)..(528): n is a, c, g, or t
ctgaaaaaaatcatgagtgagttaaatttaaatatttcaaacatgcaaactctcaagagggtaccatgattacagggattaaataacataaaggtttcctacaaactctacacctgcttttgccccttaaatatcaaatgtagttacattctggtgcaaacttaaaagtaattttcaaattctgtctgaacatggtgtcttagtctgcttgggctgccagaacaaaataccatagactgggtggcttaaacaacagaaataaattttctcacagttctgaaggctgggagtccaggattaaggttttgcagggtttggtttctagtgagggctttcttcctggcttgcagatggccatcttctctccataggctaacatggcctctactttgtgtgtgggagaagtcagagatagagcaagccctcttgngtctcttcatataagcctactaatccccatcagaccaggtcccttatgatcttaaaccctaattaccttctttaaaagcccantcccgaacaccattngactggaaattgaagctttaaccccaataccat

SEQ ID NO: 217897 - DNA, 542 bp, Homo Sapiens
  misc_feature (3)..(3): n is a, c, g, or t
  misc_feature (17)..(17): n is a, c, g, or t
  misc_feature (20)..(20): n is a, c, g, or t
  misc_feature (40)..(40): n is a, c, g, or t
  misc_feature (168)..(168): n is a, c, g, or t
  misc_feature (170)..(170): n is a, c, g, or t
  misc_feature (427)..(427): n is a, c, g, or t
  misc_feature (496)..(496): n is a, c, g, or t
  misc_feature (505)..(505): n is a, c, g, or t
  misc_feature (527)..(527): n is a, c, g, or t
  misc_feature (535)..(535): n is a, c, g, or t
ganacagagtctttctntgnggcccaggcttgagtgcagnggcgcaatctcggttcactgtaacatccgcctcctgggttcaagcaattttcctgcctcagcctcccgagtagctgggattacaggcgcatgccaccatgcccagctaattttttgtagttttagtananatggggtttttccacattggctaggctgatcttgaacttctgacctcaggtgatccacctgtctcggcctcccaaagtgctgggattacaggcgtgagccaccgcgcctggctgtattgtcattttaaacaccgtatccagataaactgtaagagggaacatggaatagaatgcttgtttttcacttgttaatattttttttaattttcaaaaaatagaagtgatgtactctaaccaccatataaataatggccagngctctggatatccttttttttaattttttagagcaagacgtatttcaacgactggcaccaatttggttnctgcctttnttggccaaaaagaaaatttggntttaaaanaaggtta

SEQ ID NO: 217898 - DNA, 570 bp, Homo Sapiens
  misc_feature (485)..(485): n is a, c, g, or t
  misc_feature (535)..(535): n is a, c, g, or t
  misc_feature (538)..(538): n is a, c, g, or t
  misc_feature (550)..(550): n is a, c, g, or t
  misc_feature (552)..(552): n is a, c, g, or t
  misc_feature (556)..(556): n is a, c, g, or t
ctaggaatgtttttcttatttaaaaaataatactgattttctgggaaaaacaaaaaaacaagccagagaagactgcccttcaaaccaaaatggtaagaaaggcagctatgaacatggggaagacaagtgtgaacatgaggaagacagggatgaaggtgtgaaaacagatgtgaggataagaagacaggtgtaaaggtgagaaagaggccgggcatggtggctcacgcctgtaatcccagcactgtgggaggccaaggcagatggatcatctgaagtcaagagttcgagaccagcctggccaacatggcaaaaccccgtctctactaaaaatacaaaattagccgggcgtggtggcacatgcctgtaatcccaggtactcgggaggctgatgcagcagaattgcttgaacccaagaggcggaggttgcagtgagctgaaaaccgtgccattgcacttcacctgggcaagaaaaccgagactccatntcaaaaaaaaggtgagaaagaatggtgtgaaccttaaggtgcaagtgttnaanattggaaaggcngnttanccctgatgcctgcc

SEQ ID NO: 217899 - DNA, 559 bp, Homo Sapiens
  misc_feature (483)..(483): n is a, c, g, or t
  misc_feature (489)..(489): n is a, c, g, or t
  misc_feature (505)..(505): n is a, c, g, or t
  misc_feature (521)..(521): n is a, c, g, or t
  misc_feature (533)..(533): n is a, c, g, or t
  misc_feature (545)..(545): n is a, c, g, or t
cctgctgatacttcttttatttctgttgtaaaacagagtaggggttaaataaagggtattgggtttgtcagctccagcctcttgggactctttttcctggagagagtggagagaacagtgggaggcaaagacacatagttggggaagggttcttttaatatgcagatgcttcagggagaaccaaactatttcactggtaatctcccgtcccactggaactggtgcttggatcggaagggaagtgagatcagtcaattagttaccaacactgccatcagcattgccagagaggtggagggcagacatcatggaatcagacagctccctggggattttatctgcacatttctgtaaattcttactcttcagggaggatgctagagcctgccctgttgtaagggggtccatctccatgaatcctcttgcaatactgggcaacagtccactgggcacacattccaccttactggttttttttaaggnggtggnctacattgagtttaanccacccattgatgacnattcggattggngcaataaccagnggaactccattttt

SEQ ID NO: 217900 - DNA, 562 bp, Homo Sapiens
  misc_feature (538)..(538): n is a, c, g, or t
  misc_feature (555)..(555): n is a, c, g, or t
actagtctttcacttctggctgaacatttttctttctgctttattgcaccactttactgctcattaaaatcactaattcttcctgattaatttgaaatcaaatggcaatgcaaaacatatacatccaatgtttctcctactttaaaaaagctttggccaaagcttttattattcaatatggtggtgggaaactatcataatgcatgtggtcatacgcctaagtgagctactttgttgcgggacagaagcggataataggagcataggtaatggagccaacaaacttgtacttgaaagccagctttgccactacaagtaagtaggaaagtttatgcatccattggatgaagatccatttgataatcttcctcagtggacagatgggaggatacaatgagaatttatatgtagagcacccggccagcatatgcctaggatagaagccatctaagcaagcgctttgtatgatgtgaaatccttaaacgggtgtgggcaaaaaatagtcaaaatatatctaccagcttttttggctaatacntttgagacaccttttantatatac

SEQ ID NO: 217901 - DNA, 554 bp, Homo Sapiens
  misc_feature (527)..(527): n is a, c, g, or t
ctttgtttgtgccaaaaatgaatctctttttccatttgattttctctccatgccacttatcttcacatttagttgtgaattttctgttccatcagaatatggtccactggattcctccatcatttcaacagtttccaaaccaggcaacaggagcagaaatttttgtttggcttgtgttagtactggttttaactcttcaggataaaccaacatcatcactttggcaaaagtggcattccagaactgagcactctgttttcgaatctgtttattcttgtgcagaaatattatgcataatagtggggagagttgttcaagaagttcactatcataagttccggtgtagctgaattgcagacaagcaataatttctcccagtagcttttctaacttgttgttcagacaactatatactttaggaacttcatcaagctttgagttttcataaaataatgccagaggtcttggtaaagttgcaaatatttttcggatcatagaaggcaagaaatatgccccaggtccctggnaataatggccgtgaatggagttgccca

SEQ ID NO: 217902 - DNA, 584 bp, Homo Sapiens
  misc_feature (532)..(532): n is a, c, g, or t
  misc_feature (566)..(566): n is a, c, g, or t
gttctgattttgacaagggtaacttcttctttattaaagcaaataactggacataatcttaaaggattccacctccatcgtctttcctaacttagatcttcattgagaaattgggcaaggttaagtttacttttttctagtgctgcggttttggctcgtcttggtagtctcatcttcatttctgattctggttctggaacttcatgatcactttcagagtcggcttcagcagtctgacacctcctgttcgtcctagctgaaactgtcacttttctctgtcctctgttagtctttagctgagtagactttgatgcttgggttgcttttacacccctgagtggagtcatatatacttctttattcttttcatcttcattttggaaagtagttgtagtcaaggtggcatcctgtgctgcttcagcttggtcaccaaattctttatttcctttttctaactgaatcttgattttctccaaagctctcagacatgtcctatcttttacttgctccagaatctcattcaatagaaccngaagatcttttgcaagaaggcttccggagttctnaagaactcaagggtttgg

SEQ ID NO: 217903 - DNA, 590 bp, Homo Sapiens
  misc_feature (389)..(389): n is a, c, g, or t
  misc_feature (394)..(394): n is a, c, g, or t
  misc_feature (484)..(484): n is a, c, g, or t
  misc_feature (535)..(535): n is a, c, g, or t
  misc_feature (581)..(581): n is a, c, g, or t
aaataaattaaatttaattcaatagaaacacacacattgttactagcataagtaacaaaaacttccaatgtttaacaaagtaagtaaaatgtgataagcatgtacagtctaagaattttctacatgcattcttgttaaactactacttttgctttgttcagactttataatacctttctccaaacagcttatccttgatttttttaaaaattcaaatacccacaagtttcagtgaatagattgtgaaataaagactatttctaaaaataccttcatgttcacattctgacagagtaaacaataagaattgagaatcaagaggctatgtggtttcaaaaacctaaaaagaaacactgcaggacagatcttttatgagtatgatcttttgntttgntttcttacagttttgggtaaagcaaaatcaaaagggcacactaagagtaaaacacagaaataatcctttaaaacaatttaagtttaagcngggactcaactttaccatgggctctggtaaacaactttggtcattctaccncaaatcttcaaaatggaaataggtttaataggattttaaaaaggtnggctgatgg

SEQ ID NO: 217904 - DNA, 588 bp, Homo Sapiens
  misc_feature (471)..(471): n is a, c, g, or t
  misc_feature (475)..(475): n is a, c, g, or t
  misc_feature (543)..(543): n is a, c, g, or t
  misc_feature (545)..(545): n is a, c, g, or t
  misc_feature (556)..(556): n is a, c, g, or t
  misc_feature (572)..(572): n is a, c, g, or t
caaagaatgtgtaaatactttatttcaaaattgtatcaagggttattcagttcctcttgctatctaaattaaaatgttcaaccaaatgcggatccaaaaaaattagaaaattaaacgaccaattaagtgaccttttaaacttcagttctttggtacactaaatctaagtaaattcaacaacaaagtacaatgatgagccctccatacctatggaaggctctgtgcttcgtcattcaactatagatcaaaacaatattcatttaaaaaaaatagctgcatctgcattgaacatgtacaaatttttctcttgttattattccctaaacaatatagtataacagttatttaaatgatgtttatattatactaaatatatgtaaagacgatgtaaagtatatgggaggatatacataggttatatgcaaatactatgccttgagcatcctcagatttgggtattctaggggacanaaanggtagggcctggcacaattcccacagcacccagggccaatgggttacttttctgaaaagggaatttcngncccaacccctnaaggctaaacctaaanggggaatttcattttt

SEQ ID NO: 217905 - DNA, 535 bp, Homo Sapiens
  misc_feature (454)..(454): n is a, c, g, or t
  misc_feature (499)..(499): n is a, c, g, or t
  misc_feature (517)..(517): n is a, c, g, or t
  misc_feature (520)..(520): n is a, c, g, or t
aggtacatattttaggatttttattgctgattacagatttgaaactatgaaatgtgcactgcttggcaagtaacacaagtaattctttacttattcacatttccaataaaagcgtaaataaacagacaaaaaatataaaggacaagagaaatacaaatagcaacagcttcaaaacaaaaggatttagtaacagaaagtctccacagtgtccgtcaaaatttaagattatccaaaccgtgcaaacgctcaacacaaaccaacgccatacactgaactattaatacttgtcccttgaagttgcaaactagaagccacccacataactgtatgatcacacaaaccaactaatttgctcaaggttcaggttaaagcaacatttaatatcctttacaagatggaattcgtgacaagttcaaaaggagaacttcctttggtttaatgcagctgtgctcanaagcctgtgatttcctaggaaaccctctggggttaacccattggnaaaatgccgtttaagcantgncacactggctggctg

SEQ ID NO: 217906 - DNA, 548 bp, Homo Sapiens
  misc_feature (431)..(431): n is a, c, g, or t
  misc_feature (440)..(440): n is a, c, g, or t
  misc_feature (456)..(456): n is a, c, g, or t
  misc_feature (474)..(474): n is a, c, g, or t
  misc_feature (488)..(488): n is a, c, g, or t
  misc_feature (524)..(524): n is a, c, g, or t
  misc_feature (526)..(526): n is a, c, g, or t
  misc_feature (544)..(544): n is a, c, g, or t
aagacaagatgcaggaagaagaaattgagaattcactacataacttcccaccatcaaggctttacaacagcaacattttgttttccttaaatgttcctgtttggtagtccaatgctcaaaaactgaagacagtatgttttggatcacttttgtcctggaagaaaaaaaaaaaagtctaggggtcctctacaaatagttatgaccaaagctcagcaaagaatgggaatgactgcaattaaatgccactggccctggctcactaacagccagccagtccctgctatctggcaacctttgtgctagcttcctgcctcttgctacacagagaacacagggcctgtcttagctcaggccaccataacgaaataccaaagactgggtgacttaaacaggcgaacctgattttctcacagttctggaggctggaaatncaagatcanggtgccagcatgatangggtcttggtgggggctntctttctggcttgnaaaagggcactttctcttttttaaaatggaatgggnancctatggatggctggacncaca

SEQ ID NO: 217907 - DNA, 569 bp, Homo Sapiens
  misc_feature (515)..(515): n is a, c, g, or t
  misc_feature (545)..(545): n is a, c, g, or t
ggagagagatgtatttataccagtggggctaaggaggaagcagtccagtgggggactttgagtgctgtgcagtgttctcttaagagtcgtagtacagtcctggggtcaagtctctttccctaatctttgctggggaagccttgagccttgatttatccttcccttggctttgggctttgaggaagttggggatggaggggatgatgcttctttaggtttctctattccaagcccctctgaatttctagttgcaacctgccttcacacagagttgatgggaaagattagttgtagatgtcggtatgggattgagcctacagcaagaggaagaagggaactccagtatagagtacacaaaggaaaagggcaggaaagataccaaaggcttatgaaaacaaaggaagggaagaaaagagaaaaaaggtggaaaatcaggtcccagattgcttgttaggaagaatgaggtaattttgggcctaggaatgcacaatccaaagcttgattttcaccacctncattggtctcttcgagccttccttccaaangttcttcccggcttaaagccagca

SEQ ID NO: 217908 - DNA, 507 bp, Homo Sapiens
  misc_feature (464)..(464): n is a, c, g, or t
  misc_feature (467)..(467): n is a, c, g, or t
  misc_feature (470)..(470): n is a, c, g, or t
  misc_feature (483)..(483): n is a, c, g, or t
  misc_feature (488)..(488): n is a, c, g, or t
  misc_feature (492)..(492): n is a, c, g, or t
gttcagagtagctttattttaatagccaaatattggaagtgatccaaatgtccatcgacaggtgaatggattaaacaaactgtacagatgtggtatatccatacaatggaatgttattcatcaataaaaagaaaagaattgacacacacaagacacaagaatctaaaaaataattatgctgcgtgaaagaagacagacaaaagaagagcacgtactctatgattccatttatataaaacttaagaaaatgcaaacgaatctgcagggacagaaagcagttcagtggctgccagagagagggttttctcagggggaagaggcctaagaaaacttttgtgggtgatggatatgatccccctgttgattgtggtgacagtttcacagatgtaaacatatggcaaaacttatcaaattatccactttaaatattaacccgtgtttggatatcaattttaccttaattnggnctngttttaaaaaaantttgnctcncaagcttaaaaaagg

SEQ ID NO: 217909 - DNA, 543 bp, Homo Sapiens
  misc_feature (427)..(427): n is a, c, g, or t
  misc_feature (432)..(432): n is a, c, g, or t
  misc_feature (446)..(446): n is a, c, g, or t
  misc_feature (461)..(461): n is a, c, g, or t
  misc_feature (504)..(504): n is a, c, g, or t
  misc_feature (515)..(515): n is a, c, g, or t
acatgttcataccaactttattcatgatagccccaaactagaaacagcccattgttcaccagttagttgttcacctaacaggtgaaacgttaaaatgtggcattcatacatagaacactgctcagccataaaaaggaacaaagcttaaacacactgatgaacatacaaacatgctgagtaaaaggaacttacagaatacatactgcataagtgagtccgttatatgaagttctagaataggcaaaattaatctacagtgaacaaaatcctaacagtagctgactgccaggggagggaagaagggacaggagagagaggtgcaggaattgactaggtgaaaaaattcagatgtaatacagatgttccagacataggggtttgagttacatgcttttacatcaaaactcatcaaatgagtctgggtatnggggntcacacctgtaatnccagctactcgggangcttaggcaggagactcccttgacccaggaggtggaggttcantgagcccagancaggccctggacttttaccctgggggat

SEQ ID NO: 217910 - DNA, 695 bp, Homo Sapiens
  misc_feature (8)..(8): n is a, c, g, or t
  misc_feature (35)..(35): n is a, c, g, or t
  misc_feature (51)..(51): n is a, c, g, or t
  misc_feature (65)..(65): n is a, c, g, or t
  misc_feature (68)..(68): n is a, c, g, or t
  misc_feature (455)..(455): n is a, c, g, or t
  misc_feature (568)..(568): n is a, c, g, or t
  misc_feature (657)..(657): n is a, c, g, or t
  misc_feature (679)..(679): n is a, c, g, or t
  misc_feature (687)..(687): n is a, c, g, or t
  misc_feature (690)..(690): n is a, c, g, or t
tagtcttnctctaatacaacaagttgcatttgttntttaaaagaaacaaantttaaaactataanggnaaaccttgaaaagtatacaaatttttttcaaagcatggttttaaaaacacatctttaaaaagcgtgattgggatgtgccacaaggaatcataataaatttcaaaagataaaaaataaacattgacacagaagtcaatcactcagtcacagaagttttaaatataaggaaattttgatgaattacagctttatttctgctgctgtcaggagtacttctatgatgggattcacaaattttactagaactttaagctgaatagatttgtcatgttactaatgctataaattaattctaaaccacggtttgggcatttcacaaacgttgagaacactagtttttggctttggtaatgattgcaaatatcaaatccttttctttttaattgnaataaaatacacatcaaatcacccattttaaagtatacaattcactggcattttggcacattcacaatgtgcaactattcccactatcttggtctacaatattttcatcaatncaaaagaaaaccccattcccatgaagcaagcacttccattcccccagcaaccatgaatctgaattatctctatgaattacctattctgnatattcatattaatgaaacctntaatatgnaanccttt

SEQ ID NO: 217911 - DNA, 698 bp, Homo Sapiens
  misc_feature (3)..(7): n is a, c, g, or t
  misc_feature (23)..(26): n is a, c, g, or t
  misc_feature (672)..(672): n is a, c, g, or t
  misc_feature (687)..(687): n is a, c, g, or t
  misc_feature (691)..(691): n is a, c, g, or t
agnnnnnttggtggccttttttnnnnccctttttttttttaaaagaccaagtggtggctttattagggtaaatatatcacagttgctacagtgaattgagctttctcagaagctattattttctttgggtgattggcaggtatagggcaatagccagtggggtgtcagtaatatgccctgtccctgacctcaaaggtaaagggatagaaaagagagggcgttgacaaactcattttcccacttcccactcatggcttatattatctctgagcatctcggtggctattcctcatttacttaagatgttttagtcattctggatgtgcaaatgcaaggcaagcattctcccactggccccctaacggttaactatcctggcttaaaattttcctttgctcacttccattctatgagtatatcgatggagcagctggacattagagttctttctctttgaccaaaggagccaaaatgcggtgacttgacttcaaccccaacagcccctgtaagtagccctggccaaacagaaaggctaagctgaatgaagaaaaaaggaagacaatttcatctacagttgcctttttgacagcttccaaggggggtttgctaggaataacaatattcataagaagctttttcatatgcaaaagctttagcatatatgtaatcctnacaacaccctgtgangtangggttac

SEQ ID NO: 217912 - DNA, 568 bp, Homo Sapiens
  misc_feature (445)..(446): n is a, c, g, or t
  misc_feature (474)..(474): n is a, c, g, or t
  misc_feature (555)..(555): n is a, c, g, or t
  misc_feature (567)..(567): n is a, c, g, or t
aacaggtaaaatgaataacatactttatttaatccaatagagccaacatattatcattgcaatacacaaaggaaaagttattagtgagatattttacattattttttgaagtaggtatttgaaatctggtatatattttatacattgagcacatctcaattcagactaggcatgtatgaagtactcaacagacattggtggctcctggataccatatgggacagccagtgccattctcatccttgatatttgtttctaccctcacatgtacctcttaatttcttttatagctggttcaaaaaacatattgcacctctctaccaaagtcatagcagctcactcaacagctgtttgttcctgcgcataaagagagtgtggaaaagctggaagaaatcatcctcttcctttaagtgctttatattggtcatattttctctttgggggnntctttctattctgagagaaaatatgtantgggatggttttctcttcccactactcttttggttttactgcaattaattggaaggacgaattttttttatggtcaattgntctcttaaaggng

SEQ ID NO: 217913 - DNA, 576 bp, Homo Sapiens
  misc_feature (505)..(505): n is a, c, g, or t
  misc_feature (560)..(560): n is a, c, g, or t
agttttctatcaaccgagaatgtttttattaccccatcaatcctgaaggatcatttcaccaaataggaatttggagttgacagagttttgttttgaggcagtcttgctctgttgcccaggctggagtgcagtggcaggatcttggctcactgcaacctccacctcccgggttcaagtaattctcgtgcctcagcctcccaagtagctgagattacaggcatgtgccaccatgcctggctaatttttgtatttttagtagagacagggttttgccatgttggtcaggctggtctcaaactcctgacttcaagtgatctgcccaccttggtctcccaaagtgctgggattacaggtgtgagccaccgtgcccagccacaagttgatagttcttctggcactaaaagaacttgtctcacttccttctggcctccatggtttccagagagaaatccactgtcatctgagttacttttccctctagttaagatttcacttctttcttganctttcaacttttttctggctttaagttttcaaaaatctggcctatcatggacttnttggggttacttactt

SEQ ID NO: 217914 - DNA, 531 bp, Homo Sapiens
  misc_feature (38)..(38): n is a, c, g, or t
  misc_feature (125)..(125): n is a, c, g, or t
  misc_feature (139)..(139): n is a, c, g, or t
  misc_feature (156)..(156): n is a, c, g, or t
  misc_feature (174)..(174): n is a, c, g, or t
  misc_feature (299)..(299): n is a, c, g, or t
  misc_feature (321)..(321): n is a, c, g, or t
  misc_feature (458)..(458): n is a, c, g, or t
  misc_feature (484)..(484): n is a, c, g, or t
  misc_feature (486)..(486): n is a, c, g, or t
  misc_feature (496)..(496): n is a, c, g, or t
cttcttttgttctttttgcctttgttgttctttaactngttctctctcaatatccatgaaaagtcgtctatgtctcaggtactgcttttgacgctctttcttatcttcttctttatccacgtcanactgaaatgccagnggagcttggaattcagngctcaatcctgattgatncctatcataagccaatggcactccaggagtatttcctcttgcaatctcccatttctcaaaagatgagggtagtttgatatgcttgttctgttctctaggggagtcttggtcctggattttaggtncaacatattgatgatagtccanaggcaattcctctctcactctttcttctctcataaaagatgcaggttgctgatttttgatgtcatcctggtcctgggatttgggaggcaaacactgatagtctgccagagaaaagcttctctccctttctcatctgncatatcagagtatggctccttaaagngnactttctganattttggtagaaaatcttgggcctgacatttggga

SEQ ID NO: 217915 - DNA, 564 bp, Homo Sapiens
  misc_feature (526)..(526): n is a, c, g, or t
  misc_feature (545)..(545): n is a, c, g, or t
cttaatacttatctttattatgaaagtgtttccaaagtaaaatgatcctcataataatgattgcttccagagatcaagaatgaataattatattttcatataaaaatcagcaaaacacaataacaatacataaaataattctaattggctaacagtatttcattccatttctgacagagatgctcaagcactgaattgtcttaagaaaacaagtaaggttttgtcacctatcctatttctcactgcaagttgaaaaaaatcaaatccaaacaccaccaccccttctatgacaacaaacggctgtggaggtaaatgactatgtgggcaaagagttgatgaaaatcatgagcttaggggctttatgaaactttgggaaatcaaactcagaggttgttttccattcttaaagtaatgaagctctaagttaaagtttcagaatcatcacataactgttcctattccataactcatttctttttttttttgcaggtaatcttattttcctaagggtagtttcatgatgacnggtggcaaaaaattactgngggttaaagaaaaaattgg

SEQ ID NO: 217916 - DNA, 540 bp, Homo Sapiens
  misc_feature (457)..(457): n is a, c, g, or t
  misc_feature (504)..(504): n is a, c, g, or t
  misc_feature (506)..(506): n is a, c, g, or t
  misc_feature (522)..(522): n is a, c, g, or t
  misc_feature (531)..(531): n is a, c, g, or t
  misc_feature (538)..(538): n is a, c, g, or t
aaagttatattggctcttttggttttgttcgcacttccatatgaatttcaaatctgcttttcaatttctacaaaaagcctgctagaaatttgattagcactgcattgggaagagttctcattttagcaatactgagacttctgacctttaaacaaagtatatctctccgattatttaggtcttctttaatttatttcagcaatgttttgtagtttttagtgtacaggtcttacacttattttgtcagatttacccataagtatttctttctttttttttgagacagagtctcagtttgttccccaggctggagtacagtggttcaatctcagctccctgcaacctctgcatcccaggttcaagtgattgttgtgtctcagcctcccaagtagctgggattatagggacaggccaccatgcccagctaattttttggatttttagtagaagccaaggntttgcccggtgctcaggaagggctcttaaccttctttcttgagggantnggcataccactccctntggcaaaancctggtngt

SEQ ID NO: 217917 - DNA, 570 bp, Homo Sapiens
  misc_feature (23)..(23): n is a, c, g, or t
  misc_feature (450)..(450): n is a, c, g, or t
  misc_feature (494)..(494): n is a, c, g, or t
  misc_feature (497)..(497): n is a, c, g, or t
gctttaaaaaattttgctattgntataattttgatgcaatggatcaaaatcaagataccaaaagaatatgctcagcaagtttcagaggtcaatatttccatttaaaattatattgaaaattaaactagttgaatcataattattttatttagcaataaaatagctacttctttgaaaaattacttaaacctataaacctcttttaaaaattgataaatgttttatgatcttactttacttttttttccttaagattctgagtcttgaaagtttatttcaaagaaaagacaatgcctgtgccacatatttgacttgggtgagtgactagaaactccaagagcgggataaaccaaatttggctagctgaactgtataattttaaaatatttccttttatctcttattctggctttacctgacatgatggcagcatgtgagcaaggacaattncaacatggccctgaaaaagtcagtaagaccaaccagttagcttnggnccccagcttttcctcatctggaaccccatcttggccaataaaacctggaccttgatgggatttgaaaagccat

SEQ ID NO: 217918 - DNA, 540 bp, Homo Sapiens
  misc_feature (472)..(472): n is a, c, g, or t
  misc_feature (493)..(493): n is a, c, g, or t
  misc_feature (508)..(508): n is a, c, g, or t
  misc_feature (517)..(517): n is a, c, g, or t
  misc_feature (528)..(528): n is a, c, g, or t
  misc_feature (531)..(531): n is a, c, g, or t
ctttttttgcatcataacatttgataaaaatcttttgtttttgttttttgtttttttttttttactaaaataaacctgttcgggggaacagctactagatgaatttaagggttttatgcaccttatagaacttatagcaaaaatagttttagttgatttcattataaataacgttttcaagaacctgtgcaaaactgtcaataatttcctaaagcacaattgatcagaaaaatccatgattgttcagccttcacacccttcttcatgtaagaacacctttctgtacatctcacagttacttattaggttgaaaggtatatggagaatggtcattagacgtctcgacagccacctgccgttgaccacttgcctcctcaacaggaaccgctgtcgtctgcatatgtgcatactgtggcaagtaggctccttgcatagctgacgttgcaggcatgtatgttccggggctgcctantggcagatgactcatctgctnggcccaaaggctggncatttgatnccggcttgaanggncatgggggc

SEQ ID NO: 217919 - DNA, 533 bp, Homo Sapiens
  misc_feature (483)..(483): n is a, c, g, or t
  misc_feature (525)..(525): n is a, c, g, or t
  misc_feature (529)..(529): n is a, c, g, or t
aagctattttaagtataaactctattcctgaatatcttcagatactttctgctagttcaaataaactcacacagacattaatccaatttgaataactacatatgaatgaggctacagtattattcaatccagagtgtgtcacttccgttcatgaaggcttgctatgcataaatataaaaatattttatcttctgatgctttcatttttgaagcactcccttcaaaggatgtaaaaaaatattaaataaaagagctttcaaagtgttctgttaggctatgatttgagggggagatgaatggaaatggatattgatagttatttaactggagatctttgtggtgatatgtgaaagtataaactaactccaacaaactcgttttttcctgaaacttttggtgtaaaattatatattattattattttgagacagggtcttgctctgttgcccaggccaggctggaatgcaatggcatgacctcggntcactggccctggcctccgggctcaacgatcttccattcagnccantcca

SEQ ID NO: 217920 - DNA, 517 bp, Homo Sapiens
  misc_feature (336)..(336): n is a, c, g, or t
  misc_feature (412)..(412): n is a, c, g, or t
  misc_feature (432)..(432): n is a, c, g, or t
  misc_feature (456)..(456): n is a, c, g, or t
  misc_feature (504)..(504): n is a, c, g, or t
  misc_feature (506)..(506): n is a, c, g, or t
  misc_feature (514)..(514): n is a, c, g, or t
  misc_feature (516)..(516): n is a, c, g, or t
gcactacttaccagaggtttttatttggcctctaatctccatcccagcacagcccgagaattcagcaaatgtctttaggcaagtccaacaaagtatcgaggtcagtttctcacttctctttccttataaaaatcaagcctctatgactttttgtctttccagtgtgagatggcaaaaggcttcattggtttctctgcctcttagtagcaatcctcttcctgatccctttgtttgaattcttcttttattgctctatacctagaatttaaaaatgtcctgtcttttctctccagtaacagacctgacctgttgcaggtgggggagtctgccactganaaacagcaagaaggtactgggttcctcccccctttttggcagtctgggctggctacccttccccccatcttggcanaaaaatggtttctgaccctnctctgggatgggaaattaggaatnaagaaaaggaaaagcccacttttttgctactgccaaaattgcattgcncnctttggantnt

SEQ ID NO: 217921 - DNA, 444 bp, Homo Sapiens
  misc_feature (400)..(400): n is a, c, g, or t
  misc_feature (412)..(412): n is a, c, g, or t
  misc_feature (414)..(414): n is a, c, g, or t
  misc_feature (429)..(429): n is a, c, g, or t
  misc_feature (443)..(443): n is a, c, g, or t
acagaacagaaactagcttatgtatttttctggaagacattctcctactcccctgaactcccaaaaaaagaccaaggtggctgggccctgcttctgtgactgctgagcggggttgcgcgtcggagccggtggggcgcgggaggaaagggcagggcccgcgcacggggagcctgggcccgggaggggaaggcacaagaacccacttcgcccgagagcacgggggaggcagagccaggtgaggaaggaagccacggtcccgtgaagcaacctcagctcagaagcacacggagggtgcctggtgttcctgtccatgcagcctcagcctagcagctgccaaaagggcgacctggctcccccacggtcgcagtcgctgcactgtccagctccagccacagcaaangccggggggcanangccgtgcacacaggnctggcacacagggna

SEQ ID NO: 217922 - DNA, 558 bp, Homo Sapiens
  misc_feature (361)..(361): n is a, c, g, or t
  misc_feature (510)..(510): n is a, c, g, or t
  misc_feature (518)..(518): n is a, c, g, or t
  misc_feature (539)..(539): n is a, c, g, or t
  misc_feature (550)..(550): n is a, c, g, or t
gcattttttttattgccaccagtgtagtcccaacctccatcctctctcacctggatcacagtaagcctctgcccctgccaatccattctccacaaagcagagtgatctctaggaaagcaactcaggttgtgtcccactcttaggtaaaaccctccaacagtttctcatgcctcagaatgaaatctaatctccttatcctggactctaacaaccccctcgatttagcccctacctgccctatctcttgcactctttccttgctcactcaatttcagccactggtgtccttccatgctttcattcattcatcctcaggcctttgagcatgttattccttctgctttacacagcctctctctgntctttgcctggttatctcctacttgtctggttctctgtgtgtcacttttcccacacaggtcttctctgacttcctaatactaaattaggatcataagtctcagtttcctcatttctgaaataaggtattctgcggattaaatgagaacnttcatgtnaaggttgttggccaagtactngcccacagtgnggacctta

SEQ ID NO: 217923 - DNA, 553 bp, Homo Sapiens
  misc_feature (495)..(495): n is a, c, g, or t
  misc_feature (533)..(533): n is a, c, g, or t
gagatggggtcccgctgtgttgcccaggttggagtgcagtggtgcgatcttggctcactgcaacctccgcctcacgggttcaaggattcttctgcctcagcctcctgagtagctgggactacaggtgcgcaccaccacacccagctaattttttttgtatttttagtagagacagggtttcaccatattggccaggctggtctccaactcctgacctcatgatccgcccgcctcgacctcccaaagtgctgggattacaggcatgagccaccacacccggcaatttttgtattttttgtagagacgggggtcttgctatgttgtccgggctggtcttaaactcctgacctcgagcagtcctcccaccttggcctcccaaagtgctgggattatagacatgaggcacggagcctggctctgtctccctctttaatgagtaaattttacaaattgccaacctaccactagttagtacacagtgactgtagttgtcanaagcttaaacgtgtatctgggcatccgggttcttctgntttctggggagcactttcct

SEQ ID NO: 217924 - DNA, 465 bp, Homo Sapiens; identical to SEQ ID NO: 54941
  misc_feature (450)..(450): n is a, c, g, or t
  misc_feature (452)..(452): n is a, c, g, or t
  misc_feature (457)..(457): n is a, c, g, or t
  misc_feature (459)..(460): n is a, c, g, or t
  misc_feature (464)..(464): n is a, c, g, or t

SEQ ID NO: 217925 - DNA, 541 bp, Homo Sapiens
  misc_feature (517)..(517): n is a, c, g, or t
ctctaatcttgtcttcatgctttatttcattaagttgatcttcaatctctgatatcctttctttcacttgatcaattcagctattgatacttgtgtatgcttcatgaaattcttgggctgtgttttcagcttcatcaggtcgtttatgttcttctctaaactagttattctagttagcaattcctctaaccttttatcaaggttattagcttccttgcattgggttagagcatgcttgtttagcttggaggattttgttattacccaccttctgaagcctacttctgtcaattcatcaaactcattctccatccagttttggtcccattcctggcaaggagttgtaatcctttggaagataagaggtattctgatttttgcaattttcaccctttttatgctggattttcctcatcttcatggatttatctacctttggtctttgctggtggtgaccttaggatgaagtttttgcatgggccgcctttttggtgaggtgatgctactgcttttggtnataagttttccttctaacagtcag

SEQ ID NO: 217926 - DNA, 543 bp, Homo Sapiens
  misc_feature (443)..(443): n is a, c, g, or t
  misc_feature (464)..(464): n is a, c, g, or t
  misc_feature (493)..(493): n is a, c, g, or t
  misc_feature (523)..(523): n is a, c, g, or t
  misc_feature (531)..(531): n is a, c, g, or t
gaaacggagtctcattctgtcacccaggctggagtgcagtggtgtgatctcggctcactgcaacctccacctcccaggctcaagcgattctcctgcctcagcctcccgagtggctgggactacagacatgtaccaccacacctagctaatgtttgtattttttagtagatatggtgttttactatgtttgccaggctggtctttaactcccgacggaccccaagtgatctgatcacctcggcctcctaaagtgctgggattacaggtgtgagtcaccgcgcccagcctatgtattttttatttttatttttttgttgcagagatggtgaggatgtcttgctttgttacccaggttggtcttgaatttgtggctttaagtgatcctcccaccttggcctccaaagtgctcgggttacaggcgtaagccaacgtgcctggcctgnatttattggaattcctttttncattctcatcttaatgcattttccaaatngagaaggacatccttctggcttacactttnaaaaattnccgttttcatgg

SEQ ID NO: 217927 - DNA, 515 bp, Homo Sapiens
  misc_feature (472)..(472): n is a, c, g, or t
  misc_feature (482)..(482): n is a, c, g, or t
  misc_feature (486)..(486): n is a, c, g, or t
cactgatgacaatttattataatctgttagtagcacacagacaaatattagttaaaccagaaccatgtctacacagaagtgggcaatgacatgtgccattctatggcacacggtgtgcacttaatcatcatgttttagcattttgatcttctgcttatggcgctcaatttctttctgcagacgctcaatctccttcttatgatgaacgatttcttcttcatggtgttttttcaaagctgccagttgttctctactctgtgctctacaaggacacggtggctcagggtttaatttcaatccttcaccccaaagagatctcaaagcataacctgtaatgtctaagcaaggaataggagttccaattccatgggagtctagctggtcatcctcttctactcctcaactagtgaaagaataccccatcttaaattgaggtgtaaccatcttaagaaagacccaagagcttaatggntttcaaaatncctntttaaaatggaaactccagaggggatggg

SEQ ID NO: 217928 - DNA, 431 bp, Homo Sapiens
  misc_feature (407)..(407): n is a, c, g, or t
  misc_feature (409)..(409): n is a, c, g, or t
  misc_feature (411)..(411): n is a, c, g, or t
  misc_feature (415)..(415): n is a, c, g, or t
  misc_feature (427)..(427): n is a, c, g, or t
  misc_feature (429)..(429): n is a, c, g, or t
gagacgggagtcttactctgtcgcccaggctggagtgcagtggcgtgatctcagctccctgcaacctccacctcccaggctcaagcgattctcctgcctcagcctcccgactagctggaccacaggcgtgcaccaccatgcccggctaacctttgcacttctagtggagacgggggtttcaccacgctggtcaggctggtctcgaactcctgacctcgtgatctgcccacctcggcctctcacgccaccatgcccggccctgttcgttacttacaaaaacttctccctctctttgtgcttactagcatttgaagaaatccctgcttcttactgcctgcccctcaaaacaacaaaaggggccaggtatggtggctcatgcctgtaatcccaacactttggggaggctnangngggnggatcacctgangntg

SEQ ID NO: 217929 - DNA, 551 bp, Homo Sapiens
  misc_feature (388)..(388): n is a, c, g, or t
  misc_feature (425)..(425): n is a, c, g, or t
  misc_feature (449)..(449): n is a, c, g, or t
  misc_feature (532)..(532): n is a, c, g, or t
  misc_feature (536)..(536): n is a, c, g, or t
ctgctctcatgaggagaatgtattttaaacttgggaagagtcataattctgggatgtttcacatgttgtcagctttaaccttctacagacacaggccctctcctctgtgaggagggacctctggcatgtgtgggtgtgtggtgggtccctctccctattagcagaaatgtgttgggcatgagccaggtttatgatttggattgtgtcctgcacataacacctgtgagaatacaactgggactaggacaatgcgggaagcatattcttcatgaggcggtaaccaaaaggcttggctataccaaaggattctggtggccgggcacggtggctcacacctgtaatgccagcactttgggaggccaaggcgggtagatcacttgaggtccangagttcgagcccacctgccaacatggtgaaaccctgnctctactaaacatacaacaattanctgggcatggtggtgggtgcctgtaatccactactggggagctgaacaggagaatgcttgaacccggaacaaaggtgcatganccanatgcccccagactca

SEQ ID NO: 217930 - DNA, 585 bp, Homo Sapiens; identical to SEQ ID NO: 60001

SEQ ID NO: 217931 - DNA, 708 bp, Homo Sapiens
  misc_feature (600)..(600): n is a, c, g, or t
actgaaagaatttacagtagtatagcttagcacagcacagaacagaaatgctagaatgaaccacatgcagtaaggcccagtgttatgtagtgaaactttgattttagttttgtgggggtgtgtatttgtgtttgtacagagctgagaaacaaagtctaaaatgtcctaccatcaactatggtcgaaagagcttgctatatctgccctgaggcacacagggccgagggaaggacaggcaaagggggaggaagtcctcagtgtccagacacaccaacccacccactgtgcacaggcagggtagaaaggaagtggggggagggggcaggactccctttgctttggatgtgtcaaggggccaggcatgaggctgcagggaaccacatggcccttagtgaaaccaaatgccgagcttccaggctagcatttcttcctctactgcccaggctagaggatctagatttgatcctactttaaggaagcaaaaagtgtctgtttgtggcggatcctgaagggaaggagaatgtgggaaccccagagttcagcagcctcaccccacgtggggctcctctccatggccccgcttggagggcctgagtttangtgaattaaaggagcccagtgaccctgcaggcagtacccagtccacagccccagtgactgcatattcagaaggctcgcacctcttgaggctgcagaaggcatttccag

SEQ ID NO: 217932 - DNA, 505 bp, Homo Sapiens
  misc_feature (474)..(474): n is a, c, g, or t
ttttgatattaagacactttatttttctgtccaactttcattttaggttaaaggttactcatgttacatgagcaaattgtgtgtcatgggggtttggtgtgcagataattttgtcacccaggtaatcagcataatgcccaatagtcaggtttttaatccttaccctcctcccacattccaccctcaaataggtcccagaaaagacataattataccaaatatgagcttcatactagttcagaaggtagagttggaggatcataggcaagttttcagagaaaccgctttttttttcatttagattattataagatgttccagaggcactaagtgaacagaatctaatgtctttgtgcaatctgacgaacacttagtgtttagtagcagcattatgaaattgccatttttagataattctggcagtaaataccgtttaaatggtggtgaagaagactagcaacctatccttcacanatatttcctgatagctctattttccctgctc

SEQ ID NO: 217933 - DNA, 519 bp, Homo Sapiens
ttttgggttaaaaagttccgtttattgggggtatcgctgcagacagtactgcctgtcccagaagtggatttcacacagaccagtctctcgcagcagagaggggaagccctccttcccaccccagatacactcttccaccttgtcctagcaggtaggaagaaatagggctgtgccccttcctttccctcccacctgccttcccatgggcttcctttgtgaaagctggattgcctttgagaaacccctgcagccctgagcccaccccttgccccgcaagaaacagccaggttggagggagagaacagcagcagagggccagccacaggctcgatggcatttattctgcaccctgaccaccctggcctcaactgaggttggggtttgatcctgggggagattttctcttgtttaccttcctggcttgtgagggctttgcccctgtctttttggcctggactgtgttctctctcttcctgggcgatgatgattccacaatatcctcgctggacagttctccct

SEQ ID NO: 217934 - DNA, 499 bp, Homo Sapiens; identical to SEQ ID NO: 59642

SEQ ID NO: 217935 - DNA, 487 bp, Homo Sapiens
tttgagagagtttcgctcttgttgcccaggctggagtgcaatggcatgatctcgactcacggcaacctccgcttcccaggtccaaacgattctcctgcctcagcctcccgagtagctgggattactaataggcattcaccacctcgcccagctaattctgtattttcagcagagacggggtttctccatgccggccaggttggtctcgaactcccaaccttaggtgatccgcccgcctcggcctccctaagtgctgggaccacaggcgtgagccaccatgcccggcctgcaattttttttttttttaagccttcgaacatctaagatcttgtttctagcctaggggctggctgcagaggaggctgtgccaggcacagtgacctcagaagctctttgatgacttcacagctgcagagccaggacctgtgccatcctggaatttcaaggtctgactggctcctgactgccctcagctaggatccagggc

SEQ ID NO: 217936 - DNA, 413 bp, Homo Sapiens
ctcgtgccgaattcggcacgagcgcccgctatccacatccttctagagtcagaatggtagggtccgttgacttcagcttttgattttgcaggatggccctgtgtcctcctctgccccattccctggttcattaaccagtttgaagtgtatgtagattgttgccccgtctttcccaggtcacatgtgtgagatgcctgggtgctgcttcagaaatcaagatgatctcctttaatttgcatgaaactacaccatgctgcgttccccaggcagacagttctgctttgacacaccaaagaatcctgtaggctagcagagccgccagcacaaaccaagggcgctgggtgtcgagactcagaggggtcagctgtgtccctcggcatcagcgtctaccaaggtgctgctaggtacagagc

SEQ ID NO: 217937 - DNA, 668 bp, Homo Sapiens; identical to SEQ ID NO: 55650
  misc_feature (590)..(590): n is a, c, g, or t
  misc_feature (644)..(644): n is a, c, g, or t

SEQ ID NO: 217938 - DNA, 594 bp, Homo Sapiens; identical to SEQ ID NO: 53172
  misc_feature (431)..(431): n is a, c, g, or t
  misc_feature (446)..(446): n is a, c, g, or t

SEQ ID NO: 217939 - DNA, 530 bp, Homo Sapiens; identical to SEQ ID NO: 44270

SEQ ID NO: 217940 - DNA, 404 bp, Homo Sapiens
atagactatattttcactttgctaatacaatgcataatagcagaatgagacagttatttagttgctgccttcctccagagttcaaaatccatggaaaagagctgccagtgccttagacctgccctcctcaccacttcactcctctgttacacggacaggactgacaactgccattctcacccagtgtcagccacttcgcccggccctctgtggccttccctgagtatagaggaaatgctgactggagccaggtgataatggaagtataccccacctggcttctttctttcagtgagagaacttcctgtcattgggatgacacgagaacattttacgctttgctttttgtgaaattagcatacccacttaattcagattgatgatcatttcagagatgtgtattg

SEQ ID NO: 217941 - DNA, 465 bp, Homo Sapiens
cttttttgagacagggtctcactctgtagcccaggctggagtgcaatggcatgatttcagctcactgcaacctccgcctcccaggttcaagtgattctcatgtctcagcctcctgagtagctaggattacaggcacctgtcactacacctggctaatttttgtatatatatatatatttttgtagagacagggttctcactgtgttgcccatgctggtcttgaactcctaagctcacgtgattcacctgcctcggcctccaaaagtgctgggattacaggcgtgagccagcgtgccggccatcagatacgttcttaagtacattataacaatgtaaaaaaccaaaaatttgaatttgaaagacttaaatatcatttgtgtcatcttcaaattcaagaacaagttatttgtgcttttggttttctaaaatgacacagcatatttccagttcaccaagactgcattt

SEQ ID NO: 217942 - DNA, 653 bp, Homo Sapiens; identical to SEQ ID NO: 41381
  misc_feature (394)..(394): n is a, c, g, or t
  misc_feature (529)..(529): n is a, c, g, or t
  misc_feature (549)..(549): n is a, c, g, or t
  misc_feature (554)..(554): n is a, c, g, or t
  misc_feature (588)..(588): n is a, c, g, or t
  misc_feature (590)..(590): n is a, c, g, or t
  misc_feature (641)..(641): n is a, c, g, or t
  misc_feature (645)..(645): n is a, c, g, or t
  misc_feature (647)..(648): n is a, c, g, or t

SEQ ID NO: 217943 - DNA, 597 bp, Homo Sapiens; identical to SEQ ID NO: 54021

SEQ ID NO: 217944 - DNA, 614 bp, Homo Sapiens; identical to SEQ ID NO: 40336
  misc_feature (490)..(490): n is a, c, g, or t

SEQ ID NO: 217945 - DNA, 604 bp, Homo Sapiens; identical to SEQ ID NO: 47115
  misc_feature (481)..(481): n is a, c, g, or t
  misc_feature (542)..(542): n is a, c, g, or t

SEQ ID NO: 217946 - DNA, 685 bp, Homo Sapiens
ttctaaaggaaatgatgaggggaaagaatggaaggaaaacaacaatacaagcctcaaagcagatttcattctggtgtaatgacattagtgggtgatgatgtaatgggaataggtttggagccaatttcttgtggtggaggcctataaacagctgaacagaaattctagtacctgggatacaatatgatcttggagtttctgaagggagttaaagggaagtgttcaatcacagttgaaaatgactagataaaatcttaagtcctaaataaccaagtaagacccctgcattttcatttatcaccacatacacatggcctatatgctactctcttagatgtactgagaacaacaacaaaaaaattaaggtaatctagagaagtttagttatttatcattattaatagttttctacaaggtactcatgaaaatgaagacagtgactcaatttaaccttttttaaatggggcaaacaaaaatatctttctggaaataataataattatcaaaaagctttaaaagaatctaaccttttattgcatgggtcccttgacaggcctcatctgggcacaatctgccatgcaaactgctaaagtcaaaggagaaagatgcacaattgccaggacgatatctctgtacacttgctaatggatgggtagggttaattggagtccaaagacctgtacaa

SEQ ID NO: 217947 - DNA, 690 bp, Homo Sapiens
tgccatgttaggcaaggtaaaagagtattaactcagtactgcccttgaggggaccactgtctagagacataggctaaggatgcctggaaaatgaaatcacagctgtgcttcttgcaaattactctcttgagtacgtaattctgtctcctcatctaactggggcagcttccaaggcagaagagacaaggcctctccaatggaatgagtatttcctccaggtctcctccatctccacaactcaggtcagggtttcaggactaagcaggtgtttgggctgtgctcagggccaataagtagtctcagctgaacacttgccaagaagccaggtcagttctaacacccctcttgcggaatgaccagttcaatgaaaaaaatcaagcatgctgcaatccatctaatcacaaccaggcttttggtttcaaccttgactccccatgcttggcccttcccaacccaagggcttaatgggaaccaactgacacaactgcttaccacacattggtgggaaagtgcttagaagaacaaaaggcttgactgtgcattgggtggggggtgagcgccagaaagcaatggaacaagactttcctctgtggattctggcacgggtcatagtggccttgcgaggaaacctttgaactggggaaggtggccaccaagttggcctttccccaatgacaaattttcttgtgc

SEQ ID NO: 217948 - DNA, 565 bp, Homo Sapiens
attatcttttaaaaatcttatttagtgaaacatataaattaagaaagaactggccatataaccaaaggtgttttttgttttactttaaggaaatatcgaccataagggtttaataaacaccattcaccacctagtttaaatatttaaaagcaatttactactacaggcaaaaggtggagtttactagtttaaagctaaagtattaggaaagtaggagacactagctaatgaattttaacccaatgtataagtaaagcttttctaaaattatgacatgtcaacaacaaagtgtagaattttttaacaaaaaaatacatatagacacaagtttttagaaatacatctgtatgttaaatgaggtacatctctactctaaatgaactgcgacattaaatagaaaatacatgcaaccagcaaaatattaaagacacacatatttaaagcacagcagtgatgtcattataagtgaactataccacgagaaaatttagcaaatgttaataaacagtaccaaaatcaccagccgaatgagcctctgaataggagccgtgaaaatcaatagctc

SEQ ID NO: 217949 - DNA, 542 bp, Homo Sapiens
accaaatcatttgttctcacttgaaaatctcgaatgtcattttctggcttacaagttagcttgtaaaataggtctacgtgaaaaatgaacatatctgttgattaaagcccttttgctctgcattaaatctgtgttcctgttttgggtacagaatgaaaatctgccttattgtgtaggtcggttctaaatgttttcacatcatcactggccgggagacattggagctccttgcacagaagggctcatgcccggcacggggacatcagtgacaccagcgcatctggggctccggtcctgattctgacccttgcaaggactgtcagcaacagaataagctttctgagcttctgacaaattggaaataacaacatttgccctgcctttctgaggggacgactgtgagtttcaagtcggctgattataaagttcttggaaaaatgaaagtgttacacaacatgagatagtgttcatgacagcagcatgtgtgaacatcacttactaaatgctattactagggatatctgctatacacagagcatgct

SEQ ID NO: 217950 - DNA, 546 bp, Homo Sapiens
tactgactaacacaggaaacagatttaattcatggaattgtgcatatggtcatccgttacattgtgacatgttaattttttttttatcatttattggcactgtcaacagattacttgtgaacaagatcactttgtacgcttaagtctgcgatgctacttagctatggttttctaccatgagcttatatatagataggtgtaggtatgtagatacattaatgctatacacaattttgcatggttactgagcgtcagtaaaaattatgaaaaaacacccatttataataaaagtgaggatgtactaagacttgctattactggaccttgttttctgtaaaagtgatgacacttgctggacggttactaaactctatggcactaatgtatgatggattcatttccagactgtcggccacggaagcacttcttcatggcctctgccctggacagcagcctgtcctccgggctccccatgtttttaccagcttctgctgagtttctacaatcttgagctctgctgagaattcttttccttgaaattcttct

SEQ ID NO: 217951 - DNA, 535 bp, Homo Sapiens
caatgcaatacaattagaaattttaaacaaaacgatagccaaacaaaaaacaagccagtgtttgtttagaaacttttaaacagacttgtaaataactcaagttaaaggggtagcaggaccagaaagaacctagacttccaaataaccagtgtagttcatgatctagtccttttgttcatataaagctatttgttttaaaatagttgctgaattacatgaaagggtgagaaagtgggagagacagaaaggcagagacaaaacaaggtgggctgggaaagggattcactggagcaacgagttcagtgtatggaagaattgaagggtcagatagttattaccagccaggttcagcaaagcctagaaggatctgctggtctcagtgacctgggcaggcaaacaccacccagcggaggccaggggaagacaccagcaagcaggccagatcctttgagcttggatcgtagggtagattctatttgcttctaatcctttagtgcagatgagctcctgtgtgcagaggaaagaggtggctcct

SEQ ID NO: 217952 - DNA, 704 bp, Homo Sapiens
taatgtactgttcttctagaaaattagcacaagatactatggaacaaacatgttttgaccaatgctgagctaagggagcttcacatgaaagcctacaaatatgaggaggaaaaacctagccacggcacatttccaacaatttcttaataattcctcttttcttaaccacagaaataaatcagagcctttaaaagttaccttacagataccagcttctcagaaattattttgcagttacgtgagagtatgtgccttcacaatgtcagcaccaacatctttagtattttaagaggaaaagtcaagtccactgaaggaatttaacagatttttccagaaacacttaagacatctataattaggttttaaaaggagtgacagaatgtcttgaatcacaaattaatctgaattcaggacaataataactttaactcttacccacttttataagccattattcccattaatggctgacaatctatatttcccaatttccatgccaaatgagctgagcttccattcttttgaggatgaaaaacagaatgacttcttgaggatctgctatttgccagtatatcagttaacttttgcttgctaacagcttgctaccaaaacttagtggctaaaaacaacatctatttgactgttaaaggtgatagaccattatcaatatgtgaaacaaacaaaaaacacacggctcaacttat

SEQ ID NO: 217953 - DNA, 725 bp, Homo Sapiens
  misc_feature (478)..(478): n is a, c, g, or t
  misc_feature (522)..(522): n is a, c, g, or t
  misc_feature (626)..(626): n is a, c, g, or t
ttttttttttttttaagagatgaaaaaaattcccaaagtttaatggttccaaaagtacattttacaaatgacctctaagtaaaacattactgaaatgtttcaatggaagtataacaatttctttcatttggtttttgatgcaatgatcaaatattgctatattttcacaacttacctgatatagttgctacttgaactaatgtcccattttccttccagtgaacatcatcaattccctcaaaaaagcaggcagcgccttgattacaccagaaaggggcatccatttcaggtcggagatggggaaatgtacagttgccaagttggaaaagttcataccattccattgtgtagttcttgccagttaatgtacttctgaatccaatggcatcatgcataattttctgtgtaaagacagtacatgtataaaagcaactgtgacacaacccatggtccaggtaaccctgataggagaaaatgntgcacatcacaaatgcatatcaagtagaacaactgttcaactgntctttcatgctgctatttgcatatccactcttgggccccaaacttcaagccctcattcaacccagcttttgccactacacccctattttgcccatctcaaatangaagccctgcatgtatgttgaccagcctgtaattttcctagagcttagaataatgtgaagagcgcccattgccatcttttgaagcagttttcagacctt

SEQ ID NO: 217954 - DNA, 680 bp, Homo Sapiens; identical to SEQ ID NO: 49076

SEQ ID NO: 217955 - DNA, 553 bp, Homo Sapiens
  misc_feature (541)..(541): n is a, c, g, or t
ttatttgcacatgtatagtaatggccaacagatactccaagttcatacaaatttgtaaaacaacaaagttaataatcacttggtacacttgtgtgttatcttgcttacatattaaaacctagatgaacttccttcattttgtggacttccatacaatacttccttaaacaaaattcttgaaaacacatatcagcatgtttaagttagagccaacacaaagttaagacaagacacaaactcaaaaaccaagtttgaaagatacttttctacctccctcccctagaaagaagtgattttctttaacagatgtatgttatatcacacaagtaaccatgaagacaaaagaatgacgctcccatcatcaggaagaaaatgccaaccagatcatactgtttagttatctaccgaacatatggttaaaatatgagaaacgggggaaaatgcttagattaaaataacaagggagaatagaaaatagcaaatgattttaaagagaactgttccccctcaaagctgcaaagctctgactctgacaactaanaaactgtcaagg

SEQ ID NO: 217956 - DNA, 633 bp, Homo Sapiens; identical to SEQ ID NO: 49560

SEQ ID NO: 217957 - DNA, 646 bp, Homo Sapiens
  misc_feature (439)..(439): n is a, c, g, or t
  misc_feature (492)..(492): n is a, c, g, or t
  misc_feature (584)..(584): n is a, c, g, or t
  misc_feature (593)..(593): n is a, c, g, or t
  misc_feature (638)..(638): n is a, c, g, or t
gcctcccaaagtgctgggattacaggcgtgagccaccgcacctggcctgtttattctcttaagagagaaaatgaggggattagtggactgtagttctggacaaggtggaaaactcttaaagtggaagtattggggcaagtgctctgacaggctaggatggtgcagtcagtcacttcacccagaaatcagtagaatgttaacagttcagactcaaaccttgtgaaaaacaggttctagaaaggaaatccctcacagcaactggcaccataatcaagacagaatttttgcagaataaatggagttacctgctttcagccccaggtcgtagctattgtctgccctgctgatatgtgataataatttgtgatcctgttgtcttaaaatggggtcactcatctccagtagaattaagtccacagtgaagttgtccccccatccncagagataaacatatatgaatgaactcacgtgataacaactactgctgcctgngatcatgagagacctgaactgaactgataggaagtgaaaggtggctgaggtaatgagaatagacccatctgcagaggatcatagaactctanggacttctncagaccctgtggctgctgctgtgatctctgcccaagaggagcttnttgaccaa

SEQ ID NO: 217958 - DNA, 540 bp, Homo Sapiens
aggggtgaatacagaaatgtccagtatgccaatagctgcagaatatgcagcaatggaaagtatcagtatccatacaaagatttttcaagaaaacgaatgggctgagccaagtagctgagattgagaatgagttcatagactgtccaagatctttatcccaaaaacatttggattgtttattttcagtatttatcctctttccctactacctggatactccaaatttgcatatacttgtaatattaatatacagttcctttgcaatatttattttgttgcttcttagagaaacccaactaaatgagtttaaaaaatctgtgaaagggctgggcacagtggctcatgcctgtaatccagcactttgggaggctgaggtggacggatcacctgaggtcaggggttcaaaaccagcctggccaacatggtgaaaccctgtctctaccaaaacacacaaaaaaatggtcgagcatggtagtgtgtgcctgtagttccagctactcgggaagctgagacaggcattccaagctgggcaacagaaca

SEQ ID NO: 217959 - DNA, 448 bp, Homo Sapiens
  misc_feature (416)..(416): n is a, c, g, or t
  misc_feature (437)..(437): n is a, c, g, or t
  misc_feature (440)..(440): n is a, c, g, or t
  misc_feature (443)..(444): n is a, c, g, or t
  misc_feature (446)..(446): n is a, c, g, or t
cttttacgtcggccttcgcgagcgtctgggcgggtggtaggaacaatggcgctgtcttaagtggcacagtggagcagctctgaagatgcaaagatacacgaaaaaacttccagaacatctgggagaatatttaatggaaaatcgcttggttaaaacctgacacttttaacagtgaacagcgttctgagtgtggacgagtagccagtgaagataatgaatgtcgaatgtgactgactagcagcttcattttgaatgagggtcgctgtctgcccattgatagaggccagattgtcttggaagttccaaagttgcaacgatttctggctagtgccacgaggtttacttgactgttgtgtgaaaagctgataagaaaaccatccagaaaaaagctcttcgttttacaaacatgaaaatanaacatgtaatttttggataanaanaannanaa

SEQ ID NO: 217960 - DNA, 643 bp, Homo Sapiens; identical to SEQ ID NO: 40679
  misc_feature (596)..(596): n is a, c, g, or t

SEQ ID NO: 217961 - DNA, 658 bp, Homo Sapiens; identical to SEQ ID NO: 52977
  misc_feature (580)..(580): n is a, c, g, or t
  misc_feature (588)..(588): n is a, c, g, or t
  misc_feature (591)..(591): n is a, c, g, or t
  misc_feature (649)..(649): n is a, c, g, or t

SEQ ID NO: 217962 - DNA, 717 bp, Homo Sapiens
  misc_feature (520)..(520): n is a, c, g, or t
  misc_feature (650)..(650): n is a, c, g, or t
agggaacactggaggtggcagtgcctgtttatgaactaaataaataaatattaaacacctaaaatattagaatatttattggagatttaaaatcatcttattctgacttaattaccgatatccccgaaggctggattcattgaataatagaaaatttcattatgattgcttttaagaacagattcttcagctgatttagtgataagaatccagaaaagaaaatgtactagtgatgtattctctccccagatgaaattgctgccttattcagatttactctcttgagccagattttgaatttcactgcagactgcttcagacttctaatcataggcttgtaaacctactaataggctctgcccctcttcccaatactttttgtcatttagagatataaaccggggcatataaaaatgcaacttgtattcctttgtatatttttccctgtctgacttataaatcttgagacctttattgtaaaagcatgtatcatcaggtgagaaatataaataggaactgnggtcattgagcctcaggtagggaatatatcaacccgatttcttcctctcttttcccttttataggataaataatccaccctgtctgcctttacattgaaatagtgcaaaaagaatacgatttctgcaaantaaaattaaaaaaaaaaaatgcttttgcttgcggccgaatttcggcctacttggccattcgccttat

SEQ ID NO: 217963 - DNA, 713 bp, Homo Sapiens; identical to SEQ ID NO: 46235
  misc_feature (705)..(706): n is a, c, g, or t

SEQ ID NO: 217964 - DNA, 707 bp, Homo Sapiens; identical to SEQ ID NO: 47803
  misc_feature (689)..(690): n is a, c, g, or t

SEQ ID NO: 217965 - DNA, 504 bp, Homo Sapiens
ttattattttaaaaattttgtttgaaagcctttgtacagaataatataatgtactgcataaaatatttgaaatagatgaagtttacaagtttataaagatgaaacaatgagatagtgattacattaagtggttacattaagtctcaggggaaactgaatttttaataggaaaacaccctatgtacaatgttactatttaaatgtattctttctcatcttaatgcttagtcttgtcacaaacaagaggtaatcaaattgtttctagaattaaatcagagcatcgtggtgctgaacaatatatgcatacatatattcaaactgtatttatgaaaatccatagaaaataaaaaataggctgtgaaaccagtattcttcatagattttgcagacgattttaatctgattcatcactgctgaagtaggagctatcacagtattctgctgtatatagaaatttgtgaatggttgggttcatcttcggtatccagtgtcggggaatcaggt

SEQ ID NO: 217966 - DNA, 600 bp, Homo Sapiens
tcctgaacttccatactattaactagacacagaactgcacagcaggatgcctgctgtgtgcattccagatatagtacatagctcagctctcaaatcagcaacaaagaagataagcacaccaggtccacatagcagagaacttcacattatcaagtttctatccaaagcttcaaagaagcaaataatattttgaaagactatgtgataaaaggatcaatttttagaaagtttcatgatctgtcatggatcaatagtttataaaggacactgaaacttggatgttgaggcaatgtcaaattgccccaagtttctaaatgcttactcttcatttctgtacttaatgtggacttggatcaaatagggcatgaaccagcattggtccgtggactgcattttgactagtattggtttaaagaagttgttcgtttactcctcgaggtagtctcagatctaattttctcttggattaatatgacaactaatacttgaagcactttagcttactactagagaattctatctactgagttatgctttatgtacttagcttttatcaaatatataagtatttgataaaaaactcacgtaagttacaggaaa

SEQ ID NO: 217967 - DNA, 477 bp, Homo Sapiens
gtctcgctctgtggcctaggctggagtgcagtagcacagtcatagcttactccagcctcaagctcctgggctcaagcaattcccccacctcagcctcccaaatcaccagtattataggtaggaaccaccatatccagccgaaaatttttaaatctcacaagtttccagataaacaaaactatgtgaccaaaaacatttctgagcaagttatcccattaagttatacactctcaaataatctggaattatagcatcatatactttaaaacaacaggaataaaaagccaaattaaatacaggggaaataatttaaaagctctgtctacacattatatttcctctaaaaaggctagtaaattacagtatcatgtcaaatttggctattgatacctgggaagagctatctatactactcaaacacataatgattacttctttgaaagcaaatatatgcagttcataatttagaaaatacgg

SEQ ID NO: 217968 - DNA, 590 bp, Homo Sapiens
tttgagacaaagtctcgctctgttgcccaggctgtagtgcagtggcgcgatctctgctccctgcaagctccatcttccgggttcacgccattctcctgccccagcctcccgggtagctgggactacaggtgcacaccaccacacctggcctatttttttgtatttttagtagagtcggggtatcaccatgttcgccaggatggtctcaatctcctgacctcatgatccacccgcctcagcctcccaaagtgctgggattacaggcgtgaggcactacgcccagcctcatgctgtttcaaaattgtacttaagtgtggttcagtctgaacattcctttgtacaaatgtggaaacacggggctgtagatgctgttaactactgaaggcaaaagtgtgacttcatggtataggtgtgattgattaaattattggctattggtgaccagctcaatcttcagtccctcttcactctgggaaaaatggagggtggggctgaaaccctctaatactgccttggccctgtgactagccctaccctgaagtttcgtaggggctgcccatcactggtcaactcattagggtacaaaaaga

SEQ ID NO: 217969 - DNA, 579 bp, Homo Sapiens; identical to SEQ ID NO: 52273

SEQ ID NO: 217970 - DNA, 588 bp, Homo Sapiens
  misc_feature (574)..(574): n is a, c, g, or t
tgtttattaatgctgtaccaaatcaccttgctgaaattgctttagatagttctcttgaggttttagttgtatataaccaactacttagaaaaacaaaacctcttaaatacacccaaggagatccagtatagtattgaagtgtacaatttcagtatgttcacacaatggaacataatacatagcagtcaaaatgaactatacttaacatgtgtcaacaggggtagatcagaatattaaatgaaaaaaagcaaagggcctttgtctcctggcacccggatactgagctcagtttccgtcttcactgttccatctcctccatccactactccaggatctcataggtgactctaccacagcccctgttgtcctgtgagctgcaggcactgggaaatccacagggaggatgccagaacatctggagcctgcgaaatggtattttcttatttaaaacaggatcatcatggtagacgggaggcatggtgggaggggggcgagggataaaagattacaaatagggtgcagtgtacactgcttgggtgatgggtccaccaaaatcccacaaatcaccactaangaacttaatcatgt

SEQ ID NO: 217971 - DNA, 515 bp, Homo Sapiens
taataatttttattttttggtcagcacacatggcattttagagctgtgaagacagacgtggttagcacaaaccacttgggccagtgaaaccagggcaaactcatggatcatctgcgttcccatcttcaccttggtggcagccctacctctgagattttaaggtctacggaaagtgcaggcttccaggagtgatgaggtggagcattttctcaggttaccaacagccttgacatattcttctcctaagtatttttcatatgtgtttctgtcatgaagtttggccaaacatactgtgtcatctctgaacagaaggtccttggtttccgaccggaacaaacaaaagttgcccgagcagtcagttacgttgcttccaaataggtgctgctgttgacgtaatatcttgtggacgcaagcttccttatctttccgtgtgaccacagcgtgattcggggctctggccaggtggcagttcgcatactcctccacaggtttcctggtaccatcaaggcacagca

SEQ ID NO: 217972 - DNA, 460 bp, Homo Sapiens
tagcattattgtgataacagtaaacaggtgaaccagggccagcaatattgtacaaagatcttatgcttctgccagtagcaaccgttctctatgtttctccctttgtttttctcctcagaggcttcctacattatgtcagtgaaggaatcagtgattatgctttttataaaaattctcctggggagtggtgaggaggcatttttgctaaggcttcacctcttcccttcatctccaggggtcatcccctcaccttattgggcaaaactgcatcaatctccttttgcagtttctgctggacatcagggtgagtggccagttcatataaagtgaaggaaagaacactgctggtggtttcatagccagcaaaaatgaagattattgactgggctgcgagctccagatcagacagagctttgtgggactcagtttctttcgaattctgggagtcaatcatcagctg

SEQ ID NO: 217973 - DNA, 592 bp, Homo Sapiens
actgggactcttagttcggtttttagatggggttactaatggtgaccatcattcttccctgaagcaaataaacatgactgtatggaacttcatcatgttaaataacatgctgaggaacccagctagggaaatatcaccaaggggaagatggattgttaatggaatttgaattagcctagctgtccctcctgttgattgtaaataaagcaggaagtcactgccctatccacaccaccaaatgacctcattttacaattgatttctgaggaaggtgatattttaaaaggcatacaaaggtgacctgtatatttatatagttggtaaggagctcattttattttttgagacagggactcactctgttgcccaggctgaagtgcagtggtgtgatcacggctcactgcagcctcaaccccctgcactcaagtgattctcccgcttcaatgcctccccagtagctgggagtacaggcaagagccatgacgcccggctatttttttgtagagatggggttttgccatgttgcccaggccggtctcaaactcctgagctcaagtgatccgcccacctcgtcctcccaaagtgctgggat

SEQ ID NO: 217974 - DNA, 593 bp, Homo Sapiens
aacatgataaaatgtttatgatacaacattaaaacaaaaaaatcaggatacaaaatggtgcacacagttatatccaaactgtttgtataaaacacagacataaaaacactaaccatgttatctccccatggtgggattatgggtgactattaggctattacttctgcttgtccgtcttttccaagctttgtacagtgaatatgaattacttttataataaaaaagaactttatttaaggattttaaaagttacatacaagccagggccagtggatgatcttgtccagtcttaaggcaatgaatataaactggagaatgttgacagaacacaggatttctaactctagtgacctgtcatgtcgaaagccccaaacgcaagctgcaacagacaccggggaaacaaagaacagcggcatgaagaccaggagccagaaatggcttcctctctcgattctgtcacagaccagaacttcaaacatcaacaagagcaagtggatgcccactgcaatcaacatggctttaaactccacacacgtttctccttctgctcgatattgaggatttcgtgcccagactccagttccaactgaggc

SEQ ID NO: 217975 - DNA, 593 bp, Homo Sapiens
caaaatttattagaagaatagtggttttgaaaactctagcatccagtgagaactaccatacacaacattacagctgggaatgtttctccaaaatgtcatggtcaaataatacaatggaaccattaaatcttacacatgcacgaaagaacaagcgcttttgacatacaatgcaaaaaaaaaaaaaaggggggggaccacatggattaaaattttaagtactcatcacatacattaagacacagttttagtccagtcaaaaatcagaactgcattaaaaaatttaatgtagtgcaatcaaaccaaaaaacttaatttgtgatcataagtgctctactacataaacattgatcatagcaaggaacaaaaagttcaaatcacacagtacaaaaaaatctgtaaataaatataaactacagtacaagagaaatattaaattatacaattccatcaaactgtaaacagtatattgaaatgaggtccataagagtaaagggggttcctgttttgttgtatgacacttgaacttctagaaatctgaaagataccattttccatatctccaaaggctatgggttttatatgtggagagaatt

SEQ ID NO: 217976 - DNA, 586 bp, Homo Sapiens
tgttttattactaatacaaataaaaatttcacatttatacagatttgcttttcaataatgtatttacttatttattcagtgaacatttcctgaatatctaccaaccaagcctttagtcaacatctgctgcatcataaatgtcctcaaagtgtttcccaaaacagacttgataattaattggaaaatgatactggaagttatggggattaggtgcagagttttattaccttatacagcagtatttatgattacaataaaacatacaaaaatgtttttatattaatataatactaaagaagttcaatgcttgtaactattttaatgggcttctgacttaaagaaaatttacttaggtacaataacaaagtagtaattggaatcatagttaactaaaatagaaaataaacttcataggttacgatttatattaagcccaataattcaattctaatgacagtcttgtgttttacatttagccttatatgctcctttatgagttctctgcaaagcatatatgaagcttgaatgaagcaggtcccaaattttaattaatcttgatgaaatgcgacagattactgatttaact

SEQ ID NO: 217977 - DNA, 476 bp, Homo Sapiens
aacatgggggcagggttgggggaaggagtccgagagcctgaggcctgagaacaagacgggaagacattgctggacatttattttatgacgtgcctcatcagcagaacaaagaagggcatggacttatgtttaaaaactgtccagaagtgaccaaagaaattcaccagtgatgcagatgagctcctaataatcatgccatcggagcaggctgtgatagcctggaaatcctgcctgaaaccaaactgcaacatttccaactaagaaatcaagcggtgataaacctcagtatctgaaagggttaaatattgtgcccacgtgactactgttctttctttctgtgaattaatgtgtgtgccagaaaatatttgtgaataaaaaacaattacataatctcattgtcatgaatgtggttatttatctctgagcgttaagactgatttttccccccactgaacatcttagtgtaaatatcagag

SEQ ID NO: 217978 - DNA, 455 bp, Homo Sapiens
gtggtatgtgcctttcaacttgataatttgggggacattttcatattgggagattaattctaagtatcttcatgttctatgactatagaaccatttgccaaaaaaaaaagcttttcttgctacaaaaaataagcaattttcttgagccttattgactttattacattttctgtttagcagcatttttcactgcaatgttaaaataaatatgacattgaattcgaactgtgtgtatgtcagtggaatcaaatcaaaagccactaacatggctgtctgtttcactggactgtcccatttgctggttaaaaggattggggcccaaatcctctggcctagcatttctcagtgtttgctattcagactgtctaaatacagcatgtgacaagctgaagaagccaaatctagcagtcatttctgatttcattatattctccccctcttcctgctaaaaagac

SEQ ID NO: 217979 - DNA, 716 bp, Homo Sapiens; identical to SEQ ID NO: 49709
  misc_feature (58)..(58): n is a, c, g, or t
  misc_feature (108)..(108): n is a, c, g, or t
  misc_feature (158)..(158): n is a, c, g, or t

SEQ ID NO: 217980 - DNA, 611 bp, Homo Sapiens
  misc_feature (529)..(529): n is a, c, g, or t
  misc_feature (554)..(554): n is a, c, g, or t
tttggtagagacagggtgtccctatgttgcccagattggtctcaaactcctgggcccaggcaatcctcctgcctcagcatcccaaagtgcttataggcgtgagctatcggcacccagcccaatgtattcttttaaatgaaatctactccaaaaattgtctctatgagggatgacataaagaaaaaatggtaaaatatatgtaaaatgctaaaaatgtagaagataccagacttccagacttcagaaaacaaaaattaaacaaatttaaaaatacataatatacaaatttaaaattaataaagggaatcagcttagcactgaattgaactatttaagataagcttcctttcctttactgtgtgacccatttgtttctttgactcaagaccacggtccctgccaggctgacatcttgccccttacccaggtaagtgccataagtcacgtttctgtactcatcccaggagattaagccgtcttgattcatatcaaactcctgccattgttttcaacattgtcatatatgatntcttcttggcgtgcttaatccagantcagctccccctcgtcacaaacccatctttaatcacgtctattttatctacaatcat

SEQ ID NO: 217981 - DNA, 632 bp, Homo Sapiens
  misc_feature (513)..(513): n is a, c, g, or t
  misc_feature (524)..(524): n is a, c, g, or t
  misc_feature (589)..(589): n is a, c, g, or t
  misc_feature (608)..(608): n is a, c, g, or t
  misc_feature (619)..(622): n is a, c, g, or t
  misc_feature (627)..(627): n is a, c, g, or t
  misc_feature (629)..(631): n is a, c, g, or t
gaaaatatacccctcacatcatcggattgagatggcagtcgaaatagcttcattgaagtgtcagcactcatccatcaatcaatcacccacaaggaaaaatagcaacagtacaacggggtggcttttatgggatttactcatgggcatagggaatagcggctcaaatgtagttctgacatgaaaagcaaggtgctgatattattttttatgatgggaggatcataaagtgaattgagaacagtgaggtctgtctttgcttaacctattcaaccagaaatgaatggagctcgactggaaaggaacagtcttcagatgggttaagattgaagggtggactggactctactgagcaccgtccttcaacaaggaaattctattaaaggaaaatcaatgcattagtattggggttcttgtagctgttaaaaattgtctgctccaatccagggttattaggccaaagttacataattcagatctcactgcaaccatccaaaagtggattctcgagccttngctccaatggngggaggagatcaatacaattcccaattccatggaaaatgggttcctttctaggggagaaaaatanatcatctgcttcaacatanaaaaaaaaaannnnaaaanannna

SEQ ID NO: 217982 - DNA, 603 bp, Homo Sapiens; identical to SEQ ID NO: 52089

SEQ ID NO: 217983 - DNA, 696 bp, Homo Sapiens
  misc_feature (559)..(559): n is a, c, g, or t
  misc_feature (572)..(572): n is a, c, g, or t
  misc_feature (600)..(601): n is a, c, g, or t
  misc_feature (606)..(606): n is a, c, g, or t
tgagacggagtctctttctgtcccccaggctggagtgcagtagcacgatctcagctcactgcaacctccgctcccgggttcacaccattctcctgcctcagcctcccaagtagctgggactacaggtgcccgccaccgcgcccggctaaattttttttgtatttttagtagagacggggtttcaccatgttagccaggatggtctcgatctcctgacctcgtgatccacccgcctcggcctcccaaagtgctgggattacaggcgtgagccaccgcgcccggccccctcctccccaatttttcatacagttgcccctatacaatatacacacccttgagggcaggtagaagtccagcccacctgcgccagggacgctgtggggagcatttttctctgagttgctaagagaaccctgatgggcggtgagcagaggaaccacagaacagccagggctcaaggctggcagcggataggccaggagagatcgctaggccccagaaagccccctactttcagtcagggtgggcaagagggtcttcgcagtgaagtgggaggcangcctggaggaggnagccagggagacccctgggagccctganngtggnggcccagcagggagatggggatagcagcttgctcagtacttggggaccttgcttgaagcttcggaatgcacgtgccggcacaagcagatg

SEQ ID NO: 217984 - DNA, 568 bp, Homo Sapiens
  misc_feature (399)..(399): n is a, c, g, or t
  misc_feature (540)..(540): n is a, c, g, or t
  misc_feature (544)..(546): n is a, c, g, or t
gggaggcccagggggccgagggcccaggtccccatcatgccctcaccactttatgcacaacgcccggcctgagccccctgccatagggaggggaggaccctgagggctcagccagggaggggtcccaggactcaactgggccccgtttctaggaagtaccagccccatcccccacagtccagctccggggaaggggctctgggaggcattttcctgctttgccccttttcttcctgacttactaatactaaagaagttgggggagctcgagagccagacggccagacaggcagacccctccagaggcccgccaggtgggcatggtcccccattttctttaaggcagcacctggagtggagagaggccactccctctccagcccccgatgtggacccggngaggggaggctgaggcgtttggccccggcctggccaggagaggcccatccccagggcagtttcaggtgccggctgggccctgaatgtcgaggatagtatatagcccgctcctgggtcctggagctgtggccctttgtaaanaaannnctaaaacataaaacggccggcg

SEQ ID NO: 217985 - DNA, 656 bp, Homo Sapiens; identical to SEQ ID NO: 47280
  misc_feature (507)..(507): n is a, c, g, or t
  misc_feature (518)..(518): n is a, c, g, or t
  misc_feature (520)..(520): n is a, c, g, or t
  misc_feature (615)..(615): n is a, c, g, or t
  misc_feature (621)..(621): n is a, c, g, or t

SEQ ID NO: 217986 - DNA, 655 bp, Homo Sapiens
tatcaatttgttccaagaaccagctcattgatttggtttcagtttcattgatttctacttttatctttattatttccttctttttcttgcttttggtatattttgtgcttctttttctaggttctagaggtggaagcatacgttattgatttgagacctttcctcttttctaatgtgagcattttagttacatttagttccctcctaggactactttaattggattattgagaggtgttgaagtctccaactgtatttgtggatttatttatttttcctttcagttctattagttttagcttcacattattttgcagctctgatgtttaaaggtgcatgaacatttaggctcactatgtctcagtgaattgacccttttatcattacgtaatattcctctcagtctctggtcattttctttgtgctgaaatatactttatctgataatataatgactgttccctgtagattaatattttcaggatgtatcatttttatttttttattttcaacctgcctgtaatcattatatttgcagtgaattttttctagacactgtatagttaaatcattctaaaaagtctgaaaaactaaaaaatccctctaatacctcttcgagcgcggccccggtaccctccgcctataggggtccgtt

SEQ ID NO: 217987 - DNA, 645 bp, Homo Sapiens; identical to SEQ ID NO: 55929
  misc_feature (52)..(52): n is a, c, g, or t
  misc_feature (134)..(134): n is a, c, g, or t

SEQ ID NO: 217988 - DNA, 654 bp, Homo Sapiens; identical to SEQ ID NO: 48939
  misc_feature (489)..(489): n is a, c, g, or t
  misc_feature (609)..(609): n is a, c, g, or t
  misc_feature (616)..(616): n is a, c, g, or t

SEQ ID NO: 217989 - DNA, 445 bp, Homo Sapiens
  misc_feature (444)..(444): n is a, c, g, or t
aattcgcggccgcgtcgactacggctgcgagaagacgacagaagggagatgtgagactgcaagtatgactgtccatggtggtcagtttgcaaagcactgcttctcgtattttctctgaaagccacagtgcctcttagtgttctctagacaccaaatttcaggtaggccggatgcagtgattcctgcctgtgctcccagcactttgggaggcagaggcgggcaaatcgcctgagctcaggagttcaagaccaactggggcaacgtggtgagaccctgtctctacaaaaaatacaaaaattagccgggtgtggtggtgcacgcctgtactcctggctactcaagaggctgaggtgggaggatcacttgaccccaagagtttgaagctgcagtgaggcaagattgtgccactgcactccagcctcagtgacaaatgagttctgtcgng

SEQ ID NO: 217990 - DNA, 525 bp, Homo Sapiens
tctttaaaaattgtttaatgaaaatcacactcaacacattcacatagctctctctctgcatttcgtgcttaacaacataatttcttcagtcgccccagttgtgatgttctttccaacctcgcgtctttccacaggtctggaatgcactgtcctttttccgtcttcacctggccacatctctttacctgtcttttaggtccctgactgtattagtccattttcacactgctatcaaggtactacctgagactgggcaatttataaacaaaaggggttcaagtgactcacagttctgcatggttggggagacctcaggaaacttacaatcatgacgaacctcggggaacttacaattgtgacgaaaggcaaaggggaagcaggcaccttcttcacaaggtggcaggagagagtgcagggaaaactgccacttttaaaaccatcagatcttgtgagaactccctcactatcacaagaacagcatggggaaacagcccccatgatccaatcacctcccaccaggtccct

SEQ ID NO: 217991 - DNA, 687 bp, Homo Sapiens
  misc_feature (496)..(496): n is a, c, g, or t
atttttattgaatatctgtgtaatatgttaagtcatttttaacaacaatcagaaaactactgtggaattcactacacaaagtgaaacaaaatttaaatcacctcatcaaaaatgaaggtaaaatacagctgaaatagttggctcgcaggccacgagccatatggcagaggaaaacaccccaacatttctacaagatacagggaaaacccacacatagaaacactcaagcaggcagtaaatatacacaaaggcaactaggatctttctagagcatcagattctaatactttacacagctttgtcagaagggtacatgtggcttatttgaggatgaatcttggtcataaagcaggttccatcactgacttgtgaaagagtgaaagatggcatagtaccaactaattctatggtgacaatcccatgtctggcagtgttgcaagagaatgcattagtggtattttaatgcaagaaataatgtctattcagcagcttgaanctgcttgtttgacagtgtggtttcattgtgaacaacttaaagctgaatacagtgaaattaaatgtcattcggggtatttaaatactttttgccagtcaaatccctctcttgggtagggtctggccttttaattgggagttcggttgaatttctgttcaaccatttttatttcacatctgactgggttattc

SEQ ID NO: 217992 - DNA, 799 bp, Homo Sapiens
  misc_feature (8)..(8): n is a, c, g, or t
  misc_feature (12)..(12): n is a, c, g, or t
  misc_feature (20)..(20): n is a, c, g, or t
  misc_feature (28)..(28): n is a, c, g, or t
  misc_feature (35)..(35): n is a, c, g, or t
ttggaccnccanttggaagnattgcaanccctttntctcgggaagcgcgccattgtgttggtacccgggaattcggccattatggccgggggccgagcgcggtggctcatgcctgtaatcccagcactttgggaggccgaggcaggtggatcacaaggtcaggagttcgagaccaacctggccaatatggtgaaaccccatctctactaaaaatacaaaaattagctgggcgcggtggtgggtgcctgtagtcccagctactagggaggctgaggcagaagaatcacttgaacccgggaggcggagattgcagtgagccgagatcatgccactgtactccagcctgggtgacagagtgagactacatctcaaaaaaaaaaaaaaaaaaaaaaaaaaaaaaaaaaaacatgtcggccgcctcggcccagtcgactctagactcgagcaagcttatgcatgcggccgcaattcgagctcacttggccaattcgccctatagtgagtcgtattacaattcactggccgtcgttttacaacgtcgtgactgggaaaaccctggcgttacccaacttaatcgccttgcagcacatccccctttcgccagctggcgtaatagcgaagaggccccgaccgatcgcccttcccaacagttgcgcagcctgaatggcgaatggaaatttgtaagcgttatattttgttaaaattcgcgttaaattttgttaaatcaactcattttttaaccaatatgcccgaatcgcaaaatcccttattcgttgaccgagatagggttggtgttgtc

SEQ ID NO: 217993 - DNA, 802 bp, Homo Sapiens
tttttttctcgacagcgcgccttttgttggtcccgggattcggccattatggccggggcagtctgtataaaaataccgtggatcatttactctttctgcagctctatacgataggcaggagaggcttatgtggcagcacaagccaggtggggattttgtaaagaagtgataaaacatttgtaagtaatccaagtaggtgtattaaggcaccaaaagtaacatggcacccaacacccaaaaataaaaatatgaaatatgagtgtgaactctgagtagagtatgaaacaccacagaaagtcttagaaatagctctggagtggctctcccaggacagtttccagttgctgaatagtcttttggcactgatgttctacttcttcacattcatcttaaaaaaaaaaaaaaaaaaaaaaaaaaaaacctattgtccgggcccgcctcggcccagtcgactctagactttgaccagtttaattcatgccggcccaaatttggagctaactttggccacattcgcccttttggggggggggtattaaaatttacttgggcccgggtttttaacaacggggggattgggaaaacccctgggggtacccaactttaaaaggctttggagaaaaaacccccttttttggcggttggggaaaaaagaaaaaaggcgcccacaaataggccctttttcaaaaaatgggccccctttagggggagaagggaatttttgggccggtaatttttttttaaaaaaaaccggggaaaaatttttttaaaaaaaaacctttttttttaccaagcggcgcgg

SEQ ID NO: 217994 - DNA, 752 bp, Homo Sapiens
  misc_feature (12)..(12): n is a, c, g, or t
  misc_feature (736)..(736): n is a, c, g, or t
atgggagccccnttcccccttcgaccccccttttctcgggaagcgcgccattgtgttggtacccgggaattcggccattatggccggggagagaggcgaagccaggtcacctttcaaggacccagaagtagggttttggcctaggtaacggggcagagatgtggttcgagattctccccggactctccgtcatgggcgtgtgcttgttgattccaggactggctactgcgtacatccacaggttcactaacgggggcaaggaaaaaagggttgctcattttgggtatcactggagtctgatggaaagagataggcgcatctctggagttgatcgttactatgtgtcaaagggtttggagaacattgattaaggaagcattttcctgattgatgaaaaaaataactcagttatggccatctacccctgctagaaggttacagtgtattatgtagcatgcaatgtgttatgtagtgcttaataaaaataaaataaaaaaaaaaaaaaaaaaaaaaaaaacatgtcggccgcctgggcccagtcgactctagactcgagcaagcttatgcatgcggccgcaattcgagctcacttgggccaattcgccctatagtgagtcgtatcacaattcactggccgtccgtttacaacgtcgtgacttggaccctgcgttacccaacttaatcgccttgcagaacatccccctttcgccagttggcgtattaccaagaagcccgnaccgatcgcttttccc

SEQ ID NO: 217995 - DNA, 760 bp, Homo Sapiens; identical to SEQ ID NO: 53159
  misc_feature (6)..(6): n is a, c, g, or t
  misc_feature (21)..(21): n is a, c, g, or t
  misc_feature (23)..(23): n is a, c, g, or t
  misc_feature (459)..(459): n is a, c, g, or t
  misc_feature (553)..(553): n is a, c, g, or t
  misc_feature (630)..(630): n is a, c, g, or t
  misc_feature (666)..(666): n is a, c, g, or t

SEQ ID NO: 217996 - DNA, 752 bp, Homo Sapiens; identical to SEQ ID NO: 53758
  misc_feature (13)..(13): n is a, c, g, or t

SEQ ID NO: 217997 - DNA, 653 bp, Homo Sapiens; identical to SEQ ID NO: 52823

SEQ ID NO: 217998 - DNA, 701 bp, Homo Sapiens
  misc_feature (540)..(540): n is a, c, g, or t
aaaaaaggatttttgtcatgaattcactactgtttgcctaggctgtccttgggccagccacctggtttctcagagcctcagtgtgatccactggaaaatgtgatcatgttcaatgtcctttcctaatctgtcattctgtgaagtggtgcttccaggtcaaggaaacaaataggtcagaatgttcctgtggtcattgttctctttaggctcattttccatgaaatagttgtattcctcttcctgtagcacactcaggttaagttggagctctttaacctgggcattcttcccaatacttcattagaaataccgcctgcttcaaaatcacctttgtttgcactatctactacagcgtaatagacttctggctcagagagtgaaagctgtggaagacaactagaagaatatttatgttaactcccttattttacagctaatgaagttgaccctagggaggtttgatgactctccacccagtcccaaagcttctaaagcacggaatcgagttcctactgtggatttttaatcctcttattgcgnattttccacttgcctatctttaccacggagcttagcgcattttagggctttccaggagtactggccaggttccttgccctgttttttcttcctacacccaatatgttaagcagctgctgcttttggaccagccacgtgctggcccactatttcgggtcggc

SEQ ID NO: 217999 - DNA, 699 bp, Homo Sapiens
  misc_feature (478)..(478): n is a, c, g, or t
  misc_feature (513)..(513): n is a, c, g, or t
gattgtgcaccggtatctctcagacaccagacgtcagagagagagcaggttgtaaaatatgtcttagacctaaaagggtatgtggttcttagttgattgtctcctggatctgggaaggaaggaaagaaaacaaagaggaaatggggttctttatagaacgtggatttttcctacaagagactttgcagggcaatttcaaggtatggcaaggaaatatatttttgggtaaaacattttgattttcttcttgttatgccagagtctgattggaaagtaagtcttgatatacagggttaaataaaacccatctgatgagaatttatggtttgtagggcataactccctaagccccttagataggaatttcagcaagataaaaaattagagcttaggccaggcacagtggctcatgcctataatcccagccctttgggaggctgaggcaggtggatcatgaggtcaggagtttgagaccatnctggctaacatgatgaaacccctgtctctactaanaatttgaaaaattagccacgcattggaagtgcctgcctgatagccccagctactgggtgaaggcctcaacacgggaagaatgatttgaaacctggaagtccggaggtttgcaggggaggtccaagaatcaatcccatttgcactgaaaccctggggcaaacagggccaattccgcgtcttacgggg

SEQ ID NO: 218000 - DNA, 674 bp, Homo Sapiens
gaggatgtggcgcgcggagggttaaatggctgccgaaaacaagccggaagagcgtttcccaaagtgtattctgcggaactagcacctactgtgttctcaacaccgtgccacctatagaagatgatcatgggaacagcaatagtagtcatgtaaaaatctttttaccgaaaaagctgcttgaatgtctgccgaaatgttcaagtttaccaaaagagaggcaccgctggaacactaatgagagatcatgatgcagccgtccttttggatttctttttaataatgtgtgacccttcacctttgatcccctgacctgcattaccttggctctcaccacacacttgttcatgggcgcagcaaagaagagggatccacagagctggagccatgagggctgacacattggaatgaaagctggcagaattcgtagggagagctttcccatcctgccagccccatgtctggctttaagacagttctattagtgaattaactgttctcaaaaccccaaattaatttgaaccgaatggtactatgaaatagaatgtgacctactcttgcctcatccggagttattacgggagctccgcagcctgactgagctctggagagcagggctctgtgcacacgccttctgttccagaggcctccgtgaccatccatgatgccctctgtcc

SEQ ID NO: 218001 - DNA, 445 bp, Homo Sapiens; identical to SEQ ID NO: 137639

SEQ ID NO: 218002 - DNA, 517 bp, Homo Sapiens
ttgaatcttagggtcttctacatagtaatggataacagggaaagatttaatgcaatatattataaatgtaattggattttaaattcaagtagattcgtattttttccactcaagacaaattaaagtaagcatgcctatttgttttcttcatgataaagaaataaaatcctcagggcaatttcaagttgagtattaattataagtgacatgaattaccatcttataacatggaattatgcctcacagcattaaagctacttaaggcacttaattgtcagcacacttaaaaggaatttattttctggaaaacacacaggtgatcctagttttaattaggtcacacacataattcactggagccaattatgtatttctaactacaaacagcaaacacatttcttcaaattctgagactatctccagcagtggatcaacacaaactcttcaaatgaaaacagactttagttcaacagtcagtcctgccacttggcatacttttccaaggacaaggacatct

SEQ ID NO: 218003 - DNA, 559 bp, Homo Sapiens
ttttttttttcttaattttggggctttattataatttttcttttcaagatgctacatagtcaaacagaactgggttggtcttttatggcataaaattaattcacagtcaaactctcaactagtactagaaggattcgctgaagagtttctctcttcccttgctccccacccacaactgctggtgccctcgcttctaaccctctgcagcccgatccatttgtcctgactccaggctaggtccccaaggggaggtcaggctcaaacttggacctgggcgctggaagtgtgagtaatggttgagaggtggtataagaacaatctagaagactgactactcttcattaaaaaaggtaacctagagttgactgtcactactgagaatttccctgcctatgacagttgttatttactgacccagaaaaaacacttcctggcagctcttctccagcatcccaataaaccccacctccacatgaccagactctccagagacagaggagcccacagccctccagcagcaataccagttcacccaacagagttcagcagcacgcagcat

SEQ ID NO: 218004 - DNA, 495 bp, Homo Sapiens
aacagatgtattttgaagctgccaagatgctatctttcactgaggaggaatttatgaaagcacttgaatggggaaattcataagtgatctacttcagttagtctctatgacagtatgtgatggatacccattttacttattgtagtggtttgaattatttttattcttcataagtaatatatttgattatgaaagcaaaataatttcaaagaattccctttttagatttaggagattagctattagctctttttgagttgttttttaagttcttagcatgacaattaagcacatcagataataaaattcttgactcttttcatttataattctcctcccttacagtagaccaaaaaagatgctttaaaagaaaattccaaatatttatttccctggctaaatcaagtaagtaaagttcgtaaacacagacagaaggcagttcactttggggtagagttctgtattagtcaaggtaaatatactgtcttgaggatg

SEQ ID NO: 218005 - DNA, 506 bp, Homo Sapiens
tttttttttttttttttttaaaatggacatgaatatttaattaaatcatatttccttgagaaaataaagttcattcgcatttatagcagacagttgtgaggagctcataattgtcataagaccagggtagccagtaccggttgcttgtggaacaaaactcctcaatttttaaaactttttttaaaaaataaacatacaatcataggtattcatttactttaaaaattctaaagatgaagaaaattattgtttatatatttaagtccttgtataaattacaaaactcaagtttatgttacagagtcccttccccataggaagcataaagcacttttgtggtacctttcaccagtaaatatttgtatcacattgaatttgagaaaccaaataaaagtcgatattgcatctttaagccccaagagaacattcttctaagctgtctcttgtgatgaatgcgtttcaaaagtcatttgattgctatgatttaactcaatctcaaataaagt

SEQ ID NO: 218006 - DNA, 623 bp, Homo Sapiens
ttgaagcattcaaataatttgcactatattatcctgccaaattaaaaaaatatactgtggcagcctgtcttttttttttccactaccaaaaaaggtacattgataccttttaagagaacaagcaacagttaaaaatacaagcttcaatataaatactatagtgcctaacactagatgaacatttaattcaaataccattctagaaatacagaaaaaagaccataaatgtattttagcataggaatcaacatgagtgtgcattttcctatatttaagtactatataatcttaaacctttccccaatgtatgttttttttttttacaacctgaagagcggtgtgtatccaaggcatagaatttccactaccatttttaaatggataacaagtcttgtaacaccaccaagacaatggaaccctaaaatgcagttcccccctaaacataatgaagtgttttttaaaaaaaatttttcttaacatttatatttaaaaaagttttgtacaaaaaaatccttgcactgtagaagcgaaagcaatcattcatttctatgttaagtgtattctgtttccattcacagcgcttgcaatgttgcgtccaagtaagtaagctcaatagtcaagta

SEQ ID NO: 218007 - DNA, 469 bp, Homo Sapiens
ggcggggagactcgggtctttattagcaagcccagcctgcggcaccctgccccgccccggctggcagtgagtcggggtctctgtgcggggcgggaggggaatcactgcctctcctcaaaacgtgtgcaccagctggactgcgggtagagtctggacaatctggatggagggcaggccctgaggggtcataacaccaggcccagctcctgcggggaccacttgcaccatctgggaggctggagccccggggagccccgcggggcccgaggctgggcctgacggcggtggggccaggagctgcagcgtggcggtgcctcctccagtgttgctgctgtccagcagctcagtggctggggcgctgcggatgatgaggagtttctgtccgggtgggccggtggcaggcggctccgtcagcccaggaggaagtgtttctacctcctgtacgcagagtcgagtctgttcgccatcg

SEQ ID NO: 218008 - DNA, 559 bp, Homo Sapiens
catttattaatcttttatttttcattacattttagtacagcaaagcaaatacaggtaaacatcagtattcttcatacaatagcagacagaaagggaagccagccacaatttagagtgccttttcagttgttgttatatttgtttgttagtttatcactttaagctagattattttactggcgaattttttcaagctttcaaggaaaagcctatatctatagctatatgctatattcttttctagataatgcaacaagatggaaagatttccaaaacattttatagagctatcaaaactcataccaaaatacaacagagacagcaagtggtcaatcacatttacccaatcagacaatatattaaaacagttgaaacatttccagacaccacaccagaactaaatatgaaaagacataaatataactggaacacaaataccaaatacaatatgtacccacccccaccccccaatacatgagaactgaggctcaaaggcccctccttgcaaggcccctctgactgccatgcattcctctacctgaagttgtgaacaaagatt

SEQ ID NO: 218009 - DNA, 404 bp, Homo Sapiens
ttaagcgcactaattacgggggtgttttacggttctggagacaatccgggttgctctgaccaattgtgaccggcatttcattgtcaaaaagcaagggggtgggggccgaggagccggcaggggctcggcggtggggggggagtagcaaggttacgctaaagggtacagcagccaccgcgagctgcatctccttccctcgcgccccaaataatttcctgcgaacagagcaactgcaacagcctgctctgaggagcccagcacgactgccctggccggtgcagctcagggtttccaccacgtagaaggaggggagaagatttttaccttaatgctacactgagcaggagtctcagacatgtctcacagcgagagagatcaggaagttctcaggttttttccacttt

SEQ ID NO: 218010 - DNA, 348 bp, Homo Sapiens; identical to SEQ ID NO: 43310
  misc_feature (264)..(264): n is a, c, g, or t

SEQ ID NO: 218011 - DNA, 426 bp, Homo Sapiens
  misc_feature (373)..(373): n is a, c, g, or t
ttttttttttttttttttattacacgccactgaagtgttggcttttatttgaatgtcaatgtgtaaagtggcgtacaggcaatttaaaataacatacatgatactgacatatttatacttagaacttatgcaatatatttacagacaaaaatacaggacaatgttttacaaaatctttcactaattacatgtttacaacattttcagaaataaaacgaaatttgctgtaaaccatctcaactgcactgtgtatatagaaaggcttctaaatatccatgttttcatttctataaccatttaagcgcttagtttttacgaattcatcaaactcattcgcatagtcacacatcattagtcactgctgagctgtagnaaagtaagagaaatcgcaaactccttgattagcttggtattttaaaaagctct

SEQ ID NO: 218012 - DNA, 416 bp, Homo Sapiens
  misc_feature (395)..(395): n is a, c, g, or t
tcctgagtggagaccgccttggtgcttctaaaacattttaaacccctattgtttagagagggttctcttggccatctaggatggaatccagccctggcctgtcttgtgaaagtgggtgcttcagtctgctttcaaacagactcagattagttgtcttttgtttgctggtggaacctcttctaatcttaataaatgggttaaagagctaccaagaggaccctcctaaataaatagtgcaggtataaaacaacatttttaaaacaaaatgtagagtcagctccatggctgccctgtatggttgcaacaattcttagaaatacattctttctttttaccaataaagattttgaaaaatccagtacagacaaaagagcaaagaatcatttccccataanaggttctacacattcaatatt

SEQ ID NO: 218013 - DNA, 409 bp, Homo Sapiens; identical to SEQ ID NO: 60211

SEQ ID NO: 218014 - DNA, 503 bp, Homo Sapiens
tagaaaaactatagtggttttgacccactacactgatttcataaaacactaacaagttgtgatctgcaagttaaaaattccaatatgaaattcctctgtcttcctattaccctaagattgctaggtcttcgctaagacctttgttattatgaatagcagcaaacagatacatacattatagagccaacaacagagatgaataacatagctcagaatttcaggaaatggacagaccagaacttaatgctcttcaaaaagtaaaatataaagctatcctcccacgtttagtacggagatctaattaaagtaaccatctttaaatgatactttcaagtattttccaaccatagtaggctcaatagttgtactcttttgtagttgttccctttttagttgttctcatagaaagggattaattctgaacaattagccaattaatttaaattaattttaatcatgagcaatacagtacctagaacacatgtaaggatgaatctgaacac

SEQ ID NO: 218015 - DNA, 577 bp, Homo Sapiens
caataagcaagataaataagtttaatgcaatatttttaaaattaaggcccccccccccaaaaaaaaaatccatggtgaacaaaacatcacagttttaaagacaggattcgtattactgatgtttccttttgcctcgggttcccattaggcttgcctgcccctgtgggagggacccagtggggcacccagagttgctctgcccaggcgaggcctcactgtggctgtgacgcacccttgatgtcagaacgaggtgatgtgtgaaggttaaatgacagaggagtgtggaaccacagccatgctgtaggtgctccaggtgctctgcgtgtacaaagttcccacctcctgaacttcccacccagctcccctcccagagccagttaggaagctggaaggtggcgcttctcaacctacacctatcattggaatcacctgggtggctcctgcctccccactgcccagaccccaccctggaggagttaaatcagcatttgtgggtgggccccaggcctcagtactttttaaagtccccaggtgattacagtgtgcagtcaaggctgagaaccacttctctggagag

SEQ ID NO: 218016 - DNA, 527 bp, Homo Sapiens
tttttaacaagttcctgtttcacttttccagctagctgctgggtatctccaacaaaatatctcatagatctctcaactgtaatgtattcaagccaaaaatcagctctgcccattctccatcccaaagcccctcctcttggttacctgttagtggagcaacatcatcccagtcaccaacacttggcaactgattcttccccagcatccagtccccatatctagacgattgctaagtcctctgatgctaccataataccttacacatcccacttcctctaccctgaatgcagtttgtattagttcctgcctagaattctacctaaactattacagcaccttacctactgctttcccttccccagtccttctgtctgatacagatctgccttcagatccatcttggtgcacattcctaaccaagtcacttcctggtgcaacagaatgagcatgggctttggaactaaacaactatttgaccttacataattactgtatcttctccaagccctcaatttcagcagttcttc

SEQ ID NO: 218017 - DNA, 553 bp, Homo Sapiens; identical to SEQ ID NO: 62018

SEQ ID NO: 218018 - DNA, 488 bp, Homo Sapiens
ttttttttcttttaaaagtttttatttaaaaatcggtcataacaacacattacttagtataatcaattataattcaggattttgatgacttgtacctgtgttatttcttttcttttctttttttttgagacggagtcttgctctgtcccaggctggagtgcagtggtgtgatctcagctcactgcaacgtccgcctcccaggttcaagcaattctcctacctcaccctcctcagtagttgggactataggcgcctaccaccacacctggctaatttttgtagtttcaatagagacgggggtttcaccatgttggccaggctggtctcgaactcctgaccataaatgatctgcttgccttggcctcccaaaattctgggatcacaggcatgagccaccacacctggcctgttatttcttttttctttctttcttttttttttttttttgagacggagttttgctcttcttgcccaggttggagtgcagt

SEQ ID NO: 218019 - DNA, 508 bp, Homo Sapiens
  misc_feature (505)..(505): n is a, c, g, or t
tagggatagagtctatgttgcacagtctggtcacaaactcctggcctcaagtgatgtttcctcctcagcctcctaaagtattgagattacagctgtaagccactatacctggcctcaaaattatattaatgtctattagttaacttgaattgtttgtgcttgtcttgttggttttaaccctacttatatacaagaattcaaaagtattttcaagccctatcatttagttgtaaaatatacccaactcacatttatagactgccaactaacttgaatgtttgtacaggcatttctgctgtgatgccatgtgtacctaaataaaactcacactctataaaatcacacactaaattaaattaacagggctatagaaaaaagagttataggcttacctctcaaaatctatagacttttgtgactagaaagcactaaaaaacagcaataatatcatataaacagtattactgttaaatctctctgctagcatcatagtccgcggatgctntgc

SEQ ID NO: 218020 - DNA, 485 bp, Homo Sapiens
tttttcttttttttttttttggagacagggtcttgccctgttgcccaggctggagtgcagtggtacagtcatagctcacttcagcctcgaactacttagcccaagagatcctgccgcctcagcctcccgagtagctggaaccacaggcacgtgccaccacgcccagccaattttttttttttttaaaattttctagacaaggcctcgctgcattgcccaggctggccccgaatgcctaggcccaagcgatcgtccgcctcaccctcccaacgtgccgggactacaggtgtgaaccaccatgcctggcactgtatttcttaatataaataaattagcaatatgtgtgtgtctgcacgtgtgtgtgtctgcacgtgtgtgtttgcatgtgtgtgtgcgtacaggtttaatgagcctggtgaataggaatcctccctttcttgtcgtgctgagagagagtttctctgggtctgctggatgttgcattg

SEQ ID NO: 218021 - DNA, 343 bp, Homo Sapiens
tttttttttttttttctgtattcatgtaccaagaataaaagttaaacactgatttttgtagagatgtaactcattttggtgtcacaggagttaaaaataatcatttcttgactgaagacaattagtaatacataacaggaaaaactgtgaaaaagtctggtatcaacatattttttttagaagagataaaaaaaaaaagtcttactctcattaggctgcctgagaattcctcagttggaaaataggttaataagccaccatggggtagaagcagcctaatgtcgtagacctgggcctccacgaagcgaggaatctgactctgaacagaagaaatgggggaggg

SEQ ID NO: 218022 - DNA, 550 bp, Homo Sapiens; identical to SEQ ID NO: 59704

SEQ ID NO: 218023 - DNA, 537 bp, Homo Sapiens
ttttgagacagggtctcactctgttgcccaggctagagtgcaatgaaacgatcatggctcatcacagcctcaaccttctgggctcaagtaaacctcccaccttaacttcctgggtagctgggaccacaagcgtgcactcccaggccaaattgttttttcctttttgtagagatggggtcctaccatgttgcccagactggtcttgaactcttgaactcaagcaatcctcccacctcagcctcccaaaatgctggaattacaggaatccaacatttttaatacagtaaaccaaacaatttctaagtttacaatttatcacaatgcttaatgattaaaagttgaataaacttttctaatgcagtacacctggtttcacagaaaacaaagcaactcttaaacaccagctggcaaaatgatagggcttttcctttgaattagtcaccacaggtgtgaaagacagaatgactaatccatctgattaaacatagaccttttagaaatcaataaccttatttacacagatgacaattgctactg

SEQ ID NO: 218024 - DNA, 436 bp, Homo Sapiens
ttaatttataaagaaagaagttttaattgactcaaagctctgcatggctggggaggcctcaggaaacttacaatcgtgatggaaggcacctcttcagagggccgcaggagaatgtgtgccagcaggggaaaatgccaggcaattataaaactatcagatctcgtgagacccactcactaacacgagaacagcatggggaaaaccaaccccatgattcaattatctccacctggtctcacccttgacacatggggattattacaattcaaggtgagatttgggtggggacacggagccaaaccatatcagcatctctcctgattttccaaatgcaaatgtcttatagtctcttgctgaggaatatacagttgccgacttgccctttctctgaccaccccacacaaacaccatattggaatcagacagaatgtgaatg

SEQ ID NO: 218025 - DNA, 546 bp, Homo Sapiens
  misc_feature (500)..(500): n is a, c, g, or t
taattaaatctacaccatctttactaagtttttccatactgtttctttggaaatccaaaaaactacttttttgactaaatggatttgacctctctgatgtttttgcaaacgaaggcacgtagctaccaaatgcgaactcattaggggaggctggacttctaacatttcctgaattctgaccttctccttttggagttgagaaactgatgtcttgcaaatgatgcccattaaataatctctctgaggattcagagaacctgtatgttttggggcttctctctggggagtgtagttttgattcaaaatcaggtaacaatggcaaaacagggtattttagatttcgagaatcttggagttctctgtcaatttcattcagtttagcaagtagcatttctctcttcagtctttcttcttcctctccttgcaatttatccatattctgaattggatacattcctagttggtaccttccagtttcccactctggcttttcttctctntccagtaaagatgccttttctttttgctttttatcaagttcttctc

SEQ ID NO: 218026 - DNA, 509 bp, Homo Sapiens
tcaggtttttatctttttatttatttatttgagacagggtcttgctctctcgcccaggctggagtgcagtggcgcgatctcagctcactgaagcctcggacttccaggctcaagccatcctcccgcctccgcctcccaggtagttgggaccacaggcacgcaccaccacgcccagctaatttttgtattttttgtagagttggggtctcccgatgttgcccagactacaggtttttatttaaatgaaatcattttcctttgggtttcgtggtaaggtccacgcaggcaaagtgaaaccactcaattggacagtctggattgtcacagccaatcatctccccataggagacctggtggcacaggcagtacgtgggttcgtttgggtccacgggcatgtccagcacatcagaggggtgcacggacaggatggtgtcagtgaactcagacctaagtctgtcctttgcaggtaatctgctcttctgctctttctctctgtctgggaatagaca

SEQ ID NO: 218027 - DNA, 521 bp, Homo Sapiens; identical to SEQ ID NO: 60596

SEQ ID NO: 218028 - DNA, 543 bp, Homo Sapiens
  misc_feature (484)..(484): n is a, c, g, or t
aaacgatacacattttaaaaattcaagtcaaatccagatagatagatacaggccagttggttggtatcagctggcccctcatacccaccataggaaagcatgatgagaaagtccgtttctgaaatgagagagacaagaggcaccagcttcttatctgggggtgagttccttgagcttgagaggaagcctgagagggaaatgctaaggctcaatgaaagacagggcagctccagcctcgcggccctcctgggtcaaaagccaaaggcctctgtgcaagcagcacataggatctggatgtaggttgaggatagatcctcacccaccagtggggtaactttcccagcaattctgaaactaaaataaggaaggcacattcccagagccctgctgagtaggggcttcaggctattttcactctacacaaaatgggggagaggagttccctctccactaatttttcacccataaacctccacatcactangaacctaaaggggaactccaaaggccaacacatccttggtggttatatgtgttgtcctg

SEQ ID NO: 218029 - DNA, 512 bp, Homo Sapiens
ataaatgataaaaatactttatttctttaacacagaatatacaatattgcactccagttgcaaatagtgtatagaaaaagctctgtttagaaactgccatagcaattgtctaagtctactaatgttttctggcatcaccaatgataaccacagtgctgaactttgaaccaactgaaaaaggggaatgttcaataaagcctcctttttcttccagtttcagtgcccagtagtttaaaacattctattatgtttaattacattttgaaaaattgtcgttctttcatgaacaaataaaagtaccttgcagccgtcactattgcccattcttgtgggaagcaatcgcaagcttttcatcccgactgaactaaacagtctgatttttctcaaagtcactcagcaaattgcggtaattcaggtttaggcaagaagttctttagttgtactttttatatatatttttagagacagggtcttgctctgtcactcaggctggagtgcagtggtgcaatcat

SEQ ID NO: 218030 - DNA, 731 bp, Homo Sapiens
acagcttttttttttttttttttaggagcctttaaacaggagctttattctctaatgtgcgtccagcaagttccttacacaatcaaggaaatggtttctctttcaggcatcgactcttttatcaaaagaaaatccatcctgctcagtcccacccaccctgggcagaagctgccctgagcaacgctcttggcctaaagctaaaggataatgggagaggggtgggcacataccactgcacccctacaatgcccagatgccccaggcctgagtcagccatgagaaggcgcagcacagagcagtcacccacacacctacacctcccctcacagctccagagccagcctgggaggacgtggagggctggcgaatggggcgtgggcagggtctgccagtcaaggcctgtgctcagcgtccatgacatccaagtacttggcttcaatgattcggggcagcaggatatagcggatggggatcatggcgatcatgatgaggggaaagatcatcttcatgtaaggcatggagctcatgccgaatgcacacagcagcagcagctgaagcacctgcatgcccgtgaagtagtggatcttcctctggggcaccctccggatgtagtgtgtcagggggtacacagtctgctctctgatcagcagggccactcgctggacgagctagttgccatctgaggatgtgagcgcgatgtatacgaagaggccatataacacagcctttgg

SEQ ID NO: 218031 - DNA, 685 bp, Homo Sapiens
  misc_feature (653)..(653): n is a, c, g, or t
  misc_feature (657)..(657): n is a, c, g, or t
atagataagtccaaactttatttaaaactacattttaaattcgttaccaaacatcacaatggggaaaaaaatgaagacccaaaaaagaagggggaaaaaaaaaaaaacacagtgtgtcaaggcttaaatctgtccagaattcagtttctgatgttttaaactaccatggggagaaatgaccacacctatcaaaaaagcagtgtcaaactaatttacatttttatacagatcagatgtttatttagtattgttttcatatatgcattgagtatgtaaggacagagttagatgagcctctgaagacatctcatatactctgggctcccaccgtttcaggttcttttagtgtctcagaatttccagctaattcttcggtctgcatttcacatatttcaccagataaatggtttttctgttcttcttctaccattttctttcttagatctgcctctgaatatattgtcagtttcagtggtaaatcttcaacttttacaaaatcttcttcatcagacttttgacttatattaccagattctgcttcatagtcattcactaacactggagattcagtatcaggacttccagccagagagctttccagagtttcctgagcagaattaacttctttgactctaggcacctaagggtccatntcangtaaacgtaaccgccaagggttaggctg

SEQ ID NO: 218032 - DNA, 488 bp, Homo Sapiens
ttttttttttagctcaccagcgatcgttagagtattttatgtgtagcccaagacaattcttcttttttccagtgtggcccagggaagcccaaagactgaacaccactgccttaaccacttctaccacaaaacacacaaaaaggacattcatttaatgaaagtagcaatatcacactgtttggaagaagtaagattttcttgtagcatagtctatttaaaaaatgattcaaaacaccactggcagttgactcaggctttcagctctggcgtgggaggtcttcaagctgtgtcacctccttctttctcgatatgtgatgtatttgtgtttgtcacacaccagatgcttcttgtctcacacatcacagcattttccaatgtcattattagtctagatgggcggaccatctttataaattgcagatgttgtaattttccatagcactgccaatctcagagcagttttctccaggacttagtaaacctaacac

SEQ ID NO: 218033 - DNA, 473 bp, Homo Sapiens
gtcttatgtctctaatctgcactgttcagctcttttaggcactgcaaagttgtcttgaattaggaaagaggtgctagaatgtgggcgtgggtgttgacctacatctgaacaatttacatatgattcaccacaattaaacaatttggtttgaaatagctataattaagttattatcagagaagtatttactagtctagaaattctaaatttatcttcacatacaccctaactgagaaaagggccacattttctgcactctattaagtaaagcaaatgctgaactaaatgcctccatgttaacatttatattgttaagttactgacagcatattctatgaatgattacgttagtcgtttctttaaaaattataggtttgaaatagcaagaaaaatatgaaatgatggtagacaaaaaagagttcagtttctaacttctaactatatatatacacacacacatgcacacagaattg

SEQ ID NO: 218034 - DNA, 469 bp, Homo Sapiens
ctagaagtaataatagcagatttattgtacagaagtgtccacgggctcacaattctaaggacatcatcatgacagcaagtaggaaaaaaaattaaagtaattctttcaccaattaccagtttatctcttctccaattcctttggatacgcctcctgcaagaagccgatttccagctgtatgtgataatgaaagggtttttctttcttatgttaaatacaagcgaagtgattaactggaagatagcgtctgattgcgaggaaatcagtgattcagatggtgtgggaatggcacctggggatgggggaggcaggacggagatggaggaagctggtgcagcctagcctgccttgtgccaaggacacccaagggcagagggactgagctctgggggaggacagatttgacataactggtccagcctcacagtttacaggtcctggagggtgaggaaagtgggagctggctgcg

SEQ ID NO: 218035 - DNA, 552 bp, Homo Sapiens
tttttttttttttggcaaaaaacatctttataggctgggcattatttctacaaatgtactgaaaatacaatgtcccacatacaatcaaagataaacaggaattcaggggacaagacaacaggaacaagacaagcaacagtcaattcttgctttctaatgtgataagaatgttatgtatgtcttagtaatcacagatctcaaggctgtttcctttcaaaatgttttaggatcaaattcatgggagaaatgaagatttaatcattcctaaatttaagtcagatagaaagaaatcaatctttaggaatgtatagtgctcaaaatgagatctacgaggcagtgagaatttcaaaccaaagcagcaaatggtaagagacagtggtccttgatgatcatctgtagagttcttggggttactgttttctgctgttcatatcagtattggcattattacggttatcaccagagcagctcaagacacgccaatgggaaaccccaggagaaaatgtgtttttccaagtctaggagatgaagatatttatccaagagaaagac

SEQ ID NO: 218036 - DNA, 524 bp, Homo Sapiens; identical to SEQ ID NO: 59558

SEQ ID NO: 218037 - DNA, 577 bp, Homo Sapiens
ttatatattcaaaaaatctttattaagggcctagtatgtgccagatattctttattatatgtgtaagaaaaatattattaacatattgtgggtgaaaacatgcaacactatgaacatagttttcatttttgaatggcttttactttttcagacaatagaaggcaactggaaaagaggcaaggattctaactacatactgcagaaaaaatattcacacctgtcaaattccaacagctggcactgttgttgttctacgaataagcacacacagaatcctcgtgaatagttctttgtctcttgctctagtaaatcataacctgcttgtagcttttttatgaaccttcaggaataactcttcagaggatgctaatacatcattaagattaaattgaacctcaaaggtgggttttttttccaaaatgataaaggccaccaacactgcaaggtttgccgtcattcccttgatctggtaagtgacaccgtcttcagggtttgtgtactcaaagatatgattaataaaacggtgaccaagacgtgtgacgtaatgctggtcatggacctgtggatgcaggaaata

SEQ ID NO: 218038 - DNA, 578 bp, Homo Sapiens
tttttttgtattggctttactgagatataattcatatacgatacaatttacaagcaatttttacaacaagataaaataagagaactaacatttcaggggaccctatattatgtgtcaggcactttattatcctcatactggctttacaaaatacacatcattagccttattttacaggtgaggaaattaaagctaccggaggttaggtaaccttcccaagatcacccaggcgatgagtggtaatgcgctgggctgtgctctggtttttctggggccgttacccatgtactttactttattccgtgccacactgagattccacactaaccactaatgaattgtttccaagaagagatcctttaggagtttgctttaataaatcgatcagtcttctcagtatggcatttgataaagttctgtagcttggcagtaaaactctttagcttgatatttaagaccttccaggacctaataccacctttttagttcttacctctcctgttctcttcctctgctcatcctctttcaatgtctggacacactcacctagtgagtgcaccccagatatttctgtcctg

SEQ ID NO: 218039 - DNA, 454 bp, Homo Sapiens
tttaaccaatcatctctcatttgaatcaatagaggttgacgtttttaaatatcaaagggacgctgccaaaccatttatgaggaatttgctcccccatgacccaaacaccacccaccaggtcccacatcaaacaggaggattatattgcagcatgaggtttagagaaaatggacatcctctaaccttaggccaaccatatcatatcaccaactaggctcaacagatatggtcaaaaacttaccaggcaaaagcaagagaatacacacaatattcttacttgctcctagtgtgttctgttacgacacataccaaggcttattaaatctatgaatactggctgagtgcagaggctcatatctataatctcaacactttgggaaaatcacatggggcaaaaagtttgggaccagcctacacaacatagtgagaccctgtcgctactaataaatcaaaa

SEQ ID NO: 218040 - DNA, 568 bp, Homo Sapiens; identical to SEQ ID NO: 60333

SEQ ID NO: 218041 - DNA, 607 bp, Homo Sapiens
ttttttttttttttcaatagaaaaaacatttattatatatgcatgcaagaacactacaaagagtagctctctgaacagcaaggggtaagggtttacagatcagctttatggtgtgtgtcttaaggcttcagaatgaaactacaaaaagttctgataaggcttatttacaataccttgggaggtcctagtgctaagtgcccttataagaggaacactcagaggagggttttggcagctgaattctcggtaagacctgctttactcatcaaagtttagctaaggctttttgtctgcagctgctgtttgttcagatattctcaaagtagacttgtgtcatattgatgggttgttagtcccttcattgccctatttgaaacttgacatgaagtttcactgacaaggagctgtgctgattgctgtggagataaggctaggttcagaggttgggagttaagggatctgcgagatttgcgaaagacacgaacatagattaaaacaaagatgaataagcagaaaagaacaattaaaagcacatagccccatgatctgaaccagtctcccacttttgcaaatatgccttgccaatcaagtaacggtacattcttca

SEQ ID NO: 218042 - DNA, 489 bp, Homo Sapiens
tttttttttttttaatttgtacaggaaagaggtttaattggctcacagtttggcatggctggggacgcctcaagaaacttacattcatggcagaaggggaagcaaatatgttcttcttcacagggcagcaggaaggagaatgagagccgactgaagggggaagccccttctaaaaccatcagatctcgtgagaacttactatcacaagaatagcatgagggaaactgcccccttgattcagttacctcccgctgggtccttcccaccacacgtggggattgtgggaactacaattcaagatgagacttggattgggacacagccaaaccatatcaccaactgtctacttctcattgtatcctcacatggcagaagagaactagctaggtctctggcccctttttgtaagggcactaatcccattgataaagggtccactctcatgacctaattaccttcccaaagttccatctccatataccatcacat

SEQ ID NO: 218043 - DNA, 321 bp, Homo Sapiens
  misc_feature (35)..(35): n is a, c, g, or t
  misc_feature (40)..(40): n is a, c, g, or t
  misc_feature (93)..(93): n is a, c, g, or t
  misc_feature (114)..(114): n is a, c, g, or t
  misc_feature (122)..(122): n is a, c, g, or t
  misc_feature (158)..(158): n is a, c, g, or t
  misc_feature (266)..(266): n is a, c, g, or t
cttgtacctaaacattttttgaatcataccaaatnctcantttctttgtttcaatagcaaaaatgaaacaaaataacttaaaataccactttncaggttttgtaagtattcttncataaatngcaagctttctgagggtagggcccttccctattttntcccccagcacctaacatagtgtgtgtgtctcattgcaggagctcaattaatctttgctgaataaaattaataagcaatgaacacagagaagacctcagaagcctggnctagtggaaagcagaacaaaatatgggactccacaatatgaaaattataaaattt

SEQ ID NO: 218044 - DNA, 371 bp, Homo Sapiens; identical to SEQ ID NO: 61515
  misc_feature (278)..(279): n is a, c, g, or t

SEQ ID NO: 218045 - DNA, 574 bp, Homo Sapiens
tttttttgtaatgcaaccgagtcgatgcaagttttatttaggagatgggttacaatcacctggggaggctctagttaccttgatttggtctggtacaaaccctagcaccatcatccacagatccccagaggaagtcattcctggatgacttcctcatcgattttaaataatttccatttcagaggaaggcctttatctgacctgatcccctaaatattgggggaaacctacatagggacaaagacagcaggtgtctgcaatgttgagaatcagtgtgttctgtcactgtctctatcagggctggtggcacatgcaaatctctttcccactctccagttgaacactaacgccatggtgcccacaccttccttattagtccatgtacatggggtttgtcaagacagtggttcatggctctgaccctgagcatgtcagatttcaggggctttatgcaaaatatccataccagttggggtcatttcccatcagtattgctcacaatggagcctacaaacccctagttcccatccaacacatctccaaggcagactctcagaccagctcccagaaatga

SEQ ID NO: 218046 - DNA, 562 bp, Homo Sapiens
  misc_feature (506)..(506): n is a, c, g, or t
  misc_feature (541)..(541): n is a, c, g, or t
aaaaattgacaatgtgcttttattttttttcttggtaaaagggaacaacattggaaaatcgttttcattaaatagacctttgtgattttactgatttacatgagtggcactaaattacatgatttataaggcttgacacaggaaggatacactgaggtatatggtaagaaaagggatatgaatactagagaaatgttaaattgataactaaggcacactttcggatgtgaatcataaatctaccactgtggctagaacagcctatatgtacatggattctgaaagacatgatcagttgctggtaaaagtagagagggcctgggcttctgccagtcccctggtacttcccacaccacttcagagaaaaagcatcatgacacaagcacagtagatggtagaggcccccagcactgagtcaggtgaagctacatggttcgctgtttagttacgtttccagtacttggtttaatttcacagtgagggagtcggttggtgatctctaaganatccccaagcacctggtgttgggaaagtccctcanataaagaagtgttcttttctt

SEQ ID NO: 218047 - DNA, 759 bp, Homo Sapiens; identical to SEQ ID NO: 61889
  misc_feature (549)..(549): n is a, c, g, or t
  misc_feature (573)..(573): n is a, c, g, or t
  misc_feature (669)..(670): n is a, c, g, or t
  misc_feature (689)..(690): n is a, c, g, or t
  misc_feature (745)..(746): n is a, c, g, or t
  misc_feature (751)..(751): n is a, c, g, or t

SEQ ID NO: 218048 - DNA, 491 bp, Homo Sapiens
acataacttttttaaaaaagggtaaaaaatccatttgtccaacccctggcatattgtaataccatgagtacctgatttttttttaaatggacagtctatgctttcatgaggcatgcatattgagcaccccgtgtgggatggtcccagctaggggagaaagtatgtgtgtctgtgctcacccggcagcataactacacaactgcccctctgaaggatggagcaaaggacatctcctgagcactgagcatcaagcactgaggctctgggaaaaggaagatcagacagagaggaggtaagtggaaggaactgagcagcttcggttcaatcccaaggcaaaagcctgagcaaggacacactccacaaagtgctcagggtggttccccgggccccaggacggcatgacacagcacagcacagcaaagccctgagagctctgagtttctgcctgagtctaattatctataaaggaaagagactggatcctcaagtct

SEQ ID NO: 218049 - DNA, 482 bp, Homo Sapiens
aactgagtgcagtttgcattgattaagctccaaattagttggaccagtaggggcggaattggaagccttacttacactaaataatgccattcctttaggggataaaatctggtttagacctctttggtaacaaaacaagaccttaactgaagttatttctagtatctatttattgaataggtgtgacttgtcacccacttcacacaccattgttacctttctgaaagccaaaaaaaaaaaaaaaaaaccccaaaaaaaaaaacccaaaaaaactctagccataattttgaaacatctccagccataagggtgtcagataaggaattatgaaactgtaataccatattttattggtgaaaatattgaaaagtgtagataaacacaaaaagaatagaaaaactacccacaattctaccaacacagagagatctttcattaaatttgttgcatatctctcaggttgaaaaaaaatccatatattg

SEQ ID NO: 218050 - DNA, 493 bp, Homo Sapiens; identical to SEQ ID NO: 52970

SEQ ID NO: 218051 - DNA, 537 bp, Homo Sapiens; identical to SEQ ID NO: 61932

SEQ ID NO: 218052 - DNA, 516 bp, Homo Sapiens; identical to SEQ ID NO: 59478

SEQ ID NO: 218053 - DNA, 519 bp, Homo Sapiens
catggagactattttttaataaaaagactaaactttgacatcattctcttacatatttttacataaggaaagagtatttgttttatcttggtgggaacttttattcatccaatgaataatatattaaagaaaacaagtgggaaatttcatgcagaaattacatacaagaaataggaagaaaatatacaaaggtcaaaacttagtaagtcacattgacctagcatgttgcctggattatttaggtatgcaataactttttactgaaatggaatgttctcaagtactgtgaggccaagtaattcaagatagagaggaaggaacaccatccatgtctgtcggcaaaatagtagcaaaaccttttcacctctcgcataggaatttagttaactttttaggtatgtttcttggagcccttacagtatcaactacattagtaggctataccgctatggaaaaaatgatctctgagtaaattgcatgtagaccagaaggaaatataaatgaactagtttccagatg

SEQ ID NO: 218054 - DNA, 415 bp, Homo Sapiens
tttttttttttttgaaacagggtcttgctctggtccacaggctggagtgcagtggtgcaatgatggctcactgcagcctcaaccttctgggctcaagggatcctctcacctcaacctcctgagtagctgtgactacaggtgtgcaccaccacacccagctaatttttaaattttttgtggagatgggcccttggcccaggctggtttcttaactcaaatgatcctctggcgttggcttccaaaagtgctgggattacaggtgtgaggcaccttgcctggcctaagtactttttttttttgttcctcctccaaggactgtcccgttgcaatactgaatgccttttttttttgagatggagtttcgctgtcacccaggctggagtccagtggcacgacctcaggtcactacaacctc

SEQ ID NO: 218055 - DNA, 595 bp, Homo Sapiens; identical to SEQ ID NO: 61824

SEQ ID NO: 218056 - DNA, 541 bp, Homo Sapiens
tggctttgacaggtttattctctccagacggtcaggaggacaggtggacgtgtccacaaatgtgtctcatcctcgcaacagctctgaggatttcctggggactccaccagtggccggggcacccagccctcctcccccagcactagtttgttcttggccagtataaggttttgcacagttgaccttataagcagggctgaccccagctgagcccgagcagcagggggagaaatccactgtggtcagcagtgtgagggcagtcacctaggaacagcagagcaggtcggggctggagcttgggactgcagaattctgtgtgacatcagaagctcctgggccagttgtcacatggagtcccaggccccattggcaagacccagaaatctgcattttaacaagttgagggggacagttccacacttgggattgaggacctctcatgccatcctgagggtcccttttcccccaggacgaaggctgccctgtctctgcttctctgagatgcctagttaaaaggatatgacaaggacgagggacaaca

SEQ ID NO: 218057 - DNA, 575 bp, Homo Sapiens; identical to SEQ ID NO: 60239

SEQ ID NO: 218058 - DNA, 522 bp, Homo Sapiens
gttttttaaaaatcacattatctgtatttccagacataaggtaagtatttcaccaactttcatccaaactaacatcctcaattgtaatcccactaagaaccgccagggcgagacgaaagcggaatcgcttccatctttacgtggagtccgggaaatggttcagcaccatgacatccgccgaagacgtaggtgtagacgaggaacaaaagagaagacccctcgtggaggtggcctgtggggcccgccctcaccgggcgccatctgtccctgattctgctccccgcaggggccgcagcgggtgcgcccggcgatagagcgggctgtggagggagcctccatggagtctccatcaaccattccggaccaggagacggtggcaggcagtaaaaaggcctaggcagggccagcgccccgggctgctagcacaggacggcggcgcccagggacgccccagggcaggcctcagcccctccaacccgcgagagcccagctccaagggagcctgcagctccctccatcttg

SEQ ID NO: 218059 - DNA, 520 bp, Homo Sapiens
gttttgtttagcatgaactagtttaacagactaaatggcctgaaaaaaacctggaattcaaggtatgcatattatgatggaaacaacaaagggtaaacatgatacctggcttcacatgtttgaaaaactgtcatatgaaagattttatctgtgtttatctgttgctcaagggagcagcactagaatcagtgggtaaagtgagagaaagctgattttcaatccaaaataaagaagaatttcaaatatacatgtctggaatttgattggggctaccctgcgcttccccatcaatgcaaatgttccagtgtgaactgagtagcctgcttgctgcagactcactaaatattcacatgtatgtaaacgatgatggcaaggaggcaacagaggaacccagtggaaggctgaattgctaaggcttactaaccaaggacttcttggaccccatttctactgctaggacttttccaagtctctcatgctataccttgacttctgtctctgtttcccttccagaaagtct

SEQ ID NO: 218060 - DNA, 566 bp, Homo Sapiens
  misc_feature (506)..(506): n is a, c, g, or t
  misc_feature (557)..(557): n is a, c, g, or t
agcagctccttctaatttattaatatagcatggtacataagggaggggggattctctgatagaaaagtggaaagccactgtaaagcaaacataaaaaacgcttttaaatgtacaaataatgctcaactttatttattgaattagttagggctaagctaggctatgctgccataataacaaaacacaactaatgcagtcgtttgacacaataaaatcttaccactcatgctgtctgatgcggttgagcagctttcacccatcttgtattaatagctatgctatctggatcactggcttccacagttgtgggaagtgtggaggaggcataccaactgttgtttttcttggagggaagtaatatgaccccaacctaaatgcatgagaggccaggaaaacaatgtagtttagttgtgttttcagggggagaaaaagctatggtatgcacatagctttgcctctgccacactcagaatgcaaaataaaagtagagaaaattggttcaactnttatggaagacaatttggcaatatctataaaaaattatatacatacaattnttaactctg

SEQ ID NO: 218061 - DNA, 575 bp, Homo Sapiens
aatttctttttattgaaggatgacatacatatagaaaagaagatgtatgagaagtgtaagcttgatgaatgtgacaaactgaacacacctgtgaacccagcacccagctcaagaaacagcattatcactgcccagatggccccttttgttccccttacttaagactccataagggtgaattaattttgcctgtttttaagctttctatcaatggaatcatatactgtacacattgttgtgtgtctggatgcttttgtttaacattgggagagtcagcaatattgtgtatatttgcagaacactcattcttattgctgtaaagtattctgtgcatgcatacactatacatatacactttttttttttcgagatggaatctcgcttttttacccaggctggagtgcagagccagactctgtctccaaaaaaaaagaaaaaaaaaaaaaaaaactacatacatgactgttaaacaacaaatgcaaaactattttggattcagtttcaaaatacaaagtagagataataagtgctgtaaaatgtcaaaatatggagagatcagtgaagactcacttcat

SEQ ID NO: 218062 - DNA, 509 bp, Homo Sapiens; identical to SEQ ID NO: 61461

SEQ ID NO: 218063 - DNA, 498 bp, Homo Sapiens
  misc_feature (477)..(477): n is a, c, g, or t
tcgtctttaatgctctcaccttagatcccataaaactggggcaccccccccatcacccatgtgaagagaggtggggcccagggcaggttcagtgcacgtggggcactcctgctgtgaccgctccctgcaaagccttttcccctgctgggtccacctcattctggaggacacccccagatctcaggccatgcatgtgtgttcaggcctgggtgcagtcacagctctcagggtggtcgcagtggcagctgctgggtctggggttggggaccttggccgggcaggctccatgaggctctcctgtgcatgagctgactcacatgcgtgcttgtggggcctgtcacaccggttctggggatggcaacccgggatgagcgcccctcagcctttccatggggcccagagcctgccaaaggtggcagatacttcaggcctggagtggggttgctgccggcctcccagctgctgacagcctcctgngagagacctatgccttccctg

SEQ ID NO: 218064 - DNA, 474 bp, Homo Sapiens; identical to SEQ ID NO: 60386

SEQ ID NO: 218065 - DNA, 755 bp, Homo Sapiens
ttctcatattttccttaatgcattttttctggaagacatcttttatacagcaaaaacaatccaccaataggattacattcatgtaagattcaaacataatcaaatctaccgtgtggagaaattcatagtttgttaataagcatacacgtgtatagaaaaggcagagtttatcacaaaacaggatgttatttatccctggggcagggagggatttgagatggccagagcacatgaggggcttctgggaggacgatgatttctagatcagatgacagtaacataggacttgctatgtaattatttgccaaattatatatttgtgtttagggcacgtttctggaggcatgttacatattctacaattgtaaaaaaatgtttttttaaaaaacacagctacacattcagggttatagcggtgaaataaatgttatcactatttttttctagaatattctatggctgaaaacctgaacgcagcagtaaaagtacacgtttttaaaacgactcataaaccatatgcacaaaacacagtcaggtgaagtttctctcatttgttacggaggttggtcgtatttcttcctggtgcctggaagacgtcacgtggtctgaacacagtcttggctggtgatgattcctgatttttgtctgaaatcctgctaggcgcatttctggtgcagtttcttctggtccttgtaccactgcatgagctccttcatgaaagtgattgtcactttgtcgtcctcaagcttgggtcc

SEQ ID NO: 218066 - DNA, 815 bp, Homo Sapiens
tttttttttttttttttttttttttagagacagtgtctcactctgtctcccaggctagagtacagtgtgcaatcatagctcactgcagccttgaactcctggcctcaagcaatcctcccaccttggcttcccaatgtgctaggtttacaggcgtgaaaacattgtgttgtgtgtgtgtgtgtttttttttttttttttagacagagtttcgctcttgttgtccaggctggagtacaatggcttgatcttggctcactgcaatctctgcctcgcaggttcaagcgattctcctgcctcagcctctggagtggctgggattacaggcgcccaccatcacgcccggccaattttttgtatttttagtagagacagggtttcaccatgttggccaggctggcctcgaactcttgacctcaggtgatccacctgccttggcctcccaatgtactgagattacaggcatgagccaccacgcccggccaaaaacatttaaaaaatgactgtccctgctcaaatactgcagtaggaaatgtaatttgacatatatcacttccagaaaaaaactttaaatctttctataaaatgaatttgatacatcatcagcatgaagtgaagttaaaatctcttacaaagtaaattcaggtatatcaacaatgagatccaaaagtatcggttcaagatcaaagactcatatgaggtaaaggcaaataaagcccctcatgctttcagacatttacttgttatccttaaaatgattattgttctaaggtgcaaatcttatcattcagtgacctatttgctatttggctgtttat

SEQ ID NO: 218067 - DNA, 812 bp, Homo Sapiens
ttttttttttttttttttttttttttttagtaccaaaataactttattaagagttggccaaacttcaactattattactattactacagggtcttgttctagcaaagttccaatatttatcagttatcttacacatgacatttatcttaatatgtacataaatatcaggaaagtttaaatacttttattttactattttaatcttttccttaaagatgcagggtttcatactacatcaattaggcggacatgacaaaaatgacttaaataggaactgaatataaagaatactcgataccatgacatcatcatctggaacaactgaagttttctacctcttgctccattttctgaataagtgatgttttatcatggtccttgcgatgccgataaatacattggctgattactgcatacaaattttccaactgaaatatgttgtagttttgactttttttaacaacagtcttcaaaagattttttaatcgctcatgatccacaacaagtgagggtgtaggctgaaaaaaaattgccaaagccttttcaacagtgatgagctgctgctgttctacctgggaacgtctagctcgagtcattcgcagaacacacatttcttttccttcattttcatcagaaatatgtattatctgagagctagaagcatctccattacaagcaatcttgtctctcaattctgtacatgctgtagtcttcctagagtcttcaagctcattctctatattacaagtatttgaattatttctcaattccagtttgctttcagaggcattttgctgtttttcattttcttc

SEQ ID NO: 218068 - DNA, 847 bp, Homo Sapiens
ttttttttttttttttttttttttttagtttggaagcagttttaatgaagatggaaatgtttatcaactcaacacaggtacccccaaaatacaaatcaaaatatcatcttcagctgcatagcaaatatgatttaagaatttaacatcattatttgatcacaagcgtaaatatgtcaccataaataaatgtaaattcattgtacaaaaattcccaacaactcttaatacaaatatggtacatttgacagtttctgaaacagattatttttaaaactttttaaaacctaagctttatttttttcctggttattagacacacacaaaaaaaataaaaagaggctggggcagtaatgccaaggaggaaagaatattaaactcattgggtgttcggaaatcagtgccactggcaagccagggaaatgaaatctttctgctgaaagggaagacctcagtctactgggatcaagtctcctgaaggtaatgtgactcggcccagagggtcaaatttagggatatgaatgtggggtgagagaggtgggttattgaaatagaaatctcatcaaatagattattcaaatctccatgaagtcgtggtcaaggatttggatggaactctagccatctatcagctacagagagccagctaccatcctcagacaggactaaagatgtagaaggatctggaactttgacattttatatgttttgaaagcatgttctgccatctgggataatgtgtctcttttgcctctggaacacatctatggtcatcaagaaggaaaagtcagaaaccagaatagaaggtggtacctccagacaggaggatctgccagttactacttggaac

SEQ ID NO: 218069 - DNA, 655 bp, Homo Sapiens; identical to SEQ ID NO: 54936

SEQ ID NO: 218070 - DNA, 880 bp, Homo Sapiens
cgggatgtcaaatgtggagaaagagatgaattatccccaaagagaattaaagtggaggatgggtttccagatttccaggattctgtgcaaacactcttccagcaggctagagctaagagtgaagaacttgcagctcttagttcacagcagcctgaaaaggtgatggcaaagcagatggagttcctttgcaaccaagctggctatgagagactgcagcatgccgagaggaggttgtctgcagggctttacaggcagagctcagaagagcacagtcctaacggcttgacttccgataactcagatggacaaggagaaagacctttgaatctccgaatgcctaatttacagaacagacaaccccatcattttgtggtggatggggagctgagcagactttaccccagtgaggcaaagtcccactcatcagagagccttgggattttaaaagactaccctcattcagcttttaccttagaaaagaaagtcatcaaaacagagcctgaagattcaagatagctgtgatttctctcaccgttctctggaaatggcatcagatttaaggataatactccatcatagaaataagccttaataaccagtgttgcctcattcagctcaaacagatttcatagccaaagcaaaaggactggtacggtagtctgtggaaaccaggaagataaaacaacagccacaaaagagaaaatcaagagtgttgcaatctataacagtaatattgattcattcacattcctgtgttaagtcattttatatggaaaggcttacaaatcaatattgtaagcattcattatttaagaatgtacaatgtatttgtgtaatttatagaagtaaaatctagatgttgagacctgtttggtctaat

SEQ ID NO: 218071 - DNA, 754 bp, Homo Sapiens; identical to SEQ ID NO: 48428

SEQ ID NO: 218072 - DNA, 819 bp, Homo Sapiens
gggatgacaggattctttttggaaatgtctgtcgactggaccttggtggatttggaaatggaactgagggaccggtgacacgtgcttcagaccggtctggggtgcggcgcacacctgggcccgtgcagggctcagctcggcagcagctctgagggcagctcaatgaaaaagtgaatgcacacgcccttgttggcgtggcctggcatggcctggtgctatcggcagccgctctccactccccgactgatactcaattacgtgaagccaagaaagatgatttttagaacctttgcctatattaggttgtacttatgtacatattttgcagtgtttcacaggagaaagtggccttaactgccccttattctctctccacgttgtaaataaacatgtgtttaatacaagttaaagctatgtatgaaaactcagaacttgaatcccgtcagcttaaaacttgtgtagggaatcctgacttttaaaatgtgagggtatttggatctgtgttgaaagtcgtatatttttatctgtgcggtgctgagtgcaggccaccagctcctaaatagaggttccctatatgcgcgtatgacatggtgaataaacacaactctctccactcaggacatccggagcgttatggacgtggtaggtggtcgttctgtgtgcttgtgaaagtgtccaggcgtgtgcacagccagtgcgcccacttccgggctccttgctccctgctgtactgaagttttggattttgcatccaatcctgtgtgcctgcccttctgccgaaggcttgtgaggggcctgattcctctgcccatcaggatg

SEQ ID NO: 218073 - DNA, 805 bp, Homo Sapiens
ttttttttttttttgtataaaaatatcatcattttattacattccacacaatacattttcaaataatttccaacgtccacaagttattttgacacacaggcaactgagcaatgcaaggggtgtcacagtaataaggaaaggaataagaataggaagtaaaaatctttaggttttcttgtttcgttgttgttctttggtaattttcgattatttaggtgtttgcctgctagtttcattttaaagacagggtcttcttaaagatcggctatcaacttcagaaatagtactgtatttcctattcaattctggctttaatcccaaaaatgtgggacaagggaaaagacaattttactttatcttcagcatccagttttgtcaatgacaatgctgattttttgttttctttttctgccttcgccaggaactaagtgatggcaattgctagcataatatcatggaaggggagttcaacccagaaataagggcttccctcctgaaggtgttgacataaaacctctactaaggcaaaagctttatcagcccgagctaggccttcaactcattcactcattcattcattcatattttaatagttgctatcatctctttgtcttctgagaagcaactctaaacacatgcatgcatgcattcgcctgtccagtctatttttcttagaagagaatgacccttccctccctccatgaaatacagaattttgctttttgaagctgcgaagcatggcattttacagaagagctgaccttttagcacagtacctggataacactatgaaaattgctggggt

SEQ ID NO: 218074 - DNA, 857 bp, Homo Sapiens; identical to SEQ ID NO: 54713

SEQ ID NO: 218075 - DNA, 725 bp, Homo Sapiens; identical to SEQ ID NO: 45598

SEQ ID NO: 218076 - DNA, 800 bp, Homo Sapiens; identical to SEQ ID NO: 54969

SEQ ID NO: 218077 - DNA, 704 bp, Homo Sapiens
ttttttttttgaggtgtccccacaattttattataaataaaaacaagactcccagtgggtggctgcagcccctgcctcggtggctgtgagcacctgttggaggggcctgcccttaccctggtctggaggccagaaccgaggaaagggctccctgcccctccaagtacacaggggagcctgaggtactgagaataaaaaccagggagggactcccaggccaggcggcggccccgggccctctgccccacgaggctcatcccttggagcacacaggaagctgcccgtccatcacaccacactctcttccagccgctcggcgctgcctcctaccccccggcaccctgccccgagcagccccccatgcacagagtggctccgtcgggcccaagctcctcccaggcgcctggcataaccgtagcacccggcatctcccaggtccagagagcagctgcgctgcggccggggcggggggctccgcggcgggtgggccttgggtgtggggctggggcctccattggtctgggactggacgtggctgagcttgagggggaggcggccatttccggccccccggccccgaaccagcaaggccacagtgaagaccagtaaggcagccaccagcacaccccccacggccacggtcagggtcccgcccagcacgtgggcctgcagggcgtggcacaggggcgaggccggcagcgtgg

SEQ ID NO: 218078 - DNA, 834 bp, Homo Sapiens
agacggcctgggtgctggcgaagcggaggccggagttaaacacgaggaactcatgcaaaggaggggactttcggaaatccaaacttagagtgccttgtatttagaatccggaaggaaaaggaaatgaaatgtgaagaaactcatgcaccaaactcgaactgggtatatgtgatgttacctagtaagaagactgttagaatgccctcggtaacacagaggctgagagatcctgacataaatccttgtttgtcggaatctgatgcttccaccagatgtctggatgaaaataactatgacagggaaaggtgttccacttacttcttgaggtacaaaaactgccggagattctggaattctatcgtgatgcagagaagaaagaacggagtgaagccatttatgcctacggcagcagaaagagatgaaatcttgagagcagtgggaaatatgccctattgaatgtttgcattaaaagtgtttatataacttagaagcagatgaatatttctaataaatgattgctgtaatatttaagactgtacacccctcacccagacagaccttaagttcttcaagtggagacagtgaagtcaccccgtgtcctttttgcttgctctcagtgccatgccgatggtatgttgctgttggctgtgttgtggcatgagtttgcatgactttctggaggcatggagttaggtaaggctacatgagaaattgagcttttccactgggttttgaaagaagagtatgatgtgaacaagtaaagactgaatggggctgagatgaaggcaatgtttccaaggaaaggaaatgttatgagcaagagtgtgaggcaag

SEQ ID NO: 218079 - DNA, 820 bp, Homo Sapiens; identical to SEQ ID NO: 48850

SEQ ID NO: 218080 - DNA, 828 bp, Homo Sapiens; identical to SEQ ID NO: 49107
  misc_feature (729)..(729): n is a, c, g, or t

SEQ ID NO: 218081 - DNA, 664 bp, Homo Sapiens
ttttttttttttttttttttttggcgtgagaaatggcattctttattcataaataaaaacataaaattgccacaaatagtttacatggccaaaaagtgacgtcaaaaataaaatgaagctgtcaaaagcaaaccaaaccaaacaagaaaccacaaagagaaaaataactatgtacatcttccagatgctggtccgtcccagcctgcctctgctgggggctccagctctgcctgcaggcgcagcacaaaggccaccttgcacaagaggtgggtgagcagccccgctggcccaggggtgcagcctctgtcatggcagcacccaccgcatgatggcttgaggtctgcagggaaatccctctccccaagctgctgctcctccagccaggcctggcttagtttcgggcaactgtctcacctaagagatggcccaggctggggccaggcacaggaggctcactgagtgcctctctggggaagagatgcccccatatcccagtcccatgtgagctcagtgctataggggctgtgtgtgcctggcaggagttcactgggagagctaggagggaaccccgtgacagtccagtcgttcccaggtccaggggcagagtccgatccttggtgaggtgatgcggagtgctgctctctcctgcaggcgtcctttgggg

SEQ ID NO: 218082 - DNA, 812 bp, Homo Sapiens
ttttttttgttcagggcagcctcactggttgacataataacattttattaaagataatacgttttctaaaaatcaaatctgccaaacccggaccaccctggaattgctagcacgcctacagggatttttggttacagaaaggcatgcccaagattcaggagagcagagacatctgagcttgtaaatagaataaaaggcgtttgcaatgtgaagtacctacataaacatctacatcgagaagattaaacaagtctgttaaaggtaaaaagagatattcatccccttcccaaagcccttccctcccacctcccactacccaatacagttgattttcaaaagtaggttgcttcagttacatataataattattatttagtaatccgtcttcaaagtccaatcccaaatttcacttccattgagaaatgtcagtcccacactgggctcggtgtggacgtaaacatcgcaggtacctgcactggaatccaacaagcagctgtctacttggaccatttcaataaggccgaggaccgcgctccagacacacagcgcaggggctactacaggaggtcctgtgggacccccgccacggaaatccggctttaccttgaactgaggtaggactgtggtcgttttgagtgtaagccagtaaataccagattttaccacttccataggtacgggtgcactctcctagcatgctgagggttatatctgctttgccaaaaggaaaataagaagaaattaaaagacactggccacaatttaagaaggccaatgaaaacatccaattttcttgagaataacttcttcag

SEQ ID NO: 218083 - DNA, 858 bp, Homo Sapiens
ttttttttttatttcagcagcatctttattgcaacaaagaacctgtaataaaatgcaagaaaactaatgtttcactttacatgattaaaagccatatacctaaaaatgagaaaacccataagcttactggagacatgcaattctttttatacaagtcaatgcttaaaacagcaggcacttcatgttctaaaattaaacacctgaattccaattttgctgaatacaatataaatttgttttggggttacttaaaaacaaacatacaaacactactttttctttatctgtaaaggacttatgaaatgatcacctagagcccaggaccttgcactaacatctctatatttgaggctggaagatggctaggtgaggctgggaaggtgggaatcaaaaaagtttcctttttcctttatatctgctgggaatagacacactcaccttatatagtttagaaatggccatgtctcttttcttacatcaaatagctataaagatgggctcccaggcttaagcaagcactctactctatattccaatcctcaaatcctccactataccaaggaag[293 bp omitted]

SEQ ID NO: 218084 - DNA, 706 bp, Homo Sapiens
ttttttttttagaatgaaactgcaaatttattagaaagtataaaaattaaaaaacaaaaccaagcctaaccaaaacacaaaaagcaacgacacacaacctttccagtttacattaactttgagcgtcacacactattaaccacttagttgcattttttaaaaatgtcaatttcaaggtagagggagctgagtcaggtaataggccagtcatcacagtgtaactaatttaatgctaaaataaaacacggatctcatttgagaaaaaaagagatgagactattttctggttggcgtagatttaggcaatgtataaaaaagcttcctggttggaatgagttaaaaaatattgctggccactaatgtgccatcttgagttggaaaacaaaccccctccccccaaaaaaaaccctgccgctttggtgtcctatttatatatttttaaaaacattcattaaaaaaatcaaatctataataaaaatgtccctgtttgttttaaaaaagcattagtaggcatcccttatctactaaaaccatttgtttttcctaagatgcctggaagcagaaaagcgagtgagattaactcactgcgcaattaattaaaattagaattctttcctctaaacaacttccagagcaccagaaagaagaaggggccccatcaaagggagaaataaagcccttctgactcacaggagatgaaatgttc

SEQ ID NO: 218085 - DNA, 353 bp, Homo Sapiens
ttcatattaaacttgtagttttattcaggtttgattttaacaaatgtgtcggggagagagcccgcagggaagggtaaagcccatgggggcagggccctcccagatgcctgaggagggggcaggtcccctcccctctcctcctcttccctccccatctaaaggggtttggggagagacacaggcaggcgagggggctggtccccagtctgttggggtggtgctcagggtaaagggctataggcaacaggggaccagaccagggatgagtggggagggcacaaggaccatttgccagaatccaccgctttctgattccagattgaattaaaaaaaaaaaaaaaaaaaaaaaaaaa

SEQ ID NO: 218086 - DNA, 711 bp, Homo Sapiens
tttggattcttggtaaaattttatccaaaaacaggatacatatatatttagagaaggaaatatgaaatcaagagttttggcagcccctgctttttttttttttttagctccctaaagactgtagcaggataaaaggatcactggctccgagtctctttgagataacaagtgatgaaataaaaaagaaagcccataccctcaaataaggtcaggtaaccccattgcccaccctccctacaaggtaaaaaatgagtacttttagtaacagttcagaattcatctttatctcctacctgcctcatcggtggaagtttaaagtcatgattttttttagacattgatacttgtgtctatagacaaataaactcatattagatgacaattgattttttaaaagtccaggtagagaaaggagcaatcattttgaactaaaatctttctatgttttttgattactattcaacttgctattttttagcaaaaagcgaagtttcaatagtgttcatctcaaatcttattgctttacaaccgtggtacacctttcattaaaaataaaaagatgaagcagtcaatccagtgattaatttgacatggctttcattgggaaaggggagggctggcaaagagaccaatagacaaaaaggtaacttaaacacttacacatacaatggtttgctttaaaaaaaaaaaaaaaaaagagagagagagaga

SEQ ID NO: 218087 - DNA, 799 bp, Homo Sapiens
ttttttttttcaaatatgaaaatttattttgcataggaaacaataatctctggtaaacatcattactgcatctaacaaaacaatgccttcaattaaagggggaaagtgagtttttaaacattagggttaatttagaagaaaatacagtatataataatctcaacatcatgtttagggtaaaaatgctataatgtgaaaaaagtccctaagaactggacagaacctacctaacaacaccatttaccgtgtatgttttcaatagacaaaacatattttgtaccaaattccaacagtggtaattctatagttgtggccctttaaaaaatggcagcattgtacttgaatcagaaagcttactgggatttcctcatcgaaagtagagattgcagctaatcctagtaccttttgttagtaattacttaaggcacagtgcaaagttgaaggactgttttggtacaaactcaagccagctacatgtatgcttgccttggtatccttgctagagcacatgcaggtataataccgtattatatacaacaaggccaccctgttgtatctgtgttacaattaaacatcagtcccagaaagtgaaccctagtcatttattataggtgcccacctctgacttggaacaaaatgccactccattcatgttcatttttgtcctggagaggatttatttcctaaaagattctgaaagccaacaaatcaatgtagttcttcatagagaacttaagagtaaggctcaaaatgggcttcttggatgacttcccacagtgactggccttctcaacactgc

SEQ ID NO: 218088 - DNA, 687 bp, Homo Sapiens; identical to SEQ ID NO: 51604

SEQ ID NO: 218089 - DNA, 648 bp, Homo Sapiens
ccttttttttttttttttttttttttttttccatttcaactttttattataacatgagctaaactttaagaaacaaccctagtcttctatttcccagagctgttcaaagtctaaatgacaatataactcattatgaaaatatactgaaaagtacaagagctgatgtaaaacggtaatcaaggttccaggcatcatgggattagggtaactgaagaataaacccagccaggctgcaacagcaggcaggatgtgctggcttgatgaggtgctaaggccatcgaatgctcagaggaagccggattcacggtgatcatctcaacctgagaaatcgttccttggggtgatttctgcccttttttttgttttgtaagaaagaggttccttcattcagtaacttagttttcccttaataaatatttcaaaaataaaaccaatcatcatcaaacaaacaggagccacttttgtaggtaaggtaaatcacaggataatgtattgggataactctgtttttttaaaataaaaaagccttacatggtcagggattgatggagtggggatgacaaatgcacatttcagactttcatcaccaatgaaaaaataaagcattttcatagacttaaaactgtcattagtgcattcggcttttgg

SEQ ID NO: 218090 - DNA, 537 bp, Homo Sapiens
ttttttttttttttttttttttttttttttaaggggaccaaagcctttactgtaataaaccaaatatatttacaatttatacaaatgtttaaccttcaacaaaaatacaaaaaaacatttcacaagatgcaaaaccaggaaacaagttcattggagacaccactgctctacaaaggacggaaagtgaggtgaactgcaaggaacagaaaggtaatctcacacttgggcaaggcgtgatccccagatcacccagaaagaaagaatgggctgtcatgtgagtcggcagattccgttcctcaatcctacaacccatggcccctctgtccgcttggccttggtgctccatttggtctatgtagacaggtgactttctgctgatggacttgtcgcctcctctttgtagactcaaagtagttttctgtcaaggtttggaaacaggtgtttgtaattttttttctcttttaaagttacaacttttctatttctataaattcgaaacattttggcccaattcaactataaacgttaaaccacata

SEQ ID NO: 218091 - DNA, 860 bp, Homo Sapiens
ttttttttttcttattcataaactcttttattctagtccacagatttttccattacaataataatgaaaatagcactagtaatttgtaacactgaggcccaaagggaaacccctcctcaaattataaggtaaatgacacaaagttgaacatagggtcagtgttgggcaaaaagcatttaaaatatagataacggggtcaagattttgtgtgtgtgcaaacactgggttttgtttttcaggatgacaccattttagaaagtgcatgattttgaaaactatatgtgtaattgtgacaaaactaaactgtagagaaaagacaaaatcaagcaaaaacaaaaaccaagaaaccaaaaggaagcaaatcaaatacaaggggcggatatgcaaacctccggtcctttggccctggaatggcaagtgagtgggcttcatagaaattctctgtagaaaggaatgtgtgggccagtgtggccatggccctggcctgacatcgctgagtctccaagtcttgtctcctcacagaggaaaagaagttgcttgtccgacacatctgctgggggtctgcccgagatggggccttcgttcccaatccctttgagaacagtctcaaatcctgaaaaggcaaggcatccctgcggcggccccagggcggcggcaggagatggggtcagtgtctgccccaggctctgccggagctgtctgagtggttcaccgggagtgggtgggcctcggtgttgaacacccagtcttccagggagagcaagtcatcttcagagaacagaagatagagatactttagtgtctccgctagaaagaagctctgctgcttgttgtcgtggttgggggtgctactgtacacg

SEQ ID NO: 218092 - DNA, 306 bp, Homo Sapiens
  misc_feature (290)..(290): n is a, c, g, or t
gaatatacaatagagcatatttaagtagtagtcttgctttaggtaaaacactttcttgaaaccagaggcatttgaaacaataaaacccggctctaatggggatgctctgtgtggatagaaagctactaaaaacactcaggtttattctgatgtgagcagcgattgtgtgcagttcctcccccaatctcaacattgcttaggaaaaaaaaaaatctatgagtttattccacctttcatccattgcatttgtgatgttattagttagcaagatggacactgttctttagaanggacttatttaatatt

SEQ ID NO: 218093 - DNA, 531 bp, Homo Sapiens
actgagacagggttttgctctgtctctcaggctgaagtacagtggcacaatcctagctcaagcagttagaataggatttttgaacataattaagcacaataaaataggtaaaataaaatacagtattttccttgaatttttatgttaagtatacatatgtatatgtgtgtgtgtatatatatatatttgtgtatttgtgtgtgtgtttctttttttagagccagggtctcactttctggtccagggtaggagaccacgcagcatgatcacggctacccttgtccagggtaggaggtccagtagcataatcacagctcactgcagccttgacttgctgggcctgagcaatcctcccacctctgcctcttgagtagctgggactacagacacccaacaccatgcccagctagttttatttgctgtagacacgaggtctccctatgtctcccaggctggtctcaagcaatcctccgccttggccttccaaatggtggatgacaggtatgagcccccacgtctgggcttattttt

SEQ ID NO: 218094 - DNA, 1000 bp, Homo Sapiens
tctctttatggcaggaagcaatgaggctccccaagaacacacctgaggaaaaggacaggtgagcctggagggccggccgcaccgtgggcctctgtgtctggggagttggtggccaggatcccgagtacctgggtgctgtgacggggcgtggttggcctgggcgtgctgggtgtttgggaatgacttcccatcgcccgcttctgcagcctgctcagccctgttggggtgcagtgtgtccactgcctgcctgtgtgtgccgctgtgctcaggctctcctcttgctcctttcaggcgcacggcggccctacaggagggtctgaggcgggcagtctctgtgccgctgacgctggcggagacggtggcctcgctgtggccggccctgcaggaactggcccggtgtgggaacctggcctgccggtcagacctccaggtaggggggcccgggggaccccaggcctcctgccgcaaagcaggaagcagctgttggggctgagttgctggagagcacggtggttggctgggctgagccaggtagggagacctcacttcacgggcagttcccggggctttggcctcctccaacagggccggggtgtccgctgccttctaagatctcgctcacggcggcaccacagacggagacccaaatgtgtctgcagagcccaccctgaccactgtataagtgtatactcccccaagaccccttgtatcacccccactgtcgtgttctagaaaacacctatgtcagcccaggcacaatggttctcgcctgtggtcccagcactttgggaggctgaggcgggaggatcacttgaatagaggaggtcgagaccagcctgggcaacatagtgggaccctggctgtacaatagatacatatgagccaggcacggtggtgcctgtggtcccagctccctgcccagccagcctcctgtctccagagaagttctccattaaaaaataatttagcaaaaaaaaaaaaaaaaaaaaaaaaaaaaaaa

SEQ ID NO: 218095 - DNA, 567 bp, Homo Sapiens; identical to SEQ ID NO: 61059

SEQ ID NO: 218096 - DNA, 454 bp, Homo Sapiens
gcatttgcttctatttacttgcactaatattatggtaatgataggaaaaaaatttttttattccagcaaaaagcattaccatataatttttcaattcccttgaattgggcataaaggtctctcactttgctgggtaatgaataaaaaggaccaaggtcatttgatgatgactcaactgttttcttagcaacattaatttcctcagataggagagtgtctttgagctgtttacttctagaaaatattggtgtctgggccttcgcatttccagtcatggcattttttagatgatctttaatactttttctcctgttcatatctgaactagttctgactttggaagaggactcatcattttgctggggttgctctatgcaattatggggcagttcctcattcacagtgttgtgagaggatgacttccaatccctttctttcatagaatgatcaccca

SEQ ID NO: 218097 - DNA, 616 bp, Homo Sapiens
aaagggtctcactcttgtcacccaggctgcagtgcagtggcacaatcacagctcactgcagcctcagcctcccgggctcaagcaatcctctcacctcaggctgctgctttttttttctttttttcttatttttgagacagggcctcactctgtcacccaagctgaagtgcactggcacgatctctgctaactccaacctctgcctggacaaagaagagcaaaactccctcaaaaaaaaaaaaaaagaaaaagaaaaaactccaggagactttgctttgctttagaagtaagcaatgagcagagcttccatttcttgctcagtcccaagacggcagacatatttggcttttgatgatggcaacagccaatgctagccatttcccggtgattgcaatgcggagtacctgtcaatggaacagcaccagaggcaacaacagtagcatctgcaatcaaactgagtgtctagtatttagtgttcagtatccctggctttctcaaatctagttctgcagcatggtttcaggcaatgttcccagaagcttggacttaaatctatatctctagcactcccccaatgactctgtgaaccacctaatattcaatattccctactcta

SEQ ID NO: 218098 - DNA, 592 bp, Homo Sapiens
tttactccatgaagttttatttttaaaaaattgtttaccctgtacatgtttctattgaatcctaagtacgaatgcccaaggagataaagcaagtgcagttaagtatgcatgggaaagctaaaatgggtatgtacataagatcggcaaaggaaaccaagttctgtaaaatgagttctccctcccctccagggtagctgattatgaggaaaataagaaagagctttgcttttctccttagtagtaatggtctacaataagctgcacacacacatccctcatcacacctctctctcaaaaaaaaaaaaaaaaatgcagggagatgtgtcctgcccaggttaaactacacacaggctatcttcaggtcacaggaaacagtcacacttgcttgtaagttcactggttcaggtaagcagaccatcttttctctgtcattgacaggcaaaagggcagtgcagaacttcccaataatggtagtccggtcttttttccaaactcggttggaagactgaaacttgaatttcacttggtttatctggcattgtggggtggcatgggctatgattcctttcccatagcgttgctgcttaggtat

SEQ ID NO: 218099 - DNA, 739 bp, Homo Sapiens
  misc_feature (552)..(552): n is a, c, g, or t
ttcttatttgtctagtaaagataagctataaaattctaccactaggcaattccaatctgaatttctttttttcataatttaattctttaaattatctgaagtggattagtatctttttcttctataagtttaaaatcatgtattaaaggtttacttaaaggaagacattcctacaccaataaagaagcagcaaaggataggtttgtcacatatttatatctgttaatacatgtatccaggtttcccccccttataaaatcaagaataatgtacacatgaattccttgcaaatcccacagtttgagttaatttcaaaatattgagttggttatgttcacattccagagctcctggtctccttcctggttgaatcatacagctaaaatacctcaggcaatgagacatcaaattcagtagcagagtttttcagagaaaaaaacaagactaattcctgaggaccatgacagcatgttgaaaatttgcaagcatggagcctacaccttcctccaaatacaaagcgagcataaacacaaagcgtaatgccctcacctnggtcaggtggcacacacgtacaggataagagagtgttgtagcccactttgaagttggagttgatggggtagtaatctgccagcttgatcatcttcttgcaagcatcatagtataagatgaagcttatcatagaggaaaagccctgcttctgtgaacgtgtgaagttttgatccaggaagctggcctc

SEQ ID NO: 218100 - DNA, 451 bp, Homo Sapiens
tttgacctatttaaataccaaatttcttggtaggcttactggagacaattttttttaaactagacttaatttctgttttaattatttaaaattattaaatcaaaccacctgataaggacagaataaatttaaatatattaatgtaaaatttatccaactattgaatattggtctgaaaacacttattcatgaaagtgataaattttcggttatcagatgggcagacagaacacatctaaaaccactactgaaatgatactttatctgtcagaatctgagtgacaagaaaattaaaggccaggtacggtggctcatgtctataatcccaacactttgggaggccaagatgggaggatcgcttgaggcgaggggtttgggacaagcctgggcaaaacaggggcactctgtttctacaaaagattttaaaattaaaaaaaaaagataataaaac

SEQ ID NO: 218101 - DNA, 464 bp, Homo Sapiens; identical to SEQ ID NO: 60861

SEQ ID NO: 218102 - DNA, 471 bp, Homo Sapiens
  misc_feature (415)..(415): n is a, c, g, or t
ttttttttcagacttttggcttgtttgaaaccagtaactggaagaagacactgccggacctgaggattgcacaactccgggaaagtcacctcattccactgataacagaaccaagcgtcagcaggctttcaacagcccggaactcagctaaaatctgcagacctcagaaccgccagcagcacgaggacagagtcggggaggtgtagctggacaacagctcatgaggcagaagagctgtgtcacaggtgtcagctgagcacaagccctgtctgaggccgtggtgactggcgacagccgggcagtggagggccttggaagctgaagggtggtcttggcatggactctggtccttggggtgcaggctcttgggtcccagttctgctcggggtggtcctgtgaagcactagactcctancgggtcatctgggaggttctagcaaagctgaacagcccaagggtcatcagggctca

SEQ ID NO: 218103 - DNA, 482 bp, Homo Sapiens
tttgtttttttctttttacctctttcgtctacaagccacacttatccaaaattctgttgacaactcacacttgctattatacctgcttctattctcctagttagtccctgtgggtttatacctttttattctttcattgttattttaatgaggtttctgtaggaagcagagttaaatgcctatgtttactccatcatggttatctgtaagtctgaggtgaatttcaaaaactcacgacatgatcaaacaagaagggtactcctaaagaaaaaggaacagttagagaaaaagtacaggggaatgaaagagcatggtataaataagtaacaggaagtatttgcagtagaagaacctcagtgaagtggcctgagcactagggcaaaacaagccagagtgtgaatccaggctctgctatttagtcgtcatatgacccaggatatgtttcttctctctgaggcatctcactgctgggcatgcacact

SEQ ID NO: 218104 - DNA, 424 bp, Homo Sapiens
ttttttttttcagtttttcctgtttattatatagttattctaaggtggtaagtgtcacaaagttaacttcaagaggaataacatggtccagtgtgaaacacaaggtacaacattttacaatgaaaccacagcacaaagtaactgaactttcaaaattgggtagttcaatgaaacattttgtcaacccttagctctataaagctctgctgatggacttagttgatggatttaaaaaatatattgctgtgtcaaatgttttaacacaaaatgtttttttttaaagagaatacacatccaatcaactgaaactgtgagcagaaagtatgtaacctctttataaaacgttatccaaatttacaacattcataatatatttcaaagtaaaagagttcttagaaaaaataaactcaattccttgcttact

SEQ ID NO: 218105 - DNA, 570 bp, Homo Sapiens; identical to SEQ ID NO: 59987

SEQ ID NO: 218106 - DNA, 482 bp, Homo Sapiens
  misc_feature (414)..(414): n is a, c, g, or t
ttcatgggtcacatatttattgagcaatggctatgtatatcaatgcaaataaagagatgaacaagacctcagcatctacagacggtgacagacatcgattcactaattacataataattaaagtaaaattgtggttggggcagggacatagaagtctatcttccacagctagcccagcctagcccaaccaataaaggcttcctttggaatccctacttattttctgactttggcctttccatttactgtctagtattgctatttaaatgcttcccaagttcacaatcatttcctaaagctgactgtaggcaaggacccgggttcttgggctgcctttgcctttgttccacacagaacaaatatgcgaggctcagtcaagaataaaacacgatgtcagatccacatgtctcttgngaatggcgatttggaaatgctacagtgacttagaggtctccttccaacttagaattatctagtattta

SEQ ID NO: 218107 - DNA, 293 bp, Homo Sapiens; identical to SEQ ID NO: 40568

SEQ ID NO: 218108 - DNA, 493 bp, Homo Sapiens
aaagaggttacatatttaccattaaaaatctctcactggccctaaactggcaacagtcatctaaccctggtctcacgccactctgaaccggaccctcctctgtacttcctcctgcaccagctcgcggcagccacagggctgttctgttcagacctgagagacccattcaggcactcacgctgggacgtgcatgtcactttactccagtgactgaggacctgagaactccttcgtcctccattttccagagcaaagaagaaacagtgaaagctacagaaaagcatctctgcttttgtgaaagcacaattctcttcccatgctgactcagtctggggaagaggtcaacttttggatccactcttctgaagaagcaagtgtcccgctcccctcacccggcactggctatcttgaatcagtgaagaggaaagctcttcactccctaatgtcacgtcctacacattacaagctctgactgaaatttctcactcagaat

SEQ ID NO: 218109 - DNA, 470 bp, Homo Sapiens
aaaagtggtgccaaatacttgctattcacaaaatttaatgactgccactagagcattaaagatgaattgctaccatcacaccctcctctcatgatcgaactgtaatcattatttctaggtgatttaattcttaaaagcttgaatgttttcctgtttgcagaccccaggtataaacataagtggaatgttaaagcacacgcgctacacagttaaatggttgacaacgtcaattaggtaacataaaaagcgtcactgaaattcctgggaaaacaccgaggagcatgcagacccaagcttagaaagcccaagacacatgataagcataaaggacggcagctgaacagtcacatttgaaagttaacaccatggtttataagtttaaaatacagataccaagtgctatttaaattggtcctcacatatcatttttttctttattccaagctcataacaaagagatcaattcaaag

SEQ ID NO: 218110 - DNA, 548 bp, Homo Sapiens
gcaatgtataagacctttatgttatcactcagtgctttgttttgttataattaactctaattttctaaaatgcaggaaaccttaggaacaaccaagatgacagttttgttaccttagtacccccgcatccacaattttgttttctgtgatctggaaatacacaattcataaatttgcaggccattctaagtagcatgatgaaatcttgcaccatcctactctgttctgccctggatgtgaatcaacttattcattctgtctacattacccacacactgaccacttagtagccctctaggttatcggattgaaggaatatagtgtatataaactttggtactatcttagatttcaggcatcacctgaggataaggcagaactacaatatttctagttttgtcatataaaatgaaaaaaaaaaaaacatggagatctcaacagacacccaaaattttggaatcaaattgaagggaaaaaagtaatgctttcctatgtcatttttttccaaaatattctataagtactctgtctaaaacctaatgaacact

SEQ ID NO: 218111 - DNA, 508 bp, Homo Sapiens
cctgaagcagcgggcatcagcgaaggcggtctgcagggcatccacactgcgccgcacctcagccaccttctcctgggcgccggcgggcaggccccacacgctggactccagagcctctaccgtgccctgcagctcctgggtcaggctgcgggacagcaccagcgtctccagctctgcctggctccggcggcggctctccggagggcgctggccccattccccccacagctcgtgcaccttcccagggcgggccggggcggtgggggtcaccccacactgcatgtggtctatcagctccagcgtctcctgcagctgggccagggtgtcctgggcacggtgtttgctctgcctcagtttccccacagagtgctcgtaggccaggtggcggatccgtgctgacagggagccgaggcgcacaaagtagccctgctgtctcctctgatcctccaccgaacccacttcagggccttcagcctcagccgccagtgccgctggaggacaggatacg

SEQ ID NO: 218112 - DNA, 573 bp, Homo Sapiens
aaagatgtctgatccctgaagacctggttttataaaatacatgaatcacctcttgttctatcttcaaaatcccactgaataactttaattaaatatcatgtatgtgaccattaaaaaccactaatttatttacagttctatttcagaacaattttcaaaagacacaagaaaatcagatatactctttatcaaggaaggtgtttagaagctacagaatagttcaagataggctaaaggatatacatacaacttctcccataaaaagctcttgtaagaaggaaaaaaaaaaacaaacaaaaaacccagttcctaaaccacaggcgaagattgcattttagttcctcaaaaggaaatataacttttatagtattatgaaaaaaaaacactctgcaccagaattcagaagtccattgaccatttcaaataatacactatttctaaaataggctgtttccaggtttaatctctaacagaaataattactttctagaattaaaagaccaagttactgatgttgtcatacaggggctgaaaaactcctctgtaacaagccaagagggtaaagaattttgg

SEQ ID NO: 218113 - DNA, 490 bp, Homo Sapiens
aatgtacggtataatttatttatttaataaacatttattaccactatacacttctagaatgaggtggatggtaaatcaaataaacataaagcaatattaagtacctaccgtgtgcaaaagcaaaaaaagacatggtccctgccctcatggagctcacagtctagctgaagcagacaaacaagtcacaaatacaatggcaaagcaccagggaagcattatggaggaaaggattggttctgcctggagtatgcagggcaaggcttcccaaagatggagacaatgaagctgggtcttggatgagtaggagttcaccagatgaaggggaagggggtaagcacattccaagcagagcaaacagcgtatgagcaagcagagtcttgaaagcgcatgccatggtgcaggacgatgagtgttccagcgcagcttattttgattgagaggatcgtatcgcagtctctgtttgttcttctgtaatttactaggcatcatc

SEQ ID NO: 218114 - DNA, 538 bp, Homo Sapiens; identical to SEQ ID NO: 62015

SEQ ID NO: 218115 - DNA, 586 bp, Homo Sapiens; identical to SEQ ID NO: 59978

SEQ ID NO: 218116 - DNA, 517 bp, Homo Sapiens
caatagatcacacatttgtttaataacttatgaaaaagaatgaattctgatgaaaataacttcagtaaatataaatgaaaaatgttagcaacagtttatctgccctgcattgaaaatttatcaaggaattacatgggttttgtgtttgatctggaaaaacacttgtacaatgaaaattcatcaatgtaggtgtcattctgaattaaatgtctgtattcacaatcatggtcctcaagccaagaggtcctattcaccccactcctcccgtgccctagggaagagaggttactgacaaagtccagtcccaggctcagctgttttcctagccattggcttcaagacattgggaaatcttggcctagccggattttaacagtgctcaccttgctttgcaaagcgtttcttacgcctcattttggtccggtgtctagcaaacaagtcactgatcctctcagcccaggccgcataactgttggtatctgtaaccccgcagcggggacgagtcatctggcgcagg

SEQ ID NO: 218117 - DNA, 523 bp, Homo Sapiens
gaaaaatatgacaagtttttttaatgttaaggaaaattctgtaagagagtttttttgttgttgtttttgggttttccccccaccctccaaaagatgaattttgcagcattttctcccagcagcacactggtagctctgacatcctgtatataatgtgttctggcaatgaagccctcaagtaccgcagctgtcatatactccagcacaggacccccagaaagaagtcctgcaggccccatggcatcttggtcttttccacaccctctagcagcacccaatccttgggcatcttgcaatagcggctgaagtccagaacttgaacttcactgagaaaatcaagtccactcaaaatgcagcattttcatcttttggttgggtgattcttggtcccccatggataggaatgatacctgttagatgtaaaattgtaatagccactttcctcaaggacttcttcaatcacagtctgcatctgttcatatgttattccttcctccaattcaatgctggttggtaaacctgt

SEQ ID NO: 218118 - DNA, 469 bp, Homo Sapiens
  misc_feature (439)..(439): n is a, c, g, or t
gaaggattgcatttttatttgtgataaaactcgtagattagaatatacatacaggtcacataaaaatacatgaggatgataaacctaatacacagtgttgcataggtagtgcgattaagaaactacacatttattgtatacagtgtcattaatgtcaatgaaattcttagaagcacttcttgtacaaagagtatgtttttgcagttagcaatactacaggcatgttaaaaactactatttatagagctacaacctcaaaccattcaatgaaatttgatcttatgagttggtgtactgcttgataaatggtcctgatttacaatgatcattccataacatgccagaaaaaaaagggacaagaagcctattactttgcagaagcaattacagaaaatctggaacggtagtaccattcctcattataatatagcacatttgnttatattgcaccttcctgagttgaacttcg

SEQ ID NO: 218119 - DNA, 529 bp, Homo Sapiens
gctttagaaagaaaagcacccactaacacaataaacacgaaaggctgcttaaaccaaatgcagtgaatgcttatcttggtcagctggagttcacctaagcaaggactggaccaggcaaggaggccctgaacagcagcctgcttctggggccagctttcctcttggagccgcagtcctggagaatcatgctgggaggtgttagtgctcgtgagagcgcacagaggagcacagcctacagtcgatttgatgtccatcatcttccctttgcatggggagattaatagaccatagggaagacagaggggtctgagaaggactccctgagccgggccctcctgcagggaggcaatgctgaccacatcaagcatgggctccccagctgtgagggtcatcttcgctgctgctgatcactgctctgtgatttcaattaaatcatgaagggtggattctcgcacacgcacacttctacagatacacacatgcacagattagggagaagggtgatggtgctttacagatacgaaatgtc

SEQ ID NO: 218120 - DNA, 613 bp, Homo Sapiens
gagagaaaatgtcttttcaaacaaatttatttccttgcttcatgagaaagagcattctaaaagcagtgtagccagcatacaatcacaatgctgcagaacattgaataagcttttaaaaaaaatcacagggcagagaatgggatggtaaattgttaaaatcaggaaagagagtccaacaaagtaggaatccaatttggttcccacagtggggtaatcagcttaagaagtccattcatgatgttaactacaacaacggaatggaaacatttcagttgatactatatattttcaaatacttgttttggtaaactgcaacaagcgtcacaaatcccaatagttccaaaaattaacattgatgtttcaagtttagattgttaagaaacctattgagagagagatcaatttgaattactgcatacattaccatggattatactgaagataatttgctacttcttttaaaaatatttctgagggtagtttttattcttcaagtttactatgtcataggtggtgatccaaagaaaaataaaagtgatacttagattttgcaggcattcaataagtgtagactcgaagaatgagtagatgagtggatgcataaagagccata

SEQ ID NO: 218121 - DNA, 577 bp, Homo Sapiens
atgtttaattgtttattagtgtgtaccagttgtacaagaaaattgattttgggtggtatatgggtttcagtcattctgaagtacaatcatctctgtatcttcctttaaaattgccaaaattgtgcttttactccagctgaaccctggggttttgggtaaagtcattcactgtgattataccatcagggccaattacttcctgttccatgtagtttagcatcctgctgacatgtgatgcagagatctccccatccacttttgcaatatacgtgtagagaaactggaaggtgctgaacgggatccggggcgacccaccattatggtcacatgataagacctcacacactatcttgagagttttggtaatagtaactcccagagcgctgcaagcaagggctaaaaacttcagccactcgatctcctccgtgaagcgacccacattcatcacactattaaacagatctgttgggagattcaccactttccacatctgggccagctcctctgcacggatgatcagtctgccagcaacctgagaatgcaggatctttaacagctcaggtgttagctctgcccg

SEQ ID NO: 218122 - DNA, 539 bp, Homo Sapiens; identical to SEQ ID NO: 59723
  misc_feature (527)..(527): n is a, c, g, or t

SEQ ID NO: 218123 - DNA, 474 bp, Homo Sapiens
aagaacctacagttatttaaactaactggaaagaaatgggttttgggaaagattgagtacatttttgtgatgttcaacattattttttcttacagttttaaaaacacaattgatgtttctatcaatttgacttaaaaaaattaagaactatattaaaatttaccagcagaggggagtgaaggaacacaaagcaactttcagtttagggtaatttttgggcataaacagggcagcaatgtcctcaactctattcttctttattagccagtgaatccatgtgagctcattaaatgttattaacagctcagtctataatggagggcaaataaagagacttgtaggtcacaaaggtattgacttttgatcagaagttccagggggcgagaagaatgaactaactccatgcattctttttttgtttttgtttttgttttttttgagacgaggcttcctcttttgcccaggctggagtgc

SEQ ID NO: 218124 - DNA, 439 bp, Homo Sapiens
ctttctttatttttgttttttctttgacagagtctcaaaaaaaaaagtgttcagagacctactcactgaaggaacagatgttgccagcaccgaatagagcggcaccaccccaccctcatcctgatcttcatgcttctgttaggacaggctgggccactgtacccctttcacagccttcactggctcctagccccaccaaactgcctgagtgcccttcttgggtgtgccatttatcagggcaccctcattcttagacttgaaattgaagggcttctggggtcagccttggactgaggtacatggaggagcctgggttggacctggacgtgggactcctctcattcacagtccatggcatgtgtagcaaggaagtgactgatctggacgtcgtcagagaccctgagagtctgagtcactcacccctcccaaatgtcatctc

SEQ ID NO: 218125 - DNA, 643 bp, Homo Sapiens
aaaaataagataaatcactttactctcgcccttacatgtccagggacttcatgtagagaggctgagcctttcgaccacaaagtgtgttctgtgttgaagatgttataatgatgggagagggcagttgcagcagcttctaaccaagtgtctacaacacatgtactactgtttcctacctgtgtcacctctgcaaaaaatggagctctgagcccagttctgtgagcatggtgtcagagccctccaaagtcctgagaaatcaataccagggatccaaatctcagacaccagtttgaagcaatacctggataccaagactcagagtgaggatatggattttgggagctgacagttttgctgatcctgccacactggcaggggctgaagtccagaaatggtgtgtagctctagtcattcttattcaccacagctcttatttcacagttttttcccttggtttcttctgtttcttctgttcctcatattcaagtattttctgttggaaatagcctgcaggaggattcttgctcttctcggcttcctggatgaaaagtgagaagagctgtgtcttcacaaacttcttcacaaatcggcggttggtcttggaggtcagagccttacagaaggatctttcttgtagtggcct

SEQ ID NO: 218126 - DNA, 383 bp, Homo Sapiens; identical to SEQ ID NO: 60313

SEQ ID NO: 218127 - DNA, 564 bp, Homo Sapiens
tttttttttgcttattgaacaaacaagctttgcacaggctctcctgccctcctgatggaaaataagttagaaaacgccctaagacaagcactcaaagagtctagatagctatccccctctcctccctccctcattttaaaaaacagcgagaagaataatcaggcttccacgttttgggttagcctgttacagatgacccaagtatgcagaaataaaataaaccagtgaaactccaaggccaactgctgcaaaccttggctatcaatgaaagttgtatccaaagtactagaacgaacagtccccactagagacataatggcggttagcttcctgccaggcaccttctagctagtatctctctccagccaccaaatatcttaagaccaagcggcccttaccttctttcgtctgcgcattggtgatctgcaggtcgcagtcggcagctttcagcttctctctccccataatctgcttctttaagtcgcagagggagatgtggagcccatcaaaggtgacggtatcatagttgagtttagaggaaaatttataatgcacacaggacat

SEQ ID NO: 218128 - DNA, 604 bp, Homo Sapiens
  misc_feature (588)..(588): n is a, c, g, or t
ttttttttagatgcctttgattttatagggaattttcagtaatcctgcttagtcacatttaatagacacacaaacattaacaagatatgttattaaattcaactgaccagacattgagcaaggatattttagtgggtcaacataatttttcatatgaaacattaaagggacaccgttaggacaatacattttcaatcttggctaattatttcttcatttatttgccaaggaacagaaaacatacacaactactttgggattagattatattaaggccaaaaatctaccatgtaaggggaagccactgtgcacacacacagggagatactgtgcacagtacttagggtggactgcagtccatttcacagctggaggtggcaaactgaaacagaaaagcccaaattaagacaaagtagcacaccagtgtccttttaaggttttatttcctaggccaattttgaaggaactgttatatcattcttcataactcagttttggaatcaacttcttgaagatgaaaaccaacaacactacccttcagaatagtaataaaatctccaaacatggctcaatcgaaactcaacattntacaggcagacaactg

SEQ ID NO: 218129 - DNA, 443 bp, Homo Sapiens
tacacttctccagtattagattgtattttcataggaggaaaaataaagttctgatttaaggtgtcttccttctgggatggggctgtctccttcccagcattcttggcagctggtgctaaagaaaatctcccaagtgctaggaaaatctttcctcagtgtggggcttcaaaagtggcaaaaagtcatgttcatagtctccttttgttctcactgcagtccggagatggggcaggctcttttcaggaatgagaacactgcgaggctcacagacttaaaaaatggaccaaggtcacacaggattaaggggcaggacggtctcgaactcacgtctgttggtgctagtccagcgcgctctgctcgcggttctcttaactggtcttcaggctgctttccatctaaatcacgcctggagattaaagctgcacttgctctccagtgcccgc

SEQ ID NO: 218130 - DNA, 431 bp, Homo Sapiens
tttttttttttttttagtcaagcaatactttatgccattatttttttcttttttcaacagttttagtcaaactattttggatgtgtagttggaattcccaatttcttagggtcccagtgagacaggaataatacagggtggtcactagagaatagaaaattccaggtggcagtttcacatgactagcaaaaggaaacttttgctgcagaagtaaggggccaataagaccctaaaaaaccagggtgtggaccaagcttggctaagacagactggacccaacacggtgctggatttgatgtaggtttcaccaaggacctcattatacactcattaatatactaaatcccacacccattgggcatggtggctcacgcctgtaatcccagcaccttgggaggccgaggcaggcagatcacctaaggtccggagtt

SEQ ID NO: 218131 - DNA, 518 bp, Homo Sapiens; identical to SEQ ID NO: 61343

SEQ ID NO: 218132 - DNA, 553 bp, Homo Sapiens; identical to SEQ ID NO: 58585

SEQ ID NO: 218133 - DNA, 460 bp, Homo Sapiens; identical to SEQ ID NO: 43085

SEQ ID NO: 218134 - DNA, 822 bp, Homo Sapiens; identical to SEQ ID NO: 44538

SEQ ID NO: 218135 - DNA, 743 bp, Homo Sapiens
  misc_feature (5)..(6): n is a, c, g, or t
ggggnnggacgtggtatcgatagttcggtccggattccgggattttttttttttttttttttttttttaagaaaaacaccttttattatatctcagtgtgcaaaaatacaaattatcttaaaaaaaatacagagcactctcgctatggatccaggcaaagacaggacaaacaaaaattccctaacagatgacagtgaacacttcggtggattgaatctgggaactacaatagccctgctctcattatactatgaagccaaattaatcaactttgataatgatacacacttaaactatgaaaaccaattaaggcacagtatcattcaaaatttatagacagaagagcaataatcccgagaaaatataattaaaatactctgctgaacatggaatgacaccacatttgtaacttaacactggcaaaatttggaatgattatagcataaaagacatggtttttctgaaaagtggacagggaggtgtggtatataggaaagtggctcacattcaagactcaagtttattttttaaaagatctcttctgcattagattctaggtttcttttttggtttcaaaactgggtctacaatccataaaaatgacattaatggagatcttaaaaacaatctgattataccagcagtttggtaacatatcggtagagctgttctgtaaatgcttcaggggaaaatttttccttcactctggctcttccagccaggcccatggtggcttttaagga

SEQ ID NO: 218136 - DNA, 829 bp, Homo Sapiens
tttttttttttaaaaaaaggaaaaagttttattacgaaactagtttgtataaaacagggttatacatatttttgtaagtttgtaataaaacagtaagaaaaaaaaaggcagtaatagaaatctccaaaaggcaacctatcaaaaccaactggctgccactttgagtttggacagtagctgcataaactttgttcttcttgaacagtatttaataacatcattaatacattaacaacatttctataaagtaagacacattggtgctgaagtacaactggtggcctcttgatctcacctatgaggagagttctttacaaaaccacatagggaaaattgcagttgtaaggtgaactacacatctaaaatatgcagaggtaatagcattacatgttaaagtatcaagatatacacattttaaaccatttgtacaaaacttctataaatttttctctctctttctctcttatgtacaaaaatatcttaatatatccccgaactggttaggatagatacaaatagattttttataataaaaaattcacaagagattggaagcattctataatgaaaatggtagcaaagacagtgtgagggaagccatggggtttgggattcggtcctggaggaaagcagagtttcaaaggctgagatagcaagtttcactgaaaccatgtctacgcttatggggtggggctctgaacgaagaaccactgttctagaggctagactgccttaaaaaggcgggagtgaggaccagcaaatttccctgcgtaaagggaggagtacaagggtctccctttcagaccctgtttccaattattcctgtcgc

SEQ ID NO: 218137 - DNA, 789 bp, Homo Sapiens
actttagtttttattttattgtaaaacattgagatggaatgatagggtttcccagaatcaggtccatattttaactaaatgaaaattatgatttatagccttctcaaatacctgccatacttgatatctcaaccagagctaattttacctctttacaaattaaataagcaagtaactggatccacaatttataatacctgtcaattttttctgtattaaacctctatcatagtttaagcctattagggtacttaatccttacaaataaacaggtttaaaatcacctcaataggcaactgcccttctggttttcttctttgactaaacaatctgaatgcttaagattttccactttgggtgctagcagtacacagtgttacactctgtattccagacttcttaaattatagaaaaaggaatgtacactttttgtattctttctgagcagggccgggaggcaacatcatctaccatgttagggacttgtatgcatggactactttactgcatatatttcaagttgcccccgctttttttttcaaccacgcattaactcaagatcaatgtatgttccattagaataagatttattaactaggaattgccagaaaatcttcctggtaacaaggaagtccccgtattgtgagtcttaagattttctgaagagaaaacatacatatatagcctttttcagatgctcaagaggtctaaatcctctccacctccaaaatatagaacatctcagctggcacagtgctcacgctgtatccagcacttggaggcaagtgg

SEQ ID NO: 218138 - DNA, 788 bp, Homo Sapiens
ggccgcccttttttttttttttttttttttttttgaaaggcccacgaaggtttatttgaatagagttacatctagagttctcatttcagtgtacaaacaactcagtgcagtgtttctaatacaagtcatataaaactggaacacactaaatgaatagtgcacttgatagaaaaataaattacactttaaatgctactgcaaagttttacacatataaaaggtaaacacaaaatagttagtgagaccctcataaccacttatcatatccagataaggagataaaaggggcaaaggaatctgtgctataaaaaaaaatctctctgaagaggagaaatcctgacaagtaactgaatgatcatctcaagcaatgtggtgacatagggacttacagatcgtatctcttagaactgggaaggaatcatagctctaccaatgtgttaacacaacccagttcagctcagggcaaatttctataattcaaacaaatgtcctcatactaacgcctaatatgtaggaaaagtttccaactttcttctgaccactgaagaggtacagtgtttaaatttttgagaggataaaaaggacaaataatctagaaatgtgtcttcttcagtctgcagaagaccccaggtctccaagcaaccacatggtcaagggcatgaataattaaaagttggtgggaactcacaaagaccctcagagctgagacacccacaacagtgggagctcacaagaccctcagagctgagacacccacacagtgggagctcacaaagacctcagactga

SEQ ID NO: 218139 - DNA, 734 bp, Homo Sapiens
tttttttttttttttttttttttttttttggaatgaagagtgaattttatttacactactagtaaatcccagctactccagttactctgatatatctcatcaatgacaggaaaaatatcttcttccagtatttcagttttaacaattgtaattaaattgcttggttataataagagttaagaagcaattaatgaattttttttggaaataaaaaatatgtatatacattaccctgatacctaggccaaaatatatctaacaacaaattttcttgatttatattagtcataaaaataaaggaaaaatatattgcaagtattttctttatagacaatttcaattagaaaacaatagtttaaggaaagcaatacagaggttcatgagaatggattgatatggaggcaagataagtatttaaaacttgacagacaacatactgtcaaatatgacgaaagaatatctgcctcaatgacaccatttacaggcagtaactagatttttacacatctcaattttctctcatattgaaggaaattacaggtaagttatgctcctaagtcagttaagaaccccttcttttagcttgtaaaatgtagccttttgatttgataattcctctacttttcacaatgaccgaataccgcagtagccacagcggcacccactcgtgcgcttgaatgtcaggaatgctttcctgaagagcttcttggaaacttgcttcagaaagcagttct

SEQ ID NO: 218140 - DNA, 750 bp, Homo Sapiens; identical to SEQ ID NO: 47166

SEQ ID NO: 218141 - DNA, 729 bp, Homo Sapiens
cgagcgccggcgttgggcagaagcacagcaccctccgtaagggcaccgggagagcccgggagtgcgttccggggctttcggagcagcggtgtgaggaccagcagagagaagagattccatcttccagaggttgccactgtctgcctccccacttgtccccatccacagtcatcttttttatatatataatgacacattagttgtctagttcttcatagttaatgtggtttaagtctgacatcttttcttttgccatgaaatttacaccttagtgttattctcactgaaaattgcctttgagtttgataaactcttatcccagtgatattgactgttttaaattaacagatttatcaccatttctgagctgtgtagggccttaattgaaaaagtatctttgattattttttcacattttggccacatgcctataataatggaatatttacagtactttttagtggagaacttttttaagtagaatttcaataattaatgtttgatggagtttggaagttaccgtattttgaagtatcgtttaacattcttctctcaatgagttttcctttaaaatttgcagtgaatttgttttcctgtttatgcatgagaatttaggtcttattaattgggggaaattaatgttaaagtaataaataagcccttgttgcagcttattgtttcttgaaatgaattaactatccaggcaaaaggtaaaaatgaaaaaaaaag

SEQ ID NO: 218142 - DNA, 706 bp, Homo Sapiens; identical to SEQ ID NO: 43517
